United States Patent Application Publication US 2019/0348154 A1 - sequence listing, part 17

SEQ ID NO: 64316 - DNA, 936 bp, Acinetobacter baumannii
atgaagaatggtttagttgtgaaagataatgcattaataaacgccagttataatttagaactaacagaacagcgtttaatcatgcttgcaataatcaacgcaagggagttaggacaaggcatcacagcagatagcaaactagaaatacatgctagtgattattcaaagttatttaatgtatcagcagatgcctcctataaagccctaaaagaagctgtaaataatctatttaatagacaattcagctatacagcagagtacaaaaaaacagggaaaataggtgttgttcgctctcgttgggtaagccgtattttttatgtagatgatttagcactactagaaattacttttgctccagatgtagtacccttaatcactcgattagaagaacaatttacaaaatatgaagccaaacaggttgcccacctaacaagtaagtatgccactaggctttatgaaatattaatctcttggcgtgaggttggtaaaactcctatctttgagttacaacagctacgcaagaatttaggtgttgaagatgatgaatatcaacgtatgcaccacttcaaaagccgtgtattagaaacagctattactcaaatcaatgagcatacagacatcaaagctacttatgaacagcataaacaggggcgtacaatcacaggattttcattcaaatttaggcaaaagcaacagccaaaaattgaaaccaaacgagatccccatactcctgacttcttcatcaaaatgacagatgctcaacggcatttatttgcaaataaaatgtctgaaatgcctgaaatgggtaagtattcacaaggcactgaaagctatcaacaattcgctatccgtatcgctgatatgcttttagaacctgaaaaattcagagaattgtatccttgtttagaaaaagccggattcactttaaataaataa

SEQ ID NO: 64317 - DNA, 372 bp, Acinetobacter baumannii; identical to SEQ ID NO: 64313

SEQ ID NO: 64318 - DNA, 399 bp, Acinetobacter baumannii; identical to SEQ ID NO: 64314

SEQ ID NO: 64319 - DNA, 471 bp, Acinetobacter baumannii
atgagcaatcaaaatgatttagacgaccagttatatattttattagcctctatgaaggaatacagagaggctatagcagacgataagaagcgattagagacgttttacacccaagtagctagtggggttctagataaggctgaaaagtcgctgcaggagacaaataaacaggctataggggcattaaagagtcgtattcaggaattagacaaagcaacaaaccgtcttaactatcaattcattgctgtgtttgccagtgcctttatagcgttggtaatggtgctgttcttggcaatatttttatttataccaagtatggatgaaatccagcagcgcagatcggaagtgaataacctaaaaaaatacagcttagacctatcaaattgtgatgggaaaacatgcgttagaattataaaaaaacagtgtggctatggaaaaaatgctgattattgtgtgattgaccctaaataa

SEQ ID NO: 64320 - DNA, 954 bp, Acinetobacter baumannii
atggcaatttatcactgtacaaccaagaccgttaaccgaagttcgggacgaactgcggtagcatctatcgcctatcgtgcaggggaaaaattgacagatgaacggacaggattaacgcacgactttacgagaaaagaaggtgtggcttataccgaaattatctcgaacttagatactcagattgatcgtgccgaactctggaatctggcggaaaaaaccgaaaacagaaaagatgccagaaccgctagagaatgggttattgccttgcctgatgaattggatgaagaacaacgtaaggaacttgctaaagactttgccaagtctttagtagatcgctatggggtagttgcagatttagcgattcatgcacccagcaaaggtggtgatgataaaaaccatcatgcacatatcttgctgacaacccgcaaagcagaattagaccctgaaaataaattggtccttactcaaaaagcggaaatcgagctaagtaataccaaaagaaaaagcctaggcatgggaacaagccaagaagaaatcaaacagattcgagccacctgggcaaaccttgcaaattacgccttggacaaagcagggtacacagaaaaaatagaccctcgcagctatgtcgaacaaggtaacggcttacaagccacgatacatgaaggcagcaaggttactcagttacgcagaaagggcatagatactgaagttagccgtttcaatgacaatatcaaacagcaaaacaatcagcagctccaattcaaagaactcaaaaaggaaaaaatcctagaacaaggcttcagccgtgtcgaaaagggtttcgagcaatggaagaaagatcaggaagctaaacgcttagaactggaacataagaagcagttaaagctacagcaagaacaagcgatgaagcagaaacaacgcaaaagcatgaatagaagtggaccttctctatga

SEQ ID NO: 64321 - DNA, 399 bp, Acinetobacter baumannii
atgaatcaaagcataactacaacacctacagtgaattccaccactttaaccacaaccaacccgactgctgtcgctgattcaagacagctaaatccaccaccaagcccttcaaaacgcagcttaaatgccagacgtctgatcaacaccaaacaactggactatcaggcatggcttgaagtgcgtaaacagggaataggaagcagtgatgccgcagctgcctgtggcttgaatccttatatgtcgatgctggaactgtggatgattaaaacaggacgggtacagcaaaatatagaagatgaaagctcaggacatgcacctttatattggggcaagcagttagaacccttagtggctgaatactacagcatgcacaccaataataaagtccgtcgggtctga

SEQ ID NO: 64322 - DNA, 306 bp, Acinetobacter baumannii; identical to SEQ ID NO: 54617

SEQ ID NO: 64323 - DNA, 471 bp, Acinetobacter baumannii
atggcgacactaaaagagcctgtgaaaatctttatagttcagtctcttgcttgtcgtgatacacctcaagaagtggctgaactcgtaaaacaagagtttggcgttgatatagatcgtgttcaagttgcaacttatgaccctacaaaggttgctggtaagaacttaagcaaaaagtatgtcgaactatttgaaaaaaccagagatgagtttgataaaggcttaattgatattccaattgctaataagtactaccgattgaagcaataccaaagacaacttgagaagactagaaacgtcaaaacagccttaaaaattcttgagcaagccgctaaagacattggtggtcaatttactaatcgccaagaaattacaggcaaagacggcggaccagtccaaacagttaattcagaaattccagttccaatggaagattacttaaaagcgcggagggaagtcttagatgagtactga

SEQ ID NO: 64324 - DNA, 870 bp, Acinetobacter baumannii
atgaataattttcatgtaacttttcaatcaaaatattttaagaaggaggatcaatataaagtaaaaaaccaatttttgaagagatgcttaggttacggtgataatgatcttagagggttcagttggggaaaaggcgttggatatgcttttttaactttttttacggaacaagctttaagctttagaagattaccgaatcatgttgaccgaatttggtcagagccttcttttccaagaactaatctcaaagagtttaatgatttaacttctgatgagattaatgagattatagaagaagtacgtactatttattcccatactcaattaaaacttcaagaaaaagaactagatgaggtccaagtaattagacgtatacgctttaaagaagattatccctcaggtttttattctggtccacttagaaatcatgcccaacttctttttgatttgaaattagctgcggaatatgttggacaggattccatccaaatagaaatggatatattaaattcgttcggtgagggggcttattctggtccaatttcaatatatgcaaaaattaaatctgaagacgttttttattgtcacgatttattagatttaggtgaggataatctggagtcaggtgagtgggtgattattaatagagatcccaaaggtatcgtaacaatccctgttacttggattcaggcagaacaaaaacatgacttggccacccctatatttgaatcacgagatgaagctcatgagctgctgaataatagtcatttattcagatttcctaggcaacggggctggactaatcaatgggtaaagaaatatgactattcaccagtgaaacgaagtttttttgaaaagttatttggttga

SEQ ID NO: 64325 - DNA, 465 bp, Acinetobacter baumannii
  misc_feature (437)..(446): n is a, c, g, or t
atgactgatattaccctagctccaatacaacctgatcaaccaacacatttaatggctacttatggtcgccaagcgatcagttttgttcgaggccgaggggcgtatctttatacacaagatggtacagaatatttagatgcactcactggtattgctgtatgtggtttagggcacgctcatccagctattgcagaggctattgcagaacaagcagctacacttgtgcatacgagtaatttgtttgaaattccttggcaaactgcggctgctcaaaagcttgctgaagtttcaggtatggaagaaattttcttttcaaacagtggcgccgagtcaaatgaaggggcaattaaaattgctcgtaaatttggtactcaacaaggtataagcttgccaaagattattgttgctgagcagtcatttcatggtcgtactttagnnnnnnnnnnccctgtcagcaactggtaa

SEQ ID NO: 64326 - DNA, 255 bp, Acinetobacter baumannii
atgtggttctcttataataagcaggacaagttgaaaacctttaaatttaaaatgaacagtttaagtaatctacaaccggtttctaaagacttgatgatcaagatttatattttaagaaccatgatgtactgcggggttctgtggggactatttgatgaaggctgggccattaaatcagatcaggaagattttatttttcaaaactcactggcccaattacaagccaagaaaaattaccccaaaagacttccatga

SEQ ID NO: 64327 - DNA, 300 bp, Acinetobacter baumannii; identical to SEQ ID NO: 58789

SEQ ID NO: 64328 - DNA, 909 bp, Acinetobacter baumannii
atgaaagatttgattgtgaaagataacgctttaattaacgcaagctataatttggatttggttgaacagcgacttattctgttatcaattatcgaagctcgcgaaagtggtaaaggaatcaatgcaaatgaccctttaacaattcacgcagaaagctatattaaccattttaatgttcacagaaacacagcttaccaagcgttaaaagatgcttgcaaagacctttttgcacgccaatttagttaccaagaacaacgtgggaaagggattgcaaatataaccagtcgttgggtttctcaaatcgcctacatagacaatactgcatctgtagagcttattttcgcccctgcaatcatccctttaataacaagactagaagaacagttcacaagttatgagttacagcaaattaaggggctaagcacagcttatgcaattcgtctttatgaattgctcatcgcttggaggagtacagggaaaacgccaattattgaaactcaagaacttcgcaggaagttaggtgttcttgatggtgaatataaaatgattgctgactttaaaaagcgagtatttgagccatctatcaagcaaataaacgaacatacagacataaccgttaagtcggaacagcacaaaacaggtcgttcaattactggattttcattccgattcaaacaaaaggcacagccaaaattagaacaaaaaaccgaccctaaaagagatccaaacacacctgatttctttgtcgaaatgaccgatgcacaacggcatttgttcgcacacaaattatctgaactgcccgaagttggtagcgaatatgcagagatcggagagtccgcagaggactttacgaaacgccttgccgatatgcttttagaaccaaaaccgagttgttccagtagcggataa

SEQ ID NO: 64329 - DNA, 567 bp, Acinetobacter baumannii
atggctaaagttattggtatcttcacaggtaaagatttgaaatggatggaatcagaaggcggttcaggctattggatagtacgtacagaccgtattaaaagtgctgaatatgtaattttaattcgaaatcatagagaaacatgggcagtaaaagatggcttaggtcatggtcaagccttcatggttggtaaaatttcgggctgtattcctactaaaaaacatgcaggtagaaaattaattcaaattagtgaatatgcactgttgccagacacagaaaactttaaaaaggcttggaagaaattaacagcaggtcaaagatatccagtagcttatttgaataccaatgatctattacaaaaccttgaccttgatgttgaaaaacttgagtggtctgcttttaatgcaaatccaaatgcagaaactgcttcacctgaatctgaaattattgctgaagaatctgtagatgaaacaaaagaactatctgaaattattgctgaagctaaagaaatgatagctcatgcagcaggtattgacgtggataaagttaatatccaaatcagtttctaa

SEQ ID NO: 64330 - DNA, 183 bp, Acinetobacter baumannii
atgaaattaagtgatgctgaaaaaaataatcgtttgttagaggtgtttttaaagaaatcagatcgagaatattacgatttagaaatcactgaagatcatcaaaaactttatgatcagtacgtttcaggtgatttaaacaagcaagactttgacgagtatttaaaaaaattagctcataactaa

SEQ ID NO: 64331 - DNA, 432 bp, Acinetobacter baumannii
atgacttaccctctatttgaaattaagctgctagctgctcttgatcatgctcaatttgaagaggcaatttgggcatttgaaattgatggagacatttctacattattactgattgattatgcattagaacaattccatcaaaaaaaagttcaagctgatgaagtctatcgggttcctgaacaaaaaattaagaaaattggtgaacaaaatttaggtctagaaaaaaatgaatcatatacatttgccgagctcttacaattcttaatttttactcaggcaaatgatgttaaagatgccttaagcaatatgctgtttggctctattgagcaaacacaattgatcttgtctaaaagagcagaagatcaccagttagctttaagaacacctaatcaattaaaaaatctattttttattggtaaaacacatttatag

SEQ ID NO: 64332 - DNA, 216 bp, Acinetobacter baumannii
ttgtataaaaatcgccataacgtattcattagttatcatgataaaaatgatcgtgagtacagagataagtttgaaaaactttttcatgatacttacgacttgcttatatcaaaatctgtgcaagatggtgatattgccgagaatgaaccagcagacaatgtacaacgtatcattagagatgattatttaagagattctactgttacagtggtgtga

SEQ ID NO: 64333 - DNA, 1224 bp, Acinetobacter baumannii
atgtctgaaaaaatttgctttgttgtaatggggtttggaaaaaaaactgattttgctacagggagagtattaaatttagatgctacatatgagcatattattaagccagcagtagaacaaacaggatacaggtgtattcgtgctgatgatatcaatcacagtggcatgattgatttgcatatgtaccgaatgttacttattgctgatttagttattgctgatatttccaccacgaatgcgaatgctctttatgaattgggtattaggcatgcactaaaaaacaaaacaacagttattttaagtgaggataaaacacctcttcactttgatctaaatcatattgctacaattcaatatgaacatagtggtgatgatattactacgactgaaagtcaaaggatgattactagactaactaatgtgattcgagatgcaactatggggcaggatccagatagtccagtttatacattattaccaaagttaagaatgcctgtattagactctgtagaagtagaggcaattattgaagaagctcaaaccatagaagatacatggagcacacttcttggggatgctgaacgttatataaaaaattcagacttcggaaaagctaaagcaaattttgaagaagctttaaaattaaatccaaatgatagttatttaattcaaagacttacattggcaacatataaacatgagcaacccaataaagttggagcattgatagatgctctgcaaatactcactaaactagattttaaaaactcaaatgatccagaaacaacgggtttagcaggtgctattaataaaaggctttggaatgaaacaagaagtattcatttcttggaagaagctatagtcgcttataaaagaggatttatacttaaacgagattactacaacggtgaaaatttgactttatgtaacttattaatgagtgaacagcaagttaaaggatctaatattgaagcatatcatctagttgaagctgataaggtagcaaaagatgtattgcagaatgttaaaagaatgttggaactaacttcttcaagccaacgtactgattataaatggatattagcaactgcagccaagctttccttcttcttgaatgaagactacttatcttatgaaaaaagctttaaggaattagctgacgagtgggaattagatagttatctagaatctaaacaagtcttttttaaatttttagaacgctaa

SEQ ID NO: 64334 - DNA, 411 bp, Acinetobacter baumannii
atggcaaaccatgccgtttttattagttatgatcattcagaagatgtgcattacaaacgattattagaagcttgggatgccaatagtaattttgactttcagtttgaaaatcacagcgttcgacaacctatcaacagcatatatgctcctgcgatcaaaacagctataactaaaaaaatgcaaaatgcctcgcatcttttagtgattgttggtgcgaaaagttataccagtagttggattgaatgggaaattaataaagctaaagagctaggtttgaaaattgcagctgtgaaaattaactctacttatacaagcccatcaagcttattaggttgtggtacatcttgggcaactagctttactaaagataaaattattgaagcattaaataatgcaaagaaatgtgcctag

SEQ ID NO: 64335 - DNA, 213 bp, Acinetobacter baumannii
atgccttgggagttaggcttttttgatggatacaaacctaaaaagattgcaatattaccgatcacttctgatagcaacaaatatgaaaattatatcggagtagagtatttgagcctttatccttatatagaagtgggaacaagtactttatggttaaaagatcctgaaaaccataattatattagggaacttgataattttataaataaataa

SEQ ID NO: 64336 - DNA, 201 bp, Acinetobacter baumannii
atgagcaagaaacacaagacttacaccacagaatttaaagctgaagccatcaaattaattgaagccaatcaaggcaatgtctcggaaacagctagacaacttagcatttcaatgcaaactctttcaaattggaataccaaagcaaaggctggaactttagcagtgaaccgtaccgggtttgtcggagagtcaatattctga

SEQ ID NO: 64337 - DNA, 1293 bp, Acinetobacter baumannii
atgacaaatatgatcaataaagcccaagggttgggtttatcgctgatcacaaaactagctggaagcgatgtacttgatcaactcaaactacgtaaatttcttgaaaggtctctttaccaaggttcaaaagctggttttagagcattaagtcagactcagaaagcatttaaacctaagcaaattccccaacaacgtctgcctcaacagaagaaaaacctatttgatttaagcctaactgaagaacaacaaatgacttcagaggcaatgtctcaatttgctcaagaagttttattgggattagctcatgatgctgatcagacagctcaatttccagaaagcctttggcaatatgtagaagatttaggattaaactattacgctcttccagaagcactaggtggtgtcgccgctgaacaaaatattgtaagtaacttattgattgctgaaaaactagctgaaggtgattttagtcttacagcagggctcttaagtacgtttagtgttattaatgccattacacgttggggttctactgaagttcagtcaatgtatttaccttgctttgcagaagactccgacattaccgccactttcgctgtacaagaagctactccagcatttaacccttatgttttaaaaacaaaagcttctcttgaaaatgatcaatattttatagagggcgaaaaaacattggtcattttaggagatttggctgatgtgttcttggtaagtgcagactttaatggcaagccggatgtatttgtagtacaagctggcgataccatttctattaaaagtactcctgctatgggtctcaaagcagcagagacagctactttaaaattcagtaatacgcctgctctacgactaggtgcaacagattttgattacaccgcctttttagatttaggcaacttaatgtggtgtgcaatggctgtaggaacctgtgaagctgtaaaagcatattgtattaaatatgccaatgagcgaactgctttcggagaaccaatttcacatcgtcaaagtgtcgcattcatgattgcagatatggcaattgaaattgatgctatgcgcatgctaattctaaatgccgcaagtcttgccgaagcaggtaaacctttccatcgtgaagcatatttagctcgcattctttgcgcagaaaaatccatgaaaataggaacagatggcgtacaaattttaggtggtcatgggtttacaaaagaacaccctgttgaacgttggtatcgtgatttacgtgcaaccgcaattttacattctggcctacatgcttaa

SEQ ID NO: 64338 - DNA, 408 bp, Acinetobacter baumannii
atgcaacatcagtcattatttaataagagtcagtggactcagttagttaagcgctttagcgcggtcgctgtattaggtttcacaatcgcagcacctgcttgggcaattgacccaacagtgaaagaacttcgtattggttttcaaaaaagttcgattaacttcgcgattgccaaacagcaaaaactatttgaacaagaatttccaaatgccaaaatcacttggaatgagttccccgctggccctcaaattttagaagccttagctgttggctcactcgatgttggcgttactggagacacgcccccggtctacgctcaagccgctggcaagcctttatattacattgcttatgaagcagccaaaccattggcctcagcaattttagttcccaaaaactcacaactatag

SEQ ID NO: 64339 - DNA, 600 bp, Acinetobacter baumannii
atgataatctatggtgatgtagattcaggtaattgttataaaatcaaactgttactatccctattaaatataaatcatagatggattcatgttgatattttaaataaagatactcaaacagcagagtttctatctttaaatcctaatgggaaaatacctgtcttagttttagatgatggacgggttctaagtgagtctaacgctattctaggctacttggctgagggaacagaattgattcctgcagatccttatatgaaggcaaaaatgtaccaatggatgttctttgaacaatatagccatgaaccgtttattgcagttgctcgttttattaataaatatctaggtttaccgccagaaagaatagaggaatatcataaattacaacccaaaggccataaagcattatctattatgaataaagctttagtagggcacgactatcttgttggaaataaatttacaattgctgatattgctttatatgcatacacgcatgtagctaaggaaggcggcttcgatttaaagttatacccaaatattcaagaatggtgtcaacgaattcaaaaatatccaaaatatgtgagtatggttgaataa

SEQ ID NO: 64340 - DNA, 627 bp, Acinetobacter baumannii
atgcgatgggtgcaagaaatccaatttttagatagccaaagtgtaattggcattcgattttcaaaaccgatacttccttttatctctaatttaagcagagaatttactaaatatgcgctttcagacattgcgggaatcaatagtgcctatgctatccgtatttacgagttacttgtgcaatatcggcaaataggtaaacgcgagatatctgtagataacttaagaacaatgttagagcttggtaaaaagtatccactattcgcagatttcaaaaaacgagtaattgatacggcagtagatcaaataaatgaatacagtcctttaaaagtaacgtatgaacagaagaaaacgggacgtaaagtcactcatattcttttttcatttaaagaaaaaactcaaactattagccagaagaatacagatgcatctagagacttttacaaactgacagatgcccaaatcaatatgttcggtaatcaactatctcggctacatgaactttcccatttagcggatcagggtgaaagttatgatgcattagcatcaaaaatcaaagaaatgctgagagatccaaagcaacaaaaacaatttttaccttacttaaggaacttaggcttcaaaccttga

SEQ ID NO: 64341 - DNA, 759 bp, Acinetobacter baumannii
atgagtaatattgttttgtcgcaagttagcaagattgcatcagcttttaatatgcaagatgttgatcctgctgagttagcaaatactcttgttaatacagtatttaagaaagcaacaaatgatgaatttctttctctattaattgttgcaaaccagtacaagctaaatccttttacaaaagaaatttatgcattccctgccaaaggtggcggcatcacaccagttgttggtattgatggatgggcacgcattattaatgacaatcctgtatgtgatggtatccagtttgaacaagatgatgagtcatgcacatgcaagattttccgtaaagaccgcaaccaccctactgttgtgactgagtatttatccgagtgtcagggtaattcagaaccttggaaaaaatacccaaaacggatgctacgtcataaggctttaattcaatgtgcccgtgttgccttcggcttctcaggtatttatgacgaagacgaagctcgtcgtattgatgattgtcatatccctaccgttcagactgttagttcagatgtccctcaaggttatgaagcctatgagcagcagcatttagataacatgcgcgctttggcaatggaaggcacagaagccttgcaaactggctacgctgaattgcctcagggcgactgcaaaaaatacttctggactaagcatagcgcttcattaaaaggagcagctcaacatgctgatcaaccacaaggacaagtgtatgaacattctccagcgtag

SEQ ID NO: 64342 - DNA, 666 bp, Acinetobacter baumannii
ttggattggggaaatcaaaatgaaatttcagagattttgacaaaagaaattattcatataccgagcaataaattaacccaaattttgaaaaaagctattcaaaaacttggtatccgctctagagaaactggtaaaccaatatctgtaactgcatatcggtttcgttacacgcttggaactaatgccgctcgacagaaagcaggtgtgaatgtcattgcaaagctattagatcatcatgatacccagaatgcacattgctatgtacaaagtgttcctgaaattgcacaacaaatctcttccattatggatgagaacttacgcaaatatgcagatgcttttcaaggaagagttgtaaaggatgagatagaggctcaatcacaaattaaagatgctaatcgaatatcttgtgtggaacaggactgtgatgttggctcatgtggaacacatcaatattgtagggatcatgcgccaatagcatgttatctgtgtagcaagtttatgccttgggcaaatgcaccccatcatctagttctagagcaattaattaaagaacgagatgatctaatagcaatgggatgtagccttgaagtcgctgctgtgaatgaccgagcgattattgccgttcagcaagtaattgctgcttgtaaggagtttaatcatggataa

SEQ ID NO: 64343 - DNA, 255 bp, Acinetobacter baumannii
atggataatttaatatattttccatcagacaaaatccagtctccttacttcgaaattaagcggtttattgattttgttaaacagttatcagaattaaatgaagatattagatttgatgagaattattggaaaggcgaagtaaactttgtcaaatcaggtgtgccatcacaagacagacgacctgaaaatctcttggatcattcaattctagaatttgccaaggcgtatgttaagtatcaaagtgatgtgtgctga

SEQ ID NO: 64344 - DNA, 273 bp, Acinetobacter baumannii; identical to SEQ ID NO: 62035

SEQ ID NO: 64345 - DNA, 495 bp, Acinetobacter baumannii
gtggatcgtgaaaaattcgaagctgaatctgccgaacttgaacgcttacgcaaagctgagcaagagcgtttacaacgagaacatgagcaacgcattgcacatgaagcagctgaaaaagctcgtcttgaagcggaacgtaaagccaaagaagaagctgatcgtgtagaacgtgaaaagcaagaagctgttgctaaagcagagcgtgaaaaacgtgaagccgctgaacgtgaagctcgtttagttgctgaaaaagaagctgctgaattacgcgcacaacatgcagccgaagcagaacgtaaacgtattgaagctgaacaagctgcaaagattgaagcagaacgcaaggctgaagaagctcgccaagctaaccaagcacaccgtaaaaaaatctgtaatgaagccctaaaaggcttattggctttgggtattgatgaagcaaaaggcaaagagagagcctgtaaattattttgtgtaagttccattttttataaatga

SEQ ID NO: 64346 - DNA, 522 bp, Acinetobacter baumannii
gtgagcaacaatgccggtaatggggattatggtctggctaaactgctcaaagccggttcaattaaaaaagtgatttgctctttcccacgtcagtctgactcttatgtatttgatgaactgtaccgtgccggaaaggttgagcttgaactggtaccgcaaggcaatctggcgtgccgtattcaggcagcaggtatggggcttggggcggtgtttacaccaacaggctttggaacacttttagctgaaggcaaagaaacccgtcatattgatggtaaagattacgtgcttgagtatccgatcaaggctgactttgccctgattaaagcttacaagggcgaccgctggggcaatctggtttaccgtaaatctgcacgtaactttggcccgatcatggccatggctgctgatgtcaccattgcccaggtttctgaagtggttgaactgggtggattagacccggaacacatcattaccccaggtatctttgtacagcatgttgtacaagtacagcccgcacagtaa

SEQ ID NO: 64347 - DNA, 351 bp, Acinetobacter baumannii
atgcgtgtaacatttgaacatttaaataaatttaaaacttctaatcgaatatttgaaggtagaaatatttctttagaggcaaaaaaaatattaaatgagcaaaaatatagagtagaaaaagagtacgatatttttttatcacattcttttggtgatgcagaaactatatatatattatacacttatcttaaatctttaggatggtcagtatatgttgattggattgaagacactcagctagatagacagaatgtaacaagatcgactgctgagcttttaagaatacaaatgaagaggtctaaaactcttatttatgcctcatcaagcgcatctaaagattcaaaatggtga

SEQ ID NO: 64348 - DNA, 318 bp, Acinetobacter baumannii; identical to SEQ ID NO: 59916

SEQ ID NO: 64349 - DNA, 204 bp, Acinetobacter baumannii
atgattgatttttttactcaaaatgaaaaaatttctatttactacaatcttgctagagatttaagttttgctatagattcttatgaagttcaaaataaaattaagacaacatttttaagaaaagcttttgacgaattgaaagtaagtggattaatctttataggtgcgatacttacgattttaattagttactttatgaggtaa

SEQ ID NO: 64350 - DNA, 318 bp, Acinetobacter baumannii
atgaacgacttagaaataaacggatataagatttttacaaatcctgatgaagctgtttatgcagctaaatcaaaagaagatgtctataactatttcgttgaaaactatggctctactgaagaatgccaagatgaatcaaaagaacaatttattaataacttgaatgaggttgagcttgatagtgactgtgctcagagaaaccgagagtggattaatgaagatacagggatgatttcaacatcatcctactatcaagaatataaacatgttgcttctaaagatgaaggaacagaagtaatcgcatttttagtctggtga

SEQ ID NO: 64351 - DNA, 300 bp, Acinetobacter baumannii
atgagcaagaaacacaagacttacaccacagaatttaaagctgaagccatcaaattaattgaagccaatcaaggcaatgtctcggaaacagctagacaacttagcatttcaatgcaaactctttcaaattggaataccaaagcaaaggctggaactttagcaggtacaaaacagtattcacctgatctaaacgctctactcgaagaaaataaaaaactcaaacaacagctcaaaatagctgaaatggaacgtgaatttttaaaaaaggcagcagcgtactttgccaaagaaagtcagtaa

SEQ ID NO: 64352 - DNA, 288 bp, Acinetobacter baumannii
atgttgtcagatcatgttactcgactgactttcattaatgaagcgcacaaagagactagcgaacagaacaaaaaagatatcgatacattggatatcaaagtcgccaatttagaaaaccgcacagcagcgcaagatggtggaatttctgtgctgcgtgtattgctgggaatatttgcaggcatcgtattttctttgtgtgcttgggttggttcttcaattattcaattaagccaagaccagtctttaattaaagagaaagtatcacgattggagaaagcaggacgatga

SEQ ID NO: 64353 - DNA, 255 bp, Acinetobacter baumannii
atgacagagctaaaaaatcgaggagtacaggacattcttgttgcctgtgtagatggattaaaaggctttcctgacgcgatagcctctgtttaccctcatactgctattcaacgactcaatcgcatttgttgtataaatcgcatgacgtatttcggctggatagctaaagatcgttcggatattttcccaattggcccgccaggattctccaattttgggatactggtgattccattgatcacagaagatgtctag

SEQ ID NO: 64354 - DNA, 219 bp, Acinetobacter baumannii
atgctacctgtattgttaacattcgcttttctgatctggattgctgaaaatattagtactttttataaaatctggctctatccaagtcaggtagaggcttggcatatggtggggtggggtaaacttggatcatggtatttattattacttttgagtttagtgttagtacttaaaatattaggtcatcgagataatctaggtaattggaatttaagataa

SEQ ID NO: 64355 - DNA, 489 bp, Acinetobacter baumannii
atgttctatttgtctgaacgtaagattattaaagctctaaaaagtgcccaagaacgtggcgttattgttcgtgttttactcgatccaaataaagatgcgtttggtagacaaaagaatggtatcccaaaccgtcaggtagcgtcagagttacatgctgctggcattccaattcgttggtgtgatactcatggcgagcagaaccatagcaaaatgatcttgaaatataatgctcaacaagctgagttaattgtaggatctgccaattttacagcccgtaatttaaaaaattataaccttgaaacggatatgttggttgtaggcaaagttcaagatcaagtctttaaagacgctcagaattacttcaatacttcgtggtcaaacctacaaggtagacagatgagcgtggattatgcgaagtatgccgatgagtctaaagtgaagtattggatttatcgttttatggaatggtcaggattatcgactttttaa

SEQ ID NO: 64356 - DNA, 810 bp, Acinetobacter baumannii
  misc_feature (794)..(803): n is a, c, g, or t
atggaatcgtttcgtacagtcattaagggttggctcggcaaagtccttttagttttgtttttgacccctttagcgcttgtaggtattgaaggatattttaataggggaaacaaggcagatgtcgcaaaaactgtaaatggacaggacatatcaaaaaaagaccttgaaactttaacgcaaaggtataaagaacaatatttagctgctgtaaagggtgatgaaagtttacttaatttaccggtaattcaagccaaagctcttgatatattggtatcccgtaatttgctcattcaacaagctgaaaaattaggtatttctttaagcaatgctcaaatcgagcaaatgttagctcagcagccaagtttgcaagaaaatggccagttttcacaaaaattatatgaaaattatttgcgttcgattggcatgacaagtgaaggtttaattgctagcttacgtcaagatcacgctttaaaaatgttgacttcaacttttgcagattattctttagtgagtaaagttgatttaatgcaaattgcgaatttgcaaactgaacagcgtacattgcatttggctagtattaagttagacccttataaagctggtttaactgcatcggaccaagaggctactgattactacaacaaacatcagaatgagtttaaacagcctgcttctgttgatgtagattatgtcgttttatctccgtctttaatggctaagccagctccagcaacagatgccgagcttaaacaagcttatgcaatgtacgctgttcagtttgcaaattcgcaatnnnnnnnnnntttgtag

SEQ ID NO: 64357 - DNA, 480 bp, Acinetobacter baumannii
atgactgcaggccaagctcgtattgaagtcactttccaagttgatgcagatggcttactcaccgtttctgctcgtgaagcaacttctggcgtgcaagctcatatcgatatcaaaccatcttatggtttatctgaggcagatacggaacgcttattaattgaaggtttccaacatgccgaagaggacaaaaatcttcgtcatttaaaagaaactaaagttgaagcagaacgtgagcttgaggctcttgagcaagcattaaaagtagatgcggatttacttgatgaaaagcagcttgacgcactcaactctgctaaggaatcattaaaagctcagcttgaaggcagtgatattcaagcaattgagcacgcagttcaacaacttaaagtacatagtgatgcttttgcagcactacggatgaatcgacatattgaccatgccttaaaaggcacgaagctcgatgattggtcaaaatcaaattaa

SEQ ID NO: 64358 - DNA, 366 bp, Acinetobacter baumannii
ttggatactgattttggtctaaaaatactttcgccttttgataactctcttattcatcgtgaccgtttaacttccttatttgaatttgattatcggatcgaatgctatgtgccagcggccaaacgggtatttggatatttttgtttgcctattctttatcaaaatgagttagtaggacgaatcgactgtaaagcacaccggacagtaaaagaactagaagtgattagtctacatttagaaaaaacggtaaaagataaagagcatttcttttttgaattagatcaggaactcaagcgttttgcagcatttaatcaatgctcaactgtgaatgataaggtagtcaaactcattcgcagcaagctttaa

SEQ ID NO: 64359 - DNA, 351 bp, Acinetobacter baumannii; identical to SEQ ID NO: 62870

SEQ ID NO: 64360 - DNA, 201 bp, Acinetobacter baumannii
gtggtacagcagcagctttgggtcgttgaagggaaaattgaaattcaattaggtgaaacttcttatgcattaggtcaaggggattgcttggcaatgcaattagatcaacctgtcatatacagtaatcattcagctcaagttgctcgttatattttagtcgtttctaatcaactggtgcccgctcttaaggaatctttatga

SEQ ID NO: 64361 - DNA, 1281 bp, Acinetobacter baumannii
atgaacactaagtacttatctgcattaaaaacaaatttcattaatgaaaacgaactagactcattattaagtgaaattcaggatttaccaggtcatccgcaatcccttacgaccttacaagattgcggatataaaatgggtgtaatccatgaagattactttaacgtaatgtcatcattcacatttcaacaatttgaaaaaagtaagagatctattctatacgtctacgataaagaactagtttataaacatatacaagcaatacagaaagctaaatatgtactacctttaattcttaagcagtatgaaaatacagagcgaaaacttaaagaacttatcgaaggttgtattgctgaaaaacaaaagtatcaaaggaactttgaattacgtcaaagacttagagaggtcttacaaaagaaattaagtgaactgacttctgataatgaagatgagtataaaaagctatctaagcttaatgatttaaatagcctgcaaattgtgaacagtgacttaagccttaagtcttttgatatggctattaatcttgctaaagataaattgggtaactttgatatagcgaagacacacggggatatgtggaacaccaattattctattaaagctttacagagtgataataaggccctgatagaaatttctaaagaccctgaaaaatatgacaaattcaatatcagagacttatctttagtaaattatgtttgcgtcataatttttgtacttgttcttcttgtagcgggattactaacgttaggtgataataaaagcgaaattaaagaaccagttcattttgcagcacttgatgtttataacatggtgaatggttcaaatccttcttcaacaataggaaaacataacaaagaattctttctaaaaaattatgaaagtacggttcaaatatataataaatcacaggacgttttagtagaatatttgaacggttcacgaactttgacaccacagaatagggaggctattcaaaaagggtataccatacttttgcagttagcagatttaaaaaaggatgatattactttttctattaatcctgatattaagtattcgtatgagtatgctttaggaatcaccaaaaagaatgataattttagtggcttttggaacttttattataaagccgtagtttattggtttttatttattttaatcccttttggcttacttaacggtttatctgaattaaggcaatatgaactgagaaataaaattagaaaaatgattgagccatattataagcataattaa

SEQ ID NO: 64362 - DNA, 144 bp, Acinetobacter baumannii
atgatcaaattaaatttccgtttagcagaatttagtgacatcccaacactagtagagttgattaatcagtcatatagagaacaacaaggtagaagctggactactgaagttgaatatgtaaaagggcaacgtattaataaatag

SEQ ID NO: 64363 - DNA, 468 bp, Acinetobacter baumannii
atggaaataaacatatataaagctaaaactaaaaaagcacctttaaaaaacaaacctagatccaaaccgctacctaaggctaaacttagctatgaggaagccgaagaagactttgaaaaagccttgaacatactcgacatcaagtacgagaagaaatttcagttcttgtctacaaagcattggcgttttgatttccatctgattgagcacaagattttagtcgagatatccggtgggccttggtcaggtggacgaaagggcaagctggcaacaaaggcatggagtatggaccgttacgatgttgctgaatcaatgggatataccgttgttcggttagaggcagcaccaagatttaagattaatgaatctggtccattacagatccaagctcatttcgcaagccaatggcttaaaaatttaaagaggcaaatatttaatggagcagatcagaccatttccaccgactga

SEQ ID NO: 64364 - DNA, 1278 bp, Acinetobacter baumannii
atgctgccattcgcttcaggcattcctaatctggcaccaaacttttcgcaggtccaaggtactgctgcagtctctcaaggtggtactggggcgacaactgcactagatgctcgaaataatctcggagcagcaaaaaaaggggtgaatagtgacattacagagctaaaaggattaaccaaggctattgcaatttctcaaggtggtaccggtgcaacaactccatccaatgctcgaactaacttagggcttggtagtgccgcgactagaaatgttggtactacagctggtaatttgatagaagttggcggttttggaattggtggagtaggccaaacttttgaaagaaaaatgattacgggagtaaacctagattctgtcgttagctatgtattgttatttccttattctgtcagaagctcacccaatcgaaacatgtttggtgagctagtgttttcgaggggtgattcaggctcagcaaatcaacattcgagaactttagtatcaattcagcaagcatatgatcgtgttacagctcggtttattagtattggtgtaacaactcatatttcaggtatggctgtagttaaatatcaaaatgtaaactatgttgccattcgaagaacagcaagttcttcaacatcggcatttagatatttttccggtatttccaatattacatctgataattatttagttactgttcatacagatgacgttgttattgtcagtgagatacctgttgtaattgagcagctaagaacatctgcgaatacttctgtggattccaacggtttcataaaagcagcatcaccagtagttaagctatttaacgaccatatcgagctcaataatgatgcagaaaagcagcctattgaatttaagaaagtcgatgtaggcgactatttacttaaaggctctttaggctttgctcaagaaggttggtatatcgaagtacctaaagacgcaaacggcaacacaatcgttgcagtagtgtatgacaccctagaaaatggtgacatctcaattaaaacttacaagcgtaagtttgattttgaacttgctgctgctgtggcagatcacgagaacccaatggacattccagaaggccgctggattgatatccgtctgcatgaagaacctgaaccagaacctgaggttgaagaaactttgagtgaaacaccagtggatttccagcctactaacttatctcaggcagttgctgcagccatgaatggcgtggaaccgccagaaatctcagacacagacgaaacactttaa

SEQ ID NO: 64365 - DNA, 1149 bp, Acinetobacter baumannii
atgactcatggtgggccattttcagcatttagaggaaatagacagttatgtgataaatatggaagaaatgataatcatcctgctgatcaagtaatgatagctaatattgcatatgcgaatagaaatggaaatggtgatattcaatctggtgatggttggaaatatagaggtcggggaattatacagataactggtaaagataaatatgataaaattaataaagcaataaaagataattatcccaatgtaggaatatctattgatgcaaataatattaataatatttatgaagggacattggcttcaatggcttattggaaatcttttggtctatcaaaactagctacacaaaaacaagtagatattaggactcaattagaagttgtagattctttaattgatattattaatcgagatacagcatcaagatcagatagaaaaaagaattttgagtatataactgcgaaagtcttcaagcttaatgaatgtaaaaattcaattgtagaagcgaacttactaagtaaatctacacctacacctacacctacacctacacctacacctacacctacacctacacctacactgagtaatgttttaaaggaaataaagcaattagtagatagaaacataccttattcgcaaactggtgcaagaggtgctggaagtaataaaaatgctacctcagtaattactgctaatgatttaaaaggattagactgttcagaaactgttgcaatatatcttttaaagttaggtgttactgataaattctattctatacatactggtgttatgctcactgaaaatgattttagaaaggctatacgttcaaataaaattgagtatgttgttggaagtaaagatcttaattttatccctcaaattggggatatatttgtttggcgtaatggtggtgggcactgtggtatagtgtatgatgttgatagacaaaatgataccgttactattttagaggctataggtgacgttggaagtgctgatgaaaattttaatataaataatgggggcgaaaaaaaagtagggtgtacgcgaacagctgtatatagaagatctggaaaagctttagcccagcatagaggatgggtgggatattttaggccaattattagtggaaaaaaaatatga

SEQ ID NO: 64366 - DNA, 942 bp, Acinetobacter baumannii
atggaatgtatgagaattcagcctgtaacgagtcatcctggagaaaatgctttatttattgtattaggattagctcaaggtgattctgttgtagaaaaagtaaaagattttgctggtaaattctcagcgttaaccagaagtttgtctaaccgttatcctgaaactaaatttaatgccatattaggttttagctcaaacgcgtgggatattttatttccacagcaagcaaagcctcaagaattagaaacatttcaagaaatcaaaggcccaaaatacacagccgtttcaacacccggggatttattctttcatattcgtgctgatcgacaagctttatgttatgagttaggaagtatcatcaatgaacagttaggtaaagtaacttacccaattgatgaagtgcatggttttcgatatttcgatgggcgtgcgattattggctttgtagatggaacagaaaatcctgaacctgtaattgctgcacaatgggcattagtgggtaacgaagatcctgactttattgggggaagttatgcatttatccaaaaatatacccatgatatggaaaaatggcgtgcattaagtgatgatgaacaagaaaaagttatcgggcgtaaaaagttcaacgatattgagcttgatgatgaggagaaacctttaacagcacataatgtagtaagtaaagcgcatgatgcagaaggcaatgaactaaaaattatgcgtgcaaatatgcctttttcgaatccatccaaaaatgaatatggtactttttttattggttactcacgtaaatttagtacgacacgtcaaatgcttgaaaatatgttcttaggaaatgagcaaggtaatcttgatcgattacttgactttagtactgcccaaacaggcactctatttttcgtaccgacagtagattttctagatggcttgggtgatgagtag

SEQ ID NO: 64367 - DNA, 189 bp, Acinetobacter baumannii
atggggcctgcgattcttcggttaaaaccgggcaaatatgaacctttaaaagagggaaagcgagaaaaattgttgccggtcatgcaaggtaaaatgcaagtgccttatttagtggacccaaatacaggtgttaaaatgtttgaatctgcggaaattgtaaagtacctaaaaaaacaatatggcagttaa

SEQ ID NO: 64368 - DNA, 591 bp, Acinetobacter baumannii
gtgggccaaagctattattttgaagatcgccgcgtcaccttgaaacaacaagatgaaattgatactgaacgtaatacaggtcctgttgttagcttatcaagtcaacttaatcaaaactttaccattgctgccaactcggcatggatgtcaaatggtgataatgcacagcgtgattttcaactttactatacaggcgataaaggaaatctatataacttaggctatttctatcgtaaagatattccaggacgccaagatacatacgaccaagttgttgcatcgtttatacaaccaattaaagacaattggcgtattatggggcacgtacaatatgacatggacaatgatgttgcccgtgaattattactaggtgttaattatgaatcgtgttgctggggcatttctgtctatggccgttcatactataacgatctagacgatccaaaatctccagatgttagtgaaaagcgcgcgatcatggccgaaattacactcaaaggtttaggtggtttaaacaataaactcgcgtctttacttgaaaatcgcgttttaggttttaacaaaattaatcaatcttggacacaacgttaa

SEQ ID NO: 64369 - DNA, 369 bp, Acinetobacter baumannii
atgggcttacgtgacgaaattcaggcagacattgctgaagcatttaatgatgatttagcagatgccattcatacctttacatgtgagcggatctctaaaacgaattgggatcctaaaactgaaacttatgttgaagttaaagaaaactattctggccgtggcgttctgtttggctcatacagtcaatatgagatccaaacacttggagtactggccacggataaaaaggcaaccgtgcttcaaaatgaagtaactatgactccaaaaattgaagatgaatggttaactgccttaggctcattccgggtaattaatattcaacaggatccagctaatactatttggaaatgtcagcttcgaaaagtgtag

SEQ ID NO: 64370 - DNA, 780 bp, Acinetobacter baumannii
atggtgggactgtttagttacaaatttgcgtggtggaaacctgcaatagattggaaacgaccacgtgtgctcatgtatcacatggtacgagagcatatagatggggcaaaatttaataagctaagagttacaccagaacaatttgagcatcaagttgcatggatgagtgctcaaggcttccattttgttacgatgcaagaattacaagaaaattgggggaaacaccctgaaaaaactgtcgcgattacttttgatgatggctatctggataatctggaaaatgcctatccggttctagaaaaatatcaggccaaagccacgatttatgtggtggttgaccgccataatcgcgactggtcgacctataaaaaagcccatcacaatagtggcgaactggcacgtgagccaaaactgaatgatgaacaagttcgatttttggcaaatagtggtttggttgagataggttcacataccatgacccatgccaacttggacaagttgacagatgacgaatgtttgcaagaactggtgcaatcgaaacaacagctcgaacagataattgggcaacctgtgaccagttttgcctatccttttggaatttatagccagcgtgacgttgaactgaccaaacaggcaggttatcacaatgccgtgaccaccaaaaagggtattgatactgcacagcctgactttatgcagttaaagcgcatcaagatcagtggtaaagattcgatgcttgcagtgaaatgtcgcctgaaactgggtcaacgcgggctataa

SEQ ID NO: 64371 - DNA, 735 bp, Acinetobacter baumannii
atgtcatcgaaacagcaaggtaaagctggagtagtgctattgataatagtagttctaattatttttctggcttctttagcgataagttcatcatggaatacggatgagtattctccaatagttacacaagtagaaagtgagaataatgctgtaactacaaagagcaaagaaatggaaatacctattcctattagtgattcatcagacaaaggaaaatattttttagtaagtaaagaaagtaaacacaatggattcattattatttataaaagaattggtgtggagcaaaccttatttaataaatatgaaatcaactgtaagactgaaaagatgagagttttaggagaaggggatagtattgataatataaaaaattattctgaaaaaggttcttggtttacacctgtatctgaagcaagtacaggcgataccttcaattttatctgtggtaaagataaaaaaattgatgaaggaagagaagattccgtaaaacagtcttttggtaaattgcaatataagatagagccagaagcagtaattaactctaaaattgatgaggatattctttcacagcttatccttgctgtacttgtgaatggttataagtgtgacacggtatctgctgcaatcccatatattcgagggggtggctatacaatgcattgcaataattatcaatataaatatgagatagaggataaaggggggaatattgttgtgacagtcttggattaa

SEQ ID NO: 64372 - DNA, 234 bp, Acinetobacter baumannii
atggaagaaaatcctctaattttatttggattacgattaagagaattgagaaaaattaagggaatctctcaagagcgtttggctctagaaagtggtattggcagaagctatcttggagaagtagaacgaggaaaacggaacattgctttactgaatatttataaacttgcaaaagctttaaatattgaacctagtcaattgttagaaaaacctgaattagatcaaaaacaatag

SEQ ID NO: 64373 - DNA, 267 bp, Acinetobacter baumannii
atgttaaagatagattccttaaatcagagtttaagcgtgactcaaaatgtgctaagagtaccacttcgtttaacaaaaaatgaagtgtgcatcttactgggagtgggtagagataagctgactagaatggaaagagaagatgaaagttttccaaagagtatgaaggagggggtaacgagacaagctgctgtctattacgattatcaagcaataatcgaatggtatgaaaattggaaaactaatacacagcaaaacagaggtttataa

SEQ ID NO: 64374 - DNA, 528 bp, Acinetobacter baumannii
atgactgaaatagcagcagagaaaagaaagagaaagttaattactgagcttagagattatcagtggctctatcaatatagtgtatttcctcgattattaggagcgaatagagaagaggataaatctagagcagaggaaattatcttatctgggttggatgaatttagagataagttaagaagaaaagtttctaatataggtattctgtttgagcttagaaaaatgaatgtgaatctaaacagaggctttcgaacccaatatagaagaaaaaattttgtacaaatttatattacttttcatgcatcagaaaaaattgaagaagagttgttaaatgaaattgcagaagctgtatatggagatgaagtaaatataaaaacccgagctttatctgaggaagatgtacttggagcaattgagaaaatccgaatagaagcattatatgatttttctgcctattacgaaattaagggaagaaaattcaatcgttattcaggtataaaccgatcaagttttttaaggaaagagtaa

SEQ ID NO: 64375 - DNA, 1284 bp, Acinetobacter baumannii
ttggcagatgccattgcaagcaatgcaaacaatttagcgctcgatgcaaatgcaatggcgacctatttctacccagatggatcaccacgtaaagtcggcgagaccatgaccaataaagcctatgccagaacacttgaagcactcgcttcacaaggggcaaacgcactacacactggtccaattgcgcaagcgattgtggcaaaagcagggcaaaccgtaggtgatgacccagcaagaaccccaattactccaagtttgatgaccttgcaggatttatcgaactatcaggttaaaaaacgcgacccgatttgtacgacgtatcgtgaccgttactatgtatgtaccatgccacctccatcttcgggagggattgcagttgcgcaaacgctaggtattttagaaaactttgatatgtcgctgtatccacctaaaaaccctgaaaatgaaggtggtgtgcccgatgtcatgggcgtgcatttaatgtctgaagcagagcgtttggcttatgccgaccgtgataaatatgtggcagataccgactttgttcgtttgccggcacagggtattccaagttttattgataaaaattacttgaagcagcgtgctgcactgattaacccgaaccagagtatgggcgtagcaccagcaggtaatttcaatacagcggcaggtgtagataccactgttgaacatggtacaacgcagttcaccattgtagatgcctatggcaatgtggtttcaatgacatcgactgttgaatcgagcatgggttcattccacatggtggatggtttcttgctgtcgaaccagttaactgactttagcgcgaatccttatgacagcactggggcaccagttgctaaccgtgtagaaggcggcaaacgcccacgtagtactatggcgccaaccttagtgtttaagggcaccacgccagatgaattttatatggcaacaggttcaccaggtggcggtaccatcattcaatatgtagttaaaactttggtgggtgcattggactggaacttaaatgcacagcaggccacttcgcttgttaactttggcgcgactaatagcaaaaacaccaatattgatagctcgaatgtacagctttccttagttgacctgattgaaggcttaaaagcaaaagggcatggcatatcgaacactgcgcaaaccagtggtatttcaacgattatgaaagtaaatataaataatcaaagtaaatacgcaggtggggtagacccacgccgtgaagggattgtgttaggcaatggtgctttataa

SEQ ID NO: 64376 - DNA, 2475 bp, Acinetobacter baumannii
atgtttaatataagggaaaatttgacttcattgaagaatgttcatgagtttaataatattattgaaaaaatgactttgaatcaaaaaattagtgaggaagaggttgtctatatactagcttgtgcgataatttttttaaaagaatacaataatgataaaagaaaaattcagcatttaaattttggatattttatacttttaaaagttgctttgaataataattattatgaaccattgatggatttaagtttaaatattgggttatatcctatagtaaggtatatagtagaaaataagttgatagataatttatctattaaagatattatcttagatgccaatattgaaaaattcaagaaaggtaatatagttgaaacttataagcaaaaaaagtatagagaggaattattaaatagtagatctagtgagagaagctatatcgcaccaacttcttttggtaaaagctcttttattgttgaaatgataaaaaaagaaaaagatcgaaaagtagctattattgttcctacaaaatctttattacttcaaacttataaagctatgaaatataattttccgaaaagaaaaattatatttcatgatgaaatgtataataatgatggtaattttattgcagtattgacgcaggagagacttttaagattattaaataaatttaaggatttaagttttgataatctgattattgatgaggctcataatttattaaataaagagcaacgaagtgttttattaataagggctattagaaggaataagtttagatatcctgaagcaaaaattttatatctatctcctttaattgaaaattcagaaaatttaaaatatgatagtaatcaaaatatatttgaaagaaaaatttcttttaattttaaagaaccagatattagtgaatataagttaaatggaaatgtttataaatataataggtttttagacgagttttatttatctgagaaaaatgaggattatttaaactatttgttatctaagtctaaaaataagaactttgtattccttgttcaacctaagaagattgaaaatttagctcaattaatttctgaaaggattgaggaagtaaatgataatagagaactttttgaattatctgagacaatatctaaaaatattcatgaggatttttattgtgtagaatatattaagaaaggggtaatatatttacatggtgttttgccagatcttataaaagaatatttagagcataagtttagtaaacttagttgtattcgttatcttgttgcaaatagagtcatattggaaggcgtgaatcttcctatagataatttgtatattttaaatacttggggtttaaatacaaaggatttaataaatttgattgggcgagttaatagattaaatgaaatttttaataataaaaatggaagtttaagaaagctaaatcccgaaattcattttattaataatgaagttttcggacagaaaaatggaaatatgagtaataaaattcaatggttgagaagtggtttatttgccgatgaagttaagaatccagttttactaaattgtatagagtcaacatcgcaagagttaaatagcagtaataacgaatatttttttgataattctaatttattaattgatcgaactaaagaaaaagaagattttttgatcttaaatgaaaatgatccagaagtaaggttgaggcatgtcctatatgagtcagggttggatagtgagtatgaagactttgatttagcctatagtgtattagcttaccgtatagacaagattcaaaataatataaattggttaaatgctgatattattgataaaatttatcttttctttatcaaagatctcgaatctaaattaacaaataaagaattatccagattaaaaaatgtaaaagcacggaaattctatagaatgtttattgaaagattgcatacattacatcttaaagatcatataaaagttatgttgaaatatttttactctatacgtgaagatatagatgataaaattttttatgtaggtagagcatacggggaaatagaacatccacaagaaatttataaaacaaagaaaaaatatagcactaaaaattatatcgatttatcaactaagaatcataaagagttggtgaatatagctttaattaaaattaaaattgaaagtgattttgtatcattttctttaaataaatttgtaaatgtattatatgaactttctctgattactcagcctgaatataataaatttatgtatggcaatgagaatagaaaatttatagaatttgttcaactcggcttaagtagttctttaataaattttcttattcgagaaaatcagattgataatatttttattgatgaaaatggttatcttaattatcataatgagtttataaattttttacataaacaggatgacttggtacagtttgagcttagtaaatttattactgttcagtaa

SEQ ID NO: 64377 - DNA, 456 bp, Acinetobacter baumannii
atggcacaagatagagttttctcaccaacattaattccatctttagataatgaagttaaagtctgtcatgcagatgaattattagatccattgttatgcaacagtattgttaaaattcttaattatcatactacagtgccttacacctttatgatgaatcaaggtcaatgggatggtgttaaaaacagaataccttttgaacatgatttagcaattcgcttcgggcttgagtatgatttacgtcagtttagtgaaacagttttagaaagatattcttttcatacaatgatgtatcttaagttcacgatgtatgctcaaaagcattccttaaatgaaggctcaacttttattagggaacttgctaaaaatcttttacagcacgcatggcaattgctaagaaaaattttggtgaagttattgatcttgctctttccaatgcaaacaagcctgttttag

SEQ ID NO: 64378 - DNA, 1305 bp, Acinetobacter baumannii
atgaacttaacaaaactttatatacacaacctatttggacattttaatcataaaattaatttcaatgaggaaaatattacgataattacagcaccaaatggatatggaaaaactgtttgtttaaaaattatagacgcaatatttaataaacgttttacttatatatcaaatttagatttttcttctatagaactatatagtactgattgtattttatttataaagaaagaaaatataaaggataaaaactttaatttatctcttagtaattcagatgaaatatttaactattcaacagcatataaagatgtaaattttaatggaagaagatctagtttaactcaaactattgatagtagtattccatttttacatagaattagcccaagagaatggcaagactttagaacagatgaaacatataacctagaagaagttttggagaatttttcagaatttttacccgatgaaattttaaatacagtttatcctgaatggtttctagatttcattaataatttacaagttcatttcatccaagatcaaagacttattcaaagaaaatctgtaaattctagaaataataataaaggatacattgatacaattgaaaaatatgctgatgagctatcagaactaattaaggaatatggagtaaaatcagccttagtatctcaaaaattagatacctcatttcctgtaaggctactggctaaaaagggttctattgatgatttacctgcaaatataattacagaagagttaattaaattacaaactaaaagaaaagaattatctaattttgatttattatcatccgactcatcactaccagaactagaagtatcttcagaaattaaacctgaagatcaaaaggttttaacattatatattaatgacactaaagacaaattagctccttataatgaaatttataagcgaatagagttatttgacaaaattttaaatacaaaaagactatcatataaaaaaattaaatttaactctaaaaaaggctttttcttcgaaactgatgtaggtgatcctttaaatcttactcaattatcatcaggtgaacaacatcagatagttcttttatacgagctaatatttaaagccaatgaaaatgttctcgtactaattgatgaaccagagctttcattacatgttgcatggcaaaaagaatttttgaatgatttaacaaaaatcatagaaatacagaatatgcctatcgtaattgccacacactcccctcaaattatagatagtaaatgggacttaacagttgacttggaagctgtataa

SEQ ID NO: 64379 - DNA, 498 bp, Acinetobacter baumannii
atgagacagtatttagaatcaactgatgtaattaacagtattaaattacttttaaaacatcctttttattcagacaaattaatattagttgtagaaggaacaagtgatattagattttttagatctatttttgattatgaaaatattaaacttgaatctatagatggtaagaaaaatcttcttttagctatggaggaattagttaactcacataaagggaaaattatatctatatgtgatgctgactttgaccatatagaagatttagaacaccaaagaaataaatttgatatttacttaacagattatcatgattcagaagttatgatgttaaaaagtggtagtttatttagctttatagatgaatattcaaaagatgaatatctattgtccttaaaaagtgaattacttaataatgtttttaatgcttctaaagctttagggatattaagatacataaattataaatacaatatgaaattaagttatcagtcgtag

SEQ ID NO: 64380 - DNA, 198 bp, Acinetobacter baumannii
ttgaactctgcgttcacagtacgtaaaatttctagcggtgttggtgttgagcgtgtattccaaactcactcaccagttgttgctaaaatcgaagtgaaacgtcgtggtgacgttcgtcgtgctaaactttactacctccgtgacttgtctggtaaagctgcacgtattcgtgaaaaattaccagctcgtaaagcgtaa

SEQ ID NO: 64381 - DNA, 285 bp, Acinetobacter baumannii
atgacagatttagttaaagaagaaatacttttaatacttagagagattcaaaagataccaactattcggccagccgatggaatgggcggtgtaagagtaacattaccctctcctgccaaaggtcagtactgggaaactcaaattctaattaagatttatttaatgattaaattttttactaattttagtgaaagtttagatgaagaaactatgctcctgacagtaaaaaatctaaggactgtctcttatacacatctgacgctgccgacgatactccttgtgtag

SEQ ID NO: 64382 - DNA, 801 bp, Acinetobacter baumannii
atgtctctcgatgatgaatacgaaagagtatttcgctctcaaaatctaattaacaagaatattgaagctttgcgcgtatttcaaaatgacaatcctgtagtaaaagctatggagaaattcgctaaaaataataatgaatttttaaatttttataatctctataactcaaatccaatcgtaaagttaaataaatggaataagcttattaataatgaatttttcaagaattcaaatataagtaagaatcaacttccagactatttacaaatatttcaagaacgaaatagtactctctttaagttatttgaaaaacaggaatttattgaaaatttcattgaaacatttatcaatgaaaaaccaaataattctgaaggggaattagaacctcaagaggctgatctaaatgtttttggcgaaatgattaggcaagaggtagaaattcaatctgactcatatcaaggtaattccaactttgatcctgtgatacttgtaaatggaatactttatattttatttttagtatgttggatctatgtgacacatttagatcaatttagtgatttcacagaagcgatggaattttatataaacagcattgaatgtaaaggtgttactaaatcagcagtagatttaagatcagcaccgaatgctgctagtgagcttatcttaactatacccaaagatagtggattaaaaatctataatgaatctcaaaatggttgggtgaaagttaaggtaaatcttaatggacttgattttgaaggttatatctctgaggattttatacataggatagattga

SEQ ID NO: 64383 - DNA, 390 bp, Acinetobacter baumannii
atggttagtatggaaaaccagactaatgagggtgataaaattaatatgcatgatgaaatgcgtagagctttttctttactttcaggtaaatggaaacttgaaattttatggttactcaatcagcgtattcaccggtttggtgaactgaaaaaagctattccgggtattactcaacatatgttgacggtacagcttcgtgagcttgaagctgatgggttggtttctcgtactatttttgccgaagtgccacctcgtgttgaatatggtattacccaaaaggcccaaggacttgctcctactatggttgcattgacgaagtggtgggaagaatatggacaaagtatcccattgcgcccagtttcaagtggacgcaaaccatatcaaagctaa

SEQ ID NO: 64384 - DNA, 426 bp, Acinetobacter baumannii
atgaataatgtttatttatactggttaagcacaggtttactctctttgctttatcttatttcagcagtcacatatctcacaaaaaaaacttgggtcgaaaaaaaattttccgagtttggctatccttcgtatctcatacctattctagcgatagtgaaaattctctctgtcattattttacttttacggttcaacattgctttgagtgatttgatctatgcaggcatgtttttccacttattactctcagctttagcacatattggtatacgtaaatcgccaaatgcacttccagcagctttaggtttgatattccttatgatctctttcattacccaaaatactgcaagagaaactacttctccttatttcactactgcttctccagatttcattatttctgaaagaaataagcataggcagtaa

SEQ ID NO: 64385 - DNA, 639 bp, Acinetobacter baumannii
atgaaaaaaatgaaactaaccctttttggtgccactgggaaaactggcaaatatttaattgaggaagccttaataagaggttttgaagttaccgtatttgtgagaacacagactatatttgatcatcctcatgtcacaattattagaggagatattaatgatcagaatatgcttaagaaagcgattcaaggtactgatgctgtactttctgcactaggacctacttcatttcatcatccaatgaatacacctattacaaaggctatggaatctattattaatgtaatgaaacaagaaaatattcagcgtttaattgccatctcaacaggaaccgcaaaagatccaaatgatggttttgactttaaaatctggtttccagctctattcattaaatttttaatgcgtaatgcttatacagatattattaaacttgctagcgtaatcagagcctcagatctcaattggactatggttagagtagcatttttaacaaatcagtctgtttccacccatttaaatattggtttatatggccatacaaagcacaaatggtatatttctcgacaaaatgtcgccaaatttatacttgatcaaatttctaaaaccgactttattcagcaagcacctggtattagttga

SEQ ID NO: 64386 - DNA, 459 bp, Acinetobacter baumannii
atgaaaaagaatttattaattaccatactaattttacttttcatcgttcagtccttattaaattattacttctggaatcgtacaaaaacacccaaaattcatgttctagaaaaacctttgcggataacatcaaatttcgataattatgcaccatacacaattcttccagcaggtactgttttatatgatgatagtgattctttaaatcgaagagttatagtttatttcaatttacaaggtgtagattttaaattcgaagaacaagacccagctatcttaaaacaacctagtgaagtcagtgctataaggtcgacagacttgcctgatttactaaaagaaattcctctgactagaaaagatatttatttaattattaaatatgatgacagtataaatgactccgtacgttctattctctttaaaaaatataaaattgatccatcagagtatgaaaaataa

SEQ ID NO: 64387 - DNA, 516 bp, Acinetobacter baumannii
atgctatttaatttttttaaacaagaaagtaatcataaagaagaaaaatcttctccatatttaacgaaagaactatcttgggatgaagaaaaaataatagcagttcgatttaatggtacacaacggactatatattataaaaatattatacgaatagaaattattattactgatctttatttacccgtacctaaatgggttatacaagatgataatttagaagatcatacgacaatagatttttataatgacataaagccaaatatcaatgatttagttgttgatatgtttaataaaaaaataaaaaattatgataaccagaaagttcatgaaaaaattatagaggcaatgggggcaagtagtggcttgtttcatttatggagcagagaagatcttgatcaggtactaaataagatatgggataataataaagataaaatagaagctgatattaataaggctataaaagatgtagaagagcagggaaaaagtaggcagtggtggaaaattttttaa

SEQ ID NO: 64388 - DNA, 1119 bp, Acinetobacter baumannii
gtgagttatacagctcgtttaaaggtattttgcgacaataaagaaattctgaccaagctaaattatatttttacaaatacgacaacaaaacagaactatggaggtaagcttgattcgaatggatgtacgagagtttatccatgtaacaagttagatctaatttttattgaactccttttaaataactcaaagctcgcaagaatccgtgtgcctgcattagaaaatggagagtttaataaatccacctttcaattaaaaacaacgagtggctcaacaaaacaggctgatactaataaagtacctgttaaagtaaaaaatgaacttgaaatagcattagatagtttaaatggtactgctgtttattttggaaataatttcttagctcatgattctcatctgcgtgaaatttatatccgtgaagtgaaaaaaatgagtgaccgctatcttcacttagtcaaagaagggaagatgacggtaaaagaagcggcatcagaggcaacaagtttaagaaatgaaatattagagggtattcgaaaacgtaattcaccagtggggcgtgctatagcagaaaaagaaaaactgctcacaaaaacaatggatgaattcatggagtactatgcattacaagagaaaaaccccaaattgtttgatgagcttaagagtaaggggcgtagtgcgatagatagttatgttaaggcatctgcaaaacaaggaaaccctatttttaaatcgcttaatgattcacaaaagaaccgagtgttttacagcatattaaagggttcagggaaaacgaatgctgggtttaattctaaaatctcatttatgaaatggggggggagagcaattgtagttttttctgctgcttatgcaggttatgaaatctataatgcggaaaataaagaaaaagaaatttacagacaaggcgcctctattggtgctggcattgcaggaggtgcggcaggtggagcaatagcaggaggaatttgtggtccaggatcacctatatgttctggtattggtatcctcattggtggtgcaattggggggattgctgcatatcaactggtagatgcatttgataaagaattagaagcatttactgcttggactgtattttaa

SEQ ID NO: 64389 - DNA, 417 bp, Acinetobacter baumannii
atgcgtactagcacacaactttttccagaaaacaaaatcgtgactgtggacgaccttgttacagcacgtagcgaagctaaaaatgatatgggtgatataaatgccctactctctgcaattgagctaagtcttgttgaaaaacttaaggaccataacttaagtaagtttgcttttgataaaacttttcgcttgattgatattgccaaaacacacgcagatctgtctcaggattatcacaacggtgagcttgctcaattaactggtggtcaataccaacttgatgagctgaaaaataatattacacacctagaggtcgtcccagagacgcaaaaaatcaacataaatcatttagctccagcgaatgcagccatctctaaaacacttacagaaggttttaaaaatgacggacggcgttaa

SEQ ID NO: 64390 - DNA, 327 bp, Acinetobacter baumannii
atgaaaccagaacagtttattcgtgagtttggggtagataaggcgagagaggttgttgagggtgcgccagatctttcacttttctatgacttggaaaagcaaaaacatgtgcttaaggaaagtacatcaattgcaatggccttcctaaagaaccgttttattcctattgaagacctcaagcgccttgtggagtcggttgagctaattgaagaattgggtgggataaatcttgtgaaagatcatggacgaaaaggtggactatatggcggaagagttattacagccatccgcgaccacgaatcaatatatggaggcggtcatgtttga

SEQ ID NO: 64391 - DNA, 300 bp, Acinetobacter baumannii
atgaaactccaaacattcaagaacaagttgcagacgctacaggcacccgcacaagctcagaagaaccctaaacaaaacaattggggttctggtcgtggtggtcgtccgtggcgccgtcttaaagctaagatccatttgcgtgatgagtggacttgtcaatgttgtggcattgtcactaaagacttagagcttgaccatattgtgaatgtggcaagaggtggaacagatgatgaatccaacctccagtctctttgtgttccatgccataaaaagaaaacccaacaggagagcagactatga

SEQ ID NO: 64392 - DNA, 4980 bp, Acinetobacter baumannii
atgacagcgatggtaaaaggcgcaaaaaagggaagccagcaaccaagacaaccagtagttgcaccagactccgcacaatctaaaacttatataaaagagttgattggtctagcggagggtgaggtcgaaggattagcaaacggctatcaatcaattttgcttgaagatactccgttgcaagatgaaaacggcaacaagaactttgaaaacgttactgttaattttagatctggaacaaacgatcaagaatatattgaaggcttcccggcagttgaaaatgaaatcccgattgacgtagagcttaaatcatctacaccgtgggtacgttcttttaataaccttgatcttgatgcggttagattacgattacgttgggggccactacgaaaccaagacccaacaacgggtgatgttactggctatacaattgagtacgctgtggatttgcaaactgatggcggtgcatggtcagaagtattaagagcaaaaatttcagataaaacctctgataactatgagcgtccacatcgtattgacttacccaaagccgattcaggctggcttgttcgtgttcgccgtatcacgccaaattcaacgtctgaatatatcagcgacaaaatgtatgttaaggctgtcactgaggtaattgatgcgaaattacgctatccaaatacagcattagtttcactgcaatacgatgccgaaacctttggtggctcagttgcaaaattagcggttgatttgaagggcgtaaaaattaaagtcccaaccaactacaatcctgaaactcgcgaatatgttggcatgtgggatggtacttttaaacgcgcatattcaaataacccggcatggatttactatgatctttgcacatctaagcgctatggaattggtgaacgaattacagatggaatgattgataaatggtctttataccgtttagcccaatattgtgatgagttagtgccagacgggttgggcggccaagaaccgcgtttcacatgtaatgtttatcttcagagtgccgaagatgcttatagcattcttacaaaattagcaggggtatttagggcaataacttattgggatggggatagtattgtttgtgatgctgatattccacaagatacctatttcacatatacccgcgcaaatattattggagaactggactataacggtacacgcgcacgggatagacataatgcagtaaaagtagcttgggataacccagctaaccattataaaactgaatatgaatttgttcgcgatgaaaaagctatttctgaaatgcgtcaagttcgcttgcttgaacttgatgcttggggctgtacatcacgcggacaagcacaacgagcaggactgtgggctttaaagtctgaacaacttgaaacacgaactgtgacctttaaagttggcttagatgggcacatccctctgccgggtagagtaattgaaattgctgaccatttatttgcaggtcgtgctaacggtggccgcatttcagcaatttcagcagatagaaaaagcattactcttgatcgtgatgacgttgttgcaatagctggggaccgtctagtaattaatggtgaaaacgggaaagctcaaactcgtattgttcaatcaattgcaggcagagtcataactgttaccgtagcttttgatgaaattgcgcctcaaaacgtttgggttattgatgctcaagatttggcaacgcttaaatttagggttttgtcagtagttcaaagtgattcacatcaatttactattactgcgcttgagtacaatccgaaaaagtttgatgcaatcgatcatggtgctcattatatcgatgtgccaatttcaattgttaatcccaatattcaagaaccagtttcaaatattgttattacaagcgaagatcgggtagatcaaggtattaatgttgccactatggttgtgtcttggacacaagcaaaaggtgcggttaagtatcaggttgaatggcgcaaggatgatgggagttggcttaaattaccaatcacgggtaataattcaattgaggtgccgggtatttatgctggtaactatcaagcaaaagttacagcggttaatgcttcggatatttcatctttaccgacttattcagttgtcactaagcttaatggcaagcaaggtttgccaccagctttagcgttcatccaagcaacaggtattttgtttggtatgcgcctaaattggggttttcctgcaactggcgcacttgatactgcttataccgagattcaagtttcaccagacggaacaagcaacattgctcaattaggcttattcgcttatccaacaacgactcatacgattcaaggcttgcagccaaatctgacgcaattctatcgtggacgcttgattgaccggataggtaatattggcccttggtctggctggacaagtgcaacaacttctgctgatgcttctgaaattttagaaattttagaaggtaaaatttctgaaacagaactgagtcaagacttacaaattaagatcgatcatattgaaaatattgatgctcaaattccgggtattcttcaagatattaaaaatacgaaagatcaaatagcgcaggaagttagagacagacaagcggaggttaaagcaaccagagaccagattgagcaagaagtcattgatcgccagaacgctattcaacaagccaaagatggtttatctcaacaaattattgatggtgatgaaagtgttcttgaagttgtagaaacggtcaagaaatcaagtgaagatggtattgcagcagttcagcaggacattaaagttgttgcaaatgatctttcacttgttgctgaaaaaacagatggcgtttatgcacagcttaatccgccattgattggctctgaatcagatttgattggtaatgatcagggttttgcgggtacatggtctgaacagtctgcacgtattgaaggtgatcttgcactaagtaaacgcattgatacgacagttgttgaaattgatgatttacgtgcttacgcacggcaagaggtggaggcgcgaattgagggcgataaagtaacagttcaaaagattgatacttatattgctagtaatgacagtgctcttgcattggttcgagatacagcaaaaacagcagttgaacagtcagcagcaaatgccgagtcaattaaatcaattaatattgctttagaagacacggtaagtaccggtgcgcttgagcaagttaaatctgacgtcaaggaagttgataagaaaatcattgctcaaacaaccagaattgatggtgtttacgctcaactcaatccgcctttgattggctcagattctgatcttattggcaatgatggcggttatgctggcgtctggtctgaacagtctgcacgtattgaaggtgatcttgctgtaagtaagcgagttgattcgaccaatgcagaattgggtaatttacaagcttatgcgcgacaagaggtcgaagcacgaattgaaggcgacaaagcaacaattcaaaagattgatgcttatattgcaagtaatgacagtgctcttgcattggttcgagatacagcaaaaattggtgttgatcaatcgtcagcaaatattgaagctatcaagaacatcaatattgagttgaaagacaaagcaactactggtgacattgttcaagttaaatctgaaatcaaaaatgttgatgacaagattgctgcccaaacgatcagacttgatggtgtctatgctcaaattaacccgcctttaatcggctcggaatccgagttaattggtaatgagggaggctatgcgggtgtctggtctgaacagtcagcacgtattgaaagtgatttagcacaagcaattcgcacagatacggttcagactgatttgaatggtaataaagctgctgttcaagaggtcactaaatcagtcaatgggctatatgcacaaaagtttattaaacttgatgtgaatggcaaaattgcaggctggggtggtgccaatgatggcgtagagtctcagtttatttttaactttgattctatcgcaatcggaaacggtagtaatggtaccgtatcttatccatttattttccgtaccacttcatttaccgatccagtaactggaactgtttttccgcctgctgcttatttgaaagctgcaattatggattatcaatccgttgatacatctcatattaaagacttggctgtgcaacgcggtaagattgctgatttggcggttggaagtgctcaaattgataatcttgcggtgacaagaggtaaaattgctgatcttgcagttgatactttaaagattgctgataatgctgtaactgttccggtatcagcatttgctgaaatttcagtgggtgttgatactgaatatgtaactattcagacgttaaatgtgccttcagatatggggcatacggttttaacttttggcgctgtctttagttttactggctacagtccgaaacagcaggtctattgccgagttctcaaaaatgatcaagtcgtttttgaggatctggaagttcacttcattgagcacacttcagttgcatctattactgatgcaaatggcatgcacaatcataatggttctgctgtcagtgtttcgggtaatacagggcaagatggctcacatagtcatagctacaatgtgaatggtacaactggctctacaaatgcaggaggtacattccatagccattcattcagcgcaaatggaaacacaaacagtggtgggtcacacagccatactgttagtttaagtggcaacgtgactatgtctgatggtggtgaacatagacataacattttagtgactggtaactcgcgtagtgctggaacaattaatatttcaagacacgattcaacaggaattgcggggacattcaaattgcaattgagagttgttgctggtggttccatgaatgtgtctcaacgttatattcatgcaatgacgatgaggaagtaa

SEQ ID NO: 64393 - DNA, 918 bp, Acinetobacter baumannii
atgaaccttgatgatttagatcttttatttgaagatgctttaaagagtcttagtccaaatgattttataaatcatattgaaaaagcactagattgctatcaagtactaagcttcaatttcgaaagaggttctgttttttggagagctagaaaaattcaaagtaacttttacaagcatattgatgatctaagctatccaccaaaagatttagttaattgtggccgaattaatgataaagaaagtccttttttctatttagcatctagaagagaaacagccttagccgagataaactctaaagaaaatgatataattcaattagcagggtttaaaataaaagaaaatgaaaacctacgtattgcagtagtgggcgagttttggaatgtttttaaaaccggatatgtaaaatttctaggtcaagatccaaaaggatgtatcaatcgattaatcaactcttcttctaaagacctagcaagaaatctaatttatattgataaatatttttctgaaattcttgctgatacaaaggcagtagaaaatgaatatttattcactagaactttatctaataaactactaaaaaaggcacatacggatgcaatagcttatccaagtgttaaagatgctggagcatataatttagccgttgaagctaacaaatcagatatcgtgttcgaaaatgtaatctgtttaactttaaaaataaaaagtataaaaaagtggggaatttatgattatagaattctgtctgcagcagaaggtattgatgaaaatggaaattttatttggcataaaaatacggaatttactaaaacccctatctataatttgacaaaaagtgaaatggataaattaaaaaaaatagataatgtagatttatctcattttaattctatttctaaagctgataattattga

SEQ ID NO: 64394 - DNA, 1344 bp, Acinetobacter baumannii
atgcaaaaattattctcattaaatgagcttatagatgcttcaaagaatcaattaaatattcatacaatcaaagattattgtagacgcggggaattacacccttgtgtttattttgaaggaaatattgtttgtattcatgatgaacgttttcaaaatagtattactaaatatgatcctgttgctcatatagaaactgtaagctggactagaaaatttaaaggatatatttttgcctcaaattttatagattatattggctatacggatcctaatacttttgacgtcttttttaatattgaaaaaattattgagcatattccatcaattaacgattttcccactctgcaaaaagatgaatatctaaaagcatttcctccactaatagatgatgatatacaagaaaaaagatggttatatgaaatcaaagattttaaaggaaatgtttttaaagctaatgaaatagtctttcatatttctgaggttgaaaaactattgttgcaactcaatggtccatcaaaaaatcctattaagttgctaaatcattctgataaaacttttctttctagtatcttgaataaagaagcgttcactgctttagaagcagcttgtctaatgaccggtgataatcctcaagccttagagttattaaaagaaaataatttagagaattatcaaaaacactaccccgagaatgaaaaagctctgaatctcattttgagagcagttgaaatgaatgttctagaaatgaaggataatttaattgatgaattacttctaaaagaattcttggtgactagaggatatattatcgaaaaatttaataaatccagttatgaaggtaatcatgtcatgtatactcctttaatgcgattgggtaatcatgaaccaagacctattccaagtgtgatagacttttccgtcatggaagacccattatcagaagataattaccgtgtttttaaagtcaaaaaattacaagaagaatatgggaatctactaaataaattacatctaactgaacaagaaaataaagcacttaaagaaagaataaagccaactgatagaaacaatgaaagttatgaagtactctcaggcttacaacggaaaaatcaattcaataaagacaaacaaggaatgatgagaattattgccaagtatctttattctctagaacaaaattcagatctaaaaccaattgatattgcaaaaaaagtatatcaggaaatgctgaattatgtagataaagaggatttacctcagaacttagagactatcaaaagatatataagtgatgaaatacctagtaagaataaaaaaccaggccgaccaaaaactaaaatttag

SEQ ID NO: 64395 - DNA, 168 bp, Acinetobacter baumannii
atggataaatcccaagttccagttaataaagattcagttcagccaactataaagctgaaaccaacttcacaatcttctacatatgtagaatctgtccgtataacgccagatcgactcattaatgccgttatcaataatattcggcaaggagtatctgatgagcattga

SEQ ID NO: 64396 - DNA, 180 bp, Acinetobacter baumannii
atgatgaaaacaagaaatgaaatattacaacattttagcaaaaatctaggccagagttgtatgaatcttgaggactataaacatttaaaagattctaaaaatttagccactgctcaggctcaaatttactcacaacaaattatccaaaaggttagtcaagctcaactaaaaaaaacttaa

SEQ ID NO: 64397 - DNA, 183 bp, Acinetobacter baumannii
atgaaaaaattagagaagttatttctatcgggattgttgggttttccttttttagttgctatctggtacggcgcaaataaaggatatatttatgctttctatggatatgttgctttgtttttaatgggaatacttataacggctacagtggtatttttagttttaccttcgaagcaagattaa

SEQ ID NO: 64398 - DNA, 327 bp, Acinetobacter baumannii
ttgaaaaagattctattcggtttggtcgcaatggtagcaccaactgcgttgtacgaaatgttgttggaaatttttatcactttaggggtacaggataagcctacaatttccatactaattgtggccttttatactgttttagcgtatgtattgaccgttttagtttatgaaaatgttgattcagataaaaaacttattactactcttatggatttattaacaggcggcattatttttctggtagcctatcaaagttggcccgctattttttacattgtggttgctcctgtaattgttatgtcttggcatagacgatcaataaaatga

SEQ ID NO: 64399 - DNA, 555 bp, Acinetobacter baumannii
atgagatcaattgttgatctttgcaatttagccctgtcgcatctcgcgcagggctatgttgtaaatgaacttaccgaaccaacaaagcatgcaagattatgcaacacgttttatccaatatgccgccgagagatactggataacgagcatcaatggacgtttgctgtcaagcgtgtccgtttgaatattgatgtgggttatgagtttggcacagcatttgttttgccaagtgactatgtacgcatctttcaacttgaatcaggcaatcgattttttgtagaaggcaatcatttatttactgacgatggcgccccagtcttacgatacgttcacgatgttaaagatttggcgttaatgactgattcattcaagacagccttatcatatttattggctgcacgaatcgcaggcccattgactcaaaacgaacaattacaaagaaaaatggagtcaggttttgctatcagtttgaacaaagcagtgttcattgatcttcaaaaacatcgtattgaaccccgcccagaacatacgggctcaatgtttgaggcacgataa

SEQ ID NO: 64400 - DNA, 324 bp, Acinetobacter baumannii
gtgtctgtaaaaattactggaaatttaaatggtttaaaacgacttactaaaaatgctgaaaagttaaaagcaaagggaagcgcttcttttactgaaattgtgaatcctgattttattagttctaatactgattacagcgatattttcgatctatttaagcatgcagggtttgaaatagagacagtcgaacaacttgaaagtattcctgaggatgatttagataattttattcgcgaaaatactaaatttgagagctttgttgacctgcagaaaaatgcggcggctgagtatatgaaaaaacagttgtttgatggtttaaagtaa

SEQ ID NO: 64401 - DNA, 174 bp, Acinetobacter baumannii
atggatttaattagccgtttggaaatgacaaagaaagcgaatatatctcttacatctaaaaatattcttaaagttttagcgagtgataatctaaaatttcaaggcactattctgcattttaagtatttaattaaaaagaattcagatcaagtcatttctgatctattaaagtaa

SEQ ID NO: 64402 - DNA, 423 bp, Acinetobacter baumannii
atgcaaaaaattattttttatatcatatcgctaattctcgtattttttatatgtctaggcctgtctattataattaaagatttttatgatatagagggtgattatttatcagctttctctactctagtagcaggcacagcattcttcttagtagctgattggaaggagcagtctttcttaaatttatttcaacagacatcaagaaaaacaacatctctttgtgatgaattatttgattcatatgataactttaaagtctttttatatgaaatgaaagacaaagaattgacaagtgaagaacaagaaacctttagaaaattaagtaaagtttttatgaatacgattgataatttattattagaaatggatcagcaaagattattactaaaaaaaattaaaaaaagaacaaatgaatataagtag

SEQ ID NO: 64403 - DNA, 735 bp, Acinetobacter baumannii
atggcaaatcaattaaatagttttgtagaattattagataggctgggtttacctgaagaaattaagaaaacttgtataattattatcgcatttattttaattgtatcaatgcttattactatcctagagaaaattggaattttaaaactcttctctatctttttttctaaaatttttactagtccaaatacaaccgaagacgatattaaagcattaaatgagctaatagactttgaaccattaaaagcagaccaaaccaagaataaaccctacgctttatatgccaactctcttaaagaattagcacttttgaatagctactttaagagtaatttaatcgatatttttacactaaaatatttatttactcgcaaagatcctaagcgagccaaaagactatattctctgaggcttgacaaatatttagaaaaatctggagacagatatattctaaaaaaatgggtaaatttctgggtagtatatattccactttgcatatggctattcatttattgttacttagcttttatattcttaaaagctctatttttatcaaaagaattccaaaataatgaacctattgctctatggtattatttcttgattgttgttgtagttcttggaactggatggttaacaagttttctcctacaaccttggcaagccaaaacttttactaaacttaaaagtaataatccacaattaagattacaaagaaaaggttataaaaaataa

SEQ ID NO: 64404 - DNA, 534 bp, Acinetobacter baumannii
atgaaaccagcaattgttatcggcaatactactgatcacggtggcatagttagtactggagatagtacatatctaattgatggtaaggccacccatgtcgagggcatgactcatttttgccctaaatgtaaagttactgtcaccgctctctcaagtagcccgcttgttgtgattaatggtcgtgcaataattgtcgctggtgataaaactagctgtggtgcaaccttcttaccaagtcagaatttattcgttcgtgatcaaggcagttcaagcggatctggaagctctacaacaaacgatagcttggttcaaaatacagaaaaagaaaatagtgtcattttcaaatttaaagatccgaatacaggtaaaccattaaccgattttccatatattcttactcttccaaatggtgaacagatagaaggtaaaactaataaagcaggaaaaacggaacttactgtgaccggcgtaaaacctgaacaagtcaaaatcgaaaccttagatctttcagaaccaatgccacctttggagtaa

SEQ ID NO: 64405 - DNA, 783 bp, Acinetobacter baumannii
atggggaaaacgggaaaatatatgtttaaaagaatattatttgaaatatatgaacaagaaaggaatatatttattgataatcataagttctattataagcaagctcagaaaagattactttctcaatttaataatctagaagaagaaatcaatgaaattgctgaacaacaattgaaagatttagaggagttttttgatcccgattatcatgacccagatgattttttggaaagagcttatgaaaatgcaaatgaacaattaatactacttaatgagatgagagatcaaactttattaagtgtattagctggtatgtatcaccaatgggataaagccttaagagaatggatggctaaggaaactagacactggggtgggaaaaatgttgtttataaaatttggaaaattgatattggtaaaatatttgatttatttgaagtaatgggatggaaaattagacaggaaaacttttttgagaaattagatgcttgccgtttaatagttaatatatacaaacatggaaatggcgactcattaaatgaattaagaaaaaattatcctttctatttttatgattatgaggagaatagattcgaaattgatggatggtttgatcatacatgtatttccctgactaatgaaaatcttaaagaattttatgaatcaattctggagttttggcagaatattccaaatagtttttttgtttcagatgaattcatattacctaagtggcttaaagatgcattaatagtagattctactgccgataaaattaaatag

SEQ ID NO: 64406 - DNA, 396 bp, Acinetobacter baumannii
atgaagctattacatgaaaaaatcatgaatacgatcgaacaagctaaagcagagccttctttaaaagaacatgcggatcaattagaccaaaagtggcaactcatccgaaatgtaacagagaaattgcatgccctaacagatgtagaacttcaactggcaaatgccgccaattatctggaagcttttggacatcttgtggtgggatggttatggcttgatcaagcggtagtcattcataaactcatgcagaactcaacagatcctgattttctgcgtgggaagcttgccgcgtgtgattatttctttggctgggaaatgccgaaaattatgagttggttagcggtacttgatccggtagagacgactccactcaatatgtcagaagaatggttctaa

SEQ ID NO: 64407 - DNA, 654 bp, Acinetobacter baumannii
atgaaaaaattaatatttgcactcagccttggtattccatcattattcttcacaagtaatgtacaagctgggctgaccattcctgtgggtcttaccaaatcagattcaatacatacatttccagaaacgttaagacgagatttttgggagcgattagggattaaagctgaggccaaaggtactgctacagccattgatgaaccgaatattggcggaaacccaacaaaatttaactatcctgtgagcagtattgtgattggctccaagatgaaaattgtactggggcgagcaaaaggtacagtgatggtatattcacgtattgcagaagatggaaatttgaagagtttaacgctttctaatttttcaattgattatgttcatcaatatgttttagcagatgcaacatatggtaaggataagagtaacttacaattaccaatttttacttttaatattgaaaaacctttgaaatttcattatcagtttccaattggttttaaaagcgatgagaaacttaatcatttatatttaacacctcaagcgaagactgcttataaagaggctttagctttacctgaaacagcaatacctttattagatttagattttggtacattaactcaaaattcatcttcaaagattcggtttaactaa

SEQ ID NO: 64408 - DNA, 696 bp, Acinetobacter baumannii
atggatggagtggttaagatggataagaaaatacgattagccgaaacattaaaacgccgaattattagtatggaattggcaccgggcgcaattgtagatgaaatagccctgagtgaagagtttggaatctctagatcacccgtacgtgaactaatccgtcaaatggcagctgaaggctatcttgagcttgaagcaaatcgcgctgctcgtgtttcttcgatgagccatcaatcactacgtaatttctttttagctgcgccacttatttatattgcaactacccagttggccgcaataaatgcaggaccaattgagattaatcaattgaaagaaatccagcaacgattccgtcaagcgattgatgaaaatgacttggaaggccgtgtttactataacaaccaatttcatttagaaataggacgaattgcacaaaatgcatatctcttacctagtctagaacgcttgctcattgatcatgcacgattaggcaaaattttctatcgccaacctacttcaacagatatgcaagaagacctcgacacagcagttcttcagcatgaccagattattgatgcgattgagcgtcacaacgcaggtgaagctggtgagctgatccgcgtgcacatggatttatctcgccgtcgaatgacagaatatgttattccggcaggtattgatgttccacttacttattaa

SEQ ID NO: 64409 - DNA, 1326 bp, Acinetobacter baumannii
atgactaaagttacagccttgcctgccgatgaccaacgatgtgcatggtatcacttgagcccaaaacgaatggttaaaccaagccatactggcaaaagcgcagcacgctgggcagtcattggtgcaggatatacgggcttggccgcagcacgtcaattagcactcaattttcccaatgatgaagtgatcttgattgaagcacaagaagttggttttggcacagctggtcgaaatgcaggttttgcaattgatcttccacatgatattggtgctgaagactatatcggtgatatcaatattgccaaaacgacattgaagctaaatttgttaggtcagtctattctgcatgacttagtaaaaaaacacgcaattgattgtcacatgcgtccaagtggtaaatatcaaggtgctgtagaagaccgtggtattaaggttttggaagcctatcaacgtggtttagataaactcgggcaagagtaccaagtcattaatggttcggaattgccaagccatattggaacatcattttataaaaaagcactgttcacaccaggaacaatgctgcttcaaccatcagcgttagtcaaaggtttagcagacagtttaccgtcgaatgtgacgctatatgaaaatacagcaatcactgaagttgaatacggcgataaagtggtattgaagcacgaccttggtcaaatcactgcggataagttgattttggcgaacaatgcttttgggcaacgttttggtttttcacagttaaaacgcaccatgttgccagtctttttatatgcaagtatgactcgtcccttaacgccaagtgagcaagctgaattaggcggtaaggatttctggggtgtgattccatcagacccgtttggtagtactgttcgtcgtacccatgacaaccgcattttaatgcgcaacagttttagttttaacccaaatggaaaaccgaaaccgcattgtctagagcgttttatttataaacatcagcgttcttttgataaccgttttccgatgttgccagacgttaaatttgaatatacgtggagtggttcactcgcattgtcgcaaaaccataaaggcttctttggtcagcttgctccaaatgtttatggtgctttgtgttgtaacggtctaggaattacccgcggaacagtcacaggtactttattagctgactggattgcaggccagcgtagcgacttgattgattttcttttggaaacttcaggtccaaacaaagttccgcctgagccattcttatccattggtgtcaatgcaaccttgtggtgggggcaaagaaaagcagggttagaagagtga

SEQ ID NO: 64410 - DNA, 1332 bp, Acinetobacter baumannii
atgacaacgaatcatatgtcaattgataatgtaccagtaaatggatttcatcagttattgagtattcgtacaggtggcggttggctactggatggctatgttctaagtattatcggcgttgcattaatgcaggccgctgcgcaattacagttatccaatttttggcaaggcatgattgcagcatccgctttattcggaatgtttttgggcggctttttaggtggctggctaagtgattggatagggcgcaagaaactgtattttattgctccaactttatttgttttatgttctgtagctcagctttgggctgattccgaatgggtattatttttatgtcgtttcatgatcgggatcgcagtcggttttgaatatgcggcaggcgggtcattactgactgaatttctaccgaccaaagcacgtggccctcgtttagcaatgcttacaatcatgtggttttttggtgcgatgctagcttatctcttcggcaatatgattttaaagatggatcttaacgaggcttggcgttgggtatttgctagcccagctgtgattggtctgattttgattttaatccgaattggcacgccagaatcaccacgttggctcatcagcaagagccgtaatgctgaagcagaagtcattattaaacaagtatacggaccatctttttcacttgctaatgtgcccgttcaggaagaggttaaaaatttatctcttactcaaatcttagcttcgggctatggcaaacgcgtatttttctgctcgatgttttggatgtgtgcggtgattcctgtgtttgctgtctattcctttgcacctcgtgttttagacgcaatgaatctcaaaggctcatgggctgaatatggttcagtggcaattactttaatgttcgtggtgggctgtgtgattgcaaccaaactgatcaatgtgatgggtcgccgtaaattgatcattcacagtttcttatggtcaggtttggcattgctaggtctaggtgcatttgctgatggttcaaaaatgttggtcttggttttgttctgtgcatacgccgtattaattggtggggcgcaagtcttggaattggtttatccaaatgaactctttccaacagaaatgcgtgcgatcggcgtcggcatggcaacttcattttcacgaatcggcgcagcagtgggtacatggctggttccgatgtcattagacacgattggtattggcaacacaatgtttgtggcagcaggcgtcaccttacttggtttgattgtttcgattatgacggcaccagaaaccaaagggttgagtttggaacaagctacttctttgaaaaattaa

SEQ ID NO: 64411 - DNA, 909 bp, Acinetobacter baumannii
atgacattttttgaaggcatttatacaccagcaatcacacctttagctgctgacggttcaattgataaagctgcttttgcagaagttttagaatatttgatcgatgcaaaagtacacgggattatcgtagcagcaacaactggtgaatattacgcacatactgccgaagaacgttatgaccttgctaaatacgcgaaagatgttattggttcacgtacctcattgatgattgggacaggcgcaattcgtaccgaagattcggttgaatatgcaaaagtggctaaagaaattaaagccgatagtattttagtgactatcccgccttatgcattgccaactgaaaaagaagttgcagctcatgctttaacaattgataaagcagcaggcttaccaatcatgttctataactatcctgcacgtatgggcgtgagcatgggtaaagagttttttgatactgtatttgccgagtcaaagaactttgttggcattaaagaaagttctggtgatatgaaccagctacatatgttggcgcgtaattatccattctttgaaatttcttgcggttgggatgatcaggcgcttgagttctttgcatggggcgcacgtagctgggtttgtgcgggttcaaactttgtgcctcgtgaacacattgctttatatcaagcttgtgtaattgaaaaagactttgataaagggcgtcgtattatggctgcaatgatgcctttaatggattttcttgaaactggtcatttcattcaatgtattaaatatggttgtgaacttaatggtttaaaagcaggcagtgttcgtgcaccgttacaagatatggatgccgaaaagaaacaagctttcaaagtgattgtagaagagcttaagcgtgaagttgcagccattacaggaggtgtttaa

SEQ ID NO: 64412 - DNA, 1497 bp, Acinetobacter baumannii
atgtctgagcttttaactgcatctgaatatgcaacgattgccaaaaacttatcgtttcagactttagcgtatattgacggtcaatttcaggcatctgtttcaggcaaaacgtttaaaacgaccaaccctgcaacaggtgagttacttgctgaaattactgcatgtaatagccaagatgtggaccttgcggttgctaaagctaaagcagcatttgatgatggccgctggcatcgtttatctccgaatgagcgtaaacacgttttacttaaatttgctgatcttctagagaaaaatacagttgaacttgctgttatggaaagcctagacagtggtaagcctgtaagcgaatgtcagttaactgatgtgccagaaatgattcataccattcgttggcatgcggaactgatcgacaagatttatgacaatacagcacctgtaggttcagatactttgtcgcttgtggtgcgtgaagcgattggtgtggttgggcttgttttaccttggaatttcccattactgatgttggcttggaaaattgcgccgtctttagcagcaggctgttcggtggtgattaaaccagccaaggaaacgactttaactgcgctgcgtgttgctgagttggctgctgaggctggtattccggctggtgtattcaatattttgccgggtggtggacgtgaagtcggtgaaccactaggtagacatatggatgtcactatggtgagttttaccggctctactgaaacaggccgtctatttttacaatatgctgccgaatcaaatctaaaacgtgttgttcttgagtgtggtgggaaaaaccctgctgttgtgatgaatgatgtcgatgatttagatcaggttgcacagcatatcgtgaatggtgctttttggaacatgggcgaaaactgttctgcatcttctcgtttaattgttcattctgatgttaaagatgagctattaggattaatcggtatacatctgaatgactggaaaatgggtaacccacttgatccagatcataaactgggttcgatggttagcaaatcacactatgaaaaagtgaagtcttatatcgatcaggcaaaagctgaaaaacaaagcatcgtttttggtggtaacactgaacaagatattttcgttcagccaaccgtggttgatggcattaaggcgacagataccttatttaaagaagaggtctttggaccaattctgtcagtgaccacgttcaatacaattgatgaagccatcgcacttgccaatgattcggtttatggccttgcaggttcggtttataccagtaacttacgcaatgcgatcaagctttcacgcgctattcgtgctggcgtagtgaccgtgaactgttttggtgaaggtgacattacgacaccgtttggtggctacaaagagtctggttttggtggccgagataaatcgatttgggcgcatgaccaatacacagaattaaagaccatctggattgatgtgtctgagtcttaa

SEQ ID NO: 64413 - DNA, 1176 bp, Acinetobacter baumannii
atgaataatgtctatatcaaaaaagtgggaatgggcttgtttgtagtcggtatgtctacacctgtttttgctggtgtaactttcggtgacccaaaaactgaactaggagcagtcacagtttcgggaactttacgggccaactatcaagataaacactacggcgaatctgcttctgatcaaaagattaagttcgatgcggcaattctaaacgtggcttatgaatcacctgactggtttggtaaagttcaataccgctgctatcaatacgataaattttgtgatttctcgactttggtacaggcctatgcaggctaccgcttaaatgcgaccgataatattacggttggtttacaaccaattccttttggtccgggccgttattgggacactagtttctatgcgggtattaacaataccatgggtctgcaagacgctttagatttaggggtgaactatcactttgagatgccaactgcgaccaaagttgatctcgcatatttcgcaactgacggtggtaactaccacgggacaagtaaagattctgcgcgttataccgcgaatgtagtcacttcatctgatccacttaaaaccaatctaaatgaaaaaaacatgtggatggcgcgtgttgatcaggatctcaagtttttaagtacagatgatttaaaagtatcagttgggggaagctactggtattcagatattgaaaataaaaagacatctgccgatggaaatcgaaacacatgggctgtgtttaaccgtatcaactataaaaacctgaatgtggtgcttacaggcggaagacagtcgatgagtaataaagatgccttaagtccagcaatctctacttttggttcgtttgatagtgaatacgacattgccaacaagggttatttctacacagtagacacgagttacacctttaagaatgttaaagattcgctcaatgttacgccgtatgttgtttttagtggttttaacaagaaagaaaatggatttgatgactctcagcgcaacatcgttggtgtggcttgggactacaaaaatgtttcgctctataccgaatatttaatgagtaaaaacgacccatttgtgggtggaacaggcagttcacttgcggcgggcgatgatggtaagtggaacaagctcttaaatgtgatgcttgtttataacttctaa

SEQ ID NO: 64414 - DNA, 3438 bp, Acinetobacter baumannii
atgaaaccaatacgtaaaatcttagttgctaaccgtggtgaaatcgcaattcgagtgatgcgtgctgccacagaaatgggtatccgcacggttgcaatttatgcagaagaagataaatttgccctgcatcgcttcaagtcagatgaagcttatcgggtaggtgctggcaaaaagccaatcgcggcctatctggatattgaagatattatccgtattgcacttgaggcaggggtggatgccatccatccgggctatggtttcttgtccgaaaaccctgagtttgccgaggcctgtagccaagcgggaatccgttttatcggtccaaaaccggaagtgatgcgtcagttaggcaacaaggtaatggcacgtaatgttgcaatggttgcatgtgtgcctgttgttcctgccacatcggcactaccggaacgtattgaagactgtcagttactggccgctgaagtgggttatccacttatgctcaaagcgagctggggtggtggtggccgtggcatgcgtgtggttgaaaatgaaagtgaactagaagatgcaattacggttgcacgtcgtgaagccaaatctgcatttggcaatgacgaagtctatttagagagactgattcgccatgcccgccatgttgaagtacagatcttgggtgatacccatggcaatatcgtgcatctgtttgagcgggattgtaccgtacaacgacgcaaccagaaggtggtcgagcgtgcgcctgcaccttatttgtctgaaatacagcgcagtaaaatctgtgacgctgctttaagactggcccgtgcggtagattacacccatgcgggtacggttgagttcttaatggatgctgaaacagaggacttctactttattgaagttaacccgcgcattcaggttgaacatacggttactgaagaaattactggcattgatattgttaaggcacaaattcgggtgaccgaaggagctgcggttggcgatggcagcagttttattccaccacaagagcagatcaaacttttaggccatgcattgcaatgtcgactcaccaccgaagatcctaaaaatggctttatgccggactatgggcgcctgaccgcatttcgtagtgcaaccggttttggggtgcgggtagacagtggtacagcttataccggtgcagtcattacgccatattatgattctttactcgctaaagtcacggttcgcggtgcaagtggtgatgaagccaatgcccgtatgctacgagctttacaggagttccgtatccgcggcgtctcaaataatctggcatttctagaaaatgtggtaacccatcctttatttacacaaggcacctgtaccacccgatttattgataccacacctgaattatttaaccttaaacctaagcaggaccgtgcgactaagttactggagtttttaggggacattaccgtcaatggacaacctgaactcaaagggcgttcattgcctgaaaccgttccagctccggcacagctaccgacatttaacttaaaccagcctcttccgagtggaacccgagaccagtttaaattactgggtgcagagggtttctcaaactggatgcttgatcaaaagcgtgtattggtcactgataccaccatgcgagatgcccaccagtccttatttgcaacacgaatgcgtaccgcagatatgctggcgattgcaccttattattcccatatggccagtgagctattttcactagagtgttggggcggggcaacctttgatgtgtcgatgcgctttttaaaagaagatccgtgggagcgtctggctcaacttcgtgaagcggtgccgaacattctatttcaaatgctgcttcgctcatccaatgcagtgggttataccaactatccagataatgtcgttcgtcactttattgcacaggctgcacaaggtggggttgacctgttccgtgtatttgattcgctaaatgcagtcgataacatgcgggttgccattgatgcagttcgagagtctggcatgctgtgtgaaacagcaatctgctataccagcgatatctttgacaacaaccgcagatataaccttaactactatgtagatatggcaaagcaactgcaaaaagcaggggcgaatatccttgccattaaggatatggccggtatttgtaagccagccgcagcccgtgaactcatcaaggcattgaaagaagaaaccggattgccgattcattttcacacacatgacaccagtggtattgccgcggccagcattttgtctgccatcgatgctggcgttgatgcagtcgataccgccatggatgccatgagtggactcacttcacaaccgagtatgggctctgttgtagcagccttacaaaataccgatcgggacacaggactcaaccctaacaacctgcaacagctttctacttactgggaaggtgtacgtcatatctatgcaccgtttgaggcagatatgcgtgcgggtacggccgatgtctatcaccatgaaatgccgggtggacaatataccaacttacgtgaacaggctcgttcgctaggcattgaagaacgctggtcggaagtttccgatgcctatgcacaagtcaacttattgtttggcgacattgtgaaagttaccccaacctctaaggtggtgggtgacatggctttatatatggtgtcgaataatctgaattcagaagatattaaaaacccgaagctggagattgattttcctgaatcggtggtttccctgtttaaaggtgagctcggtaccccagcacatggttttccaaaagatttacaacacaaggtattaaaaggtgcagccccgttaagtgatcgtcctggagcagtgatgccgccagtcgacttagcaggtgaaaaagcaatgcttgaaaatatgttcggtaaacaactgtctgaacaggaactggcgtcatatttgatgtatccaaaagtctttaccgactttatgaagcacaaactgaaatatggcacggtatcaagcattccatcttcagctttcttttatggtttaaaagagcaaagccctgtcgaaattgagcttgaacgcggcaagacactggaaataaagctgttgggccgttcggaagccaaagatggcatgattgatctgtttgtagagctgaatggtcagttacgtctggttcagattaaacaggcaagccaaaaagaagtaacggctcatccgaaggctgactcgacaaatccgaagcatatcggcgcttcgatgccgggcatgatcagtacagtacctgtgaaactgggacagtctgtcaagaaaggcgatactttatttaccattgaagcgatgaagatggagcttgccattaaagctgatcaggactgtgtggttcaggaagttttaatgagtgctggtaagcaagttagaaatatggatttggttttagtcgttcaatag

SEQ ID NO: 64415 - DNA, 888 bp, Acinetobacter baumannii
atgataagcaagagaaatgcaacgttaatagggctcatcgcagttttgctatggagttctattgttggattaattcgtagtgtaagcgaaagcttgggagcaactggtggtgcagccatgatgtatagtgttgcctctgtctttctcctgattagcattggatttccaaaactgagtgaattccctaagcgctatttagtttggggaagtctattatttgtttcctatgagttatgtcttgccttatctattggttattcaaataccaatcgccaagccattgaagtgggaatggtcaattatttatggccagctttaaccatggttgcagctattttatttaataatcaaaaatctaactggttggtgattcccggatttgtgattgccattttgggaatctgctgggtgcttggcggtgagcaaggacttgatttgacaagtatgctcgaaaatataaaagataatccgctcagttatggactggcttttatcggtgcattaatttgggccacttactgtacagtaactgcaagaatcgccaacggaaaaaatggtgtaacactcttttttatacttacagcgctggtgttatgggtgaaatacctcctcattggcggggcgccaatggtatttgacttccatgctgtgatctatcttgtgcttgctgctgcggcaatgggttttggctatgccgcatggaatgtcgggatcttgcatggcaatgtaacgattctggcaggtgcgtcttattttatacctgtgttttcagcagctctggcagcaatcgttttacaaacaccgctttcaatgtcgttttggcagggggcagctatggtatgcatcggctcggttttatgttggcttgccacgcggcagaagcgttaa

SEQ ID NO: 64416 - DNA, 948 bp, Acinetobacter baumannii
atgtcaaaaaatttagcaacattgattggtttaagcgccattctcatgtgggcatctatggtcggccttgttaagcatattactgccgcaattggtcccgatatgggtattacgctgatttatactttcagtgccgtgctattgcttattatttttagagttccaaattttaagttaatttctaaaaaatatttaattttaggtacagccctattcattgcttatgaactttgtttttcatttgcaatcgcttattccaaaacggctcaacaggctattgaagtgagcattgttaattatctctggccaagcttaacagttttagctttcgttgtttttaaagaactaaagtttaattttattattattttaggtttactcatctcaatttcaggcatcatttttattcagaccggaaatggtgattttagtctaaatagtattgttgataattttcatagcaatcctttaagttatattttggcatttgcaggcgctgtcatttgggctttttactgcgtgttaaccaagaaaatgagcaatggacaaaatccaatttctattttctttatctgtgtagcgctcaccctatggattaagctatttatcacaggtcacgcaactctaccctctatcgatctagcgacatttataactttagcggtcgcttctgttgctattggtttaggttatgcagcatggaatattggtattattcatggaaatattaccatgctggttgttgcctcttactttaccccgatcatttcgtctcttctggcaatgctcgttttgcaaactcaattgtctatgagcttttggcaaggaactgcaatggtcacagccggttcctttatttgctggatgtctacaaactggtcagttattcgtccttttattagaaagatggctagagagattcaatatctctttatttcaaaccgttag

SEQ ID NO: 64417 - DNA, 1065 bp, Acinetobacter baumannii
gtgaaagatatgaagaactcgtcttctcatgcttacgatgaagcatctccctctgaagaaagtctctcctcggttcacccggatttacgtgttggatttattctgatgaataaattcaccttagcgcctatttccggttttgttgaatctcttagatttgcagcagacaagtcttttcgtagtttgcaaatttactgcaaatgggactggatgacttttaatgatgagccagttactgcaagttgcggattatccgttaatccaacaacttcacttaacctaaaagctttaaaagaaaattatgattacattgtcattgcaggtggtttactcacagaaacacgtaatccacccgaaaaattattagaaatactcaatgaaatacataatgcaaaaataccaattattgccttttgttcaggctgttttgtgttaggaaatgcaggactcatggatggtcggaaatgtgcaattcactttacgaccagagaagagttttcagaacgattcccaaaagcaatcacagtagtggataaagcttatgttgaagatcaaggtatttttacctgccctggtggaactgctatagatttagctgcggatttaatacggcgtcattgtggtgatattcgggcacaaaaaagcttagaatatttactcattaattctgacaaacaaatcattgatgaaaaagaagagatacttttagatagcccaactacctatgaaaataatattgtctctaaagctatagcttttatgagtgaaaatttaagtgcgcacgttacattaaaagaagtagcagagcatgcgagaactaacccaagacaactgcaccgcgcctttttatcgagtaccaatgaaccaccatcaaattattggcgtaaattaagactcgaacatgccagaaaattacttgccaacaccaatgcttacatcaccaatattgctattgaatgtggtttttctgatgcctctcattttattctctggtttaaaaaacaatatggcgaaactccttttacctatagaaaacgtcgtcatgaagtagaaaaactcaaataa

SEQ ID NO: 64418 - DNA, 951 bp, Acinetobacter baumannii
atggaagtcattaaaacggttggtgttgttggagcaggtgtaataggtgcaagttggacggccttatttttatataaaggatttaaagttaaggtttatggcccgtatccgatcgatgaagcggtctttaaaaaaagaatatctgcaaatttaaacgatttattggctttagatgaaaatgctgaacacggttattctccgcaagatgtgctgcttcatctagaaatctttaatcacttaaaagatgcagtttcagatgtagattttattcaagaaaatgcccctgaacgtctcgatgtaaaacaacagctatatcaagaaatcacagcatattgccctgaacataccattattacctcaagttcatctggcttaaaagtgtctgattttcaaaaaggggcgcgatatcctgaacgtattttattaggtcatccttttaatccgcctcatcttttacctttggtcgagatcgttggcggtaatttgactgatcctcaaattttaaaacaggcttctgagttctataaacacttgggtaagcacccaatcgttttaaataaagaagtaaaaggacatgtcgcaaaccgtttacaggctgcattatggcgagaagctttttcattggttgaacaaggtgtgtgctctgccgaagatgtcgatgtcgcgattactagtgggccgggtttaagatgggcgctctttggtccctatattaatatgcaacttgcaaaccaaaaggggtttaaagaggcaattcatcatttaggcccaccaatgacagaatggtggaatgatatgcacgcatttcaacattcagacgagacaacagagttattggaagcagaaaccaaccagcttttaaaccaatataaggatattgatttatatgaaaccagagataaaggtctggtcgatatattaaagctcagacagcaacttaagttagattga

SEQ ID NO: 64419 - DNA, 822 bp, Acinetobacter baumannii
ttgccttttccagatgcaaatgaattagctgcggcagggttcacggggaataagcaaggtggtaatgcttttgtttatgtgacaaatgattctcaagaggggcacaatctagtacaggggcagtgttttagtgtccgttattatgataatacgtacattaacccagtagatcctaaccattcttctgaatataagtctcttctttatgtatataaagctatgagcttaggggtcgaattctataataataatgtttctgttccgaacattattagaattgaggaggggcaaaagcaatatatcaatagacttagaattgatagccttattattcgtgataatgtttatgatggaacggtgcttaataaagatgcacctattgatttgtggtgtagaaatatacaagcttcagtaatcaatattggtcttaaaacagccactattattaatacattagctaatatttacgtggaatctcttgaattttctgaaggaaatacttttaaagttaatcctgagcactcagaaaatattaataaatgttttaatgttactaacgggctgcttgatataccatcaaacaaactttcatatcctgcaactgttggtttatatgtgagtcaagcacaagttggtgtatctgacttctacattaacaacattaaaactgcaaaacttatatcaagaggtaatttacctgactcagtaacagtttcagattatgtttcaaatgctgattcaacgaaactttcagcaattgcactgaactccggagctgctgcagcgacttataatgcaagagtccttttaagcaacatgtaa

SEQ ID NO: 64420 - DNA, 2130 bp, Acinetobacter baumannii
atgaataaaaaatcattagttacaatacaaatcttagatttatttggtagcccaatttcaaaagcacaatatgaagtaaaaaatcagagaactgggcaagttatcgctgcaggaacaacaaactcatctggatgtattgttgaaatcagccgagataaaggaactgccttagatatatatattaaaagtatgtttaaaggttcaatggttaaagtacaaagttttgtaatgtctaaagaccgaatggttgtaaaaattacaagtcctaaagtccttttggatttaaaaacattaacgaatcaaggtaataatggacagtataaaaggaaaacacatattgttaaaaagggtgatacgctttttgaaatagcacaaaaaaatcatacgactgttcgagcactagaacgtttaaataaaatagacgatcccaataagattagtattggacaagtcattaaattaccagttcatattgctgcttctggaaatcattcacaccaagacaaacctaagcacaagcactcagctcaatctacaaataaacctactgcgagcagtacaaaaactaccccagctccagcagcaaaaaggccagctaatcctacttctcaaacaaaacaagaaaatgggcttccagaaaaagcacatcaactttatgaagatactaaaaaagcattgaatgaagctgcaagttcagtttctaaaattttgactattgatgatcgtagtcaagatggaggtactcctaaagcaaatactacaaatatttgtaaaaccaatcctcaatgtatttccagtggtaaaagtgagttaatcagagaagttaatattcgtttagcaggttttggtggagcattaccaacagatgaatttacagaactgactgcaacatgtattagacaattccaacgggattatatgggggttccagacactgggaagatttgtggttctgttttagctgctttagatagatttagagatgaatatggaatcgcttcttactttgaatcgatgaaatgtccatgtaaagattatggtggaggaaaacaatgtaatggatttggtgcaggtagaacaaaacagtataaaaataaaaatgggacattaggcaattttgcaaatgaatattcaggtatacatagatcggttatttggatcttaaaagccactttattttatattaaaagaattcacaacaaagaattcacatttaataaaattgattcaggatatcgttgtattgaaaataatgatggtcacaatggacagagagaacatagaactacagttaatcatattggattagcattagatctacattttaacaaaaatggaaaacgcactagagaagagattgatatgaacttaataaggtcagctctgttcggtacatttatgaatgcatcaagtgcgagagttaaaaataaaatatatttagaaccagcttggtatgggaagagcaaaggtgctacaacatgggttcattttgatataactcgctatggaaaagaatatttatcaaaagagctatttgcaaatactgttgaaaatctaaatggtgactatttagcgaacattgtaaagaaaaataatttgataaacttattatcttgtagtgggaatatttctattccgagtaatattgtccaacctaagcaagagaaaaataaactttttaatgaggaagatgcacgtaatgcattaaaagttattcatgagaaatatggtaaagatatagcaataattgttgaaaaaatgtatagagtggaaactaggcactttaagtcagaacaatatcaacattgtggtactcctggcatggaaaaaaatggttcagcaccatattatggatgggattcttcattgtttacagataaaccgacaggaacatggtctgcttatgaaaatgcggggctaagtggctcaggaggaaatgcgcaagtaacaacaagtaaaaaagtttttgtttgtgtatcctcagttttggttggtatgacatatgtagcaaaatatattaaaaagtacaatggaaactatgctcgatggtttgcgctagaagatggtaaacaagcggtttatcggaacgcattaagcaaagtgaaagcaagaatcgtatctgaactttaa

SEQ ID NO: 64421 - DNA, 318 bp, Acinetobacter baumannii
atgaaatttgtattttttttatttacattatttctaatttcgggatgcaaagcagaaagttctaaaattgcttatgatcaaaaaaagcaatgtaagaatgatctgatgttaatagcatctaagaattttgattttaatggtattaataaggatgatataatttttgatttttctgaaaaagattttataaaaatttttgttaaaagtaaaagtggagttaataatggtgcgacttttggttggataagaattgataggaaggataataagttatatgatattacatatgatgaagaaaataatactaccaatgagtaa

SEQ ID NO: 64422 - DNA, 756 bp, Acinetobacter baumannii
atgaaaattcttggtcttgatgcaggtagcgaaacggaagctaccgtgtcaaaaatcttaactaacagtggaatgacacatactgccctattggaaattgtaaatatctttgggcttattgcttgtattgctcttgcgctttcaggctggatctacggcgcgaaattccttaagaagaaaaactacctgcttggtttagagtggtgggtggttgcattctctgcgacaaactttgtttcctacatggtcacaggttggaatgttaatttttcaattaccatgtttctcgattcattctctcgtagtttcggtatgccagttattggtgtacttggtctaatggcactgacccataattacaaaccatctactcttaaagaaattctgctattcacattttcatttgccggaacttttgtagtctttctggcagatttttttcaagaaatacgtccctatttttacgtcatcatgtggggctttcttacgatttatctctgctatttcatcatttgcctagcacgcgccggcgaagtctttcatgcgttagccaccaccataacggctgtggtgagtttggccgtagccgtcgtatatgactttttccctatccctggtgacaatacccatatgatttttatgacttgggctttcgtaacgtggggttatgccatcattcagttgtattacgcctatgcggctctagagcgctcgcagaatatttccattcaatcttttattccagctcgccagtaa

SEQ ID NO: 64423 - DNA, 399 bp, Acinetobacter baumannii
atgtcaaatgaattaaaagacccagcattgattagcagtgctgaggcaaatcttgcgtgggctaatggagttgatattcaaatcaagaatgtaaattgtgtcaactggtatgacttagatgagagcaaatacaatcttgatatttttgataatgttcgtgttgatttccgcctcaaaccccaaaccatcaagcttgaacttgagctgccgaagccttatgagccgaaggtgggtgatatttactggttcctctcacccttctatagcactggatatgactactgcacttttacaaatgattcatcagataaactgcatgtccaatatggcgcatatcgctcagaagacgacgttaaaaaggcagttgagcaactcagaaagatacgaggtgcctcatga

SEQ ID NO: 64424 - DNA, 264 bp, Acinetobacter baumannii
atgaacattaaacctatttttaaattaccaactcttactgaaacccaagaatgggcttgcgagcaaggttgtgacagcgtccatcctcgcctttaccgaaacgtttatagccaaacatgggatacagacggaaacctaacagaagaactagctgagcactactacacatgtggtcgcaagcatttgttaatggtttgggatgaatcaacttctgattatgtagagcttgcagatgagttttacaaggagccctctcatggataa

SEQ ID NO: 64425 - DNA, 1452 bp, Acinetobacter baumannii
atggctaaaggttttgctatccacaatgctattactgatcatggtggaattattccatcaactcaatctagaagttcacagctaggtaatttatttgttagagctggcgatgggcatatgtgccctaaatgtaagtgttggtctacagtggttaaaagtcatgatcatgtgattatggatggcaaaccagtagcttatgctggagataaggtgacatgcggtgccacgattctacctcaacaaagccatgttgttggggaaagtggtggtggaagctcaagtaccacaaattctagttttcagcccaccaatactcaacagaaaaacaattttatggatgatgcaataaagaaaaatgaaattgttttaaaagatgtaatgcttaaaccatttatacctttgggagcacctaagccagatggttccccaagtaatagcaatttagttttctctggttcaactattaatgcaatatttgaggctatcgtcttagaagttaaaaaagatggaaaatttatagaagtaaaaagaatcgagggggcatttcaaggtactaaagaatttaaaatccaatgggatggattcattcaggacatatatgatagtaaattcatgacaggctcaagtggtgtcatgtttagagttaaaggtattaatggtggtagtgctatagctttagatgaaaaaacttttaattttaaatattttaataaagactggatggatgttgtaattaatagaaaaaaattaaaagtggatattacccttagagttaattttgttgatggtggtgctaaagggctgtatagcggacacttggtcccagcaagtcaaataaaaatacgtcgagttcaaccttattcaacacaaaccaaggatttttcacaacttctacaattatcaattgatggaattaattattattggagtagaaatcaattccatgcaacgggtaaaaatatttctttagatgacaaaaattatgaagtttttgtaaaagcaaaactctctaaagtaaatgctatgccagaaatgaaattaacatatgtcaccaatgttgatccaaatgacccaatgtttagaagttcaaattcagctctatcaagaaaaacagcgtatataactggatatttatattttgatagaacaacgtggggcttctatccagaaacggtatcggacaagtcatttaaagaaacaatagctcacgaaacaggccatgctattgtggaagcttatggaggagtcatggattctataacgcatcatggttcatcagaaatttggcaagttccaaaatctgggacaagctaccctacatcaggagaaatagatttgatgaaatatgctaaaggtaatttaacagcaattccaaattgggataaaaatatggttgcaaataaaaaagatgtaactgggcttttatttatttcaggaatttcaaaacaatga

SEQ ID NO: 64426 - DNA, 453 bp, Acinetobacter baumannii
ttggctacaccaaagtttttaaatgaattacctgtagagcaattattcaaattatctgaagaagatctcactcaaactattgaggcagagcagctttattatcaccacaaaccacatactgtgtattatcttgctgtaaatggttcaaaaacacgaaatggtggcttggttagagctttaaatgctaactataaaattggtggtattactgttgcctctgtaggcgatgaagttatatataccgagggaaccacttctaaaattatttcaggtgctggtgtttcctgcattgttaatggaaagtcagtagccttagtaggaagccgcttggaaaatggcgatgaaattattgatagtccaaatacttcagttgctatccgaatttttcaagatcaaccaatccctaaaaactttttaaaccatgatgactctcgaggactcaaacatggctaa

SEQ ID NO: 64427 - DNA, 879 bp, Acinetobacter baumannii
atgctatggaaagatttatttcaacatgcttcacatagaaataaaaaagaagattatctatatactcgtaatgatctcgatggttttttaacaaaatatagaaacaaaaaatttcttacttatatttatgaaaaaatgcattttaagaaacctactcatgcttcacaatatcttacagcatgttttaatgatgcactcaatgaattaataaagtataaattttttcatccagtatatacttggaactgtaaatattgtggttataaaaatttaaaaactgttgactctattaaactatacaataattgtgaagtatgtgaagagaatcatatgattcctacaggaaaggaattcgaatgggagtacttacttaataaattcattcataaaactatattagaacataatggttttaatgtactatgggctttaaattttattcaaaatataggttataaaaattcttttctatacttacctgaagttaatattttttacgatgttaaaaattcaaatcaactcaatgagattgatttactaggtatttatgacggaactttctttgctggcgaagctaaacgtacagcagaatactttttaaccgatagagaagcagataaatttatagaattaatggaatatatatccccagatcaagcttttctagcttttgggaaatatgctgaagatgaaaaaaaaattgaaaaaataaaatctaatttagaagattttagaaaaaatttcgaagctcaatttaagaatattaaacttactattcttacatttgaagatttcataaatttttcatcacctgctattgatttcggtatacgcggaaataatgtatatgcattttttgaaaaactagattctcaataa

SEQ ID NO: 64428 - DNA, 840 bp, Acinetobacter baumannii
atgagttttgatagatttagatttcaaaaagaagtggagattttgttaggttgtcatcaagtagagaaatggttgagttattctcaaaagtttcaaagccttgaagttaatatgagtaatattcaaaccctgaaatcctctctacatgaagatggattagataatttatataaaggattatattctattagtaatggtttttttaatatttatcatggctattactcgtggagcgtcgttaagttttattatgcggttttctatctgctaagatgttttttctcagcaaacgatataggtttcttaaaaagtaaaggaatatttacattaaaattagagcaaggtgagaaacctattagaagagataattttcaatataatggagagactatcaaaggtgatcataaaactacaattgtgacgtacgagcgagaattcaaggatcaagatatccttttaagcaatcatattggagatttaaccgtatatgattggttgatggaaattagaaatcaagttaattatagagagagggcttttaaagaaccagaattgggatattttcctataagtttatttaataaaagtactctaaaagaaagtatcgaaatttatttcaaggatcaagtacctatatattgttttaatgaagatcatgcatgtgtagctgcaccaattaaagttttacaatttgtaagtcatcttttttataccaatacgggtcttcgactaagtgaagaacgtattaaggtgattgaaaaaatgttagaaccaactggcattaatgagattccgtatataaaaaatattttatatcctgatcaatatgctgggtattag

SEQ ID NO: 64429 - DNA, 1071 bp, Acinetobacter baumannii
atgaatcaatcaaatcaatatgttgaagaaaattatagagtattaaaatcaaattttggggatatacctacttatacgtttacgatgaaagttaaagatattctgaaaatttattatgttgctgtcagaggggttgataaagaggatggagctgtacaaagagtcttaagtaagtcaagaattaatgctatcagagattatattttagagggaaacaatttttttaactcgtttattttaaattggacagataagaattatagcccggaaattgatatagatactatcaagttacatttagtccctgcttcagcccaagtaattgatgggcagcatagattagctggtttagatgcagcttaccaactagatgaaagtaatactgtgggtgagaaagagttggtggttacattgtgtttaggactatcaacaaaacaagccgcagaaatatttttgaatattaatacggagcagaaacctgttccaaaaagtttaatgtttgatttgtttggagaagtagttagtgatgaagaacattgcataaacagagcaacggatattgcgaaagccttaaatgaggatccattgtcacctttttacaaacttataaaatttcctggttccccaaagggagtaggaagtcttgaattatcaacatttgtttcagcttttaaagagtctctaaaaaaagatggaaaattctatgtttataaaattaatcatctagatcaacaaaaggctttaatttccaacttttttcaagcaattaaaaactattatgttgatgcaaaaatctggaatataagtactaagaatccattcataaaagcttctggttttaatggggcggttgatttcttattagaaactttaattggtaaatgtgcagaaagaaaatcttttactgttgcaacaataatggaaattattaattttgataagaatgatttatttcttgttgaagatattaaaggtttagatgggaaaactgcacggaaaaaagttaaagaagaattagaaagaaatttaattcaatcagttttagatgatgatcataattatgagttttga

SEQ ID NO: 64430 - DNA, 393 bp, Acinetobacter baumannii
atgaaaatcgcggtatttggaaccaccttacatgctggtgtaatggcagcattattagctgaatatggtaatcagatctattggtgtacaagtgtcacctgcgaagaaaatatttctatactttcttatcaagatcaagaagttaatcattatttaaataaacagagaaaagcaggttttttaaaagaaagccgtttttctgaagtccctttagatattgaagtctatttattttgttttagtcccacacaaattgggcctgctttaaagacagttgaaaagttgagcgagcgaccgattgttcatccacgtttaatgatcaatggttctacttttggcctacacggcacagatcaattaaagcaacatttgccaaaagatgagtgggtttag

SEQ ID NO: 64431 - DNA, 1206 bp, Acinetobacter baumannii
atggctggttctcttgattggtctagtacaacaaataatattgaaaatagttgtaaatcagtaaattgtgactgtactacgatatgggaatattaccaacagatggcaatgaccctattatctaataaaaaagataatcaaaattaccgtatagaacctggttatgaagcgcgtgctagacgaattgcatcgatctacgctcgtatttatttagagatgtttccttttacaccgaatcaatctgttactgcagcgacgtatagtgggcgtttctattggatgggcctaggtgcttttgcatcaaaaacagttgctgctgtatttgatcatattgtttctaagactgggtcaaatgcagatgctttaattaaatcgattagttctgatcattataatttagatagttttggagtgtcaggtattcatacttttgcaaaaggtaatttatggctctatatggatattagtgtttggcattttgtttgggccaagtcctctacggattttaaaatttgtgtaaataacaggaatactaccacttataaaaaagttaaaagctctttatataatttcccttggtctagttgtttaacaacaattaataatcttaaagcaacaacagaaattcataatgcatttgaacagactttaccaacaatagaaaaaatttttgctgcaaatgctttaaggcaagacaagtttagcctagctgctaaacacttattatatcatttattacaaattgcaaatcaagaacaaatcaatattttacaaaaaatcgtatggaatgatcctattgtaaaaaatggtgcagatgttcaacgtaaggctggaatcccaaaggctgaactgattctctcaagtgaatataatggaacaataaaaaaaatacacgctgttcgtggcaatgtttattcatatgaaactgaatttgggaaaaaggtcaagtcgttacctgagtccccaattagcacaccaccaagtggtactcaagttgagaaccaagatagccgtatgcgctggattaatttagcagctcaaaaatatcatcgtttaatgttgaatgatgttggacggccttttttagaaaaagagttacgcacaattgcaggttggaatactagtaaatgggatgacggtctaagtcaattcgataagttatttattaaaataggaaaagagtcaaatgatggaaagggtggttag

SEQ ID NO: 64432 - DNA, 354 bp, Acinetobacter baumannii
atggctggtggttcacaaatcattattaataagagtggtattacggttattacacccgcaaagttcgaagtaaaagcgggacagcatatctttaaaggtggtgcagaagttggagtaaatctgcaaggtttgcctgcttatgaaaagtatgatgaaaagtttaatttattcctcccttctggcaagcctttaactaatgtgagttataacattcaatctaataatcaaagttttatagcagaaactgatatgaaagggaaaactaaaaggataaatactaaagaggctgaacaacttgatgttgatttaaattggttgaattttgaacctgacgaaaatgaccctgtgaaataa

SEQ ID NO: 64433 - DNA, 600 bp, Acinetobacter baumannii
atgacctttattgttgctattcaactaaacgatagcattattgttgcatccgataacaaaaaagttagccaacaaaaagatggaataattaaattttcaactgaaaaaatcttgaaaatgcattcatggcaaaatggtataattactggagctggtgaatatcaagttataagccgggctgtaaaaatttttaaaaatctgcccactccttcaatagaagatctgccccattgctttaaaattgaaaaattttcgtcccaacaagattatttttctactccattagaacctaatgaaattattatttggcttgtccatcccaacattgatgtgatcgtaagtaatctacaatcattatatgcaggacttaaagactattcagctttttcaaataaagctgactggatgaattactatattaaacaactatcattgattttcagaaagcaaagtcaacatgacaaattaatgagtaaaagttttgatattttttttcaaaacaaagatgattatatatttggacatatatctaatactcataataccgctttagagtttcaaatatactcatcgaagaataagtatgttagtaaacagtag

SEQ ID NO: 64434 - DNA, 1020 bp, Acinetobacter baumannii
atgattcctttttcttttaactatctctggattttcttaattgcttccttagggagtcttgttttttttctatttgcagtgggcatgatttttagtgctaaattacgctctgtgattaggaatggaaatatattaattcggctcatttttttattgagctttttatgtttattgctaaatatcggtttaggtattctttcaattattattgataataaaattaaaaagaacggcgaggctttaaataaagttcttgtaaaagacgaaaaagttttaggaatacctatgcctaaaggtactcaacttgagctatatcaacctaatcagcttgattcatttagaagagccacttttcctcaacctattcaatttggaaactttcacgtcaattctattaaaattgcgagaggaattgatattgagttattcaacgataggtctataactttagagggtgagggtaaagatctggttgaagggtggccatgtgaaatttctgtctatataaaggtttacctagacagaaatgcgaaaattaatggtcttgaatactgttcacttgcacagcgggtccaattaaatcatctggaaatagagccaaaagcaaatatagaacgttcaaaagaccagaaatatccagatggtttcgtttcaaaggatttttggataattaaagatgcttctataaagtataaaaatatttcgatgagttgggcttatatttatctagatcgagataagaaattaataggtattgaaaatgcaatattggaagaagatttaagaataggcaatattaaataccctaaaggcacagagtttaatttattagttcgtcctttaaccaaacaggaagcatggctgttcattcctcctgaaaaagtaaatgcaatcgatgcaaagggaaaaatctatacctatcaacaagcaatactccaacgcccaaatggggcagtaaaacaagttttcgatatatctgatcctaatcttatgatgagaacgatgaataggctccattag

SEQ ID NO: 64435 - DNA, 540 bp, Acinetobacter baumannii
atgatatctaagttgtatcaatccacttcgctacatgcactttttagaaagtctcaatttacgatctttgctataactttctttatttgctcttttacatttgtatcaatttccgtttttacgatggaaacttatgcaaaacaaaatttgcaattacttagccatactcttcttgagcgtattcagcctgccgttgtgtttaacgataagatcacgatcgaacaaatcttaaatgaatacacaaatgatcactctattcgagcaattcatatttatgactctgaacatcacctgattgctcaaagttttaagttgtcgagtcaaacttcggtgttagagaaatggtttgatcactggtttttaaatgagccggtacatttaacgatttatcatcatcaacagaatgtaggtgaactcaccctttttggtagctctgaaaaaatattgcaatttttaaagatgattatggtcggccttgctattgcgatgctgtttattgtttgtgcattgtggtggtcagtgaatttgacttatcgttaa

SEQ ID NO: 64436 - DNA, 480 bp, Acinetobacter baumannii
atgacaaaatttttaatagctttaatactctcaatggcttcttgcacaattgccagtgctaaaagctcaattccacaatactcagattatccagttcaatcaatttatactggtaaagctgcaagtttagatttatctgatcctgatgcaaaattgtttcgtactagactatctgaagctctcaaaagaaaacctgattttgctggagaatacgtatctacgatgtggggctgtggagctaattgtcgaagttactcttttgtaaacaagagaactggaaagttgttaaaagatggatttggtggtgaggaacggcaagaagatctgcttgaaacaaaactacatagtagattacttgtcactcaagaagaaatattgaacgacgattatgatgttgaaagtataactcaaagattttatgtacttgaaaatggaaaatttaaattaataaaaactgtggataacattaaacctgaataa

SEQ ID NO: 64437 - DNA, 240 bp, Acinetobacter baumannii
atgttaaaaagagagacattaaagctaattatttcttcaacaggtgaagaaaaggaattaacgcaatgcacggttagtgaatcggggattaatagtaaagatatcaaggttcctgttagggcgggtgatttccttattagacagttaccaagtggacttgaagaaaagtatgaaattatagatgttgttgcatatacaagtatgcttccacattatgagtttagagttagaaaggtttaa

SEQ ID NO: 64438 - DNA, 333 bp, Acinetobacter baumannii
atgagtaatattatagaaaagcagacggatatcttaaataatctacttaatattatggttaatagtattgatggtgaatatgatagttgtagctgcctatttgaatatgatcatgattatcaggatgggtcaacatctacaggagcagaactctcatatatactgaatcaagaaaataagtctataggtattagacagatgggagtagttgatagtcttattcgagagctccatgaattaatgaaaaaccatacaggtggagattggaaagaattcattttaagtttggatgaaaatggtagagctcatactaaattcatttataatgaataa

SEQ ID NO: 64439 - DNA, 363 bp, Acinetobacter baumannii
atgttagcaaaacttttttatacattggggtgctctattttttttgtagttttagttagctgtactaaaaaaatagaaaacaaaccgcttcctcctacagttgaagagcaatatctaacttcaaatcaagagataggggagatgcttgatgcattaaataatagagatgtaccaattgttgagaagcgagagatactgtgtaagtcatatcctgaagtctacaaaaactactatatgccagctctactcaagctatcacctgatacatatacagaggaaactttattaagagattttgaggctgtgattaaattttataaacaagcttggtcaattaaatgtagtctatatcggtatatgtga

SEQ ID NO: 64440 - DNA, 276 bp, Acinetobacter baumannii
atgaatacacatgttgttgaagatttaaaaatggaaattaagcaattgtcagaaattttagttatgaaaaattgccaattttcaaatctagaaaaaatggggaaattaggttttattaattcaatagatgacgatgtgaaaaaagatgcggaatctctgaatattcctttaaatcttggtcaaatctatacagatgaaatggatagattgagggatgaaatttattctttaaataatgaaattgcgaatttaaagcgaaatttagaaagcgcttaa

SEQ ID NO: 64441 - DNA, 864 bp, Acinetobacter baumannii
atgacgattcaaacagtaaatttaggtacggcaccgactggcgcaggtggtgatacattccgttcaactggcgcaaaaatgaatgaaaactttactgacccgagccatgctgcaagtcgttatgtcggaatggacaaaacttttgttatggaagttggcgcatttggtgtcggtgcaacaacaatctatgacttgcgtacagaaaacttaacacatccaaatcaagttttaggcaggggattgcgtgcaggcattatagaaggctcaaaggtggggggtgtttcaccattttgttcagctattttattatcggcatggcatgatgcaactgcgagtggagcccagccttttatcttattttctgatgatgggcatttaaagtctaagtacagttttggcgatgtaagcggttgggctgaaactgtaatctatagatcctcacggaatactacagtagacgcaaatggttttattaaggctgcttcaccaattattaaagtatatgcagataagcttgagttaaatgaagaggcatctggacaaaatattgtttttgaaaaagtagatgtaggccactatctgattaaaggttcaagtgggttcgcgaaagtaggttggtatattgaaacaccaaaagatgccaatgggaatattctttttgctgtgatttatcagcagttagaaaataaagatattgaaatcaaaacttttaaaaagaagtttgatgttgagtctgcttcaattattgctgatttggataatccagttgatatttcaatgggtcgctggatcgatattcgcttgcaagaaattcctaaaccagtacccgaaatgccagtggtgacagaaaatgaccctgaatag

SEQ ID NO: 64442 - DNA, 792 bp, Acinetobacter baumannii
atgaaacttacagcaaaacttaaaaaagcaatcatggcccatgcagaaaaaagttatccggaagaatgttgcgggctaattgtaggtggtaaatatttaccatgcactaatattgccccaacagtttatgatcaaaatggcattattaaacaggataaaacaactaattttgaaattgatcctgaagatctcgtgtctgcagaaaatcagggtgaaattcaagcttatgtccattcgcatccagatggcactaccagagctactgatttagatcgtatccaaattgaactacataaaaagccatgggtcatttgctcctatccggatctggattttcaagtttataaaccttgtggttatcgtgctccattggtcggaagaaactatattcaccattatcaggattgttatgcattggttcgtgatttttatgaccgcgaacttggtattaaattgccagactttgaacgaaaagatggctggtgggaagacaaagatcatccgtcaatattgattgataactttccgaaagccggtttctatgaagtggacactccgcaatatggagatatgttgatttgtcgagtaccacgaacagaacacccaaatcattgcatcatttggcttggtgataaagcaatgctgaagtccgaagatactgaaccttgtattggcaatacattaattttgcatcagcttcacggccgtaaatctatacgtgaaatctatggaccgcaatggtcaaccagaacggtaaaaatcttgaggcatagagatgttaaaaacaattaa

SEQ ID NO: 64443 - DNA, 462 bp, Acinetobacter baumannii
ttgtatattttaattttcgcaatatttataataattattagactactcttctgtagagttcaagaagctaagaaaaatattcatccagatattcctcattattttaatgatttttattttcaagtatcgaacattcaatcttttgatcttcaatcctttctttattttctatctttaattatttctttaacagggctcttggcttttctaattaaagaaaaaaatagtctaactgctcaaagagactatttcgaaagatgtgacactgagctaaatgcatttataacatatgtatctgattttgatcctgatgaaataaaaaaactaaaatttgatttggcaaaaaactattttataggtggaaatgcacaaataagtaagggtacaacccaagatcaaactttaactccagagaatatgaaacaaattctagatatacttaaagaactttcaaaaaaataa

SEQ ID NO: 64444 - DNA, 252 bp, Acinetobacter baumannii
atgaatccaaaacaacgagtaatagcattccaaaacgtatttgacattttgttattcgctacacatgcaaccgaacctttcactatgaaggatttgcatgactatgtgctggatgctcctaaaaatactatccaatgctatgtgcaggacttaatcaaaagcggatatctagaaaaagattcatatgcaacctataaagcgactcagtacgcgaaggacttgctaaacgtaaaaggagagcttgtagcatga

SEQ ID NO: 64445 - DNA, 510 bp, Acinetobacter baumannii
atgaagaaacaacgcaaagctcctaaagcgcagcacttccaattgtcttggaatgtattcaatgcggttgagatcgtagagcaatacgagaagcaatcaggtgatacaagcggtcagttgccttttccagttcttatgaagatctatcaaggctcattactcacagcactacagtttggaactattctgaatcatcaaacctatggcgtgactttctttgcaaagattaagaaggactcgggtgaagaaggaattgtagagcgtggcttccgtatcgatacacctatgaagctatcagagttcattaatggctattcagactgctatgtgaacaaagggcaaggacttaaaaccaaaggctggaaaggcgctaaagaagaatggctttcaatgatggatgaagagtttaaaggcgatacatgtcttgatgcttgggcagtggctaattgtcttcacagagctaataagaacgtgaccagacatgacaaacgtgacggggtgaagggatga

SEQ ID NO: 64446 - DNA, 348 bp, Acinetobacter baumannii
atgaaagccacccaatttattaaagaccacggtttagagaaggcgagaggggttgtcgaggggtggatagatagaaactttgatgactcttttaatattcgggatggcgtttattgcaacttacctttcgagccaaccgatgattgcgaaactcttggattgttcgagttaaaacgcctcgtggagtcggtggatttggtcaacaaggttggtggtattgagaatgcaaaaacattcgatgagatgagcatctactgtatatcgcactggactgacttagagcgtctaacaaagtcaatcgccgactacgaatcgatctacggagaagaaggagtcagcaatgagtga

SEQ ID NO: 64447 - DNA, 207 bp, Acinetobacter baumannii
atgagtgagtttaaagtcggggattttattgtaattgaccataagcatgacaaaactttcatgccagttctgaaaatactttcggaaggcaagaactatttttactgcaatgatggtcaggtgcataaatcccaaatggagcaatggcgccatgcaaaaccagaagaaatagcagcaggccaccgcattgataaagtgagtgattga

SEQ ID NO: 64448 - DNA, 441 bp, Acinetobacter baumannii
atggataagaaccttaacgaatttaaagagtggtttgcaattcactatccagaatataaggattacttagaaataacttttttcgactatgacaaaggattatttgtcgcaaaagacacgtggaatcctgactcagtcattgcagcaaaagttttgagaattacgcttaaagcatggcagcacaagcaagcgaaagtggaggagctgcaaaaacaattcgatcagcatgacaagttgctactccaaagaaataaagatgtacaggaactttacgacatcaatgcaaagcatgttgcagagaaggcagagctgcaaaagcgggtggatgaacaagggttaataattgcaaaagtaatgtctattgcatctgaccttcagcagagctgggcaatgtttgagattggaaagaagttagagcaagcgctcaagggggaggtatga

SEQ ID NO: 64449 - DNA, 273 bp, Acinetobacter baumannii
atggatcttgagtggatagagaagcaacgaagagaactggagaaacgttttaatcctgagcttcatagattgaatgaactagctcgacagaaagaacaagatgagttgtatggagaacttttaacacctcgattcaacactatagatatcagcgcaattcgcaagagagcaataccgcaagagctttggaaagatcagaagatcaaagagcttgaagaggaaaacaaacagcttaagcgcactttagctttgaaaattttgacttataaataa

SEQ ID NO: 64450 - DNA, 438 bp, Acinetobacter baumannii
atgaatgcggcagtagcaacaccagtaatggattggaataaatacacgatagatggatggttagagcagttcggcgcttggtgtgaaactgtgcgcatgaaagggggtgatctaccagatggtttgcatattaatcagatctattggttgatgcgtgaggcaggcaaagagatgccaaaaggtaagggtttcatacgttgtgagatcaatgattttgaagcggatcaagtccaagcacttttgcgcagtatctttaagtctgattcagtggattatcaagccaagtatgcagtgatgtgcttaatcaagcataaggtagagaatcgctctcttagtgcagtggcagcgctaacaaatcaaagcaagccaattgcacatatgatgattaattgtggtcgtttctttattcactctagagacaaccggttaaagatttga

SEQ ID NO: 64451 - DNA, 186 bp, Acinetobacter baumannii
atgcagatttactttattggtggtagagcagataagaacttaatagaagaaagcaaaatgaagaatccaaactatgaaaagagggtctttattttgaaagatggcagccgccatacttactttgtgcaaaaaggtatgccagattctgaagctaatgaaaaagctgaaatctatagatatatttag

SEQ ID NO: 64452 - DNA, 141 bp, Acinetobacter baumannii
atggataaacacacattcttatcaataggcatcggcttagtgcttggctttatgttggttctgcttactgagcattttagatttgttgttggtatggttttgagtgttttaactcttagatggctgtttagtcagtggtga

SEQ ID NO: 64453 - DNA, 579 bp, Acinetobacter baumannii
atggaagaacaaatcaaaggcgcagaacccttaaagaatttacgccatgaagagttctgccacgaatatttaaaaacgcttagtccgcaagaggctggcaaaactgtaggtttcaaaacccgtcaacatgcgtgggaagtcctacaacgtgaagaagttgaagagcgtattgcttaccttaatggacagcgcttgaaccgcattgatatcgatgctgactatgtcttgcgtcgtttggttgaaatagaccagatggatgttttggacattatggatgataacttctgtctaaaaccaattggtgactggcctaaagtgtggcgtcagtatgtcaacagtattgaaaatatggaaatcactgatagttcagggtggatgcgaaaaatcaaatggcctgacaaagttaaaaaccttgagctgttaggtaaacatattgccgttggggcgtttaaagagagtgtagagcataagcactctgggaaagttgatttaagaaatgttccggatgatgacttagataagcgcatcaaggaacttgaaaataaggtgatgccaaatgacaagagaggagaaacttga

SEQ ID NO: 64454 - DNA, 435 bp, Acinetobacter baumannii
atgaattatccaaagatgctctacaagggtgacttaattaaatttgaattcaccacagcagtttcagaagaacatgaagaagaattgaaagcggtaggttggatagagcattcagagcttggcgaacccatccaagaaacagataccattaaagacacatcagctagtgataaaggtttcgtatccttagaagagtatgaagcaatcctgaatgagcgaaatgaggctcttaccaaaattacggaacttgaaaaagtaattaaaaaaggttcagccgaaaatatcgaattgcatcgccaactacgtacaaaagagttagaaggccaatcagcagatgaacttaaggcaatcctgaatgagcgtggcgttacatttggtgcccgtgactctaagcctgaattggttcaactcgtcctaaaatctgagcaggaataa

SEQ ID NO: 64455 - DNA, 147 bp, Acinetobacter baumannii
atgaaacgagaatctaagaaagtgacatctgtcgcaccaagaaaaccaccaccagtcaaagtggtaagtttcttggatgaaaagttaaatacatatgtatggggattaccaacgattaatacgtctattcggttatctgcaaaatag

SEQ ID NO: 64456 - DNA, 399 bp, Acinetobacter baumannii
atgaacataaccagatcaattcaaattccaaatactcctatgtttaataatggtgttatggatcaagcatggtatatgtttttctatgcactaagtcagaatgcaagtaaaggagaggaaattgatacgagtcagcttctccaactttccagtcaattacctgcagtcacaatatccaatggaattctgactgatattgatgatttgcagcggaatttcccaataagcccaattatacaaaatgaagatattcaaccgatgccacctgcatcggttttttatttcgagcaagaaaccattttcccaacatcttctatctgttgcgatgacaagatttctcccttgccaacagtacagatcactaatgacatgcaggtaattatcaatggcaatgattaa

SEQ ID NO: 64457 - DNA, 333 bp, Acinetobacter baumannii
atggcaatgattaactacactcaagctgtaattcctcaaacattgccagcaggtgattttgaggcatatacggtgccaacaaaaactgtcacacaggtgcgtgctgcgacattttacaacaaatcagcatcaccaattaccctcaaagtttcagtggttccaagtggtgcaaccttaggtgcacaacatcaagttacacagaagaatattcctgcaggaagttcttatttaaatcctgaaattattaaccatgtgcttaaagccggtgacaagctttatatcagtggggaaggattaaatgcttatgtgtccgtcatggaacaagtcctatga

SEQ ID NO: 64458 - DNA, 447 bp, Acinetobacter baumannii
atgattaccgtaaggcgcgaaaagtggattgattgtatagatcagattatgccgctttgccagatggttcatgaacttgttgaaaaggatatttatggactgccgttggactttgatgcaacgctataccaacaatcagaagatttcgatgaatttcactgtctggtgatgcgtgaaaatggccgtcctattggttttcattggatggtgatgtatcaacttgcaagattcaaaggcaaaaaacaggctggaacagatgcaatatttgttcatccagagcatcgacaacactcaatgaagttgattgagtttagcgagaaatatgcaaaagaccatggttgcacaacatgggcaattgcaacacttgatcctgaatatcgtgggcttttgtgggaacgcaaaggctttaagaaagcagaaactatttttataaaggtgatgacatga

SEQ ID NO: 64459 - DNA, 822 bp, Acinetobacter baumannii
ttgccttttccagatgcagatgaattagctgcggctgggttcacggggaataagcaaggaggaaatgcttttgtttatgtgacaaatgattctcaagaggggcacgatctagtacaggggcagtgttttagtgtccgttattttgataatacttatattaatccaattgaccctaatcactcgtcagaatacaagtcattgctctttgtttataaggcaatgagtttgggtatcgaattctataataataccgtttctgtaccaaatattattagggttgaggaagggcaaaaacagtatatcaatagacttagaattgatagccttattattcgtgataatacttatgatggaacggtgcttaataaagatgcacctatagatctatggtgtagaaatattcaagcttctgtaatcaatattgggctaaaaactgccgctgttattaatacgcttgcaaatatctatgttgagtctcttgagttttctgaaggtaatacatttaaagttaatcctgagcattctgataacatagctaaatgtttcaacgtgacagaagggctgtttaacataccgtcaaacaaattatcttaccccgcaactatcggagtttatgtcaatcaagtgcaagtaggagtatctgacttttatgcgaacaatattaagacagctaagataattgggcgaggcgctttaccggatacaatcactgtctctgattatgtttcaaatgctgatacttcaaaattaactgcaattgcatttaattcaggtacatcattcggaatatttaacgcacggcttttattgagcaacatgtaa

SEQ ID NO: 64460 - DNA, 687 bp, Acinetobacter baumannii
ttggcgaatgcgtttactgcatcggcgcatttgacgagtacagatgttgtagagaaattaataaatccacaatatgagagtgaagtccctgaagctgaacgagatacttatgagtcattatcaaatgaattaagtagcagtaagcagggcgctgagtatttaattaatgcagctacaggaattgttgttggtggtattggtaaaggagctgttaagaacaataattctgatattgatatttctaagtcaggatttgagataggaaatattaatcctattacaggccataaaatattaggtactcataaagatgaaagtaataacacagttggtaattatattgttgaagaaacaaagccttctactaaagataaagtaataaaaacggatattcaatattatgaaaatcctggccatcatgaccctaaaggagggaatcaaattggttacaacaagacaaaatcagttctgccagataaccataagactttatgggacaacagtattgtagcttctgatgggaataggtgggcagtagaggtgataaacggaaaaaaagtttatcatcgcttccaaaatgatggtaatggtaatttccattggaacggttctacgaatggtaaaacagcaagtggggttgatagaagtgatgttggcaaaattccacctgaaatattgaggaagtaa

SEQ ID NO: 64461 - DNA, 156 bp, Acinetobacter baumannii
atgggaaataagataaaaagtaataaactttttactaggaagtctgaagcaaaaaatatcattccacttctatcactttgtggagccatctttctctcaaactcggcctttgcagcctcgccttctgagacaacagatgctgaaaaaaaagcctga

SEQ ID NO: 64462 - DNA, 1224 bp, Acinetobacter baumannii
atggctgcgccaaagttacgttttaaagagtttgatggcgattggacctttaaaaatttatcagatgtatccagtaagccattatatggaatgaattcggcagcaacagattttgatggcgaaaataagtatttaagaatcacagatattgatgaagaatcacatagatttaaatttacaaaattatcttcacctagtgatgtgatagaggaaaagtatattcttcaagaaggagatcttctttttgcaagaacgggtgcaagtgtaggtaaaagttatatttatgatccagatgatggaaaggttgtatttgcaggctttcttattaaatttggtcttaaagaatcagtcatcccatactttatcttcactcaaaccctctcagagaaatttaataattgggttataaccaactcaatgcgttcagggcaacctggtataaatgccgaagaatattcaaaatggcaaatagcttttacctcaaaaccagaacaaatcaaaatcgcctcttttctttctgcagtggatgaaaagatcagccaactcacgcaaaaacatcagctactgagccaatacaaacaaggcatgatgcagaagttgtttagccagcagattcgttttaaagcggatgatgggagtgagtttggggagtggaaaaagagaaaggttagtgatttatttatagaaattaaggaaaaagttttaaatcaaaatattgaaacctacagtattacggcaggaaaagggtttgttagtcaagcagaaaaatttggccgtaatatttcaggaatgcagaatagcaattacatcgttttacaaccaaatgatttttcctacaacaaaggaaattcaaaaacttttaaatatggatgtgtctatttaaatgaatttgatcatccaattgcagtacctaatgtttttattagttttagagccaaagtaaccaagagtatttacgaaaaattctatgctcacttatttgaaaatcattacttagataggcgcttaagacttcttatttcgagttctgcaagaatggatggattactaaatgtcagtaaagaaggcttcttcgaaataaaattaccttccccatgcctagaagaacaaaccaaaatcgctaacttcttgtctgccattgaccaaaaaattgaaatcgtggcacagcaaattgaacaagcgaaacagtggaaaaaaggcttgttgcaacagatgtttgtgtag

SEQ ID NO: 64463 - DNA, 5790 bp, Acinetobacter baumannii
atgtggtgtgccgaacatcaaagaaatggtgcggatacaaactctaatttggcagtttatgctgggggaggtcagcaagccttacaatccgttgttaatacaaatggcaaagttattaataaaataacctttgttaaaaataatcaagttattgaaaaacgtgctttaaatttttacatgattaacagtcctactgctgctcaaggttcagtcggaacggtttattgggcagtgcttgtcaggggtgacttaatcactactgaatcgtggatccccagtgcttatgactacaacgctgcagtagaccaagttaatgcaaactttaatgatttcaaacaaacatatgtgactgaaaaggaggcactaacaaagagaacatcaagtcttgaaactggactttcaaatgctgaaaaaaatatcgacaacaccgcaaaagcactgcagaactatgcaaccacagcaaagttagacgaagctacagcaaatcaaactaatcagcttaatgctcaaattaaaaatgttaaagcatctattgaatctgctaacgatagtgactctttactgccagattttaatttaaaaaatcctgacgattggattaattactatagttatgatttgaaaatccactttaaaacaacaattacaggaaaagttggcaataccgtatttagaaaagattcatcgaatcaagcaggatgttggatatatagccgcaaagctttaccgacaaatcgttcttataaagttagcttttgggttcgccgaagtgcagattctacaggtgattgcagcattacggctatgtatggcaaagcagatggtagtttttcaaatgctacaatcactgcatcagtcattgctttaaatagaattccagcaaacgaagaatgggtatatatcgaacaggttgtaacttttaatactcatccacaaatgaagttaggttttgcacttggacacaatggcagtggcggttggtgggagttacaagcttatcgggtaaatagcgttttaacagacaaagatgtagacacatcacttgttcgcgctacacaactacaaaattattcgactactgctgacaccaataaagctgttgccacagctacagatgccttggaagcaaaatttaagcagaagttcgggaatttatggacagatagttcagcaacactggatagcacccgttatacaaaagcagaaacaaataaagctattgctgaagaaagtaaaattctaaaagcaacaatttcgtctagtggtggagacaatttaatcaagaatggtgatttctatgcgcctttttcaatctctaactggcgtcagaatgctggtgttgaaggtaatgttctagaagtttttaaggatgcttatggcgcaaactgggggagattccgctctacgaattcgtctacttattttaaaggttttatagagtcaattacgatagctgatggtttagaaattaatcaaacctatacgttgtcacttaaagccaaagctctaactgcagcacaaaaaactttgcttttaatcatccatagatatgatggtactggtaataaccaggttgttaatgaatggaatattgcaacagataaagaagtattatgtacttatacttttgatacaaatatcaacaacttacaatatattaatattatcctatgtgctcaagtagggtatgctcctgatttcttaattcgtgaagttcaattagagaaaggcgagttagcaacaggatttagaaaaaatcctcgtgaaattgagaaaggtttagaagctaattcattagcaattacaggcactaaaacagatgttcagaaaaatttagaaaagatccaagtactaactgaaaattatacaactcttaaatcaactgttgatacgaataaattaacagttgatgggaagtttcaggaaataaactctacaattagtgataatcaacaaaatataacccaatcaattaatagcttggattctaattacaagcagttaaatcaagatctaggacaagtctttaattacagagtttattcttcaggctggaataatgattttactggaatcaagaacttaaaaggtgagactatatctgtagcttctaaccgcggcttttctgtgcatgttttagcagtagatggctcgattgcaacctctacgagatacgatacatatgctgacccagctaatgcagtagcaatgagtaatgcaattcagtcattacctcaaaatacttttgtgattatcactaactatgattacattgcaatgaatttgaatagtgtaaaaccagcattactttcattaggcgcaaatcaatttactctagatcagattacaggcagagatgcttatattttaattgggcagaagggaatcggagcgggaagaggtattgaacttcatgcaactcctgactctggtctgaatggcgcaaaacagattatggttgctgttcaggtcgttagtggtattccattaggattagctaataacagtggtaatttgcaaaaagttttggaaaatcatgctcaaattttaagtcaaaaaattactcgatctgatgctaaagaagtatttgcagaagaaataaaatccttttcagcaaaactagatactattcaatacgcagaagataattggattttattaggtgatgaaactaaaacattaaatgtttcaacaggcacaaatcaaacttttccagtctgggaactacaatataaaattaaagaactaccaatcgctaaaggtgatcctgtagttatacgaatcaaatataatgcttcggcaggtctaattggtgcagtttgtaccatccaatttcacggcgcggtatatgggcttggtttaccattatttactgttcaagcaagtggagaattagaattaacggggatttttccaagtgatgtaaaagctacgaattttgaatttgttcctctgggtttacgatttgataatgctccttcagcgggcacattttcagtttcgaatattttcattagccgaggaaattctgctcctaatttcaaaggaggctttaaaactactcttaaacaaaatgcgaaatttgttgaagatacatttatcaatgctgatgttaacaaaggtgttattgcacaacaaattcagcaatatgacgcttctgtaccaggtggactttcaacagtattaaaaactactaaagcagcagcggatcaaacatcaaaagatttaattaatcttcgtaataatgatattactcagctccaaacaagcaccgacaatctgggttcagcattagaaaatacaactaagcttgcaatgatgattactaacggtaagttgctttacggtgatgtaaatttcaagaaaggaatgaacaacgtcggcacttacaacaatcttcagaatggtacagttagtgttactcgtgaagttaaaagtgctgacaatccgaccacttcaactcatgaggttagaatcgttacaactggttcagcaagcccgaatttcggcggttttcatcaacagtttttcacacgttcaaatgctatttttatcattaaatacctgattaaattacctatcggctacaagttatatcctgcagcaaatttaatgggcgatggatcagtagataaattcattggtagcactgacgggacggggagatttgaagtttatgttcgtatggttaaatccggtgccaccggaatattcgatacttctggattcgtacatgtagcgggtggaccagccccaacacctgaaagccctctaatctggactttagctcaaattgaatgttatgacgtaactgactatgcatctgcagatcctaatttacaagatttcgtttccacagctaacgagtcattagggacattaactaattttaaggaaacatgggcaagtaaacttactgaaatgtcttctaaattggatagaacaaatagtgcatatattcttaattctgacctaactaatacaaatattgaaagagcaattgctgcatcgtcaaatcagttaaagtcggaatatattgatccattacagaaaaatactgaaagcttaaaagaaaatattttaacgaatgttgacttatcaggtttgaatccagatatttactatcctgttatctttcagttggctaccggtaagcaaaagtatgattttaaagtattttgtactttgggcggccaaaataatagtaatgtgccttgggctacacatggtacacgctctttcggtcttaattgtgaatggagtgttaccgctaatggatggggtactcaagcagaaaatagaattattgataagttctcttttagctggactgcacaatcacctttaataaacattaaacaaatgcctaactcttcaattgaaactgtctttttacggggtggggcgagatatgatatatcacactataaaacgattacaccacttattaaaactgagtctttcacagctttgggacaatctattgaaccaattcaatataattcgtcacttgtaccagtaccaatttttgcagaaattgtaaaagctcaagacacagctgctgcagcatctagaacagttgctgacatacaaagagattatgtgacttcttcaaaattgaatgaggcagttgcttcatccaatgaaagattatcagccctctattcagcaaatagccaaaccattatggcgtctgctttgcaaacttttgagaaagattggattaacagaacgcctagcggctcaagaataggaatgcgtttaattgaagatcaaacttgtcgtggtggttatgcattacgaatgggagataattcaggaaacgatgaagtatggttgaattggttttctaccttaccaattgatgataataagatgtaccggattaaataccgctacagaagagtgtcaggtgctggtgtcgtttatgtgggggccacctgttttaatgccgcaaaaactgcatttattacagacactaattacattaatggagatatcggctcaagtcattatgtggtgggtggcgctgcacctgccttgggtacatgggtgacgggtgttgcttatttcaaaggtagatctgctggtgcaagtagtggggctggaactcttacaaaccccagaacatttgcaaataaagcagctttctttactcctgtttttatcggcaattatgcagctcaagcaggcgaagtagatctagattacatcgatattgaagatgcagacaatattgctgaatttgagagttttaaaactacatataccacggatgtaggagcttacgttggttcacttcaaactctcacttcagtatatgggccaaatgcaattaatcttaagtctcaagttgatttgatcaacgggatgaaaggtaaatacgtaatgggaatggataacaacggtgttttctctggtttatccatggtaagtgaacaaaataatggaactgtccaaacttctataggtttccaagctgatagaatttttttcacaacaggtacttcttctactaaatatatgccgttcataattcaagacaatcaggtcattatgaatagtgatgtatttattaaaaatttgaccgcagcaaacttcaaagcgaagtctttaacagctgaactgtttaaagtcgataaattgagcgcgattgctggtgagttggggaccttaactacctacaaggatccggctaaacccaatggtgcaagaatggttttaagcggcagtttaattacagtttacgacgataataatgttgtcagggttaaattagggctgtggtag

SEQ ID NO: 64464 - DNA, 552 bp, Acinetobacter baumannii
atgaaaaatttagaagcttcatttagagcattgcgagtgctccacacggcaaaagatttatttaaccaatatgggtttcacaaagtcggggtagaccgaattattgccgaatcccaaatcaataaaggcaccttttacaactactttcgctccaaagaacgactcattcaaatgtgcctgacttttcaaaaagacgtgttaatggaaaaggtccgagtggagatagaaacgacgcaatacctcactttgacacacaaactcaggcaaatttacctgttacatgccgacttaaaaagtccgtattacttactgtttaaagcaatttttgaaattaaatcgatttacccaaacgcctaccaaaccgcaattcggtatagaagatggcttaaaaatgaaattttctgcctgctgtcggaaactaaaaaaatggcttcttatgcagaagcggagatatttgtttttatgattgatggcgcaattatggagctattaagttcagatgatgaaagggaaagagatgctttgcttgagtattttttaaagcgggtttga

SEQ ID NO: 64465 - DNA, 264 bp, Acinetobacter baumannii
atggaagttaaacctatttttaaactacctaatcttgcagaaactcaagaatgggcatgtgagcaaggttgtgaaaatgtccatcctcgcctttaccgcaatgtttatagccaaacttgggatacagacgggaacttaactgaagaacttgctgagcattactacacatgcggacgcaagcacttactcatggtttgggatgaatcaacttctgattatgcagaacttgcagatgagttctataaggagccctctcatggataa

SEQ ID NO: 64466 - DNA, 813 bp, Acinetobacter baumannii
atggataactacaaaatcaaagttaaagatgaagctgagagcaaagaggctcaggagttgtttgtacaacttggctacaagttggatactttctttgggaactacgaaccaagtactagatgggttctagcttgtgcagatggctctatgggttgtgccagtgatggtatggctaaggaaacattgaaagaactcacccttccccaactccgggaccttgttgtgttgaagcgtaatgatgtgaaggatgccaattgcatagataagaaatgtgaagcttggtatttagcaagtgatggtacttattatgcttggcaataccgtaaattgtgttgggacacagaaagtgatgcatgtgttgaagctcatgacataaagccaattcaaaaacaaagaacccaagaccaaggcttgattagcggggctgatgttccttcactaatcaaaaaaggtgaatctgttcaatttcgctcaaaatttaatgttcaaggtggtggtgattggcaagaccttaatcttgagcgggatgaagaagagttctctttaggcgacctaattaacactcgttttgaatggcgcctcaaaccgcaaaccatcaagcttgagttggagattccagcgccttttgagcctaaagatggtgatcgttgtttctgcccagacatggagcaggacgatggttttttagattttcattattctgaagattcaggtttccataagaattttactcaattcggagcatggcgcactgaagaagagatcaaacaagttgtagggcaacttagaaagctgagaggtaacaactcatga

SEQ ID NO: 64467 - DNA, 243 bp, Acinetobacter baumannii
atggagtggatttgctgcaaagagcggatgccaaaggaagacacctctgtgctctttcggcttcaaaatggcgttgttcatgatggttttttaactacagattattcagatggtccatatggtgagaatggtgaagatttcggtgattactcaaccatgtggtcatctttatcaagtggccttgaatatgaccttcatgaagtaacgcactgggcaattgagccagaaccaccaaagaattag

SEQ ID NO: 64468 - DNA, 207 bp, Acinetobacter baumannii
atgagagtaaaaatcaaaactgtgaatggctcattaggtctacctaacaacttacagctagacaaaatttatctagctacacgcttatctgaggatcgtatgaaagttgtttgtgatgatggtcaagaaatcataacaagcattaccaaatcaggctacttgggtgagtttggtgaatgggaaattgttgatgaggtgccagcatga

SEQ ID NO: 64469 - DNA, 462 bp, Acinetobacter baumannii
atgaacgtgactcttatgacagatgcttcacattgccctgagactggtgctggtggttttggattttggtgcgtgtcagatcgtggaaagcttgcaggtggaaagccattgcaaggaaaaatcaaagacagctatgaagcagagatgaaagcggttgctaatgctttaaatattggcattcgtgctggactcatatcttcgggtgacaaagttttaattcaactggataacacaggtgtaattcagtgcattaagaaaaagtgcaagccgagaaatgacgttaagcatgtgcttgattacatctttgaatatgcccgtgactttctaattgaacttgaatgccgccatgtaaaaggccatagcaagaaaacagaaagccgttattcgtctaataaacattgcgatcgtattgcaaagcaaaacatgcgattggctagaaaggaattgggagcagcagcatga

SEQ ID NO: 64470 - DNA, 501 bp, Acinetobacter baumannii
  misc_feature (439)..(448): n is a, c, g, or t
atgaagattgtcattctcaacaaaccatatgacgttctctcccagtttcgtaaagacgaagcacacatgacggtctctgactttgtagatgacccgactttgcgcatagcaggccgtcttgatatggactctgagggtttagttttcttaactgatcatggtggtttgaatcagttcattaccaaccctgcgaataaaaaatacaaaacgtatttagttcaagttgatggcgatgtaaccgaagaagcactcgagcagcttcgtaagggtgtagagcttaatgatggtatgactttaccagctaaagcaattaaggtaagtgagcctgaatggttatgggaccgcgatcctcctgtacgttaccgtgccagcattccaacatcttggattgaaatctctatttgtgaaggtcgtaaccgccaagttcgtcgcatgaccnnnnnnnnnngcggtaggttttccgactttacgtctcattcgtacaaaaattggtacgattga

SEQ ID NO: 64471 - DNA, 285 bp, Acinetobacter baumannii
ttgggattacaaccgggcgaaaccaaagagattgagcctctactctaccctgactttaaagatgttccggctgaacaaccttatcgttcacgttcatatgtgaaaaaaccgggtggcactggcggtaagccaatggttcgcaagaacaaagatggttctgcgaagaaatctggtacaaagcgtatttggcaaatggatgaaagtgaaaaaccgcgtcgtaagactaacggtacaacgcgtccaaataccaaagcaccacgtggtcgtagccgcaatagccgataa

SEQ ID NO: 64472 - DNA, 372 bp, Acinetobacter baumannii
atgtcagatcaacaaaattggttaggtgccctcacacatcctgaattaagtaatgctttatccgcaattcatagtcaacctgaaataagctggactgttgaatcattagctgaacaatgctgcatgtcacgatctaagtttgccaatctttttaatagtattattggtgaaccacctcttacttatttacagcattatcgcttccgcttagctagccaatatctacgcacaagtaatttatcaatacaacaaatttcaaataaagtgggctattcttccgaaaccgcatttagtcaggcatttaaaagagtatatgatttatcacctaaacaatatagacaaaattatattggtactaatctcgaggaataa

SEQ ID NO: 64473 - DNA, 261 bp, Acinetobacter baumannii
gtggaacttaaattaaatcttaagctaattaaaggccccatacattctttagaaaaagcaaattctaaaattcctgtaaatcaaaatgtgggcggaattgcagctggcactgcttttgcaggtgtgctagctgaaagtagtgcgttacttaccagtgctcctatactagtaatggcaggtaaagctaaagatggcatcacctttacggggggaaatagaagaacattctttactagggcaatttacgacggttcgttttaa

SEQ ID NO: 64474 - DNA, 288 bp, Acinetobacter baumannii
  misc_feature (276)..(285): n is a, c, g, or t
ttgccatatctgcaactggcacaacgtggtgatgttttaaaaactgaaaagcggttaattgaggaaaataagaagggtattctttttactaacggcactggtacaggtaaaacctttactgggcttggagtggcaaagcgttttattaatgctggtctcaagaatattttgattgttaccttgaatgataagattgcaaatgactttgtaaaaagctcaagtccgttgaatatcaaagcttacaaattaaaaagtattaaagataacggcggtgannnnnnnnnntaa

SEQ ID NO: 64475 - DNA, 969 bp, Acinetobacter baumannii
ttggctgcaaagcttgctcttagcaatgccttaaaagctggagcgattaccctagagctttacaatcaatataatgggcaaattgatgtgttatcaacacaaccagaggcctttaaggactttgtgggtaatttggttctttctaatgcaaaagacccagataagtaccttttctcaactgccgacaaccaactagataatcaaacacagttagatattgcggaagcaaacagacaatttgattatgaaaaactaaaatctgatgatcagtatcgtcgtgatgctttaggtcaagatgatgctcaattttgggccgaatacggtcaaaaagatgctcagtttagtacgtctcaagacactgagcgattgaagattgcaatgcaaaagcaggtgacagctgagaaacctgagcaaaaaatggaaagaatcaatagtgctattgcttcagcggatgcaacagctcaagcagcaagggccgccaaagatgctgctgaattaataaaccatcctggactgaatatgggcacaggtttgacaagcgcttttggcatgattccttcaactgatgctaaagatttccaggctcgtctagaaaatcttaaatctcaggtatttctaccgactgtcaaagctatgcaagggatgggggctttatcaaacgccgaaggtgagaaaatagcagcagctgtagccaatcttgatcctaaaattggacctgatgcaatgaggcagcaactctccattattgcaagacaaatggctaacgctgcacaaaagtcaaaacaacagacacttaactacgcatcacggggcggtacgattccattaaatacccaaaaaccacagcagcaaaatggtaatgggaaaatatttagtagagcgatggtgcaagaatattctcgacaaacgggtgtgcctgttaaagatattattgcgcaaattcaacaatcgggtggaagtgtgcaataa

SEQ ID NO: 64476 - DNA, 459 bp, Acinetobacter baumannii
atgtttacatatgagaatggggtagtcataggttttgttctatggataattactttaattcggactctttttttaattaattcaaaaacgcaatcaaacctaagaaaagttggtaaaagactaagtttacttggtggggtaaaagacattgaatatagaaaacaagacaagtggaatttgatattaaaattcatttttatagtggtgctcccacttggtttaatttttttaagctgggtgtacgtcattccaacaattgtttattacttatatcaattctatcaagatttttctgcgcctcagaaagttaaggattttagatggaaattaaaaaatttagatttacatcaagaccaattaattagatggctgatggagctttcggatcaaaacccagaagattttgagaaaattaagaaagaaattaacgaagatatagaaagaagaaagaatgcttag

SEQ ID NO: 64477 - DNA, 354 bp, Acinetobacter baumannii
atgcctttaatattaataggtatatttattttaattgtgggactgataactgtacctatagttactttattattcacaaatcctgttgcttttggattgggtttaattattattggggtgatttgggttattctctcaaaattattttacggattaatttttgcatttttaaaagccaatgaaacatggaataaagtcattttgcctaaattagaaacaaatagatggtggcaagtgcttattaaaataagcaataaaactaacggagatatgtttgcaagggtatttgtttatggctctttgtttttaattctaatttatgcgatatatttagaatacaatcccctagtataa

SEQ ID NO: 64478 - DNA, 282 bp, Acinetobacter baumannii
  misc_feature (254)..(263): n is a, c, g, or t
atgtatgaggtatcttctgataatacgactaccgtatcgcagaatgaatctagccaaaaagtagcaactaaaagcatttcatcaactacagagaatgaaaaattagcgcctcaaattctcttgtcccaaaccacctcccttaattcttctgccccagtctgcaaatataattttgatgcaactcaagaagatttcgatgtatggaataatgaataccctgattttcctacgaaaatattcccatcgataaatgnnnnnnnnnntaaatggtcaaaaatttag

SEQ ID NO: 64479 - DNA, 999 bp, Acinetobacter baumannii
atgattactcctgatgactataagcataattctgccattgtccaagcaatgtcaccagaagaggtgaaaaagtttgcaatgggtattgcccttacaaataaagatacagctccattcttgtaccaaaccaaaaacaatgaagcagacaatgctacatccgttgctaacaatatccgcacaactgatgcgtcacgttatgcgactgatactgcagcagaaacctcagataagaaccgtatccaagacaagattctagcagaacaaaggattgcacttgaacgtggtgattttgagacgatgacgggaactgatggaaaagcatatgccgtttataaggatggccgtgttgagccattgttgctcaagagcggagaggcgtttatcccacaaccgaaaggagcaggtaaagaaacccaattgcaaatgatcaagcggaaagagtcagcacaaaatcacgtttctgcatctgctcaagctgcttcaggcgcgactttggcagcaaatattgccaacagatatgttcaaggcggttataaccctgcgaaatttgcacttgaatcaaaaatacccggcacagaggcttatggcattgctaaagaccttgagagtttaaagtccaatgcattcttgtctagagccgaccagatgcgaggtttaggcgcattgactgaaacagaaggagctagattaatttcatctgtctctccacttgacccaatgcagagtagtgagaagtttttaactgaccttaaaaatgtagctaatacttttagagatatttctaagtcaaatagagataaggcgcaactttatgccaatccgaatggtaatattactaaccccaccgtagccccagccgaaagcacagaacaaaatgtcactatacctaaaggtgcttacatgacattaagtgatgttaaagcttcggcaaagaatgctggcattagtgtagaagatgcaatccagcgacttcaaagtaagggcgttacaattagataa

SEQ ID NO: 64480 - DNA, 540 bp, Acinetobacter baumannii
atgaaaagaatagttttagtatgtggattgcttgcttcagtatctagttttggcgcagattggaagtatgtatcaataggcggagaaaatgatagaggtatttacgttgataatagtcagtatatgtataataagaaaactaatactgtaaaagcttggtttaaaacagttagttatattgatcctgatagtacagagacatataccagttcaaagaacctatatcagttttcttgttctgataaaaaagctaaacttttggggtttgttaattatgacaagaatgcgacaattatctcatcagatcagcgcgatgagaaagatgctaaatataatatgattataccagatactattggtgaagatctttggaaagcatcttgtttatcaaagggaaatggctttaggttccctaaagtacaagcaggtgagagattatcaaaagctgaaatggaaaaggtattccctaaggggtatatacctaaaaaaacctctcaagctgaaactgatgaaatgagtaaaaacttaagccctcaatag

SEQ ID NO: 64481 - DNA, 2175 bp, Acinetobacter baumannii
atggctcagttaagtatagaagatgcaacaaagctacttagtagtggcaaaacaaaaccaagacaaattactgctgatgaagccttggcaattttgaaacctcaaaaagatcttggcgtacagcaacctataaaagtgtcagctactcgccagccttttgattggaaagcagcacaacagaagtctatgcaagatcaggccaaaaaagaaggggcaacacagatgtgggagtctgcattgcttggtgcttctgaccttggtgctggactagtgcaaggttttgcttatgtaggtgacaagttaggtcaaggtcttaactcagctttagggactaattttgataccaattcgtataaacgatttactaaccaacgacaagacattgaagatttccagcaagctcgaagacagcaaaatggacagggttttgactgggcacgcttaggcggccaaatagccgctactgctccattaggtgcgttagggcgaggctatgagggagcagcgattctttcaaaagctggcgcaggtgttgcagcacaaaatgcagcagttggcgcagcaattggaggcgctgggtttgctgagaatggcaaacagcgcctagaaaatgcggcactaggtggtattggtggcgcagcaggtgcggctattggtgaaaaggttgggcaaggtgtttctaaggtcgctagatcggtgaaaaatacaggtccacgagctgcacagcaaacagcacaagctattgataagaatctggatgatgcattacgccagcaaggcatgtcgcttggtgatttatcagatgatgttataaacggattgcgtaaagaagctaaagacgcgcttaaagctggcaaaaaccttaaccctcaagcagtagcgcgtaaggctgttttggaccaagttggtattaaggggactaagggacaggtaagcgggaatgcacaacaatggcaaaaagaagctgagttagcaaagcttcaaaatgttggtgcgccattgcgagagaagtttattgatgacaataaacagcttgcaagcttgttagatagtgcaaatgcaagtactggcggtaaagcaactgatcaatacggggcaatgaaaaacgcactagactcagtaaatgcccagcttgatcagaataagcaatttattggtgctgcttacgatgctgcaaaaaaagcacccggcaatgatgttgtaattgatggccgtggatttgccaatgatgcttttactgcacttgaacaaaactatgctgcatcaagcttgccctcaagcgtgcagaaaatattgaaagatgttgctgataatccagataagttcactctaggtaagtcagaagaattaattaagattcttaaccgtgaatacaaatcatcattgcaaatggggcagcctacaagttcgacctattcaataggattagttcgtgatgcgctgaataagcgacaatctgaagcgatgcagggtttattaaccactggaaacgatgcagctcaagcataccaatttgctcgtaaagctaatcagttcaacatgaatcaaattgaaggaatgccattacttcaggatgctagaaaaggggtaaagccagacaaattgtttaaccaacatatcttgaatggaaatgttaatgaattggcccgcactgttgatttgctcaaaaacgttaatccacaggctgtttctgatattaagcaacaagttttagagtttattgccaataaggcaatcaaacaaaatggtcagttcagtccagcaggaatgaagcgcgcacttgatggtattggtgatcgtagactttcaacattatttgaaccggatgagcttaaaaacatcaagaatattgccaaagcaggtgaatacttggttatgcaacctaatcattcctatgtaaacaattcaaatactgcttcagcaacgatgaacaagttaatggatttctttgggaattctaaagttaaagctgttatgaacctaccatattttaaagattatgttgttgatcctgttgccaactatggtagcaataggtctgtaagtaaggctttccagccagatattactggcgcaccaattgcccctacgccaccatccccgcaacaacaatcgctaattgatcggctagtacaggctggattaattagcggagcttctgctactacccaataa

SEQ ID NO: 64482 - DNA, 165 bp, Acinetobacter baumannii
atggacctgttttatcgtaaaaatgctttaaatcagctttatttagctgaattgcctttccaacaattgttttgttttttggattacgttgatagacagtgtagatgccatttctgtcaggtagctcactatctttctcaagaccatgtgggttttgatgtttaa

SEQ ID NO: 64483 - DNA, 540 bp, Acinetobacter baumannii
atgaataaatttttctatagtagtctctatcttgtattgtctttacttgttttaatttttttatgcacaagtattcctgctgctaagttaaaaatctttaatgtaactcatccaacttgggtgcggctagaaaaatttcagatcttaaattatgaaattaagtgctcaagtccttggggacgaggtggggataaaatggcaaatctagcagtttcatatcaatataattatggaaataaaagctattttcaacaagaccaagttttttttagaatatataaaacatatatttttgaacgttgtgattcttttaaagaaaagaataaacagctttttaataaggctgtaaaagatcagacaataaaattatttataaataagaattcccctaataaagctaagttatttctttcaaataaagaatttaactatagattatcttggttaagtattttcttttcagaaatacaaggaattctattgactttacttgcgattgttactctttatagtatttatatgttatttaaccgtagataa

SEQ ID NO: 64484 - DNA, 801 bp, Acinetobacter baumannii
atgaaatcgaaattattgattattgctgggtgtttaattttatctaatagttttttactatctggatgtgtcaagcaacctacgtcacaaaatcttgtacaagaaaaatcttcagaagctctgagattatatgaggaaggacaaaaatattttttaggtaaagatgttaagcagaattatcaaaaagctttagaattatttcaaaaagcatctgatcaaggattagctgaagcacaaaatgatctggggggaatgtatttcgaaggtctaggaacaacccaagattatcaaaaagcttttaaatattttgatagtgcagctaaccaaaaattagcagcagctcaatataatcttggcctcatgtatgataaaggtctttatattcaaaaagatagaaaaaaagccctagagctttatgaattatcaactgaacaaggttacgctaaggctcaatataatttaggtaatgcttatgcaaatggagatggtgtcccacaaaataatacgaaagctttagaacttttctcaaaagcagcacagcaaaatcttcctcaagcatcctataatttaggtaatatgtatgcagacggtgaaggggttacccaagacaataagaaagctttagagtattttactaaagcagctcagcaaggctttcctcaagcacaatataatttagcttatatgtatgaaaatattttccctgatttggaaaaggctaaattttggtatatggaagcttcaaaaaaccatatccctgaggctgatcaagcattagaaaggttatctacggttaaataa

SEQ ID NO: 64485 - DNA, 156 bp, Acinetobacter baumannii
atgtatgttttaaatgtgcgttcagagttaattgcttattatgaaagacgcggatatataaaaacaggttaccatgaaccatatccgcttgacgcaaatgttggattaccacttataccaattaaactaatcgaaatgaaaaaggacctcaaatga

SEQ ID NO: 64486 - DNA, 171 bp, Acinetobacter baumannii
atggaaaaatctctaagcaaggattgtgctgacttaagatcacacttaaaaagagtgaaagatacttttgtaactcatccaaagaaatatttcttaagcagcagacttcagttgaaatctggcccaattatattgagcgtaattggtgtcgtttttagtagttattggtaa

SEQ ID NO: 64487 - DNA, 1149 bp, Acinetobacter baumannii
gtgtcgtttttagtagttattggtaattatgcagaagcaaatgccttcgctgttgatccttctgtttctggcgtaattcatgatcgtccagatcttggcagagctaaccagagccgtgagacaggagatatcggacaaaataatcagttttatactgccgcattaaagctacaactcacagaccagtttagttttggcttactttatgaccagccttttgcagcaaaaacagcttatcctgttttacctaataatagttattctgatgatatgagccatgaaggaacatctgtaaatgtaaaaagccagaatttaagttttatttttggctattcaccacttaagaattttcaagtttatggtggacctgtttatcagcgtgttaaaggtaatgtctctttcagaggaatggcgtataccgaagcttttaatggatacaatgctaattttaaagaaaagggtgaacttggttggttagttgggggaagttatcaaattcctgagattgcgcttaaagcatctgtaacttaccattcaaaaattaaatataattttcaagtagatgaaaatatatttggtgaaccacttcaatatgttgcaccagcagaaacaaaaatcgaaacgcctcaatcagtaaatatagattttcaaacaggtattgctacaaacacactagcgtatatgaacctcagatgggtgaattggaaaaaatttaatattcgaccagcgcaatacgatgcgcttaccgcaagctatatggatatgttaacggaaggtacatataaagatggcattgatttggattcttaccagaaagatcaatatacggtgaccttggggctaggacgccagctaactgaccgttggagcattgcatctgatataggttgggactctggcacgggtaatcctgcttcaacacttggtccaatgaaaggttattggtcttttggacttggtgctcaatttaatcccgcacctaattattttattgctgcaggcataaaatatttttggttaggcgatgctaaagctgaaggtggtggctactatttaccaattgaaggtattaaagaaattgcagaacaggctgagtttaaaaataatcatgcaattgcttatgcattaaaatttggatatcgcttttag

SEQ ID NO: 64488 - DNA, 291 bp, Acinetobacter baumannii
atgatgcgtaacatcccagactctttgtcgcttccgttcacagtatggatgtgtgaaaacggattttatccatctcataaaaatggattcatggttttaaaacgtggcaaagaagtagcaaagatatcaatgaatgaaacaaaatacggtttcccaatgaatgatatttgccaaaagaaatttgcctcgttctgcagagcatggatgaacagagataaacactttattgaacaattacgtttgcgtggtttagcaagattaaatcaaagaagttatcagttggtggcgtaa

SEQ ID NO: 64489 - DNA, 135 bp, Acinetobacter baumannii
atgggccattcatctgaattttcctctaaaaaatgggcaaaatatagtgagttattcggtgtttcttctgtaatgataaattatctaaacctctctactcaagatgagtttacgagagctggttggcggaaatag

SEQ ID NO: 64490 - DNA, 453 bp, Acinetobacter baumannii
  misc_feature (361)..(370): n is a, c, g, or t
atggctcttgaagtcaatattcaaagaaataaagacgttagtttgtggcgcgaatataaagatgctgaaggcaatgtattagctgagttcaagattcgtggaattagttataagccttaccaagtcgcattagagcgggtaaataaccaaatcacatctaagggctttgatgtagccttggcctctaaagaggacaaactctatcatgagcttttacttgaagctgctgcatgccatctcattgaagactggaaaggcgtggtattcgtagaagtgaatgctgatgatgagcaagtaaaaacggaaccgccttacaatgcggagaatgcgacaaagcttcttaacatgggtgatttaggcnnnnnnnnnnagtcacaaccctctacaactacgccaacaagttcgcgggcctcacggaccacgaaaaaaagcaaagagaagcgctcggcgtaa

SEQ ID NO: 64491 - DNA, 171 bp, Acinetobacter baumannii
atgacatggactgtacatgaggtttatgacagcgttcaggttgtacctgatgatgacttaaaacctcattcattttttcactgcgaatgccatcccgaatatgaggatggcatttttattcataacgtatttgatggtagagaagcgattgaaacgcctttacctagttaa

SEQ ID NO: 64492 - DNA, 1626 bp, Acinetobacter baumannii
atggcgagtccggcacaaatcattcgacataaatttctcaatacattcttttcacgccactctatttggttcttgtgtatttttactgcactcacaatcacgtggtttagaaccgtatatacacctcatagtatttattattttatttcggatactttactcaacggtttatgggtcgtcagtggcgcattaagcttattaggtctatatgatgtcctacaaaatagacattcaatcttaagaaattacccgattatgggccatttccgttttttatttgaagatatacgccctgaaattcgccaatactttattgaagcggatcaagatgcccttcctttctcgcgtatgcaaagaagtttggtttatcaacgtgctaaaaatgagaatgcagataaaccttttggatcaattattgatgtctatcaagaagattatcgctttattgttcattccattagtccatgtccaccagcggatcctaagagtttccgtattcaaattggtaatgcccaatgccttcaaccttatagtgcatccattatgaatatctctgccatgagctttggtagtttaagtgcgaatgcaatacgtgcattaaacaaaggagcacaattaggcggtttttatcacgataccggtgaaggtagtctcagcccttatcatttagaaaatggtggtgatattgtttggcaaattgccagtggatattttggctgccgaactttagatggaaaatttgatgaacagaagtttgctaagcagtctcaattgccacaaatcaaaatgattgagcttaagctttcgcaaggagctaagccaggccatggcggtattttacctaaacataagattactgctgaaattgccgaaatccgtggtgtttcccgtgaccatgattgtatctctcctgccaagcattcaagcttttcgacaccaattgaaatgatgcatttcttacaaaagttacgaactttatctggtggtaaaccggtaggtttcaaactgtgtattggtcaaccttggcagtttatgagtattgtaaaagcaatgcttgaaacaaaaattgtgcctgattttattgtagtagatggttctgaaggtggcactggcgcagcccctattgagtttagtgactatatcggaacaccattacgtgaaggcctacgctttgttcataatacacttgtaggtgctggcctaagagatcaagttaaaattggtgcaagcggtaaaattattagtgcatttgatattgccagcacatttgctctcggtgcagattgggtgaactcagcacgtggctttatgtttgcagttggatgtattcaagcgcaaagttgccatacaaaccaatgtccaccgaccaaagcagaacgtgtatttaatttccacaaaaatacattacatgcattatcagaaatgattgctgcggcaggtttacgtcatccatcggatattaaagctcatcatttagctcaacggattaatgaccgtgaaattaaaaactatgctcaattacacttcttcttaaaagaaggtgagcttttacaatctgaactgaaaaatgatgatgataatttctattatcgtatgtggaatatggctgacgccaatcatttttaa

SEQ ID NO: 64493 - DNA, 1467 bp, Acinetobacter baumannii
ttgtctcgtgggctcggagatgtgtataagagacagttattgaaattttctcttgcgaatcatgacgcctatgtatcggacaattatattcaacacactagattaaagctaagtttacaacatgaagttacgtatgatagagaagaaagatttacagagatcaaaaaggaatttataagaaattcaaaaaattaccgatatttaatagaagcaattaaatcttctgaaaataaaaataataagcaattttcagaagatttagctttagatttaattgcatatattgattggttactggtgctatatgaagctagtgatactcttcataatgacattgaagttggcggattaaatatagattctgaatatattccagagattttctatagttctgagcgtaaagatacagaaataaattttcataatgagcaagcaaattatcatctatctcgcgaaggtgtcagttccgaggatgaggtcacatcttcattatttgatggaaattttgatccaatagataaagtcttccaaacagaccttagctttaagttttctcaacttttaacaatacttgatatactttctaattgggctagttacactaaaattgcaccacaacctatttatcaagatagttttgaaaatattgaaaagaaatgtaatgaaatactcgttgatattgatttggatgagattagaaaaattttaagcttcctaacactagatggctctaaagttaaacgtttattaggcaaagatactctagagtttgatgtgcctgtatctgatcataacaagcgtgagcatagattaaatattagacctattattgaattagcagatggtaatttaatttgggggcctgctgcttgccaccgtactttaactatatggtttaatcatatcgccaacggttatttacctgctgattttaattggaagtcggttaataattatgttcgtaaattaaaagaaggcgtagaaaaagaacttgaaatccgtgcgggagaggttacaaaaagatttatcaaactcactgagagagggattgatttaagaagacgttttcctaaagaggatattcctgatattggcgattttgacgttttagcttatattccagagaaaaatatttggattaatttagagtgtaagtacaacaaaccttattactgtctaaaagacatgaaaaggttaagaaatactgtatttttgggtgaaggtactaaacaaagccatgttagcaaaattcaaaaaagagctgaatatttagaaaacaatttagaatatgttcgtggtttattaaagtggcccgaaagttcatgtcaacgctcaccacaaatattaaatttatatatttctataaatacgtattggtggtttagaaaccctcctatacaggttgatattaattttattcaaattgatgctctagataactggtttcaaatgacattagcggaataa

SEQ ID NO: 64494 - DNA, 1467 bp, Acinetobacter baumannii; identical to SEQ ID NO: 64493

SEQ ID NO: 64495 - DNA, 2523 bp, Acinetobacter baumannii
atgaaagcaaatagtggtaatgttaatattactggcgaaaatctttactttctaacttcaaataactatgcaaattcaactagtacaacgaaaaaaaactcatcaattttaggaattccacttaataaatctaaaacgactagtagtcgtagtcaaatttcgcaacttccagtaaagctggttggagattatctgtcaactgaatcgaaaaatgatacagtttttgttgggacagagtttgattatatgaaaaatgcgtcagttaaggcaggtgggcagattgctttccttggggcatcagaaacaataagtcaagctttaaaagttgaaaagagcaatattgtttggcaatcaatgcaagataaaggctctattactgaaactactaaactcccaaattttaatggacctattccacctacttttaaagcatcaggtggcttaatagtacaggtgcctattatatctaataaaaataatgatatccgtgcagaagtgattaaccttgctaatcaaccaggtaatgaatatctcaaaggttttattgccagaaaagatgtaaattgggaggcggttaaacttgcacaagagaattgggattataaatcacaaggtttaactgctgctggtgctgcaactgctgctagtgggactacagtaggtcttggagcaagtatgattggaactgctggtgtaactacgactgcagcaggagcaattgttccatccactttaggtgttatggctaatgcagctgttacaagtttagcaactcaagcaagtattagcttaattaataatggaggtgatattagtaagacacttaaagatttaggaagtaaagaaactgttaaaaatttagcaacttcggtcgttactgcaggagccttgagtacagttggtgggcttgattggatggaaaaattaaaagatatgggtacagatccgaatcttttagtaaatctagcagggcgtactggtggagctatagttgaagccggtctaagtgcaggaattagtagtagtatcaatggtggaagtttaactgataatttacaaggtatgttactttctagtttcgcaacagctttacagggtagtttagcgtcaaaaattggtaaagaactaggaggaatgaataaaacagatttcgaaaatattttacataaaatagcccatcttgctgctgggtgcgtagctggtgctatacaaaaacaatgtgaatctggcgctataggtgcaggaattggagagtttgtcgcagagttcatgccagcagccagtggcaatggagtgtatagtgatgacgaaaaagaaagagttttagcagttggtaaaattttggcagctggtgtagctggtattactgggtacgatgtaaacgttgcatcaagctctgcaaatacagcactgttgaataatgcattatcaaaaacggatgtagatgtattaattcaaaacttaaaaagctgcaaaaatgaatcacaatgtcgaaatgagattcaaaaagcagttctcaagagtaattataatcaaagtaatgcagtgaattgtctttcgttactttgctcagataatcttgagcaggcaattagtggttataatcagcttagaggatttatagcaagtggtaaattttcaggagataatttaaagctattaaataatttactcactcaaagtactaaagatattactcttcaaattaatagactacctcaagttcaagcttatctaaattccccttggacaccgccaacaaagcaacagatggcacagatagttattgatattttaccaatgactagtgatccttctgcaatttattcaattattacaggtaaagcagttgttacacaagaagaggtaagtcgtttttatgcagctgttggtttaattttgccaattacaattggtcgttctttaacaaaagccgaaattgctggtttgaaacagtcttcgcaaaatccactaagcggtacagtaagtataaaagatctcccagctctaccaaaatctgcacaaaacttcgttattgaacaaacagcacaatctaaatatacaaaacttttatatgaagcaaagaatgatcctagtttaggaacttggagtgcttctaaaataggtcaaaagggtgaggaaatagctgtacagttggttaaggggagtggttttacagatgttataagtatacaaaatgctagtggtaatggtattgatattattgcaaaaaatcctcagggaaattatgtttacttagaagtaaaaacatctgctgttggaaagattggtagtttatctaaaaggcaagaagatatgaacttctttgtaaatgatatattaacaaatgctgctgctaaaactgggcgttatataaacataagtgatactgtaaatgcacaagctaaaattatgttaacaaaatataagcaacaaaaagctgtaggtaatatctatggagcagctataggggtagatttaaaaaatgctcaaatcttaatctcttcttggacaaataaataa

SEQ ID NO: 64496 - DNA, 1191 bp, Acinetobacter baumannii
atgactacaacacgtaaaaagtattacaactctttacaaggtgcttggattgaggaagggattgataatgagcaatttgcaattgatataaataccaagttaaaagtagcattgcaaatgccaaatataatgatacttgcaggtagtggaacatcattaggagatattgccaaaggccctagaatgtgggacttatggttagcatgtactactaacggtatggctgagattgcacagaattgctttaatgagagtaaattcgatcctaacctcgaaggtaatgcaaatattgaagtatgtctttctcattgtgaagctcacttactagttggtgagaaaaaagaagatacagagctttttatcaataaatgtaaagatttaattttaaaagaatgccaatttattttagataaagataaacaattagtcggtcataaagagttcattagaaaattagctagaagaaagtcaaaggatccaagagtaaaattatttacaactaattatgatacatgttttgaagatgctgctggtttgttaggtattaccgtaatagatggtttttccttttcgataccacgtatctatgatgctcgatttttcgatatggatattgtacggcggaatacaattagctcttcaacaaacattcattatttagaaggtgtctatcaactctataaactacatggctctataaattggagtcgggacaaaaataatccatacattataaaacaggtagaaaaagtaaaagcggaagatagttgtatgatttttccagcaaaaggaaaataccaacaatcatatattcaaccacatctagagttaatagcacgcttttcacaaagtttgagagaaccaaatacttgtctaattattgctggtttcggttttaatgatgaccatttgtctgagccaattttgtcagcaatattatctaatccccatctaaaagttattattgtatcccccagtgtcgaaggagatttcaataaacaacctcctgaggtttctaaatattggaaaatttttaaaaaaatcgctgatgatcgaaagaatgatgaaattttatttataaactgtgattttcaacaattttcaagccttatacctgatcttacagctttatctcctgctgaaaaccttcatgaaaatatgaaaaaattatttgggggaaatcatgaataa

SEQ ID NO: 64497 - DNA, 231 bp, Acinetobacter baumannii
atggacgattggtacgataaagattattataaacactcatctagcaataacccaacaggaccaaaaacaggtattgaaaaggttttacgaggcactgtagcaatgggagccgacaacttaatgatggctgatggttttaatatagctagaactaaagccttacctattccaaatgatgaaagtaagtcaaaatatcgcttatattctgttcgttgtgttgccaatatctag

SEQ ID NO: 64498 - DNA, 666 bp, Acinetobacter baumannii
  misc_feature (626)..(635): n is a, c, g, or t
atgtcagacgaccaaaattatgatgcagatgatgtaagggaaattatagcttcttctttagatatggctgaagaaagaacaatgtcattaaaagaattccaaaaaatatttaagagttttggaaggaatttaagtggaagaaaattttctgatttacaacaaaaactagcagcaatctatgacttagaaaagttagaaaagttagaagaaaagatcatagatacagttaacagacatgttttatttgatgataagttcctcacagtttatccaaatgtcaaaaatattgatgaaattaaagaaaagttagatttaatttttcataattatcaatctaatcctgatatagagctacaagtaaataaaagaactttttacccttttcgaaaaaatgatattcgtgaagatttgatcatttcttatcaattttctcaggtacgtgaattaacagttagacaagaaattgatgcttcagatttaaaagatggtattagtgaaatgtatagtcaggtttttggctttaagaccactgagctaacatgttttgactctgtaattattgatatcgaaagaaaaatattaattattttgattgatttggctcgaataatgccaagaaatgaacnnnnnnnnnngttattcatagtaatttctcacatttcataa

SEQ ID NO: 64499 - DNA, 450 bp, Acinetobacter baumannii
atggcacgctctcaatatttaatagagcttaaaagtgaacttgaattacagttgggagaggtttcagctgaaatgttgagtgcgtgtctaaatttagtcgactatgtctctattgctccattaaaaaaaatgcatctaacttttgtcgatctttataaacatgtagatcaatcgatttctgaagatattttctataacgctgttttctacttaactaagaaaaatataaatgttttgactcaaaaatttgaagcttataattctgcgatcgatagatatgaggccattcttgagagtgaagatattaaagaaatattagattctatagctagtggtgaatatgttcatcctctaaacggtaatattttaactgctgaagaatttagtaagcaagtattaacttttttctctccttcccaagtatttgtgagtaatctttatgctcactaa

SEQ ID NO: 64500 - DNA, 252 bp, Acinetobacter baumannii
gtggcttctcggtttgccaataaatctaaaatttctgttctagatttaactaatgtagttcctacatggttattaggaggaatatcttctatagaaagacaatatgtattaaaaacttctctaagttcatttagatacatatttgtgtctaattggttgccaaaattatcagttatgaatcgatctccggcttcaggagaaaactgtgtaattagacttattggagtattggttgctttatttcttaaataa

SEQ ID NO: 64501 - DNA, 663 bp, Acinetobacter baumannii
atgccaatctatgtagagaaaggcagtcctttacttgaaaagttgcgtcaggtggtattggttgaccaaattactgacattcaactcattaaaaatcgtttatggaatggtgtacatgcgatgcttgcttggtatgcatctttaatgggttatgaatctattggtattgccatgggtgatcattcagttaaagcatttgcagagaacttaattgcagaagtgaagcagggacttgcaattgtattacctaactatgcaaaagatttggatcgaatgtcacaaagttttctaaactcatgtgaatatgcatttaaagatccttgtcaacgcgtagctagagatccactacgcaaactcaatcataatgagcgtgtcatggcatcaattgctgtgaatatttgtcatgatttgccttataaaaatttattaaaaggtgctgctttaggttatgcctatgcgattcaatttttagaaattgaagagactaaaactgttgaacatctgcagcaacaaattcagaacctagacttgagtacacctcaaagaagacagcttgaagctgaattggttcaacttatccaatatttgttttctgaacaaggtaaacaaccattaggcattaagtcgaacaataccaaaactacattaactcaatatgtttga

SEQ ID NO: 64502 - DNA, 627 bp, Acinetobacter baumannii
atggtgccaacacctatacgggattatcccgaatggcaccttgggcgtcaaaattatacattgtggtatctagaaattaatgatcagaaattagttcattatctagatcaattgcgtgcgcatttttcagaatttctagtagaacctaatcaccgtcaatatcatgtcacgctgtttatatgtggattcttgacccatgaaaataaagttcatggtgatgacttttgttttagtgactttatgcagcaaagggaaattttaagaaaagaagatattgcaccatttcaattaaaaattggatcagttgatagttttagtagtgctttatttgtagaagtccaagacaccgaaaataacttatctctcatacggcaaaaattaggtacagtttctaatgaaatagccgctttagattactgtccgcatattacattgggtttgtataagaaagactatagtagtaatttgattttacaaaaaatttctcaattacctgtacaatacacacaggctgaatttgatcttaaagttgagcatttaagctttggctattatcaggctcaaattttacaaggtcagctgtattcgtatcagcatttgtttttaggtgattcatgttgcaattga

SEQ ID NO: 64503 - DNA, 723 bp, Acinetobacter baumannii
atgcaaacaggtgtagaccagcaaccagcggggatgtctttttttgaccttacgtgggaacctccacatttagcaaatataaaaatagatttaggtgagaatagttttgttattaagaatgtattttcggcaatgggaacgcgaattgactatgcccagcaaaatgaaggtatccagattattgatgtaactgcagggttaaataaggaagagtttgttagtcaagaacaggcttatatggcgtataaggagctatttagtcagctagaaaaagccggatggaagcagtattttttcccagggttatcccgaatttcaaaaaaagataacatgaaggttatgattgaggatggtcttattatagatccttataattatttaacacttacagagtggagtgatttttttaataacatcccaactgttactactcgattatatgctaatggtgtattaatagagttaagtatagataaaacaaaatcagaaaataataaaaaacaatatatgctaagatttgcaatacaaacaattagatacgtaacgaaaaactcaattgaaaatgggtataaattaacaggacctgagttaaaaagtgctttcgatgaaatggtattagtagatcaaaaagaaagaaggaaagctgaaattaaagccaaaaaagaaggtttccatattgatgagtcatatcaggaccctgatgtttggcagtatgtaaaataa

SEQ ID NO: 64504 - DNA, 1179 bp, Acinetobacter baumannii
gtgggggcagctgaggaagtgattgcagggaaatgggactctcagtttccactcgtggtttggcaaacaggttcaggtacgcaaagtaacatgaactgtaatgaagtgattgcaaatattgcaaatcaaaagctaggccaagcgcttggagcacaaaagccggtacatccgaacgatcatgttaaccgcgcacaatctactaatgactcattcccaacggctattcatgttgcggcaagtttgcaaattaatgaattactgattccagccgtagaacagcttaaagcgactttgcaaaaaaagtcagatgaatttcaagatattgttaaaattggccgtacccatttacaagatgcgacgccactgacacttggtcaagagtttagcggttatgtttctcagctcgagcatggtttagtacgtttacaacaagctttaagtggcctgtatgagttgccattaggtggcacagcggtaggaactgggttaaatgctcatcctgactatgctgttaaggcggcagctcagcttgcagctttaacgggtttgccatttgttaccgctcctaataaatttgaagcacttgcaggacgtgatgctgctgtttttgcatcaggtgcattaaaaacactagcggtaagcttaaacaagattgccaatgatattcgttggttagcaagtggtccacgttgcggcttcggcgaaatccgtattcctgaaaatgaacctggttctagcattatgccaggtaaagtgaacccgactcaaagtgaagcaatgaccatggttgttgctcaagtgcttggcaacgataccactattaatgtcgctggtgcttcgggtaatttcgagctcaatgtatttatgccagtaattgcttataacttactgcaatctattcagttgcttggtgatgcatgtaatagttttaatgatcactgtgcagtagggattgagccaaatcgtgagaaaattgatcatttcttgcataattctcttatgttagtcacagctctaaatccggttattggttatgaaaactctgcaaaagtggcgaaaactgcttataaagagaataaaactttaaaacaagttgctgtagagctaggacttgttacagcagagcaatttgatgaagtggttaaacctgaaaaaatggtttcgccaaatagtaaataa

SEQ ID NO: 64505 - DNA, 273 bp, Acinetobacter baumannii
  misc_feature (238)..(247): n is a, c, g, or t
atggctcgcaagattgaatactcggaagaaatttggaaccggctaaaagaagtctatgaatcttctcctaagattacgtggcaaggtttagttgatcaggttggcgaagaactcggttgtgagatgccttcgccatccgttgtacgccgtaaagcacttgcggagaaatggaaaaagaaagctaaatctctagtcaaaaagacagctcaggagcttaataaagagattaaaaaattgnnnnnnnnnnggtcaagaagatacacaagatactga

SEQ ID NO: 64506 - DNA, 552 bp, Acinetobacter baumannii
atgtgtataagagacaggaatattattattgatgcaaaatctggtgtttctggtgctggtcgtaaagcaagtttgggcatgatttacagtgaaaatgcggataactttaaagcttatggtgttgcaggccatcgccaccatccagagattgtagaagctttggaaaatattgcaggcgaaaaagatgtttttgaaggtcttttgtttgttccacacttagtaccgatgattcgcggtatgttgagtacaatttatgtggacttgacagaggcagggaaacaaacagatttgcaagctttgtatgaaaacttctatgcaaatgaaaaatttgtagatgtcatgcctgccaatagttcacctgaaacacgtagtgtacgtggggcaaatgaattacgcattgctttgtataaaccacaaccaaataaacttattattttggtggctcaagataaccttgtaaaaggagcatctggacaagctgtacaaaatatgaaccttatgtttggctttaatgaagatgaaggcttacaagggattggtttattaccataa

SEQ ID NO: 64507 - DNA, 462 bp, Acinetobacter baumannii
atgcctggtcgttggttagatcaaggggcaactcaagccttacctattttaaaagttggttcacgtcgtttatctggccagcttgaaaccatgtttggttccttaattgcggataagacagattggcgtaaacttctcaaaggcgaagctgaacctctaaatttgatagaacaacgtgatcagttaattgaagagttcgcccctaaaattcaaactattcgtgaagaatttagtcaaaaccttgaatttaacgaaacggttgaattactagaaaatgaattgccacgtgagtttgtttatccagttgaacaatatcctgaaaaaattaagtctttaaacttagataaaacaccaaaaattcgtggagtattgcaaggtattaagggccaatatttaatttttgatattggtgttattaatatccgtaaatatacaggttacgagctgattgtacgtgcataa

SEQ ID NO: 64508 - DNA, 360 bp, Acinetobacter baumannii
atgacaaatactattgatggctttgtttttgataatcctcctaaagaggagcaaatcatagaacttgcccattaccatcgtaaattattagacgaagcaattttccatcaagaaatacatttaggggattattgtttagcacaaaggaaacgggttttcgactatgctcgtcaattagaccctaatcaaaaagcttggttctatcaagtttatgatggtgaacttagaaaaattgcagatgaagatgaattgcacccagcagatgcagaagaaggtttaagtatttttgctatgctattagtattagttattattgctgcaattttatacttctctgtaattcgttccttaatgggctag

SEQ ID NO: 64509 - DNA, 504 bp, Acinetobacter baumannii
atgactttgaaaccaaccatgtacattgcaaacgttgcagaagatggttttgaaaacaacccacatttagaagctgttaaaaaacttgctgctgaagaaaatgcgattgttgtgccgctttgcaaccaaatcgaagctgaaatttcattattagaagatgaagatcgtgctgaattcctagaagcaatgggcatggaagaaccgggcttaaacgtagttattcgtgcaggctataaacttttaggcttacaaacttatttcactgctggtgtacaagaagttcgtgcatggacagtaaaagttggtgcaacggctcctcaagcagctggtgttattcatactgatttcgaaaaaggctttatccgtgctgaagttgttgcatatgatgacttcgtacaatacaacggtgaaaacggcgctaaagaagcaggtaaatggcgtttagaaggtaaaacttacgttgttcaagacggcgatgtaatgcacttccgttttaacgtttaa

SEQ ID NO: 64510 - DNA, 135 bp, Acinetobacter baumannii
atgctcgtaggtgctgaaagatataaatacgatacttcaagcaatcaattattatgggaaggtattcaagatttagatttagtcgttgtgggttttgctgatactgaagaagaagctttagacttagctttctaa

SEQ ID NO: 64511 - DNA, 468 bp, Acinetobacter baumannii
atgtttcatattaaaagacattatttattttatgcctctgctacctatattttgtatgcagtaacgggcgatttcgattatgggttctatcaacttttaagatttatagctttctttgcttttgggtttgcagcttttaccgcccatacaaagaagcagcaaatcatgcctttcatattaggttttatagctatcgtttttaacccctttttaccgatctatcttgaacgcaatacttggcagttggtagatgtattaagtggggttcttttaattatgtggacggtagctacatttaatagaggatttgctcttaaattatcagaaacttttcaaatcattaaaaaagaccccaaaggtttctttaaagattttacaggatttactttctacataatttgcttactgattttagtaatgggtttattaaaaatcatttttgacgttattaaagacgttctgtcataa

SEQ ID NO: 64512 - DNA, 468 bp, Acinetobacter baumannii
atgatttatgctattgctatattacttttgggaattttgattgtcctaattgctatgtactttaataaaggggaattacaaagcaatgttaaaaatcgtcaggcattatcaaatttatattttaaggataatccgagcgctttcaaatatgcgttagaatttactaactaccccctaaagcctaatcatttatacgctggacttatactagaaattaatgagagcgtatggcctcaaatagtgacactaaaattagcggctaataatgaagaacttttagtttttgggatgactcctagaaaagacgtacatcttgctgttggtaacttagttttctggggcattgatgatgtgatagaaatcccagaaacggggaaaagtttgcctgtcggtactattctagcccttctttctcctacttttcttgttgataaaatgacgtgggaggttagaaaagaccttacatag

SEQ ID NO: 64513 - DNA, 2196 bp, Acinetobacter baumannii
atgcgtattccacaatttaatcgacaagtttctgacaatagcgttccaaatgtacaagtcaacgggggcatgtcagcaggcgaagccgctagcttagttggtaataaaaccgatagtttagttggtgcccttaattctagtttgaacgcataccaagcatatcaagatgaagcagacaaagctcgagtatcgcaggttattgcagaagtacaaaatagcgttaatgattacttatataaccctaaaacagggttattaaatattaaaggcgaagcagctttaaaaagggagtctgggcaatctctaattgatgaggctaacgagtggcttgtaaatttatctagtgagaaaacaaatactttatctaatcctagtcagcgtaaattatttaataaaaacttggttaatgtacgtggacagcttaatcgtatcgcttcgcagcacttatttactgaatctcaaaaatttcaaaagacagcttttgaggcagaaatagatgctaattcgagttcagtaaatcttaattattcggacttagaaacgacaaatcaatcgctcgcaaaaataaacagtgcttcgcaagactatggcaaaactcaagggtggaatcaacaacaagtagatttattcactaaggagcaatacgacaaagctttattgggtgcaattaatttaatgcaaacaaatggggatgcttcaaaaatacctgtatatttcgatacgtacaaagggtatatgtcgccgcaaacgcaagctaaagtcggtaaactgattcaggacaatgccgccgatatgtttaaagcagaaattataacgtttaaaaatgacccagaagaattagataaatacatcattggattacaggaccccgaaagtcctttttctaaaaaagttggtgtacaaaatgttccgagtatattgagcatggctattagatttcgagcagcacatgatcatgctgtcgcagcagaagcaaaagaaaaagacgaagatgggaaaaaggctctaggtgattttaaaaaagatattgagagtggcattcctttttcagcgcaacggtatagtgaactagaaggtaaagcaaaaggcaccgcatcttgggatgaattccaaaggcttaataacaaccttcctgtttttcagtcactatacacaatgtcccctgatgaacgtgaatcttttatcaatgcgtatgagtcaaaaacaaaaacaaaaggttctgacaacccacaggaaattaagtttgttgttgatcaaatgaagagcgtacacaatgcattattggatagtgagaaaaacaacccattggtggcttactctcttaaatcgggaaacattttgcctcaagtacctacaacattaattgtaaaaggggatgcacaagcgcttcagattcttggtgataatattaagaagatggtttcacttaatcaaacaagcggaacaatagccggtacgataaaccctttatcaaaacaacaacaggaagagctgaaaactttttggaagacagcaccagccaaccaaaaattgcaattagtttctaacttacaaagggccgctcaaggtaatgggaatgctgcacgtgagatggttcagtctattgcgggcaagaatggtgtttatagatgggcggctacactgaataatcgggggataaaagacattgcaaatcaaatggttgttgggcaagagctaattgataaaggggatgttaaggtcgatgaggatcttttaacacaaaaaacaactgaatacctaaacggaattaccgcacccggtaaacctgattttaatatctacaaagatgcggtaagagccaactatgcataccttttgcagaagtctgaaaaaatccctgataagtctactgccaagaagttagatgaagagcttattgctaaagcactgttaaacaccactggtgggaaatttactaatggggggtttaggcgtaaacagtctgttttgcttccccatacagtaggcgaagcctcctttgaacaacaacttgagcgatttaactctagaaatgctcgaacttatggcggctcggatcgtgattattttctagatttaccattggaacaagacccaagtaatccttataaatattattttaaaagtggtagtgggtacgttatggactctagcgacccaaaacgcaaaacccgattaacttttaccgtgagatga

SEQ ID NO: 64514 - DNA, 315 bp, Acinetobacter baumannii
  misc_feature (272)..(281): n is a, c, g, or t
atgccacagtatctcatgtttgcggaaaatatttataacaaaattaaagatgaggaattgttttcacatgactgtattgaaaatatgaacttacttatgacatgtatacgcagagaaattgagggaacagaatttaaattaaaatataattttattgattttgttgaattgtttagtaaacaattagatgaatgtaaagtaaaaatagatgtgagtttgattcctcctcataattcagaacgtaaagccattgttttgtgtgctggagatannnnnnnnnncataattcagaaggtgagtatattttatggttag

SEQ ID NO: 64515 - DNA, 483 bp, Acinetobacter baumannii
  misc_feature (468)..(477): n is a, c, g, or t
gtgaagaagaaggtctatttaatcacggaatattatcatccatatcaaaatacgacaggttacttgttaggaaaattgtatgacacgttgaatgtacaaagtgatatagaccttgttcttattgcaaaagaggacatgaattgtcctcaacatgcaaatgcacactttattaaagctaaaaagccaaataaggcaagtttgtttaaaagatttttatatgagctaattatcgcttttagttttttaatgaagactttgaaagtagtgaaaaaggatagtatcgtttttacaggtacgacacctattttactgcttttcgttttatttattattaaaaaatttctaaattttaaatggatattattagtccatgatgtatttcccgaaaatttagcagcggctaaaattttaaaaaaagatcattttttatttaaaatcttaaaaagtttatttgataggatttatgcnnnnnnnnnnggatag

SEQ ID NO: 64516 - DNA, 639 bp, Acinetobacter baumannii
atggaaaaatatgaacatcttgcagagcatgtacttgaaatcatgcaattaagcgatagtgaacggattgagacattatttactgatagatggattggctataagaaagccattaccatcatgaacacattgaccgatattttgaatcgccctaggaaattaagacctgaatgcttgttgattgttggtgactccaatatgggcaaaacaactatcattcatgagtttgctagacagtattatacaaaaaccgtaagtgatgctgacatggatttattgtccgtaactaagccagttttaccgatacttgctccagcaaaagccaatgttaaagaactctatattaatattttaaatcacttctttgtgccatttcgggcaagtgatcctgaagccaaattacgaaatcaagccgtacacttgatgcgtaagtatgaaacaaaaatgttgattatcgatgaaattcataattgtctgacaggttcagccaaattgcttcccagaaatgggcttaggtattttcatcaacttccttacatagatgctctaaagattaaaacggaaatgattactgagattgaggatggttttactgttgtgcttaatgggcaatattattggttgccaaaaacacaataa

SEQ ID NO: 64517 - DNA, 138 bp, Acinetobacter baumannii
atgactttaaatgaagaaacaacaacggccatttcagatctacttcgtgaaaaaggcttcaatgcggaagtatcaattgaagatgatcctgattttattggtagtagatataagcttgtaattaaaaaagcatcgtaa

SEQ ID NO: 64518 - DNA, 207 bp, Acinetobacter baumannii
atgaccttaaatggtgttatcaagatgaccagtgaactaaaccaacaagagctgttaatcaagcttattgaacaaaacaataagctgattgaacagaatagcttgatcgtccaaatcaatgcagaacaatctgctcagttatccgaagttctattaatgcttgaagatagtgaaccagcacaacggtcaggatcactagatgggtga

SEQ ID NO: 64519 - DNA, 285 bp, Acinetobacter baumannii
atgattcagaagagcattattaataatcgtttgagttttcatgaattgggtcgtgagtctaaacaacctcacattgtacttgagctcgaaaccccggaagttttgcgtaaacaattggaactccgtttagttaagttggtccaagagtatcaacataaaggtttagatattgattggatatccattgacttacttaatggtgtagatgcgcgagtaaacttaaatgaaactacccagactgcaaagcaaactacaggcgatgacaccgaagacaccgagacgtga

SEQ ID NO: 64520 - DNA, 333 bp, Acinetobacter baumannii
atgaaactacccagactgcaaagcaaactacaggcgatgacaccgaagacaccgagacgtgaagtggtccagacagggtttcgtaatcaattccagaaactttataaccatgactggagaaaggccagagcaaagttccttcaagccaatccgttatgtacgtattgtgagaacagatttggtcgagtaactgaagcaactgtggtcgatcatattatcccgcataagggagataagacactgttctgggatgagaagaattggcagccgttatgcaaatattgccatgattcaattaaggcaaaagaagaaataaaacaaggatatatgtag

SEQ ID NO: 64521 - DNA, 414 bp, Acinetobacter baumannii
atgactgcggacaattctgcactactttcatttgtcagtaaagctaaaaccaaatcatataagcagccagagtggaagcatccaaaaccttgcattgtctgtggtgagttattccttccataccaaaagaaatctgtggtttgttctcaagactgtagattggttcatgtggctaacaacagcagggctaagtggcaagttaaagattatccagaagtaaactgttatgtatgcaatacagtattcaagcctaggcaaaagaatggcaagtactgctcaaggaaatgcagcagcaacaaaccaaaatacaaggtgctgacatgcatccactgcaaaggtgagattaagagatctagtcatggaagtagagatgctggcttatgttgttcaagagaatgcggctttaggtggtag

SEQ ID NO: 64522 - DNA, 1161 bp, Acinetobacter baumannii
atgaccattcaaacagtgaatttaggcacagcgcctactggcgcaggcggtgatacttttcgttcaactggcgcaaaaatgaatgaaaactttacaaataatacccatgcagcaagccgtttggttggaactcaagctggcaatgtaatggaagtcggtgcttttggctttggttacatgggttcatcacatttaaatgtaaacactttaagtgatgtcaaaaatattgttcaaaaccaatcaagaatttttagggcagatagtggtaacatttttcagctttacgctcccacactctatatgaagactcaagatacgaatgtggcaatatcttttggtccatttagtggagatgtcaaagctgcaggttggacagatggttcaacagattttacagctaaatatttcttccgaacatcatcaaatacaacagtagatgcaaacgggtttttaaagaatgcttcaccagttgtaaagctatttgcagacaaaattgaacccaatgaagaagctgctgaacaacctctctcttttgaaaaaccgggtgttggccattaccttgtaaaagggtcttcaggatttgcgaaagaaggttggtggattgaaattccgaccgacactcacggcaataaaatttgtgcagttgaatatcaaactttagaaaacggtgatcttgaaattaagaccttcaagaaaaagctaaatgacgaaggtgatattgttgcgaatcttgatgcaccaatcgatattcctaacaatgcaaatggtgagccgcgctggattgatattcgattaaacacaattaaacgaaaaattattagaaaggtaccgcgcactgaaaagcagccaagaatggttcagcaaatcaaatattcaatgcagcctaccttcatgacccgtttaactgaactcattgatgatgaaggtagggttgtaatggtggatggaaaaccattccagaaaaaagaaacttatcttgttactgattctactggaatggcaactctcacaaaacagcctgtaattaatgaaaatggtgaaccagtattcgaatgggtgcaagcagtagatagcgaaggaaatcctgtttttgacgatgttcaagttatggacaaagacggaaatcctatttatgacgaggtaattcatgagtctgaatag

SEQ ID NO: 64523 - DNA, 756 bp, Acinetobacter baumannii
atgaagctaacagcaaaacttaaaaaatccattatggcccatgctgatgcatgttacccgcttgaatgctgtggtgtgattattgataagcaatatattgcttgtcgcaatatcgctgaacaatctgatcagtttgaaattcatcctgaagacttggcaagtgctgaagatcaaggcgaaatcttagcttatgtgcactctcatccagatggaacaacaagagcttcggaacttgatctgattcaaattgaattacatcaaaagccatgggtaatttgttcatatccggatcttgattttcaagtctacgagccttgcggttatcgcgcccctttagtggggcgtaattattttcatggctggcaagattgctatgcgcttgtacgtgaattttatagtcgtgaattgggtatagagcttatggattttaagcgggatgatgcatggtgggaagataaggaccatccatcactttacctcgaaaattatgaaaaagcaggcttctatgaagttgatacaccgcagtatggcgatatgcttgtttgtcgtgttgggcgtaccgagcatcctaatcatgcggttgtttggctgggtgataatggacagcttaaatcggagcaaactgagcaatgcataggttcaagcttaattctgcatcatccgtataacagaaagtcagtacgcgaaatttatggccaacagtggaaagatcgcacggtaaaaatcttgaggcatagagatgttaaaaacaattaa

SEQ ID NO: 64524 - DNA, 1494 bp, Acinetobacter baumannii; identical to SEQ ID NO: 13713

SEQ ID NO: 64525 - DNA, 1053 bp, Acinetobacter baumannii
ttgaatctgatttcagagattatggaacagttacgatccattgttagcgagtatgaatctgacattacgaaaattgatcaacatcttgagaagctatttgattcagtacaagccgatatagttaatctcctattagagaccagctataaaattggatatgtcacgttaaaagatcacgagtatattaatgatagattcattgccaatctaaatctcagatggtttgagtcattcgacttattatgtttattcaacatcgtatcttacgaaattgcacagaatattgcctccaatggtgccccttatcataccgaatctaaaaaaaatacttttagggtacttctaaaactccatgcacgatcaattcagattgctcaggaaatcttggttctaatgaagaatgggtttgcggatggagctttagctagatggcgtactctacatgagctatcagtaatattcttattcatttcaaaaaatggcgaggaagtagccgaaagatattcggactactatgttgttgaacaacataaagaattaaaagcatataacagtaccgctgagtatctagacttcgaaaaaatatctgaagaagatcaaaagcggattgcaaattctctagagaatttaaagcaaaaatatggaaatacctttgtcaaagagtatggttgggcaaaaaatgttataacttccaaaaatatatattttcacgaattggaaaaattggttggattagatttcttgaacgccttttacaaatgggcttgtaatcctatacatgcgggaatcaaagcatctctattttcattaggcaatttagatgaacctaatatgttatctagtctcgcaggggcatcaaatgttggatttactgatccaggtcaacttactgcatattcactgcttcaaataaacaaagctcttgtagaatgttttgattcatttgacaataggattgctatcaaagtgcttgaaatttttttcgaggatttaaaggatcgactaactgccactcaagaagccataaataatgaggaagcatcaaaaacttga

SEQ ID NO: 64526 - DNA, 432 bp, Acinetobacter baumannii
ttgcctatattattaatagttggtgatggtgaattaaaatctgaagttgagttactcatcgagtcttttaatttaaaagataatataaagttactcgggcgtagaaatgatattcctgacttactgaacatagctgattattttatactctcatcaaaatatgagggtcttcctaccgttattatggaagctatggcatgtgaaacatttgtaatctcaacaaattgtagtggtgttgaggaaattatgaatgacacaggtataatggtgcctatttgcgatagtgaggcgttagcggaaggtttgataaaagcatacaatttgagtcctaaagagatagagttaaataatctatctgctcgtaggcgtatagaaaaaatattctcattagaaaagtcaattgaaacttggttggaaatctatgaaagttaa

SEQ ID NO: 64527 - DNA, 186 bp, Acinetobacter baumannii
atggatgtgcaaagccaactcctttttattgggagttctgccgacatgaaaattatggtggcagaacgagaaagggttcgcggactggtttcgactccagcacacccgaaggtgtccctctcccgtcctaccgctacgggaggagactgggagtttacacataagactattcctcagaagaaataa

SEQ ID NO: 64528 - DNA, 2139 bp, Acinetobacter baumannii; identical to SEQ ID NO: 42639

SEQ ID NO: 64529 - DNA, 471 bp, Acinetobacter baumannii; identical to SEQ ID NO: 42638

SEQ ID NO: 64530 - DNA, 375 bp, Acinetobacter baumannii; identical to SEQ ID NO: 42637

SEQ ID NO: 64531 - DNA, 1326 bp, Acinetobacter baumannii; identical to SEQ ID NO: 50187

SEQ ID NO: 64532 - DNA, 1230 bp, Acinetobacter baumannii; identical to SEQ ID NO: 50188

SEQ ID NO: 64533 - DNA, 861 bp, Acinetobacter baumannii; identical to SEQ ID NO: 50190

SEQ ID NO: 64534 - DNA, 1116 bp, Acinetobacter baumannii; identical to SEQ ID NO: 50195

SEQ ID NO: 64535 - DNA, 981 bp, Acinetobacter baumannii; identical to SEQ ID NO: 50198

SEQ ID NO: 64536 - DNA, 1185 bp, Acinetobacter baumannii; identical to SEQ ID NO: 50199

SEQ ID NO: 64537 - DNA, 264 bp, Acinetobacter baumannii; identical to SEQ ID NO: 50200

SEQ ID NO: 64538 - DNA, 492 bp, Acinetobacter baumannii; identical to SEQ ID NO: 50201

SEQ ID NO: 64539 - DNA, 477 bp, Acinetobacter baumannii; identical to SEQ ID NO: 50202

SEQ ID NO: 64540 - DNA, 330 bp, Acinetobacter baumannii
atggatagtacatctaaacgttggaaaaatcgtttatggcaggggaagttagcagcggggtttgcaaattcgggcggtttaagtggtgataaactggcggttctgcaacaacttaatatttttgcgatgcagcacggcatgttgtggtcaggtttacctttaatgacaacaggccatactgaaaccgatttaaaccgtttatcgagctgtttagggttgatgactcaatcagataatgcacctgttgaaattacaccgccgcaaggtgatttagatacggctaaatggtttggtgaatatattgctgggcttttatatagattaaattag

SEQ ID NO: 64541 - DNA, 1779 bp, Acinetobacter baumannii; identical to SEQ ID NO: 56457

SEQ ID NO: 64542 - DNA, 1617 bp, Acinetobacter baumannii; identical to SEQ ID NO: 62717

SEQ ID NO: 64543 - DNA, 960 bp, Acinetobacter baumannii; identical to SEQ ID NO: 62972

SEQ ID NO: 64544 - DNA, 285 bp, Acinetobacter baumannii; identical to SEQ ID NO: 62718

SEQ ID NO: 64545 - DNA, 660 bp, Acinetobacter baumannii
ttgaactggcagtatatccatagtgtgttgccgcaatttttctctgcaactttgaccacgctgaaaatctcaattatcagcattattttggcgattattgtagggctaatttgcagcattttaatcacatatcacgtgcgggtgctaaatagaattgcccagttctatattgagttatctcgaaatacccctttattaattcaactgttctttttgtattacggtttgccaaaactcggtatcaaaattgatggttttgcctgtggtgtgatcggactgacctttttaggcggaagctatatggctgaagcttttcgagcgggtttgcagtctgttgcaaaagggcagattgactcagcaaaaagtattggtctaaaaccgactcaaatttttagatatgtcattttccctcaagcgcttgccatttcaattccggcaataggggcaaattgcctatttctaattaaagaaagttctgtggtgagtgccattgctgttgttgagctgctttttgtcaccaaagacttaattggtatggactataaaaccaccgaagctttgttcttacttatcatggcttatctgattattttattgcccgtgtctattttaaccagctatctagagcacagaagtcggaaggtgagccatggaacttga

SEQ ID NO: 64546 - DNA, 732 bp, Acinetobacter baumannii; identical to SEQ ID NO: 61660

SEQ ID NO: 64547 - DNA, 861 bp, Acinetobacter baumannii; identical to SEQ ID NO: 61659

SEQ ID NO: 64548 - DNA, 615 bp, Acinetobacter baumannii
atgtctcattccgtcatgctagccgaacaaggtgagttaaacttttcaaccgcacaacgtgtaaggcacttgaaggcggaagagcaggattttgagtggtatccttcgtctgagcatatcattgatgtagttcgacgcgacttggttgagtccaagttcttagagtcttacaacagagagtcatccttgcttgatattggcgccggagatgaccgtgacctcattgttactgttgaagggttcaaggacaagacagctttcaaaatcatggcgggcatggctagtcatgctgagctgttcgagaagatcagcaccattatcaaattccagcagaaggtggccgtcggcaagcggtttgctggccagaaggttgtaatcacggggttccgtgatggtgcgctggagaagatgattgaggccgaagggggtgaaatgcagaccagcgtgtcagcaaaaacaactctcgtcatcgcagccagcatttccggcagcagcggcaaactcaaaaaagtgcacgatttgaacaatagcggcaaggcgtcaatcaaattgatggaccttgcaacattccgcaaggaatacatcgaacaacaaccattgggggttgagttttaa

SEQ ID NO: 64549 - DNA, 561 bp, Acinetobacter baumannii
atgccaacagttgagattattgttgcagttgatcctgttgggggatttggccggaatggccaaatcccttggacgtgcaaggaagacatgaagcgcttcaccaccatatccaaagagattcgagtgtgtgtgatggggaagaacacatacaaagacatgctcgatatgcaaatgaagaaggaaggcgctgaagaacgaatcaaagagaagggaattcttccggagcgcgaatcttacgtcgtgtcctcgactttgaagcccgaggacgtcattggagccacggtagttccggacctacgtgcggtgctcaatcaatatcacgacagcgatcaacgaatagctgtcattggtggagaaaagctgtacgtgcaagccctcgcatctgccacaaaagtccacatgacggtaatgcacaagccatataactgcgatcggacgttgccgatgtcatacatcgacaaaaagtttgttgcaggtcaagggtctatcaccattcaaactgcggtagatggtgagacccatcccgtgaagttcatcacatatgagcgcgctcggccgtaa

SEQ ID NO: 64550 - DNA, 447 bp, Acinetobacter baumannii
atgagcgcgctcggccgtaatatagcagcagctttactctcggtcttttcctcgcttgcggtagcccagcccgccgatgagctggaggctcgtatattggctgtgtgtctaaacacagccaatgctgccgctgtcatcatacaccatcttgaaaaaggtggtgttcctgttcccagctcccaactaaaagatttagcgttggagttgtctgacccacttccccaatcttataatgcggtaaatgttggtttgactagtgcgtcagaagctctcgacagtactagccacacccaagctataccggaagcgagagctgcggtgatcggcatgtggtgcatcaatgacattgtatcgtcgatggatccgtccggagcacccattctccaagatgctgagacccagcaatcgttgattgaccaaattacactgctaatcaatcagcaataa

SEQ ID NO: 64551 - DNA, 618 bp, Acinetobacter baumannii
atggtaactaaaggtgccgaatatcatggatactccctaaacgctgttgcaggcaataagcaccgtcaggagatggatgaggacggcaacaatccgtctttgccgttgttctcctactacgagtgtcacgtatccaactccatcactcacgtatacatctcacagaacatcagtgagccagccgtatacgttccactggtgcagttcttcaactctcgccaacacggcgatgttgttcatctccatctcaattgctacggcggacgcctcgatgctggcattcagatcgtcacgtcgattctgaattcccaagcacaagtcattgctcatctcgacggcgtggcctactcgatggcagcagttatgttcctggcgtgcgacggtcactatgtatcgccgtacggcaagctaatgttgcacacctactcaggcggtggcggtggcggcaaagctcctgatcagcgggcagcccaagcagcaatcgatgagacgtacgccaagatcgtggggtataggaagtataaaccacctttttgctcctcatccgaagtatcttacctgaaattccctcactcgtttaccgctcaagccccaattttaactgccggtccagcctaa

SEQ ID NO: 64552 - DNA, 1281 bp, Acinetobacter baumannii; identical to SEQ ID NO: 64361

SEQ ID NO: 64553 - DNA, 1260 bp, Acinetobacter baumannii
gtgcgctcaaaaaactttagttggcggtactcccttgccgccacggtgttgttgttatcaccgttcgatttattggcatcactcggcatggacatgtacttgccagcagtgccgtttatgccaaacgcgcttggtacgacagcgagcacaattcagcttacgctgacaacgtacttggtcatgattggtgccggtcagctcttgtttggaccgctatcggaccgactggggcgccgccccgttctactgggaggtggcctcgcctacgttgtggcgtcaatgggcctcgctcttacgtcatcggctgaagtctttctggggcttcggattcttcaggcttgtggtgcctcggcgtgccttgtttccacatttgcaacagtacgtgacatttacgcaggtcgcgaggaaagtaatgtcatttacggcatactcggatccatgctggccatggtcccggcggtaggcccattgctcggagcgctcgtcgacatgtggcttgggtggcgggctatctttgcgtttctaggtttgggcatgatcgctgcatctgcagcagcgtggcgattctggcctgaaacccgggtgcaacgagttgcgggcttgcaatggtcgcagctgctactccccgttaagtgcctgaacttctggttgtacacgttgtgttacgccgctggaatgggtagcttcttcgtctttttctccattgcgcccggactaatgatgggcaggcaaggtgtgtctcagcttggcttcagcctgctgttcgccacagtggcaattgccatggtgtttacggctcgttttatggggcgtgtgatacccaagtggggcagcccaagtgtcttgcgaatgggaatgggatgcctgatagctggagcagtattgcttgccatcaccgaaatatgggcttcgcagtccgtgttaggctttattgctccaatgtggctagtgggtattggtgtcgccacagcggtatctgtgtcgcccaatggcgctcttcgaggattcgaccatgttgctggaacggtcacggcagtctacttctgcttgggcggtgtactgctaggaagcatcggaacgttgatcatttcgctgttgccgcgcaacacggcttggccggttgtcgtgtactgtttgacccttgcaacagtcgtgctcggtctgtcttgtgtttcccgagtgaagggctctcgcggccagggggagcatgatgtggtcgcgctacaaagtgcggaaagtacatcaaatcccaatcgttga

SEQ ID NO: 64554 - DNA, 453 bp, Acinetobacter baumannii
atggtaaaagattggattcccatctctcatgataattacaagcaggtgcaaggaccgttctatcatggaaccaaagccaatttggcgattggtgacttgctaaccacagggttcatctctcatttcgaggacggtcgtattcttaagcacatctacttttcagccttgatggagccagcagtttggggagctgaacttgctatgtcactgtctggcctcgagggtcgcggctacatatacatagttgagccaacaggaccgttcgaagacgatccgaatcttacgaacaaaaaatttcccggtaatccaacacagtcctatagaacctgcgaacccttgagaattgttggcgttgttgaagactgggaggggcatcctgttgaattaataaggggaatgttggattcgttagaggacttaaagcgccgtggtttacacgtcattgaagactag

SEQ ID NO: 64555 - DNA, 1503 bp, Acinetobacter baumannii
atgcctttatacaaagctccattacgtgatatgcaatttgtactgcatgaaatgcttcaaacagaacaaaactatcaaggtttaagaaaatatcaggaaagcgtaaatcgagaattaattgatcaatatttagaagcagcagcagatttttgtgaaaatgagttggcgccgattaaccaaaatggtgatcaggaaggctgtcatttaaatcaaggtgtagtcacaaccccgaaagggtttaaagaagcctaccaaaaatatgccgagctaggttttacctcgctaacggccgatccagaatatggtgggcaaggcttgccgacattgctgcggattgcgatttctgaaatgttatgtggttctaattgggcttgggcaatgtatccgggattgtctcatggcgcaatgagaacaattgagcatcatgggaccgagcaacaaaaacaaaagtttttgactaaactcattagtggggcttggaccggaacgatgtgtttaaccgaatcccatgcaggctcggatcttggattaattagaactaaagccgaaccaaatccggacggtagttactcaattacaggcgaaaagatttttatctcggcgggtgagcatgatctttctgaaaatattattcatattgttttagcccgtttacctcaagcacctgcagggactaaaggtatttctctatttattgtgcctaaatttaatgtgagtgacgacggtcaggtgctggaccgtaataaagtcgtctgtagcgcgattgaacataaaatggggattcatggcaatgccacctgtgtacttaattttgatggcgcaaaaggttacttaattggtccggaaaatcgcgggcttaattgtatgtttacctttatgaataccgcacgtattggaacggcagtacaagggcttgctgcttctgaaatttcatttcaaggcgcattaagttatgccaaagagcgcctcgctatgcgttcgttatctggtcctaaatatcctgacaaaaatgccgatccaattattgtgcatcccgctgtacgttcaatgttaatgacacaaaaagctttttctgaaggtggtcgtgcgctggcttattttctggctcagcatgtcgatattgtcgaaagttcaaacgatcaggaacagcaaaaacactccgatgaattactggcttttttaacacccattgctaaggcctttttaacagagtcgggtaatgagtctgcaaagcatggcgttcaagtatttggcggccacggctttattgttgagcatggtatggagcaaattgtacgtgatgcacgtatctcgacattgtatgagggaacgaccgaaatccagtctctagatctgctggcacgtaaagtcctcaagtcggaaggtaaacttttaaagaacatgactgatttaattgatcagtttattagccagcaccaatccaatgaagtgctgaaacctggcagagtaaaacttgaagtgcgacataaaccacctaattaa

SEQ ID NO: 64556 - DNA, 252 bp, Acinetobacter baumannii
atgcctattcatacggaacatgatccacgtctgaaatctacactcaaaacccgccacattagcatgttagctttaggtggtgtgattggtgctggcttatttgtcggttccagttcagtaatagctgcagcaggtccagcagccttcatctgctacgctattacaggaattatggtaggtttaattatgagaatgctaggagaaatggcggcagctcgcccttccactggctcattttgtagatttctctag

SEQ ID NO: 64557 - DNA, 804 bp, Acinetobacter baumannii
  misc_feature (160)..(169): n is a, c, g, or t
atggttactttattttttaatgcgatagtggctttattatttgcttataaagattattttaataaaatttattattattttgttatgtttttgtttttaatgaatttttttatgagtgtgcttactggggcacgtgcaggattttttacagccttaatannnnnnnnnntaataatattaatatggttgtatgtaggaaaaaaaggattaagttttataaaattttctgctattcctctacttttaactttggcattttcagtaaataagattgcttctttgagtggcgctcgagttgctgaaactggaggtaatttttatcaaaagtttgtagaggaaatcttatatggtcaaggtattactatgatggtttttagcttaggtagtatgagaaatgattaccctttattggcttatataaaaactattattcccggttcacaagtaatagcatctttttttacagatatatatcaatatcaattatctttttctcaatatttaatgtataaaatttctccaggattgttttatgagggatatggattaggttggtctttattaggcgatttttatgctttctcatttggctttatatttctttttatgatatataattatttttggggtaagacgttattttttatatcaaataaagttgataaaaatattttctatcatggattatacttctgtttcttaacttatatatttctaattaatagattgagtatctcccctttattagtattagttggtttttattttctgttagtgctttttgtgaaaattcggtggaaataa

SEQ ID NO: 64558 - DNA, 609 bp, Acinetobacter baumannii
atgaatcatattccttccggcgtccggcattttaccgccagacagctcgggattcgtgatatcaccgttcttgcagaatacggtcagagggaaaatacccgccgtgagcatgcagcgctgatacgccagcactatcagtatcgtgaatttgcctggccctggacatttcgccttacccgtcttttatatacccggagctggataagcaacgaacgtcctggcctgcttttcgatctggcgacagggtggcttatgcaacatcgtattattctccccggagccactacgctgacccggttgatttcagaggtaagggaaaaggcgacgttgcgcctgtggaacaaactggcactgataccgtcagccgaacaacgttcacagctggagatgctgctggggccaactgattgcagccgcctgtctttactggaatcactgaaaaaaggccctgtgaccatcagtggtccggcgtttaatgaagcaattgaacgctggaaaactctgaacgattttggctggcactgttgcaaagttagcgatgaggcagccttttgtcttattcaaaggccttacatttcaaaaggcactgttgcaaatagtcggtggtga

SEQ ID NO: 64559 - DNA, 2217 bp, Acinetobacter baumannii
atgagtgggtatttccgagaagaacattttgagttattgcgaaagttacaaaaccaattaagaaataaaaatgataatgctcaagatatagcgtatggaacattaaaagaagctaatagtttaactaaagtttgggctgaggaaattattaaaaaacaatttccattaggagtgttagatttccgaaatagtccacttgatcaaagcagaaaatttaaaccttatacatgggcgaaaatttatcctgaacaagattctccaaaagaattagccttgactgtaggcatagacggaaatttaggatttattgttaaaatagatacagttggtgctagtagtaagttacgtaatcaatatgaacaaataagaggggaatttaataataattcatcaataatttctattttgtcaattgaagagggacttgcaaaatctttggaagagttaattgaatggagtgtaaaaagtattcaaaaatttaaattaagttatcaagatctttgtaaagaattagccttaaatacacttcaaaataattcaatagttaccactcaagaagttcttgcatatttaaaagctagataccctcagtcggaacaaaaaacaaagtacattttcctatgtgtaaataaacaatataaagagttagccctagaaacaaaaaatcttaatacaacttctgtacgtctatttatatcagacaaaccacctagcacaattatagaagatacagaatgtcgatttattaatagtcaaactttgcctaattcgaacttagaaaaacatactaatactttaaaaaaatcaaatgaatactatcagatatgtcctaatagtattgaacaattgaaatcactatgtgattggtatgaattagatgagaatagtaaaagtaaccctgtaaggatagctcattttggaaaatcaaatatgacaatagatacttctttgaatcgaattcttttcggtgctgcgggtactggtaaaacctttaatacaatcaaccatgcgctttcaattattgaaggtaagtcacttgaagaattaaaagatgaaaagcgtgaaaaattaaaagaaagatttgatgaatataaaaatcaaggtcgaattaagtttgtaacgttccatcaaagctttagttatgaggattttgtagaaggaattcaagctgaaactgatgatcgaggaaacttaatttacagagtaaaacctggagtttttaaggatatatgtgaaaaagctacaggggtttctcagcaggcagaatctatagatgaaatagtagaaaaatttcttgatgaaattaccgaaactcctttagaactaaaaacgcaacaaaataaaaggtttaaagtaagttatgttggtagtggtgtaaccctccaatgtcaaccattagcttccgaaatgaatgctacttattatgcaaatataagtaaaattaaaagtttactttcaggtgagcaaattgagaatgcctataacagaagttacataaaagcagttgctgagtttttaaaacctaaagtaaaaccagtccaaatcaataaaaatgatcagaatcacgttttgattattgatgaaattaaccgtggtaatatttcacgtatttttggtgagctcattactttaattgaagattccaaacgacaaggggcagaagagtctctttctataattttaccatactctaagaaacccttttgtgtaccaaaaaatctttatattataggaacaatgaatagttcagatcgttcgctgacgggtcttgatattgccttacgtcgacgatttacttttattgaaatgccaccgcgtccagagctattagataatttagagatagatggtgtaaatgttcaagaactattgactgttatcaatcaacgtattgaaatattacttgatcgggatcattgcctaggtcatgctaattttatgagcctagagcaacagccaactttagaaaatctctcaaacatttttaagcagaaagttattccacagcttcaagaatatttctttgatgattgggcaaagattaatttagttttaaatggtaatggaatgcttaagccaaagcctgtggaaacatcagcaatattcccaaatgtagattctgaggaattaggatactttgaagataaaaaaatttgggaattggtgccgacttcatttaactctattgaaagtttcaaaaagattattcagtactga

SEQ ID NO: 64560 - DNA, 423 bp, Acinetobacter baumannii
atgattgttcgtgataaaagcaatgtatttaaattattatttgcttggaaaggaacaattttgccgaaggttttgcctgcactgagttttgttgtacttatttcagcctgtgtggtctggctctcttattatcattggattcaaattcctaccgtacccgcgatcggatttaccatctttggcgtgattctttcgatttgtacaggctttagaaataacgcatgttatgaccgttggtgggaaggccgcaagctctggggtgctttaattgccaatgccagacatattgttagagatagccatgttttatctaatgaacaacgtgaacatttaattcatcaggtcttaatttttagtaatttattgctctgtacacgacaaatttcacagaacccttatcctatcaggattctgccttcttaa

SEQ ID NO: 64561 - DNA, 144 bp, Acinetobacter baumannii
atgccacaagttaagttgaaagaaggcgaaccagttgacgtagctatccgtcgtttcaaacgttcatgcgaaaaagctggtgtttttaaacgctaccaaaagaaattggctcgcgaatctgtacgtactactcgcctttactaa

SEQ ID NO: 64562 - DNA, 345 bp, Acinetobacter baumannii
  misc_feature (326)..(335): n is a, c, g, or t
atgaaatatcaaatacaaccaacacaagtaccagatgatttagatagctgctggttccaccctgatatagagctacatgacacaattggagagcatgctgagttttatacaaaagaacaatgggcacaactgcaaaagaaccttggtgtttctataaaaatcgaaaaccttgactattgggatattgaagagattccagaagataatcttagtgattggtccaactggaagccgcagccaccacaagaaggcttatttctaatagcagcatttgattcagaaaatggccctgttctttggtgggcaaaccctaaagcggaaagtannnnnnnnnncggaaagtaa

SEQ ID NO: 64563 - DNA, 315 bp, Acinetobacter baumannii
atggatacacaagaattaaaaactttaattcctttactagcaccattcctaacagttttcttagggatattggcaataccatttatagaagtttataaaaactatattgaaaaaaaaaggttattaaactctttattggaagaattaaaagatgaagttaagaatttacaaaaagaatatgatgaattgtttccttgttatgtaaacgctctaaagataaaaagcgatgaggaaggtactaattataatgttgtagtgccagtatctattgtcctatattcaggggactgttctaaattttgtgtaagtacttaa

SEQ ID NO: 64564 - DNA, 885 bp, Acinetobacter baumannii; identical to SEQ ID NO: 53577

SEQ ID NO: 64565 - DNA, 387 bp, Acinetobacter baumannii
  misc_feature (23)..(32): n is a, c, g, or t
gtgagtcagacaagaaatacatnnnnnnnnnngaaatacatcgctgatattgctaagaaattagttgaatatggcttcaaacttgtagcaacaggtggaacatatcaggtacttaaagaagcaggtttagaatgtgaatctgtaaataaagtaactgaaggccgtccacatattgttgaccgcttgaaaaatggtgaaatacaccttattgtcaatactactgaaggcaaacaagctcaatatgactctgcaatgattcgtcgtgctgccctacaaggcaaagtgtattacacaacgactatcaatggcgcagaagcggtttgccaagcctttgctgtgaaattgccaatggatgtataccgcttgcaagatttaactgtaggttaa

SEQ ID NO: 64566 - DNA, 429 bp, Acinetobacter baumannii
  misc_feature (23)..(32): n is a, c, g, or t
ttgagttggcagagcaatataannnnnnnnnngcaatataatcactatgtacctttagttcttaaagtcgctccagacttaacagctgaagatgttgaatttatttcggcacaattattagattttaaaattgatggtcttattgtgacgaacactaccttatcgagagaaggggtagagaatctgccttacggtaatgagtcaggtggtttgtcgggtgcacctgtatttgaaaaaagtacggaatgtttacgtttatttgctcaaacattaaaaggacaaattcctttaattggtgtgggcggaattttgtcgggtgaacaagctgcagcgaaacaacaggctggagcaacgcttgtacaaatttatagtggtctgatttatacgggaccaacgcttgtgaagcaatgtgttgaagccatgacttaa

SEQ ID NO: 64567 - DNA, 399 bp, Acinetobacter baumannii
atgactgcaattgcaaataaccacgtggtttcattccactataaattaacaaacgctgagggtgaaacacttgatcaatctcaaggtgaaccacttgcctatttgcatggcgcaggcaacatcattcctggtttagaaaatgcattaactggtaagactgttggtgataaattcactgttaacgtaccagctgctgaaggttatggcgaatataacccagacctagtacaagaagttcctgctcaaatgttccaaggcgttgatgttatcgttgatgcaaacttcccacttgctggtcaagatttaacttttgaagttgaaatcgtagaaatccgtgaagcttctcaagaagaattagatcacggtcacgtacacggtgcgggtggtcaccaccactaa

SEQ ID NO: 64568 - DNA, 528 bp, Acinetobacter baumannii
  misc_feature (482)..(491): n is a, c, g, or t
atgaatcaacaacaagtggtttccccacctcagttaatttcccaagatcaaatagcacgtcgctttatgacaaaactcgcttggctcatggcaggcgggatgtttattgatggatttgttttaggttatttaggtgcattaatgccctctattacagccgatttgcatttatcaactacatggcaaggcttaattggtgcagcctcactcattggaattttctttggtgctccaattggtggatatttttcagatcgctttggtcgtaaaccactattcatgatcgacctttttatattcttcatatgctcaattggacaattctttgcatctgatccctacacgctttttatagctcgtctattaatgggtgtcgcgattggaattgaatatgcagtcggttggccgatgcttgcagaatttgctccagctcgcctaagaggtaaattattgattttgactgaaacctcttggtttgttgnnnnnnnnnnatcttgtctcgtataccctaagttttattatgattga

SEQ ID NO: 64569 - DNA, 255 bp, Acinetobacter baumannii
  misc_feature (235)..(244): n is a, c, g, or t
atgagcaaagcccaagacattctcaatactgccgagagactttttgactatcaaggctttcatgcaactggaattgatcagattgttcgtgaagctgaggtaactccacgaactctttatcgacactttcactcaaaggaacaattgattttaaaagtccttgaggaaagagaattacgcttttttagaaagctacagcaatgcattgagaataaagaaaactctattccaaatnnnnnnnnnnaaattgggtag

SEQ ID NO: 64570 - DNA, 369 bp, Acinetobacter baumannii
atgcaacgtttatttttaatttctgcactctgtgctggacttatgacgggttgtgcaaccacaagtaaattaattccttttgtgggctcagaaaccccaatgcaacaagtacttaaaacgcaacccgagattgtaaaagagcataacaatacttcagttcagcaggtatttaaccgagtagaatccccaacagtttctcgcattactgttatacaaaccggtttaatggatgactctgtctcagcaattcggacggaatatttatttaaattggttgatgaaaagtggcaattgcaaaataagcaaaagagctaccaatgtgcaagaggaaaaggttctaaaggtttccaaacgcagctttgttcttaa

SEQ ID NO: 64571 - DNA, 957 bp, Acinetobacter baumannii
atgactacgacagttaattccgacatgatcatctacaaccaactggctcaaacagcctatttagaacgattacaagacaatttgaatgtttttaatgaagcttccaatggtgcgattatttatcgtaatgaaatcattcaaggtgacttcaataaaaatgcattctacaaagttggtggtagcattaaacatcgcgatgtgaactccaatgcaaaagtaactccggaaaaaatcggtgcaggtgagtctgtaggtgtaaaaattccatataagtatggtccttatgcatcaactgaagaggcatttaagcgccgtgctcgtacaccagaagaatttgctatggttgttggttacgatcttgcagatgcattggttgcaggccgattagagtacagtttagcttctttaaaagctgctatttctagtaatcccgatatggttgcgaaaggaagtatcgttgttgatggccgcaaagcattaactcgtggtatgcgaaagtttggtgataagtttggccgaattggcttatgggtgatgaactcagatacatatttcgatattgtcgatgatgctatcactaagcaaatttacggtgaatctgaaatcgttatctatggtggtttaccaggaaccttaggaaagccggtattggtgacggatgctgtaggtgataacgatgcttttggcttgcagtatggtgctgtaacagtaactgaatcacaagtaccgggcttccgagcttatgacatcaatgatgaagaaaacttagcaatcggtatgcgtgctgaaggtgcatttaacctagatattcttggttatagttgggatacatcgaaaggtgaaaatcctgaccttacattacttggttcaagcgctaactggattaaatatgcaaccagcaacaaaatgacagcaggtaccttacttgatttatcaggtacagcgacaactggttaa

SEQ ID NO: 64572 - DNA, 423 bp, Acinetobacter baumannii
  misc_feature (405)..(414): n is a, c, g, or t
gtggatatccgccaagtttcacttgcatttgaacagtctggccgtattcagaaacttttagttcaagagggcgataaagttcaagcaggtcaagtactggcgacccttaataccaatgcattacaaattcaggcaaagcaagctcaagcacaacttaaagctcaacaagaggcaattgttaaacaagaggttggagctcgccctgaagaaatcacccaagcaaaagctcaacttgcgtctgcccaagctgagcttgataaaaccaataaaaacttgcaacgcttacaaattttggtaagtagtaccgatggtcgagcaattagccaacaagaactcgactatgccaaaagtaatcaacatagtgctgaggcagcggtccgtgaaagacaagccaatttagaattnnnnnnnnnngatatatag

SEQ ID NO: 64573 - DNA, 1152 bp, Acinetobacter baumannii
atgacatctggttttgaaaccttgaatttacatccgcaacttaaaaaggcgattgatgctttagggtttactcaaatgaccccaattcagcaaaaggttttaaaatatacattagccgggcatgatgcaattgggcgagcacagacaggaacaggtaagactgctgcctttctgattagtgtaattaatgatttgctcaataatccggttcaggagcaacgcttccgtggtgagcctcgtgctttaatcttagcacctactcgtgagttggcattgcagattgaaagtgatgcaaaatctctcacaaaattttctaatttacacctagtgaccctattaggtggcgttgatttcgataagcagaagaagcaacttgatgctaattttgtcgatatcatggttgccacaccagggcgtttaattgattttgtagaacaaaaagaagtttggctcgatcaaattgaatttttagtgattgatgaagctgaccgtttattggatatgggctttattccttccgtaaaacgtattgtgcgttattcaccacgtaaggaacaacgacaaaccttaatgttctctgcaacatttagttatgatgtcttgaacttggcaagacaatggttatttgaaccagtaactgttgaaattgaacctgaacaaaagaccaataatgatgtcgaacaacgtgtttacgttgtggctaaacaggataaatatcgtcttttacaagatattttacgtgaagagccaattgataaagttatgatctttgccaatcgccgtgatcaggtacgtcgtctttacgaccatttgaaaaaagatggatacaaagtggggatgctatctggtgaaattgctcaagataaacgtttaaaaatgttggagcagtttaagcaaggcaagcataacatcatgatcgcaaccgatgttgctggtcgtggtattcatgtagacggtgtatcacatgtagtgaattttacattgcctgagcagtctgatgattatgtccatcgtattggtcgtacaggtcgtgcaggggcacaaggggtaagtattagtttcttatctgaagatgatgctttctatttacccgaaattgaaaaagcaattggtaagaaattgcctctaacccgactagatggttattgctaa

SEQ ID NO: 64574 - DNA, 1695 bp, Acinetobacter baumannii
atggtttggtctgtggtgaccgaactttatattttgcgtaaaggtggccattcacttgccaagcagttgaaagctcgtcgtttggtaaaaggtgaaagtacaccagaagaacatgccgcattaaaaattacagaacatctggcacaaacattttccctgaacgttccaacactttatgttttacctgatgaagtaggtgttaatgcattaacggcaggctttcactcgaatgatattgtaattattttaacttggggtgccttacagaaccttgatgagctagagctatatggcttattgggtcatgaatttaaccagattttatcgggtgaagcagtagaaaatactaaactaaaaattttatatagtggtttgactacttttagtcagtgggggagtaagctcgccaaacaagggtttaagcgctacagtccgggttataagcataagttcgagactgtatttgtagccgtaggtggtgtgatttggttagcgggaagtttaggtgttttaatcactcgttttattaaatatttaacattaagtggtcgtacatttcgtaatgaccaaaaaaccatgcggttattaaaaaatagcactaatacccaaactttattgcgtatttacgttcaccattctggttcgcagattcatagtgcttattctgaatcgattgcacatatgtgttttgcgaattcacttagcccgcaaagttggatgaatattcacccaagtattcgtgaacgtatttatgagcttaacccaactttattacaagatttgcaattagaaaatttaaagaaacttcgaaatcgtcctttatttagtttgttccatgtactagaagaatctgagactgaaatttatacgccgtggtcatctccacaacctttgcctttgttgcgtctttctccaatcagttttgctttgaatgatgcaattaagccgttaagcagtgatatccgtcgtaataaaaagcggcctgaacttattcaacgtgcattacaaactgcgactggttcacgtgaggtgatggttgctattttaatgattcgtcaatatcgagaatttattccacaagatgcgccagtaagccatgcaattgtggatgccttacttaatcttgatgggcgtattcatattcagatatttcatgatgcatgtaaaaatattggtcatatgcctgccagtattgctcgtcaatttttgactaaactggcccttattattcaggaagatggggaaattggattacttgatgcacttctactcgagcgtgttaagtacgagttaaacttaatgccacttcatttgccgacagcatttgaagaggtaaaacctcaaattgttcgtttaattgatgcattacttcatgtgcaacaaatcaatagtccgaatcagttagaggttcgcgaacgtatcttacgttctttgcttaatcctgatgaaatgcatatttatgatgaaatttcggatgaacctttagacttagcagaaattttaaatgatattgctggattattgctgcgtgaccgcttaagtatattggcaattgctgaaatgtgcttgtggagtgatcgtattattactcaagatgaacttgatgtgcttgagttgctctattggcgatttggttttgagtctgatgaaattgtagagcaaatgcagaagaaaaatagcgttatgattatttaa

SEQ ID NO: 64575 - DNA, 510 bp, Acinetobacter baumannii
gtgctactagacagacatttacaacttgaactcatgaataaaatggcttcaacatacccattagcttacgacttctcatgtgaaattaagaatctagatgagtatgaatgcagtaagatttatgccaatttattttacttacagtctcatggactccttcacccagacagtattgatttaactatgggttttggtggaaatcaaaaccatttattcacacttcatcatcctcgcctaaccgagaagggagctgattttctagctgatgatggcggcttatctgcaattcttggagttgtaactgttaagtttgaagctgttcaactgaaagctattcttgaatctaaaattatggcagccgacttaccgcctgctgataagcgcaaattgattgatgggcttcgatcgctttcttccgagagtataaaacacctgacaacgaaaattgtggatttgggttgggataatctagggacactaattcggataattcaaagcagtatctactag

SEQ ID NO: 64576 - DNA, 855 bp, Acinetobacter baumannii
  misc_feature (817)..(826): n is a, c, g, or t
atggaaagccgtattcaagagttgatggtattactttgccgtgaaagtggtaaaacttatgccaatgcgattgcagaagttcgtgaggctgtagatttcctacgttactatgcaacccaagttgaaaatcttcctgcaaatacagttattcagcctttaggtactgtactttgtattagcccatggaacttccctcttgcaattttctcaggtcaaattgctgcggcattagtcagtggtaactgtgttattgctaaaccagctgaacaaactccattgatcgcagcccaagcagttcagattttatgggaagctggtattccacatggtgctgtacagctacttcctggccgcggtgaaacagtaggtgctcagctcagccaagatagccgtatcgatggcattatgtttactggctcgactgaagttgcaaaaattttacagaagaccgttgcaaaacgtttatctgaaaatggtcaatctattccactcattgcagagactggcggtcaaaatgcaatgattgttgactcatctgctttaactgaacaagttgtattagatgttgtaagttctgcttttgatagcgcaggtcaacgctgctctgctttacgtattttatgtgtacaagaagacagtgctgcaaccgttattaaaatgcttaaaggtgcaatgcaacagttgatcgtaggtaaccctgcaattttaaaaactgacattggtcctgttattgatgacgaagcaaaacagacgattgaccagcacatccagaaaatgaaatcgaagggttatccggtacatcaattgatgtttggtnnnnnnnnnngtttggtgcaacaagccaaacagaattag

SEQ ID NO: 64577 - DNA, 933 bp, Acinetobacter baumannii
gtgccaacagcaattgaacttcctaatcttgatgacttacaacgtgaagtttttggtccggttttacacatcattacctataagtatggtgaacttgagcaactcatctcaagaattaatgcgaaaggttatggtttaaccatgggtctgcatacccgtattgatgaaaccatccaaaccgtaattcaacatgctgaagtgggtaacctttatatcaaccgtaatattgttggtgctgttgttggcgtacaaccattcggtggtgaaggtttatctggtacaggccctaaagcgggtggccctctttacatgtatcgcttaatgcagcattgttctaacaaagtattagcaactccatttgcggtaaaaaatgagcaaaccgtttttgaaggctttacccgtgaggtttatcaaagcttacaaaactgggcgaaacaacatttaccacaagcaaaccgtgaaattgaaccttttggtgttggtaaattttatgagttacaaggccctactggggaaagtaaccaatatattattttgccgcgtcatcgtgttctttcaattgctgatacagaacaagatcaattgcatcagttacttgcaatctttgcagttggcagccaagctgctgtaatgccaaatagtccattattggcaaaacataaacaaacgttgccaaaagatgtacttgatgcgattactaccattaaaaacatcactacagatgattttgatgcagttttacatcatggcaaccgcgaagagatcttctcattacagcaagaaattgctagccgttctggcgcaattgttggtattactcatgttgaaccaaatgagtcgattccacttgaacgtttggtaattgaacgtgcaattagcgtaaatacagctgcggctggcggtaatgcaagcttaatgacaatgtctgaataa

SEQ ID NO: 64578 - DNA, 147 bp, Acinetobacter baumannii
atgaattatttaattgacctattgctaaaaaagaattcaaatttaaaaattcattatgaaatagattttaaggatgctattcaccaacagttacatgaaatgaataaattacatcattactcttttttaatgagtcgatcagaatag

SEQ ID NO: 64579 - DNA, 957 bp, Acinetobacter baumannii; identical to SEQ ID NO: 53771

SEQ ID NO: 64580 - DNA, 213 bp, Acinetobacter baumannii
ttgcaaaaaaaatacggcggtgcttttgtttccaataaaactttggctcaagttttccgtattttgagtaaaggcgacgcaaatgttggtcagattccacaaaatcagattagcctgttaaacctgattgaaatcatgggtacagaacaacaaaaacaatttatcttttcagaaatattagccggtaaacgtcttgccaacggtggtccctaa

SEQ ID NO: 64581 - DNA, 393 bp, Acinetobacter baumannii
  misc_feature (302)..(311): n is a, c, g, or t
atgaaaaaggttgtggtttttagccaaattgatgaggaaattttgtcacggttacagcagcattaccatgttgtcgtattgaaccctaaactgggtgatattaatgaacagatacgacaagaagtagtagatgctgatggcatgattggggctggtcgtttgctcaatgaaagtaatctttctcctgcccaaaaattaaaaattatttcttctgtgactgtaggttatgacaattatgatgttggttatttaaatcagaaaaaaatctggttagcaaacacacctcatgttctaactgaaannnnnnnnnnaataatttttaatttttgggcaggagaaagattactttcattgagcaaacgacagcagatcttgcttttactttgttattaa

SEQ ID NO: 64582 - DNA, 642 bp, Acinetobacter baumannii
ttgttattaagtgcagccagaaaagttccttttctagatcactggactaaacaaggtgagtggaaaagaacagttgggccacagcagtttggtctcgatgtttttggaaaaacattaggtattattgggcttggtaatattggtgctgcaatcgcacgtcgtggcttttatggatttaacatgaatattgtttaccataatcgccgcgagaaacctgagttggcggaacctttaaaagctcaatatctgggattggaagaattattacaacaatctgattttgtagtgacagctgttgatttaaatgcggaatctaaagctttaatgggtaaggctcaatttgagcttatgcaaaagcatgccatatttattaatattgcgcgtggctcagttgtcgatgagcaagccctaattgaagcattgcaaaatgaagttatttttgcggctggtttagatgtctatgagaaagaacctctgcaagaatctgcacttttcaatttgccgaacgttgtcactttgcctcacgtaggttctgctacagctgaaacacgtaagaaaatggcaaatttagcttataaaaacttggtggaagcactagaggacaagacgcctagatatttagtgaatcctaattttgtgtaa

SEQ ID NO: 64583 - DNA, 405 bp, Acinetobacter baumannii
gtgctggggcagtgtgaaaaagtaatgtttaacgtcggtggctggcgtaaagctagacaagagcaacagatgcgtgactggttcggttttgtgccaacatacttaataactgtcgacgcttctttctgtgagcgtgcaaacgatacagagttctgttatttgcttgaacatgagctttaccacattggagtgatgagagacgaggacggagaaattgtttatagcgatagttctggtctgcctaagcactatcttgctggtcatgacgttgaagagtttattggcgtagttaaacggtggggaccaagtaagaatgttaagcgacttattgaggtcgcaaaaaatccgccgtttgtttctgatttagatattgcgagatgctgcgggaactgtgtaatcaattga

SEQ ID NO: 64584 - DNA, 363 bp, Acinetobacter baumannii
atgcgcgaaattgtagcatttcaagaagatgcagaaaaacttggtgattatttagttataattacgaatcccgatgaattttttgaaagagtccgtaaaactattctaaagcttgggtatacattaaaaagaggattagttgagtacgtagattttaataatcctgttcatgtgccgattgaaaaaattggttttgttaaaagtgatgaattttcacatcaaaaagaatatagattgatggttgatgatggaagaaatatcgatgaatatattgagttgcaaattgggccattaaatgacatagcctttttaattcctacaaaagatttcaaccaatcattaaacttcgaaatcaaagaataa

SEQ ID NO: 64585 - DNA, 132 bp, Acinetobacter baumannii
atgttatctaaagctaaaaaactacatcgtcaaaaagctttacgtccttctactgaacaatgggaaattatcgcaactattggatttgccattattcttacagttatcgagcctgtaaattattttgtgtaa

SEQ ID NO: 64586 - DNA, 957 bp, Acinetobacter baumannii; identical to SEQ ID NO: 50193

SEQ ID NO: 64587 - DNA, 1452 bp, Acinetobacter baumannii; identical to SEQ ID NO: 50194

SEQ ID NO: 64588 - DNA, 1116 bp, Acinetobacter baumannii; identical to SEQ ID NO: 50195

SEQ ID NO: 64589 - DNA, 975 bp, Acinetobacter baumannii; identical to SEQ ID NO: 64087

SEQ ID NO: 64590 - DNA, 1647 bp, Acinetobacter baumannii
atggataatcaaaacacaaaaatttatacggataaatttcttgccgtaaccagcctactgtttgtatttatttcagttgctggtttggcgatttattcgcaagaatcgataaagattgctgcaacgtggatgcagtggacgacatcggtatttacaaccccagtattactgtttgcttttttagctatcatttttacttttggtcttgcctttagtaaatacggaaaaattaagcttggagaaggaaaacctcaatacagcacaatgtcatggatttttatgttcatcttgtcgggtattgggtcttctacattgtactggggctttttggactgggcctactattatcaaactccaggtttgagcttaccgcctgagtcagcagaagcattgaaatatagcgtggcttattcattttttcactcaggtttaagtgcatgggcaatttatgctttggcatcaatttctttgtgctacagctatcatgtgagaaaaaacaagggtttaagtttagcttcagtgattgaggctgtgacaggctttaaatcaaccggcgtggttggtcgtttagtcgacttaatgttcttgctttgcatgttcggtgcattgacgatttcattggtactcactgccgtaacatttaccaatattttgtctcagctcacaggcattccaaatacctttatgaccaaggtcatcattattttggcagtttcagttctgttcgcactcagttcatatgtaggtatggacaagggcatgcagcgtttaagccatatggtgtgcttgggtgtagtgttatttgcaatttatgtactttgctttggtccgactcaattcattttgaataattcattaatgagtttcggattaatggcaactaactttgtcgatatgagcttgtttaccgatccaatgggtgacggcaagtttacccgtgaatggactgttttctactggttatggtggatttcatatgcaccgggtgtggcactctttgtaacgcgtgtttctaaaggccgtactattaaagaagtgatctttgccatggtaattggtggtagtgtcggtctttggttcatctttggtgtgtttgaaaactatagtgtttatagctttattcatggggctgtaaatgtgccacaaatcttaagtcaacaaggtggtgaggttgcgattggtcaattgcttagcctattacctgccggaaaactcatgatgtggattttcctcggcattatggtggtgttcttggcagcgcatatggatgcagttgggtatgcagtttcagcaacatgtacacgcggtttaagtgaagggcaagacccatcgccaaatgcacgtctgttctggtgtgtcatgctgaccttagttccaattgccatgatctttagtaaagcaccattagacaccatgaaaacggcaactattgtgacggctttaccattcatcgtgattattctgattcagacctatggcttagtgaaatggctcatacaggattatgccaaagtcccatcacatttaattgagcaacaaggttatgatgatcaggaaattggtttaaaccagactcaagatgaacatgcaaaacggatgcagcttgagcttgcaagctcaatcaaactggatagaaaaaccagctag

SEQ ID NO: 64591 - DNA, 981 bp, Acinetobacter baumannii; identical to SEQ ID NO: 50198

SEQ ID NO: 64592 - DNA, 189 bp, Acinetobacter baumannii
atgagtgagtttaaagcaaaagacatcgtcgccatgaatgtgcctactctgcctgagccagttggaagcttacaagagttacatcctgagtttgcaaaagtcttgcacgagaactttctagagttgcttggcgacgacttccccatagaaaaccgcatcagcccgctgtgtaaatcaaaggatgtttga

SEQ ID NO: 64593 - DNA, 510 bp, Acinetobacter baumannii
atggataagtgtagagaagagtttgaaaagcaaaggtactggattggattattcagaacaggtgttgattttgatgtgattcttggtgaattcggaagatacatttcaaatggaacaaaaagtactgatgcaatggatttggagtcatttaacgaaaaatgggaagcatgggcaaactgctggcagcaccagcaagcaaaagtagaggatctgcaaaaacaattaaatgaatatatgttcgtggctgaaactattgatgaaatgtatgtgaaagaggttcagaaaagtgacgagctgcaaaagcgggtagagtggttagaagatcgcttaaaagctactgacacattaagcaaaatgagagcggctgtgattgggtcatttaattcccaagaatttaatgctcgtactagaagaaaaatgatgatcttgaaaagggctgagcaagcgctcaagggggatcaatacgatgaacatcgcaagaaagcagaagaggccatctcagagaaatga

SEQ ID NO: 64594 - DNA, 1002 bp, Acinetobacter baumannii; identical to SEQ ID NO: 51344

SEQ ID NO: 64595 - DNA, 1293 bp, Acinetobacter baumannii
atgccgaacatcaatccgacactgaatgtacctcaggctaattttttgcagatggaaaagaagttccgcgcatttgtcgctggctttggatcgggaaagacttgggttggatgctccagtttatgcaacaaagcttgggaattcccaaaagtacctttgggttattttgctccaacttacccgcagattcgcgacattttctttccaactattgaagaggttgcatttgattgggggcttaaaactaaggtttatgaaaccaataaagaggtggatatctattatggtcggcaatatcgaactacaatcatttgccggtctatggagaaaccagcaacaattgtaggttttaaaattggccacgccttgattgatgaacttgatgttatggccaaggtcaaagctcaacaggcttggcgtaagatcatcgcacgtatgcgttataagcaagctggtttgctcaacggtattgatgtggccacaacaccagaaggttttaagtttacatacgagcaatttgttaaagaggcaaataaatcagaggctaagcgtaagctctatggaatgattcaagcttcaacttatgacaatgaagctaatcttccagatgactacatatcatcactttatgagtcttatccgccgcaattaatttcagcttatttaagagggcagtttgtcaatttaaccagtggtgctgtttaccccgactttgatcgagttctaaaccacacggatgaagaaattaagaaaggtgagcctttactcattggtatggattttaacgtgcttaaaatggctgctgtggtttatgtcattcgagaagggaagccaagagctttagatgaactggttggcgtgagagatacaccgacgatgtgtcaactgattaatgagcgctttccagatcacgatattactgtgattccagatgcttcaggtcaggcaacatcatcaaagaacttcagtgaatctgatcatgcaatcttaaagaaaaatggattcaaagttgaagttaatggtgtgaatcccggtattaaagatcgtatcactgcagttaatgcacaaattctgaatgctgagggtgaacgacacttaaaagtgaacacaaacaagtgtcctaactttacggctactttagaacagcaagtctatgatgattttggaatgccagataaaagcgctggtttggaccacgttggggacgctggtggatatccaatagctaagagattcccagtcatcattcagaaaatatttaaacggcgcgcaatcgctggtttttctcgttaa

SEQ ID NO: 64596 - DNA, 516 bp, Acinetobacter baumannii; identical to SEQ ID NO: 46093

SEQ ID NO: 64597 - DNA, 378 bp, Acinetobacter baumannii
atgacccagttccagtcttctaggctgagttcgtcaaatttaccgcctaaacctactccagcattattaatgacaagagtcacaggatgcccaaataagatttcagcagtttcagctaggtggttaacttgttcagcgtcacccacatcacagcgcatagcaaaagcttttgcaccctgttgttcaagcaactttacggtttcttcagcagcttctaaattaatatctgcgcagactacgctgccaccacgttttgccagttcaactgcaaagcttcgtccaatcccactgcctgccccggttacgaccgcatatgcgtttcggctcggctggtctttcttaccaaataaaatcatagtaaatcctaaaaaattttag

SEQ ID NO: 64598 - DNA, 816 bp, Acinetobacter baumannii
atggtttcgtatcaaatcagcgcttcatttgccaagcaacttattgcgactttagatccgcttaccgttactattttaagactatgttttgcagcagtgattgttgccgttatgttccgttcttggaaaatctggtctcgtttaccttatttaaaatggcgtgatttattaatgtactgcgcatctttagggttaatgaatatcttattttatacctctcttggaaaattaccccaagggattgcagtaggtctagaatttattggtccattaggcctagccctagtttctatcaaacaaaagagcgaatatatctgggtagcttttgccatgctgggtattgcactcatggtaccttggcaagatccaactcaacaccacttttcttacgtaggtgcagcctgtgctttaggcgcagggctttgctgggcattctatatttattttggtcaaaaagttgtaactcaaaatataggaatgcatgccttaaccatagggattaccgtatctgccctcgccttattaccaattggtatttggtataatggcccagcattacttgatacacagtactggggtaaagccttacttattgcagttttagcgactgctattccctatgcactcgacctaatggcactcaaacaacttaataaattaacttatggcaccctaacaagtttagcgccagcattggcagcattaacaggtttcttattacttcacgaagaaatcagcatgctgcaatgggtggctttagcttgcgtaatgctagcgtcaattggggttactttaaggagcaaaacagcatcatag

SEQ ID NO: 64599 - DNA, 912 bp, Acinetobacter baumannii
gtgaatgcctataacgaaaatggctgtgactttattgtgtcgttaggcggtggctcatctcatgactgtgcaaaagggattggcttagtgactgcgggtggtggtcatattcgtgactacgaaggcatcgataaaagtaaagtcccaatgacgccattgattgcagtgaatacaacggctggtacggcatctgaaatgactcgtttctgtatcattaccaataccgatactcacgtaaaaatggctatcgtggactggcgttgtacccctctcattgcgatcgatgacccgaaactcatgattgcaaaaccggctggtttaaccgctgcaacaggtatggatgcattaacccatgcagttgaagcatatgtatctacggcggcaaacccaattaccgatgcttgtgctgaaaaagcaatcaccatgattagtcaatggttacaacctgctgtcgcaaatggcgaaaacatcgaagctcgtgatgcgatgagctatgcgcagtacttggctgggatggcatttaacaatgcatctttaggttatgttcatgcaatggcacaccagttgggcgggttctacaacctacctcatggtgtatgtaacgcaatcttgctaccacatgtttgtgaatttaacttaattgcttgtccagatcgttatgcaaaaatcgcagaattaatgggtgtaaatacgcacggtctcaccgtaacagaagctgcgtatgctgcaattgatgccatccgtaaactgtcttcttcaattggtatcccatctggcttaaccgagcttggggtaaaaaccgaagaccttgcggttatggccgaaaatgctcaaaaagatgcatgtatgctcaccaaccctcgtaaagcaaaccatgcacaagttgtggagattttcaaagcagcactttaa

SEQ ID NO: 64600 - DNA, 171 bp, Acinetobacter baumannii
atggcttttaaaaatattgcagatcaaacaaacggtttttatattccttgcgtatcactctttggaccaggatgtgccaaagaaattggaacaaaggcgcagaacctcggcgcaaaaaaagcattaattgtgaccgatgaagggctatttaaatttggctcattcatttaa

SEQ ID NO: 64601 - DNA, 1044 bp, Acinetobacter baumannii
ttgtctgaagaagtaattaaacttttcacagaattaactgtcggtattttatctaatgcagctttagcttcaatatcagaaatgagagataacactcataatattctttataaatttaataaaaatttagatccagcttatttgtctcatgtatttggtttaatttcttctccagatatgagagaacaagcacatgaggtagcttttgattatgctgtggatttaatttctgaggagattaaatcggaattacaaataagtccaagtataaaatcttctttatcagtagagactttaagtacttggcctgattatatcaatatagaaaataaaccagatatcttcgctattaaagtaggtgaaaaagaaccagtgaagtttggcagtcaacgtatgaaaagactacttactgtaaaaaatgatcaagatttagataatatattaaatgaatcacctcaatttccaaggaaaaaaggaaaaactatattagaatattttaaagaaaatgtaattgaactgtcaattaatggggaagactcttcaaatactcatcttgagttaagtgcaattgaatgtttaagacgagataagttatctattgtcaaagggcatattccagtattaaaacaaggtagtgtgctaaagttacagcaagaatattttatttgtattcagccaatatgcgatagcgtaaggttggaaaatgagacaggttttatttttctgaaagttgaaaaaattgatggtgaagtattttctcatgttgttcgtgatgaagaacaaaactatagaaagcttaagttaaaaaaatcttcaaaatttattaatattatccattttgctccaagtccgaataaaacagtgtcagctatcgaggaagatggaaaatatatatttaaatgcagtaaagttaataatatttatgagtggtgtggtgagttcaaacaaccaatatatcaagaaatcgttaactctgtttatgctaacttatctagagtaggatttgattcatttgagtggttaagattaaagaaacctgaataa

SEQ ID NO: 64602 - DNA, 447 bp, Acinetobacter baumannii
atgaatcattccgactcggttttaaaattttcacttggtctcaatggcctgtcatttgaaataggcagccagcacattcaaattgagcagggcttaggttttgttggttcaaaaagtatcggccatggtgttattgatgagcttgcgattgaaaagatgatttatttcattgaagaaatcatcgagtcgcagccactcagaaatctaaatataagtggtgtagctgttacatctgatgcagccatgacacaacttagtgagttattttttagtgctaaaaagcaaatcagccgtatcgagcttgagcatggattcaatgattttattgagcgtttgagctactacacaaaccaagtagctccagatcagctttatgtttttacctactttgtatttgttcgagagatgatgcatcacttacgagttgaacaaattcaaatcatttaa

SEQ ID NO: 64603 - DNA, 756 bp, Acinetobacter baumannii
atgaatactattatagaacaacctaatccaacaaatataagtagtaatggctttaaaactgctttaatccatgatgacacttatataaaattaaaagaatatagcaacccccaagtattagaaaaatttaaagatgaatgggatttttccgatgaaaatataatagatatttttaatgagatgaaaaattttctatatttaagcacaatctctcaaaaagaaaattttaatattgagatacatgagccattattagtaatagataaaatgtggcatatttttatgcaatttacagaagattacactacattttgcaatgatttttttggtttttttcttcaccaccgacctttctctaaaacaacattagaaagaactatagcggctttaaagagtgaaggaaaaacatattcagcagaaaaaagaacacaactttctaaacaattggaactaatagaaaaaacatttggttttgatcatgttaagaaatggtatatagattatgccgtagattattcaccagaaattttaacagcagcattaagacctgtttttcatgatagtgaatctcatataaatccacttttagataaaaatattataaatcagatgagcaaaaatgatctaaaatctacaattattggaatatactcctctagttgtttttgtggaggggctggatgtgggagatattgcacttgtaactcaaacggttcctctgacaccggtagtggcacaccgaaaatatgtatttaa

SEQ ID NO: 64604 - DNA, 1632 bp, Acinetobacter baumannii
ttgaaaaaaataattgttaattttataaaccagaacaagggttatatatcacttgttcttttttcaaccttactattctccataataaatattagctttggagtattaataaagtatattgtcgatggagcatcaataaaagactcatcaattgtatattatgcaattttttttgtactgatcagattaacaacccctattttatatgggtttattgattatggaagttcaaaaatatccgataaattagatatagagcttaaggaaaaattatactttaatgctattgaattagacaatatatttcataataataaaaacacaggtgaaatattaggtaaaattaatgcagggatatcatctgcaaggaatataacaaaatctatttttcagagtataattccagtttttttagatatattatttataattactgtgattttcttaacttttaatattttttactctattttagtgttattagttttaataatatatgcaatagcaattataagtcaaacaaataaaagagttcccatattacgagaactagctaatacagaaagaaagactatggggttttttcatgattcatttataaaccatgaaagttataaagtatttgggcaaaagaaaaatgaagaaaaaagactaaaaattataatagataactataaaaatatattaaatatcaataaatcatcattatttaaaataagcttaatagctgcttcagtttcagctttaggatgtataataatattttattttgttaccatagatattttaaaaggtaatacaacaattggcaattttttaatgttaacagtttttttatttcaatcttttttacctataaattccatagggttttcttttagacaaattaaaagaggtctagtagatcttgaagctataaatgaaactttttttaaagaaaacgaaaatattagagaaatagaactatcaataccagatcatattaaaattcaattagataacctcaccttacctcttagtgagactttagcaatcaaaaatctatcaggccaattaataattgaaaaaaatgagataactattcttacaggagctagtggaattgggaaaagttctttaggaaagttaatcacaggcttgttaaataattatgaaggaacaattcaagtaaataattttgagttgaaagaagttaaccttaatttattcagaaaacaaacaacatattgttctcaagacactattttttttaatgacactattagaaataatctattatatgtacaaccagactcaagtgaaatagatttaaataatgcacttactattgttggattaaaagatttcactaaaattattgataaaaatattggtgagcgtggttctaaaatttcaggtggagaacgtcaaagattagcattagcaagatcttttttaaagggaagtaaatttattattcttgatgagcctactacaggattagatcaggaaaataaagaaaatttaataaatatactaaacatattaaaggaaaaattcttaattttagtaataactcatgatccaattttctcacaagtattcctaaaaaattcctttattattgacaaaaacacaataaagcaggtttaa

SEQ ID NO: 64605 - DNA, 900 bp, Acinetobacter baumannii
atgataaatttgattaattatttaaaaggtgaagactttaactatcatttcagtcaaaaaaaacctgctcatatagaaaatatattagatcaggaaattctaagctgggatgatataaataaaatattatcttccaaatatattgatttcccccaacttagaatagttaacaataacaactattattttaatggtttttctggctttgtttcaaaatccttagataacaatggtggaattcatacaaagatgaggaaagatattatatattcgatgattaaagatggaggtactttagttattgacagatgccaagaatttataccaagtataaataatatctgtcaaatatttcagcaatattttagatgtcctattagtgctaatttatattattgctatcaaaaagattcttcaagttttggtatgcattttgatgatcatgatgttatatctattcaattatttggagataaaaagtggagtatttcttctccaacttttaaaaatcccttacctcatcataaaagttttcattatgagaaaccatgcgaaaatttcccagaaatttgtattcataataaaatgaatggattggtttttgtaccaagaggttattggcatcttgttgaagcaacaagcccatcaaatgtacatatttcttttgctattaatcgacctcgtaatattgatgctattaaaacaattttaaataatctagaatttagagaaaaattccgtgaatctgtatctttaaatgatgcaaatgaacttgattcaataattaatgaaactatagaatatttaaaaggcattgatatacaatactttttaaattctattaattcatataaaaattttgatgcaactaataaattcgatctattaaatttgagataa

SEQ ID NO: 64606 - DNA, 273 bp, Acinetobacter baumannii
atgtacgatttaaaaatatatagaaatcaatggattgaagcatactttcaaggagatacaagtatgctcaattatattgaagctgaagacttttttgttaatgaaaatggggcaatattaactaaagaaattaggttaagtagaattaataatttaatgagcgaaaaaaaatggtgcccaatacctatagaacaagaaaatcttgaattttcatatattgatgaaaaggaatgtttaattaaatatgtggaaaataaaatacttagtcattaa

SEQ ID NO: 64607 - DNA, 219 bp, Acinetobacter baumannii
atgagtgcaaaaaaatatattatcccgctatctaatattgaaccaaaacaactgtatgcatctggtttaacaagttgggggcttgatgaaatcaaaggattcaaaaaagatggatacgccttttgggcataccctgatgatgttttccttggtgagggaacagtagttctttcgagtttagaaagcttaaaagaaatacgtatcgagggtaaccaatga

SEQ ID NO: 64608 - DNA, 3516 bp, Acinetobacter baumannii
atgacaattcctgtttcagaccgtttaagccaactgtatgttggtaacggcactaatactcgttttgatttcacatttcgtgtatttgagcaagaagatgctacgggtgtagcagttcgaaaaaaaacatcaactgattttgaaacggttgaccctaacacctatacagtcaatcttaatcaagatggtatgggcgggtttgttatttttaacgaagcaccagcagtaggcacatatttttatatcgctggcgcaacgccccttgaccaattattggatatcacaaactatgataatttttaccctgaagcggtcgaaagggcactagataagctaaccgctttattacaagagtggggcacccaattagatatcgaaaaacaagcgcgaatcttggcagacatccattacgatacgttggcaatggagcgtgaagataatctcgagaatcgtctaatttcatacattaattcggtaataggaataactaaccccaaaatttttgatggtatcaccgaccgaatggtaatcaccaaagatggtcgtactcaacgtgagtttaacgaatcaatacctttttggacggatgactatgtaaattttaagcaagcaacttacattcgtgaagagaaaatcttaaatcatgctattcaaattaatgctgataccaatacaactttaggcacagcaatttctactgaaatatcaagagctacaagcgttgagcaatccttgcagatgcaaattaatgctaatggtattggaaataaagcttataaaacttacgcggagatggatgcagataaagcaaatattcctgcgaactctaaagtatcagttaccaatgaccctgaccccactaaaaacattgattatcaatgggatggttcagtttttacaccgtctggtaaggactcaattaaacaggcaaacgagtacaccgacaatgctattcgaaatattgaaagcaaccgttttcaaaatattaataaattaacttacgatcaagttgcatttaatgtcccgccaactagtgttacaggtaacgcaacctatgttaccagaaacgggattaaacaattaaaagttgcaagtgccggcacgggtggagaaattaaagtttattgggatattcctgttgcccaatttaaaagagagttttcaggctcaatttgcgtagaaggtttaaccgcaggtaaagacggattagtcggaattcagcagattaatgcatcgggccaaattgtttctccagagtatgctgaaactcaaatatctgctgctgtaactaaaaaaacatttaaaccaaaaacgatagcaagcgtagaccctactgcagtattgattcgtttaattgttcatatgcttactgatacaacacgtgagatgtatgtacacagtccctttattgctgatgggattaatgctgaatttattgcgccacctgacacaaaaaaagtggacacgctttatggtatgttccacttgaccgaagttaaaaacaaatttaacccgactctggcacaagataataatactgttcaatattcggatgggacgttttacccacgaacattaaatattgctcttggaaaacaagcggttaaagcagggcaagattatattttttggatgcctattaacacgaattttgcttttttccccgttatttacacctatgccgcaaatggaacttacttaggtatagatcattctgtcggtggtgctggcgaaaaagttaaccagaatcccccaacgggcattgcttacgcagatggcaacagaacggtaaagtttactattcctgctaattcacaaattgcgtttatccaattaagaacagcggatcgaagtcatacggctgcagaatttaacagcctaattaattcaatgcagatggagtacggtggggtaaaaacggattttgtaccttatgacccgcgaggcgatcgtttagttattgatgaagccaacttgcccgatatttcggcctctgttgcccctaatgccaatacttttacggtcactttagatggggggacggatgcctatattcgtacatcttttaatgacaccctagacttagttcaacaagtgagttatgcaactagcgaaagttgggataaaaacaatattataaatttccaagatgttagaacaattgcgaaatcaaccccacgagagagtgttattgctgcctttgctaaagggacaactcttgtaagtcagtctgatgatgcaacacctttacgatacaacggtacttatattggtgctaatcatggcgcagatatcgtccatcaagtaactgtaaacaatcatggtaaaacctttgtagacgtcgggtctcgttggactcaaggggctacaacatataccctaattagaattgttgatgcaaatcggttatggctagtaagccaaaacattggaactacgtattgggcatttacaaaggcctccttaacaggtctgcttttaacacatagcgcaggcgcgacaaacatttcatccttcacgccttcagatgatgttaatgttcagttacggcctgcaattaataaccatacaagaaaggttattgctgatgggtatagggagcttactgaggaaggcacctatgatgttgagtcagtagaatttattgataactacgacattatgaacccgccatctattctttcatatttgcaatcaaaaacaggaactccgactgagcaaatcccaaataataattcgatagcttcggatatgcgtgtatctaataactatcgatacgctttaaatggcagtgttactgttagtacgcagattcaatccaaagcgatagtcaattttgaatgggcaggtatcacacaagcgctaccgcttaaacccggtagtaaaacattgttgcagtatgtgccgaaggttttacctattgcagggaatttaaagacttgggattttgcaaatttagaggacatttctggaacaattgaaaggattgatttcactaaagctcgatgggcaaatgaaaatgatccgccagataaaatggctcaaattgtacgaaatgggtcaaataacgagtttggaaatgtagtagggtatgtaacaaatcgtggtattggtaaacctgaaaagcgcgttaatacttctgaagctggttttatccacgattctaaaaaaatgtatccacacattattaatggtgcggtttatccaagtggcctaattcccgttggtacagtgttgaatgctgtggcttatcgttcgatttatagttcttcaatactcccgcaggcaacagtatttacttggttccaagacaataacgcaatttatgttgtcttcgatattcaccaaaatgcgtcaatgcttaaattaccattgaatgatatttttaatgggaaatcagctgaagcaacaaatgcaaattctaattttactttacatagtgaaatcgttagtgacggtggtttgttgtgttcggtaataaatgggtatggccgagcaattataaaattaacttag

SEQ ID NO: 64609 - DNA, 1053 bp, Acinetobacter baumannii
atggagtttggtaaaaatcaaaatatgaatagagcaaaacgttataaggatgtatgtaacatgaaaaatttaactttactcgcattaacatgcgtcagtgtgacaatggctgggtgtggttcaggaaatgcttctaaagaggcgggtcagccaaaacgtccggaatgtatagccccagctaagccgggtggcggttttgatatgacctgtaaattgattcaatctggctttaaacaaacagaccagctcaaagatccaatacgcgtaacctatatgccaggtggggtaggtgccgtagcctataacaaaatcgtaaacagtgatcctgcgaataataatgccgtagttgcattttccactggttcactcttgaacttagcacaaggaaaattcgggcacttcactgaaaaagatgtgaaatggttatctggcgtcgctgtcgattatggtttggtttcggtacataaagattcaccattgaaaaaccttgatgacttaatgaaagcactccgagaaaacccaaaagcacttagctttggtggtgccggaagtgtgggtggccaagactggatgcaaacagcaatgttggcaaaaaaagcaggtattagtcctgccgatttaagatttgttgcacttgaaggcggtggggaagtgctgacttcattactggggcagcatattcaagttggagtaggcaatattagtgaagtcagttcatacctagagtctggtgatattcgggtattggcagtttttgctaacaagcgtttagacgggaagttctcaaaattacctactgcaaaagagcaaggctatgacattgagtggccggtaatccgtggtttctatatggggccaaaggtcagtgatgaagcttatggttggtggaaaaatgccttcgataaaatgatggctaaccagaaatttgacgcagtccgtgaaaatcaggatctactcccatttcagctgacaggtgaagaactcaaagcttatgtttataaacagaccgcggaaatgcggcagttatcacaagaatataaattatcacaataa

SEQ ID NO: 64610 - DNA, 444 bp, Acinetobacter baumannii
atgaaatctgaacggattcttaccgccattattacggtttgtgggttatttttgttgatttatgcgagcaattttgaagccccaatttcctacgatccagtgggtcctaaagcttttcctattttattaatgggcttaattacagcgagtgcagcttatctcactattcgaccggccattatgtttgaacccgttgagttggggtggacaaaacatctagtcgttaagttagcgttatgtgcggtggctttaacgctatatgcattagtttttgaatggttaggctttattgctgcaaccctgttgatgaccattgcagtgggcaaacttttccatggcaaaaccataccggttttggtgacaggtttggtacttagcatgagtacctactatatgtttgaccgtttcttggatgtgccattaccacttggattttttggttaa

SEQ ID NO: 64611 - DNA, 1500 bp, Acinetobacter baumannii
atggatgtattaagttttttaatgatggggtttgaggttgccttgcagccgcagaatcttttaattgctttgattggcgcatttattggaacgattgttggcttattaccgggtttaggtccaattaatggtgtggcaatcttattgccgtttgcttacgctttgggtttacccgtagatagtgccttgattttattggcagcagtgtatttgggctgtgaatatggcggacgtatttcagcgattctgttaaacgtacccggagatgctggagccattatgaccacgttagatggttatccattggcacagcaaggaaaggcaggaattgcattgtctttgtcatcggttagttcctttgttgggagtacggtcgcctttattgggattgtattgtttgcacctatattggcgaaatgggcaattgcatttggtcctgctgaatattttgcgctgatggtctttgccattgtttgtttaactggtctggtcagtacgcagccttttaaaaccttaattatggcactcatgggcctagcactttcaactgtgggaatggatgcaattacaggtgtatatcgctttacctttaacagtgtgggtttaagtgacggtattgcttttactactttggttattggcctatttagtgtaagcgaaatcctattaatgctcgaacgcacgacaattggtcaagttgccttaaaacaaggaaagcgttctctttttaatcttaaagagttctttttctcgttggttgctattatccgcagttcagtgattggtttcttcttgggcattcttcctggagcaggcgcaaccgttgcaagtgccatggcctataccactgaacggaagatggcaaaggatagtagcaagtttggtaaaggtgacttacgtgggcttgctgcaccagaaagtgcgaataacgcagcggcttgtggttcatttgtacctatgctcacattaggtgtgccgggctcggggacgactgcggtcatgatgggcgcattgcttatgtacaacatcgcaccaggtccacagttatttgttcagcaacctgtattggtgtggtcgctgattgcatcgcttatggtgggtaatatcattctgttggtattaaacttgccattggtaggcttctttgcccgcatgctgagtattcctaattacattctgatcccgatcatcgcaagtgtgagttttgttggtgtgtatgctattcatagcaatatctttgacctgctgctctgtatgggcttaggtgtatgtggatatattctcagaaaatttgattttcctttagctccattaattcttggttttgtacttggcgaattaatggaatcgaatctgcgccgtgcactttcaatttctcaaggggaacttgatgtcttatggagcagtaacattagtataggactttggatcatgtcaggattattattgatcttgccaatcgttcgtaaatacttgtttatcaaaaaacagcaagcttaa

SEQ ID NO: 64612 - DNA, 1047 bp, Acinetobacter baumannii
atggaaaaaataagcgcaaatctcaaaggattagcaattgctctggtcggagctttaattgccaaatatttacatattcccttgccttggttgcttggacctctattgacggccttattgttcggtagtgttggtcatccacttgcctgtgatccccagtggcgacgcatagggcaggtcattattggtatggctttaggcctatacttttcaccagctttagtacaggcagtggcagcatattggggctttatcctcataggtttggcatggtcacttgtgttgggtacgttgctggctggattgcaatatcgagttaatgccttggattgggcaaccgcatggttttcttctgcgattggtagcgccagtgaaatggtgaatattgcagaacggtatcaagctcaagtcgataaagtcgttgctgcccatagtttgagaattgtgattttagttgtcctggttccaatttttatggagctttattttcatgtcgaatggactggtttaaagataccagtgtcggatcaatttagcttttttcaggtcgtcttactgttttgtctggctctgtttgttggtcaggtttttcaattttttaatcttttgaatgcttggattttagggccactcgccattattgggttattgtcattttgtggaatacttcaaatgaaattgcctgaatggtttactgcctttggtcaagtttgtatcggctgggcactaggtagcaagtttccatttagctttttaaggaagaataaaaaatttattggaatcacactgatattcaatttactggctttagcgttatcgatcagcgttgctttattactggttaatttaagtcatacagaaaaacaaatcttgattttaggtctttcacccggaggcatcgcagaaatgtcactgatggctaaagctctcggactcgcagtacccatcgtcgtttctttccaactttcaagattaatttttgtaattctcactacacgctttttttatcaatacagtctgcaattattttttaaatctaaaaagtaa

SEQ ID NO: 64613 - DNA, 1254 bp, Acinetobacter baumannii
atgaaatttaactcacctaagacagtactaatcgttagcttgaccacaattactacatttacccatgccaatcagagcagtgaacttgaacagttacgtgcagaagtgaatgaactccgacaaatgcttcaggctcagcaagaaatacctgcaaatagcgtacaggttccacacgtacccacagcaagtgctatcacgccgcctgaaaaaaatactcaagctatattcaaatggcaaacaaaatctggtgccgatgttaatttgtatggctttgttcgtgctgatgctgcatatcagtttgaaggtgcgaaaggtatgtttaaccgcattaatggtgtgttactagaaggtgatcctgataaaaaatcgactgaagatcgcttggattcgaccgtaaatgcctctcgtattggtttagattttaatactcctgtaggggaaaagacgttaaaagggaaaattgaaatagatttccgtggtggggcaaataaagacaatgcccgtctgcgacatgtttatttacactatgatcggtggttgattggtcaaaccacatctacttttctttcaactgaaacagcaccagaaatgctagatacaaataccgcattaggtggaggtaccaatcgtaatccaatggtgcgttattctgggccaattaatgcatcaacctcttatttcttaagcttagaaaaaggcaatgacgaaaaccgtctgcctttattggcgagtaaattgaaatatgaatttgctacggacaaaggtgtaatgactgcacgtggtttagttcaggaagtccgtctacgcaatgaaaatgatgaaactaaaacgggatggggtgccgcattaggtcttcgctataaaatcacgccatccttattatttaatagcaactattcgcatgtttctggagacaataagttattactggcaacttcagataatgtccgtcatatccaaaatggagatgatgtcgaattacttgattttgatgcatttcaattgggccttacttatcaatttaatgaaaagctaaggggcacaataggtcatggtgcattgatctatgaagataaagacgtaataacaaaagatgccaataaaaagttacaacagagttgggcaaatctgatgtttaaacccaataaaccactaacttttggggttgagtatgtctatggtgagcgtaacactgtcagccagcaagtaggaaaagataagcgtatagaaatgatggcgaaatatgaattttag

SEQ ID NO: 64614 - DNA, 504 bp, Acinetobacter baumannii
atggaaaaattaactgtacttcagctaagcaaacgaactggactctccagaacacaaatttattatttagaaagacaaaataaaatcaatattatcaatggcaaaatagatttagaagaagctatgccagccattattgaattacttgataaaaaatcaaataaaggcagtgaaactaattttaaacagattttaaacttactgatttcacaaaatatctatttacaggagcagttagaaagggctaaaaatcatgaaaaaaatttgaatgatgaacttgcctattatcgtaaaattttaaatgaaaaacttagttcaattgagaagaaaatcttaaggacggactcaattaatgaagtgcctataacaaacgctccatctcttttagagagcagccaaataaatgaaatggtgtttacacaagcagaagataagaagaaatcagctttagaacttacagataagcttgctaaacttatttttattaaccaatcggaggagtaa

SEQ ID NO: 64615 - DNA, 315 bp, Acinetobacter baumannii
atgacaacattatctacagcaattgctgactatctttcaacatccattaactctatcaatgacgttaagtattttcttagccgatatcccactaatgtccagcaacagtttgtaagtgcattatatattggccgagatcatattcactacagcagtttgagagaaaacaccgagatctcaagtcaaaattacgaccatattcaaggcagtgaatacagcagactaatttttgaaaaaggttcaaatgttgcaacttaccttcaaaaatttagagaatgtgctgctgcatccaactttaatattgatgcattgtaa

SEQ ID NO: 64616 - DNA, 618 bp, Acinetobacter baumannii
atgatgacatcacaacctaaaaatattcagacttttattattggagttttatctacactggtcgtggtacttgcaggatgggttggctatgacaagtttttaaagcctaaatcaggaacaactgttcagtcatctgtttctgaacctgctgctgtctctgagcctgtgattcaggcaagcagtgaacctgtattaggagtgaaggaaaaagaagcagattctacccaaaaaacagaggacagtactaagggcaaatatctagggaatggactttatacctctaatatgaatagtggtaagtgtttagattctgacaaagtaacctgtggtttgtttgaagtgaatcaactccctaaagaatggcaagatactctggaaaaaacatgggagaataatactgactattggttctctattactgatggcaataaggtgacttcaattccatctaactggacaggttggcaagtaatgaaatatggtccggagcaaaaatatgtaatggcaatattctacagtgcttatacgaatactggtgaatgtctactcatgcagaacatgttcgatattaaaacgaaacagaccatcgacagtgttgaacttaactgtactttgtaa

SEQ ID NO: 64617 - DNA, 1038 bp, Acinetobacter baumannii
atggcacatcaaatagaaacaatggcatttgttggtcaaaccccgtggcatggtctgggcaatcaactctcgccacatcggccgatcgaagtctgggcgaagcaggcaggcatggactggcgaatagaatcctccaatgttagttatatggcaaagaatgcgcgtgggcaaagcattatcatgccttatgaagaacagcgggtgctgtatcgttccgatacccatgcaccgttatcggtggtgagtcagcgttaccaagaagtacaacctaaagaaattctagagttttaccgagacctgactgaacaatcaggttttgaactggaaaccgctggggtacttaaaggcggcaagaaattctgggcattggcaagaacggggcaatcggcagcattaaaaggtaaagatgtcagtaatggctacgttttgttggcaacagcatgtgatggcacattggcaaccacggcgcagttcactagtattcgcgtagtgtgtaataacaccttagcgattgccttacgtggacagaatagcagtgctggtgtggtgaaagttccacacagtaccaagttcgatgccgagaagattaaacagcagttggggatctctgttcgtggatgggatgaacacatgtatgaaatgaagcaactgagccagcgtaaagtgacccaacaggaagcagcagcttatttcgatgcggtgtttaataacacaaccatgagtactacagatcaggaggaaagtattattcaatattaccttaaagcagcatccatggacaaaaaatcaaactgcaaatctgagccaaatggtcgagcgatgtcgaaggctatggaaatgtttaatgggcagggacgaggagcagaattaagttctgctaaagatacagcatatggtttgctttgtagtatcacggaattttgtgatcatgagcgccgtgcaatgagtcgagatcatcgattgaactccgcatggtttggaataggagccacgattaagcagagaggtttggagcaagctttaagcatgttaatttaa

SEQ ID NO: 64618 - DNA, 2106 bp, Acinetobacter baumannii
atgaaaattcatacattaactgctgctctattcgctacaggtagcatttttaatgtagttcatgctgggggtactatatatccacaactggcgcctatttatgtaaaagcagatcaactggatcaatttggcctaaccaatacagcaactcaaggcacgataacaaaagaacatttagcaaatcgcccattattacgtcctgctgaagtattagaaactattcctggagttatcgttacccagcatagtggtgatggtaaagcaaaccaatactttctacggggttttaacttagatcatggaacagactttgcgatctcagtagatggaattcctattaacatggttacccatgctcatggacaaggttataccgacttaaactttttgattcctgaactcatcgacaatttgacctatcataaaggtgcgaccaatattacggatggtgattttgcatcagcaggtacggcaaaaataagaacaatatcggctgttgaacagccatttatacaaatgactttgggttcaaacgagtaccgtcgaatattaacggcaggctcaaccgagtttgctggtggtaccttacttggcgcctttgaagggatgagtaatgatggcccttgggattatccagaagatttagaaaagcaaaactatttactcaaatatagtcgaggtaaccagaataatggttggaattttatgttcaatcattataaatctaactggaactcaactgatcaagttgcacaaagagccgtatcctctgacctaataggaagatatggcagcctcgatcctagtgatggtgggaaaaccactcgcactgctttttctttagaaaaaaattcgagtgacgatattcatcaaactaaattaaatttatacggtgtccattcaaaacttaatctattttctaattttacttactatttagttgatccagttcacggtgaccaatttgaacaagcagaaaaccgaaaaatattaggtggttctattaatcataattggaataccaaatggttagatttagatatgatcaataccataggaacatcattcagatatgacgatattgatggcttaggcttataccaaacagaaaatcgtcaacgttttaatactattcgtgaagatcatgttaaagaattatctatgggtgtttgggttcaaaatcagacccaatggatgccttggctaaagagtattgctggcttaagagcagattactttaattttgatgtccattctgatctaactgccaactcaggcaaaacagatgaccatattttaagtccaaaaattagttttatttttggtccatgggcaaatacagaatattatctcaattatggctatggctttcatagcaacgatgcccgtggaactacaattcatctaaatcccgacccaagagatgagggttacatggaaccaatccagtccgtatctcctttagtccgtacaaaaaatttagaagtaggaatacgtggagaatggatatcgaatttaacaacaacactcgccttctggcagttagattctgattctgaattagtatttgttggtgatgctggtacaacagaagcgagccgaccaagtcgccgacaaggaatcgaattgagtcatttctataaaccaaattctgattggcttatagatgttgatatggcttggtcaaaagcacgttataaagatgatgcttctgagggtaactatattcctggagcaattaacaccacagcctctacaggaattaactacactcctttacagccatggagcttaggcgtaagaatgcggtattttggtccacgtccattaattgaagataatagtgttaagtccagctcttcaacattagtaaatttacaagctacctatcgatttaataaaaatcttcaagcgcaaattgatatcttgaatctatttaaccgcaaggtaaatgatattgaatacctatatgaatcttgcttaaaaacagaacaaatcacctccgagtgtaatgcactaactcctactagagaagggatcattgacaaacatattcaccctgcagaagatcgtgcttaccatttttcagtaaaatattctttttaa

SEQ ID NO: 64619 - DNA, 1005 bp, Acinetobacter baumannii
atgattgatttatctttaatctggattgtaattattgccattggcgttttcatttatgttgtacttgatggttttgatctcggtattggtattttgtttccattcatcaaaaatcagcaagaacgagatgtgatgatgaataccgttgcgcctgtctgggatggtaatgaaacatggatggtacttggtggtgctggcttgtttgcagcattcccaatagtctattccgcagttttatcagcactttatttaccaattattttgatggttattgcattgatttttcggggcgttgcttttgaatttcgtttcaaagcaaatcgtagcaagcccttatgggatgcagcattcataggtggatcagtattatctagctttttacaaggtgtgattcttggtgcttatattcagggtatacatattgtcgatgggcgttatgcaggtggtggtttagactggttaacaccattttcactgttcacaggtgtaggtgtggtcgttgtttatgctgcactcggctgtggctggcttatcatgaaaacggatgatgtattacaaagcactatgtatcgtttaatgccaaggctgatcatagtactgttactgatttttatagcggtaagtatatacacacctatggcacatccaataattgctgaacgttggtttaatccacctcaacttttatatttcagtccagttccaattctagtagtggttttcacttttttaacgattcgagcttgtcaaaaacatcaggagtctatgccttttttatataccttggcattagtgttcttagcctatacaggttttctgatcagtattttcccttatgttattccaccttctattacgatttgggatgcagctgctccagccaatagtcaactatttgcactgatcggtgcattgattttaatccccattatcattatctacaccatcatggcatattgggtatttagggataaagtacgtgttggcgatgagggttatcattag

SEQ ID NO: 64620 - DNA, 1434 bp, Acinetobacter baumannii
atgactctgggtttaacagcacttgaactggcaagaatacagtttgcgtttaccgtatcgtttcacattatcttccctgcaatttcaattggacttgcaagttttttagcagttttagaatggcgttggttgcgtacaaataatccaatctatcaggacctatttaaatattgggtcaaaatcttcgctgttgcctttgggatgggtgtcgtctctggtgtagtgatgagttatcaatttggcaccaattggagcgagttttcccgctttgcaggaggcgttacaggtccattgctcacttatgaagttcttagtgccttttttctagaagcaggatttctaggtattatgctgtttggttggggacgtgttggtaaaaaagcccatttctttgccacccttatggtcgcaattggcacctgtatttcaatgttctggattttatcttcaaacagttggatgcaaactcctcaaggattcacaattgaaaatggcattatcgttccacaagactggtttgcaattgtctttaatccgtctttcccttatcggcttgctcatatggcaattgctgcttttatggtggcagctttacttgtagcagctaccacagcttggcatttactaaaaggccgtcgggatgagttggttaaaaagtcattttcaatggcactttggctgattttaattttagcccccttacaagtattcgttggtgatgcacatggtttaaatactcttgaacatcaacctgcaaaacttgcagctatggagggacattgggagaccaattatgatgaaggtatgccattgtatttatttggcattcctaatatgcaagaagaacgtactaaatatgcaattgcaattccaaatctaggaagccttattcttacgcactcaacgaacggctcagttaaaggtttaaaagacttcgcacctgaagatcgtcctaattcaaccgtggttttttggagtttccgtatcatggttggtttaggcatgttgatgctattactagcatttacaggagtatggttgagaaaaacagggaaactgtttgaaagtaaatggtttcatcgcttcgcattattgatgggcccatctggttttattgcattacttgcaggttggtttactacagaagtaggccgtcaaccatgggtagtctacggcgttatgcgtacaaaagatgctctttcccctgtttcagcggagcaagtgggtttaactctgattatctttgtagtggtgtattgcatcgtttttggtattggcatttattacatgctaaaacttatgcttaaaggccctgaatttatttatagccaacaagatgaaattggcggtgttggtcattttaaaacacccatgcgcccactcagtgcagcagatgaatatcttgatgataaagatcaaggagcttcttcatga

SEQ ID NO: 64621 - DNA, 453 bp, Acinetobacter baumannii
gtgttgatggtttttggaagattgctaggattatatgcagtcttgttacaaatcgctgtgttcttacagccattactgccagagaaatatcaaatttctccagtatgtgagactattgcccaagcattgcaacttcctcattctgttgcctcccctagtcacgatcatcatagtacatcacagcagccgcacagcatgtctcatcacatgcaacatgcagcacacgcttcctcatctgacattacagcaagccaccatcaccatgatgcaggacatcagtgccagtactgtgtggtatacagccatgttgtacccttacctgacattgatctagaacaaattcttattcgaattcaggtaaggtttcttgcttttattgaaaactattttcacgttttctttcagctccagcagctctttctaattccgcaagggcgagcccctcctctttga

SEQ ID NO: 64622 - DNA, 411 bp, Acinetobacter baumannii
atggcaatgtttctgcaatccgttgtatttatacaaccattattgccagcacaataccgtattgcgctggtctgtgtctctgtttccgatgctttttcaaatactataactgctgctcaacaacataattctcatcatttatctgatcattcagatcggcatcatatgatgcatgaagatcaaaaaatttataaagagcaaagtgctcaccaacatgatattggacatgaatgtccgttctgtacggtatttgccaatttaactacgggtttagactttagtcttaaagaagtcttcgaccgtctttatgttcgaatgttggcatttgaacgtaattttcagcatatttattttgctttacagcgcttatatttattgccacaagggcgagcacctcctttatttgcttaa

SEQ ID NO: 64623 - DNA, 2280 bp, Acinetobacter baumannii
atgtctcaattcaagttaaacccattcttaaatgggaactgttttattgtttcacctcatgacgtatcaaaatcaattttgattaattctgctttgttttatcgactaggttttactttgttggtttcgggattatttggaaccactacttttgcctcagatgatttacaacaaacagtgcaattaccaacattagttatcgaagcacaaaaagatctagatactcaatctcttcatttaaaacaagtgaatacaacaggaagtcgattaggattaacctctcaagaaacgccagcaacagttcaaataatcactcaaaaagaaatgcaagagaaagggttaagaacagttaaagaagcatttgggaatgtgacaggtgcaaccgttggaaatgtaccaggtaatccggcagttctaacaatgcgtggcttttctggaaatacgaatactgttttacaggatggtgttcggattggtgcttctacttttgttactcgtgatttagatgtctggaaatatgaaaaaatagaagtactaaaaggcccatcatctgttttatttggagaaggggccttaggcggtgctgtcaatcttgtgactaaaaagcctaatttagaacagtcaacattagagggtatgctgaactatggaagctttaatacggttagagcagctattggcggtaatcttcctttaaacgatgagctggctgtacgttcggatataagctatttaaagtcagatagtttattcgatattgataaccaaaaaacggtaaagtttggtgcatcgggaagcttgctgtataaaccagatgataatttatctatgattttttcggcaaattttgatcatgataaagaaacgtctagctataatggatctcctttagtttctgcatcaactgcaaaaaatccaagttatattttggataatcctgatggtttagtgattgataaggcaacacgacataaaaattataatccagacggtggagagttgagcgctgataccacgacattgtcatgggcaacagactatcgtttatcgcctacatgggcattaaataatattgcaacttactatcatgcagaccgtaaatattatttatcgcctgaacaaaattttgatactcaaactggtctatttaagaggactgtacagcgctggagtcatgatcatgatgtatggagcgatcgtgttagcttgaagaatgatgagttaattgctgggaaatatcgtaatcgtttcagcgtgggaagtgagtatagctatactgattttagtagcccacgaccaagtggtagcttagcagctgttgatccatacaatcctaatgtcggagtgatgccttcagatagttgggaggggtggaccagttacaataaatttgcaactaaaattaaaaactgggccgtttttgcagaggatgcttttaacattacaccagattggctaattgttgggggcgcaagatacgaacgtttagatgttgaacgtacagttaataatgtactcacggacagcgagcagcaatttaatccttcgtttcatcctttttcttggcgtctaggtacagtttataatttaaatccaaatacccaaatttatggacaatatagtacagctgttacaccagtttcatcattgcttgttatttctacggcgaatggaaattttgatttatcaaaaggaaagtcagctgagcttggatttaagtcgagtatattagatggcaagttagatatgatcggatctatatactggattgaattaaacgatattctaacgcgtgacccgaataatattaatttaactgttcaaggtggacagcaagtttctaaaggtgctgagtttacagcttctgctgcaattacttcacagttaaaagcaaatgtgggtttatcttgggttgatgcagaatacaaagaattaatagaagctggtggtgctaatcgttcaggaaatcaacctgtgaatgtacctgaaaaagttgcaaatgcttctttgagttatcagtttaaaacattaccaattactgtgagtggctttgcaaaacatgcaagtggtttctataccgatactgctaatacatatttcgtaaaaggctatacgacatatgatgcatcacttgcgtatgatctaaaaaatatgacttttacgctctggggaagaaatttaaccgataagttttatggcgaatactctggttattcatctaagcaaatttatatcggggcaccaagaagtgttgagcttggcgtgacatttaaattttaa

SEQ ID NO: 64624 - DNA, 2106 bp, Acinetobacter baumannii
atgtctaaatttttatttcatccactagcgtggagtatttttatcattcagtgttcaacacatgctgttgcagctgaaaagcaattgagtgtagatcaaagcacagagcggttaccaacgattacggttactgctgagaaacaagatgagaggcatacttcctcacaggcgattactcagtttaatcatgatctattggatgtaccttttacaaaatcccatgtctcagaaaaagatattcaaaactataatattcaaagggttaatgatgctttggcttttgtaaatggtgtcgtctatcaagatagttatggtggaggtttctgggataattactcatttcgtggatttagtaccgatcctaatatgggaacgatctatatgcgtaatggtttaagttctgtgagtgggattcatagcccacgagatatggtaaatatccaagcagttgatttcttaaaaggtccaatggctgcgatgtatggtcagggagcaattggtggaattatgaatatcaccactaaacaacctgaatggcaacgcaagagcactttaagtcttagcggtagtactttagaggaatatcgactctcggttgatacaactgatgccattaatgaagattttgcttatcgtttaggtgcttcttatgaagataataaaagttttagagatcatgtagataatcagcattattatcttgcaccacaattagcttggaagatatcagatcaaacccaattaaatcttgatacggagtttgccgaatatcaaggtgtctttgaccgaggtattccaatggttgatggcaaagttgctgtaaataagaaaacattcttgggtgaaccaagtgatggcgatattaaaattaaggatcagatgtatcagttacgtttgaatcatgagtttgacgataattggaataatactacagcgcttacttacagccatggagagcgtgaaggtacatctaccgaaattggttcaatcgccacagatggaagaacagcaaatcgtttccgtcgagctcgtcaatttgagactgacacaataaattttcagtcaattttacgaggtaagtttgatactggttctctcaaacatgagttagtaactaatatagaagctgggcattatacgattgaccaaattcagcgaagaaatgcagcaggtacaaatagtccgattgatatttataatccaatttatggccaaaatattttagctctgacacgagtgactaaaaatactaaagaaacacaagacatgatcggtattaatattcaggatcaagtatttttaaatgatcaatggaatatcttattgggagggcgttttaaccggttagagcagcagattgataaccatcaaacgttaatttcttcacaacaaacatttacaccgtttacaccacgagccggtattaattttaaaccaactgaccgcctttcattttacagtaactggggtaaaggttttgaacttaatactgggttaaacaaaaataatgagctttatgaaccggaaaaaacgaccagttgggaactaggcactaaatatcagtttttaccacagagttggttaggtttaacctattttgatttggataagcgtcatttgcttacggaaggtattactgatagttatgttgacaatggtcatgtacaaagtcaggggcttgaggttgagttacaacatcaatttagtgacagtctccgagtgaatgccaattatacttataccgatgcttcagttattgaaagtgaagtggataaaaaaggttcgcgacttaaaaatattcctaagcatacagctaatttgagtgctgactatcaagtgaatatctttggccatgaagcagggctagtcggaattattaactattatggacagcgtagtgcgaactatattgataatggaacaactttgcctgaatttacagtagtgaatattggtggctatttacagatccgccctgatctacgagcccaactcaatatagataatcttttcgataaggattattacgttgcgagctatactaatttttgggtacagcctggtgaaccattaaaagcaactttgcgctttgattggtctttctga

SEQ ID NO: 64625 - DNA, 456 bp, Acinetobacter baumannii
atgaagaaaagattattgagctcttttattgttgctagcttaatgatgggttgtgaccaacatgatccagctacaaataatgagcaagtcagttcagaagttaaaaaaccattagatgctcaactccaaaaatggataggccattataaaggaacacttccttgtgctggatgtaccacattttgtgatgagtgtaatgggatgaatgtagatttaaatattcatgcagatcaaacctttcgattagaaagaaccagtaatagtgatctcaacaagcatgagttatatgttggaagttttagcttcttggataacgggaaaataaagattcgactacagaatgtgaaagaacgaaatcagctgattttaggtagtggttatgttgaagttttagagactaagacgggtctaccttatcagtcttttgaagatttccaacttgataaactaacctga

SEQ ID NO: 64626 - DNA, 1911 bp, Acinetobacter baumannii
atgaatatccagcttaattcttttggttctactcagcattttcaactcgaacagcccgtggcagtttctgaatttttgtcccatttcaaaattcaaggctataaaaaagctttcctcgccaaggttgattctcaattcgttgatttacatcatgtcatccaagacgacagccatatcgaactcttcagtctgagtgacgatcacagtttagatctactcagacactcttatgcatatttattagcacagactgtccatcagttatactctgctgctcaacctgtggaatatcaaattaccaatcaaggtatctattatgattttgccgatacgccgcattttaatcaggatgatttacaacgaattgaactgaaaatgcatgagtgggtacaacaacatttagatattcgcacagaaaagatcacacctgatcaagcagctgatttttttaaacagcaagattttgattttaagtatcaatacttaaaaaatacgagtaactcaagcgacttatttttccatcaaaatcgtgatttttctgacgtctatttatatccacttgtaccaaacactgcttgtttagagcactttaaagtgactcatgtttctggtgcatattggcaaggtgatgctacacaacccatgttacaacggatttatgtcacatgttgggcagagcaaagacaattaaagaaccatttaaagcaagttgaagaagcagcaaaacgagatcatcgtaaattagcacagcaacttgatttactacattttgatgataaagccccaggtgcggtgttttggcatgcaaaaggttggaagttattccagttattaacggattatttaagccagcagcaagatgatgcaggttatatcgaagtaaatacccctgatgtcatggatcgagaactgtgggaaatttcaggacactggcaaaattaccgccagaatatgtttactacacagaccgaagaccatcgtgtctttgccctaaaaccaatgagttgccctggagcggtttgtctttatgcgcatggattaagaagctatagggatttaccattgcgtatggcggaatttggtaaagttcatcgctatgagccatctggcgctttacatggtttaatgcgcgttcgacattttacccaagatgatgcccacattttttgcacagagagtcagcttttatctgaatgtaaagacacgattgcgctgatttataaaatttaccaacaatttggctttaatgaaatttcgattaaattatccacacgaccaactcatcgtgtcggtacggaagaaatttgggatttcttagaagatacactaaaacaatctctcgaacagcttgatattccctataccttaaatatcggtgaaggtgctttttatggtcctaaaatagaattcactttaaaagatgcgattggtcgtgaatggcaatgcggaacgattcaggttgatttaaatttaccagaacgttttaatattcattacattgatgaaaacaatgaaaggcaaagacctgtgatgttacatcgagctttatttgggtctttagagcgctttattggtattttgatcgaacattatatggggaacttcccattttggcttgcacctgtccaaatcgcaattttacctatcactgatgcgcaacatgcttatgctcaacaagtccagcaattgcttaaacaatatggcttcagggcaaccttagatttaaatcaaacgaaattgaactacaaaatccgtgaaaatacgcttcagaaagtgccttacctgatcattattggtgagcaagaaatgcaactatcttctgttagagtacgatcacaaaatggaatggatttaggtgatatcccgcatgctgagctagttaacttctttaagagcctatctacaagttga

SEQ ID NO: 64627 - DNA, 1356 bp, Acinetobacter baumannii
atgaattttagacaattacctgatttgatcattcgcaatgccaacatcgttaatgaaggtcagcaacaaatttgtgatgttctcattcagcaaggacggatgagtaaaatccaaccgagtattacaggtgtctacaatgccaaaagcattgaggctgatggtgcatggttactcccaggcatgattgatgatcaagtgcatttccgtgatccaggctcaccacaaaaaggaagttttgcctctgagtctttagcagcggcaattggtgggattaccagttttatggatatgcccaataccaacccaccgacattggatctagccgcactacactataagaaagggattgcagcacaacatagcatagttaattatgcatttcactttggtgtaagtgcgcaaaatttagaaattgttgaagcgcttgatcctaaactggtcactggtgtgaaagtctttatgggagcatctactgggaacatgctggttgatgatcctaaggtcttagaacgcctctttgccaatgttcctacgattttattaacgcattgcgaatccacgccacggattaaacaacttgaggcgttttatcgtgaaaaatatgatgaagatatccctgcctatctacatccgaaaattcgtgataaacaggcttgctttgaaagttctcaaatggcggtatctcttgcagataaattcgggacacagttacatgtgctgcatcttacgacggcaaaagagctgtgcttatttaaaaatttgcctttagacaaaaaacatattactgctgaagtatgtatacatcacctaacatttgatgaatctgattatgcagatttagggcatttaattaaatgtaatccagcaattaaaactgtcagtgacaagcatgctctcattgaagcagtcgccaatagtgaacgtctagatattattggcacagaccatgcgccgcatacttggcaagaaaaacagcaaacttattttaatgccccttcaggtttaccactagttcagcatgccttacccgcattattagaattagtggcagatcagaaactatcaattgaaactctggtacgaaaaacttcacatcaagttgccgatttattccgtattaaagatcgaggttatatccgcgaaggttattgggctgatttagtcctcattcgagaaaatcaacaaaaacaatcagtagctgaacagactaattatatgcgatgcggctggacgcccttccaaaataaaacgttccaccatctggtggatacaaccatcatttctggtcagctcgcatggcatcaacagcagccttatctcaactgtcaaggtcaagctttagaaattgaccgctaa

SEQ ID NO: 64628 - DNA, 561 bp, Acinetobacter baumannii
atgattcgtaaaaaccctacaggacacctccctgttattgaccaatccgcttatattgatcaaaccgcaattatctgcggcaaagtcattattgaggccaatgtatttgttggtccatatgcagttattcgcgcggatgaagtgaataaaaatggcgagatgcaaccgattatcatcggtgaaaactcgaatattcaagatggtgttgttatacattcaaaagcaggtgcgcaagtcacgattgggaaaaattcatcgattgcccaccgttcgattattcatggtccttgtgtaattggtaatcacgtattcgttggttttaacagtgtcttatttaactgtaaggtcggtgatcatagtgccgtccgtcacaatgccgtggtcgatggtcgagatttgcctgaatcattttatgttcctgcgatgagctatatcaatgctcgaaccgacttaagccagtacccgccgattgatatctcgatcagtgagttttctgaaagtgtagtgagcaccaatattgaattagtacaaggatataaggcattacaaaatgaattttag

SEQ ID NO: 64629 - DNA, 420 bp, Acinetobacter baumannii
atggtagcttcaacagtttttctcgacattgaacaagaacatttaggtcaacgttatgacctaatgacaattattgatgccattccttggaacaaggatggattaattacggctattgcccaagatataaggagtaaagatgtcttaatgctggcttggatcaaccgtgaggcactgcttgaaacactgaatacagagcaggtttgctactggtcacgctcgcggcagtgcttatggcgaaaaggcgaaagttcaggacatcaccaaaaactcattgaggctcggcttgactgcgacggtgacagcatcctctttttggtcgaacaaactggagccgcgtgccacaccttccgcccaaattgcttttatctaggtttagatacacaacacgccaccattttaacgcagcccatcatttag

SEQ ID NO: 64630 - DNA, 906 bp, Acinetobacter baumannii
atgaatgcctctcaactgccagatgtctcatctgagccatttcttaacacgtatgcctatcctctcgattgggtaggcatggaaaatatcgccctacctattcgaattcaaaatacgctgtgcacaagtaaggtcaatgcttatgtcagcttggatgatcctcttgccaagggcatacatatgtctagattgtatactcgactgttagagttacatgatctacccgacctaaccttaaaccatattcatcaagcactagacgacttcttaaccagtcatacacagctctcacaacaagcccgcctagatattcaagcagagctgaacttagaacagcctgctttaatcagcgcgttatcgggctggaaaagctatccttttagcttatcctgtaaattaaatgagtgtacttttgaggctgaattagcaatagaaattacctattcttcaacttgtccttgttctgctgctttggcacgagaccttattcaaaaaagcttccaagaagctattaatacaaaaataataaatccacaaaacactgatgaagtgatggtatggttagggacaacagatgcaattgttgccacaccacacagccaaagaagttttgctcaactccgttttaaattagaccctcattttcaatcaattccaattcaacagcttatttctcatgctgaacaagcattggcaacacccgttcaaacagccgtcaaacgtgtagatgaacaagcatttgcattagccaatggtcaaaatttaatgttctgtgaggatgctttgcgtcgtttgtatcacgcatttatcaattattcaggtatttcaggcttcaacttcaaagtcattcatgctgaaagtttacatgcccatgatgcaatcgcacagggatcatggcaatggtag

SEQ ID NO: 64631 - DNA, 423 bp, Acinetobacter baumannii
atgaaaatgactatcaccaatcaagatctacgaaaagcagggctgaaagtcaccttaccccgacttaaaattttaaaaatattggaaaactctattccacatcatttaagtgctgaagatatttataaaaaacttttagaacaagatgaagatgttggattagcaacggtctatcgggttttaactcaatttgaaatggcaggcattattcaacgtcataactttgaccataatcacgctgtttttgaaatgaaatcagatagcactcacgatcatttggtctgtcaggaaacaaaccaaatcattgaatttaagtgtgaggaaattgagaaaatactactggacattgcggaaaaacataatttcacattaacagggcattctctgatcgcatttggttattgtaggaattctaaaacataa

SEQ ID NO: 64632 - DNA, 192 bp, Acinetobacter baumannii
atggataaacctatcattttatattttgaatccgagttatctacaagcaaagataaaatatgggattggatcacatcggttaaaggtatccagaaagagatccagccatttttttcaatgactgcccccaaatatataacatcactgcatgatataaaattggattttgggaaacctctttttcgtagctag

SEQ ID NO: 64633 - DNA, 1446 bp, Acinetobacter baumannii
atgtccgatttgtatgtttataatgctgaaactcgatccaaagagcgcttcaaacctattgtagcaaatgaaatcaaactctatgtctgtggaatcaccgtttatgactattgtcatattggacatgcacgaaccatggttgcctttgactttattgttcgctttttgagatcacaaggctggaaagtaaaatatatccgtaatattacggatattgatgacaagattattcataaagctcaagaaaaccatgaatccattggtgaattgacggatcgctttattcaggcaatgcatgaagattttcaaacattaggctgcctttctccagatgtagagcctaaagcaaccgattcaattcaagatatccaaaaaatcattcaaaccttaatcgagaaaaaacacgcctatcaaacgactaatggtgatatttatttttctgttgaaagctatcctgactatggtcgattatcaggtcgaaaattagcagatatgcaagctggtgcaagccaacgcgtcagtttagaaacggaaaaacgccacccttttgactttgtactttggaaagcatcaaaacctgatgaacctacttggcgatccccttgggggaagggtcgacctggttggcatattgaatgctccgccatgtcgatgtgtcacttggggaaccatttcgatattcatggtggtggtggagatctacttttcccacatcatgaaaatgaaattgctcagagtgaagccgcaactggtgaaaagtatgtaaattactggttgcatacaggcttcattaatgtaaatggcgagaaaatgtcgaagtctttaggtaattttctcactatacgtgatgcgcttaaggattatcatcctgaagtcattcgcttactgatgatcagttcgcattaccgtaatccgattgatttctctaatcatattttgaaagatacgaagaaaacgctattacgtttctatcaagccctatatcgtgcgcaaacttttattgacccaactaaaagtttagatcaagttcagtattcagctcacccgtctctgctgacatttaatcaagcgatgaatgatgactttaataccccagaagcgttagttgtttgttttgatttattgaaacagctgaatatagctttaaaggatgaaaaccaaaatcaagtcattgaaaattatcatttacttatttggattggcaatattctaaatatttttcagtatgatcctgagaaaatattaaaacactcagatggtgaacaaggtctccccctttccgagcaggaaatccaagaagcgattttggcgagaaatacagcacgaaccaataaacaatatgctttagcagaccaaattcgacagcaactactcaaaaaaggcatcgtactagaagacaccccaactcaaacaatttggaaatatgaaggaaaaggccatggataa

SEQ ID NO: 64634 - DNA, 753 bp, Acinetobacter baumannii
gtggctatgaaacattttttaattattggtttactgttctgtcttacagcatgcagtcagaaacaaacggggcaattgattaactcatctaatgcctctggacgacatgccacggtaaaagataaatctgtacagtcgaaacgatcgtatccaaaaactgcgccaatagcttatcaacattggatttcgcaaccttcacataacgctcaagtgaatcattatcaaacatttttaaaaaaatataatttactgggtgttgtacctgaatttgaactatttcaaacagcacgaaattggcaaagctgtgatgcacctgaatatgaaattccacctcaggaagtatggggcaatattgttcctacactcactattttgaagaaattggtggatgccaaggtgattgatgattttacggtcacctctgtctatcgaaactataacttaaaccgttgcgcaggaggtgcagactcatcgcggcatgtttttaatgcagcgcttgattttcgaattggttctgaacaaccatcatcagaagaactttggatgattcagcaaacaaaaactaaattgtgtcaattttgggctgaaaatggtgcagctttaaatatgggacttggagtctatgcttctgggcaaatccatattgatagtgtcggatatcgtacatggggaccagatcatcatagtacttcatctccttgcgttactcagctcttgtccaatcaaaataataaaggaaaagtagatgaataa

SEQ ID NO: 64635 - DNA, 411 bp, Acinetobacter baumannii
atgaataaattaaaactcagtgtaactcagcaaagggtcttatccattttacagaatgagcagaaggcaatgagtgcctacgctttattagaaaaggcaaaacctttggggctacattctccagtacagatttatcgtattttaaaaaaattatcgggttatggactaattcttaaacttgattccttgaataaatatttagcatatgaattaaagaataaacaaacctatttacttgtcacgatttgtaccgagtgtcaggcaatagaaattgttgattcgcctcagtttgcccaagtcattgaacagtctattttccccaaaaattttaactctagacatcattatttagagttagtaggtcaatgcgctttgtgtttttccaaacataacagccctttattaacataa

SEQ ID NO: 64636 - DNA, 498 bp, Acinetobacter baumannii
atgaaatttcaggctttaaatattgcgatattaaccatatccgacactagaacttttgcaaatgataaatctggtgactatttaaaagccgctgtgattcaggctggccatcaagttttatctcgtcagatcagtatagatgatcgctatcaaattcggtctttcgttagtcaattcatcgcagatgcccaaatatccgtgatactgattactggtggcactggcttttatgatcgcgatattactcctgaagcagtatcagttttatttgataaatctatagacggatttggagaagtatttagagccatatcgatgacagagattggtatggcaacgattcaatcgcgggcattagcagaaatagcaaatcatacggggatattctgtttgccagggtcgactaatgcctgtaaaaccgcttgggaaaagatactaaaagaccaattagatgcaaccacaagaccgtgtaattttgttgaacatttctatgcctaa

SEQ ID NO: 64637 - DNA, 522 bp, Acinetobacter baumannii
atggaaatgcttgagaaagcgactaaagcaattcaacagggtaaaaccccgaattttgatgctccattgtcgttaactgccgaaattaacttacatattcctgcacttattccagatgattatctgggtgatgttcatcaacgtctattattctataaacgtattagtaataccgctacacaggaaaaactagataacatccgtatggagcttattgaccgtttcggtattccaccgcagtcggttaagcacttatttagcgtgcatcaaattcgtttgaaagcagaacatttaggtattacgaaaattgatattaatactcaaggtggaaatattgagttttcaccagatacgccagttcaggccattagtattattcagttaatgcaaaaaaatccgacttattaccgtatggaaggcggacaacgtttgaaggtgatggtgcagcttgaagagtatgaaaaacgaattcaatttatcaatgatttattgcaaaaattgatgagtgaactacatgcctga

SEQ ID NO: 64638 - DNA, 708 bp, Acinetobacter baumannii
atgacctttattgttgctattcaactaaacgatagcattattgttgcatccgataacaaaaaagttagccaacaaaaagatggaataattaaattttcaactgaaaaaatcttgaaaatgcattcatggcaaaatggtataattactggatctggtgaatatcaagttataagccgggctgttaaactttttaaaaatctgcccactccctcaatagaagatctgccccattgcttacttatttctagaattattagagagtcagaaattggaaatggtctctatcaagtagagaatagtaaactgctatgttcaagctctaatgacaagggagcacaactctataaaattgaaaaattttcgccccaacaagattatttttctactccattagaacctaatgaaattattatttggcttgtccatcccaacattgatgtgatcataagtaatctacaatcattatatgcaggacttaaagactattcagctttttcaaataaagctgactggatgaattactatattaaacaactatcactgattttcagaaagcaaagtcaacatgacaaattaatgagtaagagttttgatattttttttcaaaacaaagatgattatatatttggacatatatctaatactcacaataccactttagagtttcaaatatactcatcgaagaataagtatgttagtaaacagtag

SEQ ID NO: 64639 - DNA, 891 bp, Acinetobacter baumannii
atgatggaaaaggtggttagttatatactcctaatttttatttttttaaatttacaggcttgtcatgcccaacaaaaggaacaaaaaatgtcttctcaacctgaactttacacattgaattttggtatagaaggtgaaaaaaagttcaaatcgtatatgcaaacagatgtagaccaacaaccagcaggaatgtctttttttgacctcacttgggaacctccgcatttagcaaatataaaaatagatttagctgaaaatagttttattatcaagaatgtattttcagcaatgggaacacggattgactacgcacagcaaaacgaaggtatccaaattattgatataacagcaggattaaataaagaagagtttgttagtgaagagcaggcttatatggcttataaggggttattgggtgagctacaaaaagcagggtggcaacaatatttctatccttcagatgctcgttttgataaaacagataatttaaagagaattaaaaaaaataatactgtaatagatccctttaatctattaactcaagccgaatggagagagcattttaaatcttctacctcactctattttaatttatatagaaatggtgttttaactgaactaaatttagagaaaactagtaaaaaagagttaaaggctgaaaagaatgaacagtttatgttaaggttttcgattcaatcaattagatacgtaacaaaaaatttaattgaaaatggatataagttaacagggatcgacttaaaaagagctttcgatgaaatggtattagtagatcaaaaagaaagaaggaaagctgaaattaaagccaaaaaagaaggtttccatattgatgagtcatatcaggaccctgatgtttggcagtatgtaaaataa

SEQ ID NO: 64640 - DNA, 2679 bp, Acinetobacter baumannii
atgagtagtttaaaaattttaattacaaaactttctacagctgcacgcactgctttagaaaaatctgctaatgcttgtgttcttcagcaaaactacgaaattgaaattgaacatttatttttagagttacttaatcagcctttagaaaacgatttaaaaattttattaaaaaaatataaaatctcagccgatgctttggcagatgatttaaaagaaacaatttctcaattaccaaaaggtaatacacgtactccaatttttgctaaatcaattgttcgtttatttgaacaagcttggttattggcttcagcagaacaaaatcctgtcattcgtagtggtcatttactggttgcattattaactgcacctgacctctatcaaattgcaacgagagcttcgagtttatttgatcttttcccgatagactcaatgaaacataagtttctcgaaatttgtgaaaaaagtgtagaacaacaagaagaatcaaaaacatcttcacaagcagatgaattagaacaagccgtgactccaactgcaaaaactcaaaaaacacctgctttagatcaatatacaattaatttaactgaaaaagcgaagaatggcgggattgaccctgttattgggcgtgaatatgaaattcgtttgatgctcgatattttaatgcgtagacgtcagaacaacccaattttaactggtgagccaggtgtaggtaaaacagctgtagttgaagggttggctttaaaaattgctcaaggtttagttcctgaagcattaaaaaatgttcatttgcacgttttagatatggggcttttgcaagctggggcaagtgttaaaggtgaatttgaaaaccgtttaaagcaagttattcaagaagtccaatcatcggctcatcctattattttatttattgatgaagcgcatacgcttattggagcaggtggccaagcggggcaaaacgatgctgccaatcttttaaaacctgcacttgctcgtggcgagttacgtactattgctgcaacaacatgggcagaatataaacagtattttgagaaagatgctgcattaagccgccgttttcaggtggtaaaggttgaagaaccgaccgaagaagttgctgtagatatgttacgtgcaatgattcccgtaatgcaaaagcactttaatttacaaattgatgatgaagcaattgtaacggctgtacatgcctctcaccgctatattagtggtcgtcaactcccagacaaagcagtaagtgttcttgatactgcggcagcgcgtgtagctttgacccaaaatgcacagccagtcaaacttgatcaattaaaagcacaagaacataacttaaagcttgagcaacaaattttggaaaatgaacaccgtcagattccaatacatcatgaacgattagaaaatctgaaaaaccaactagagtcattacaaagtgagatccaagagactcaggaacaatggcaaaaagaattagagctagttcgtaaaattcaggaattagaagcgcagagccattctaatgagtctgaagcctacgatcagattaatttaatacgcaaagaccttgctgatattcagggacaacagccgttagtttttgagcgagtaaactctcagatcatcaatgaaattatttctgattggacaggtattcctgttgggaaaatggtcaatgatgaaattaagcagattttaacgcttgaagataaattaggtgagcgtgtaatggggcaagattatgcacttacacaattagtccaagggattaaaacttcaaaagctaaattagaagatccaaataaacctcaaggggtgttccttttagtcgggcctagtggggttggtaaaactgaaactgctttagccttggctaatgagttatatggcggtgaacagcatttaatcacgattaatatgtctgagtatcaagaagcacatactgtctcttcgcttaaaggtgctcctccaggctatgttggctatggtcagggtggggttttaactgaagctgtacgccgtaatccttatagtgttgtgttactcgacgaaattgaaaaagcacatagcgatgttcaggagttgttctatcaagtatttgataaaggtactttagaggatggtgaagggcgcgttattgattttaaaaacacgacaatcttattaacttcaaatacgggctcgagtgcaattatgcaggcatgtttaaatcagcctgtagaagaatggcctaccgcagaagatttaatcgaacatttaaagccgagtttatataaacagtttaagccagcctttttagggcgtatgagagttgtgccatatttcccattgcatgatgatttattggttcgaattattaaacataaattgggcaaaattactgctcgaattgaaaaacaatatggaacggaagttcaatattcagatgacttggttgaattgctactcagccgttgtactgaagtggatagtggcgcccgtaatgttgataacatcttaaattctacagttttacctgctttggcaactgaaattttagtggcgttagcagatcaaaaattgccgaaattgatcatgattgatgcaaaagatgacgagatccaatatttactagatcctgtggcgaagcctgctaaaaaacggactagtaaaaagttgaaatcagaagtttaa

SEQ ID NO: 64641 - DNA, 333 bp, Acinetobacter baumannii
  misc_feature (8)..(15): n is a, c, g, or t
gtgagccnnnnnnnntcacaaaatgaagcattatattttagtcgtgcaactattccttatgatcgagatagtgctaaacaagctgaaccaactttacatagccaagcatttcgtcatttaggtttatatgcttatcgtgtgagcttattacaagaatatgttacatgggaaatgggtaaacttgaaaagctcgagagtcttgagcaattgcgtgttttagaaaatggacaccgtattgctattgctgtagcagaagcgaatttaccaccaggtgttgacactcaagcagatcttgatcgtttaaataatatgcctgttgaatcttttgagtaa

SEQ ID NO: 64642 - DNA, 501 bp, Acinetobacter baumannii
atggatcgttcagaacttaaagaggcactagatcatattgataatcttgtaaaagatttaaatcggatagctcctatttctaacgctgaaaatattcatttaagaggtgagttttcaggcttactgctagttgcaatttgtgcaatttatgaaaatgttgtaaaacaaattatgattgaatacgctgactcagttcatattgatttttcatattatattgaagaaaattataagaaattaaatagtaagatctcaaaaaatgatctttgtaattatcttaaacttttctcgagtacaaaagaacgtgattttaaaaatgagttaacacgtatccaaacaagattaggaggtttacatcctaatgacaagtatacgtctttgcttcagtggcgtcattcatatgcgcattcgaaagtccctcaaactacaatagaagaggcgtatgaacaccatcgctattctaagttaataatttatgctttcaataaggtattaagttaa

SEQ ID NO: 64643 - DNA, 1125 bp, Acinetobacter baumannii
atgactgaagatcaatttcaagattatcaaattccagaggaaaaactacaaacaattgcagaagacttaattgatgatcagttagtagatgaagattatgaagatgaaatcccagatgttcaatttgatttagctgttacgccatctgatccgccgcttggtgtattagcaaaacaaatagatgatggtgatttaatagttccattttatcaacgaaaatatgtatggaaaatcgaacaagcttcaagacttgtggagtcatttttaataggtctacctgtaccacaggtatttttttatgttaatgatgaaggagtcttagaaataatcgatggtcagcagcgtattatgtctattaaatatttcttagatggttattttggagaggcagactcacaagagcgtaaaaaagtatttagactcaaaggactatccgatacacgaaattataatggtaaaacttttgaggatttggataagaaagatcagcgaaaattaaaaaatgctacattacgagcaattaatataagacagttatcaccaaataatagtaatgattgcgtgtttcatattttccaaagacttaatactggtggcacacagttgaagcctcaagaaattagaaatgctgtgtacagaggtaatattgtcaaagagctccaagatttaaataataatcgagattggttaaatattcttggttttaagcttgcacataaaaatcagagggatgttgagcttattcttcgattatatgggttatataaaaattgggataattatgaaaagcctatgatatcctttttaaataaaacaatgtatcaaaatagagattttgattgtgaaaagtcattgaaatttaaaaggaagtttatagaggttgttgagatagtatctaaaaatattgaaaaaccatttcgccctaaaggattaattaatacagctatgcttgatgctatatttgttgctttattagagaaagaaaatattgatccaaaaataatatctgatcaatacaatagattaattttagaccctaactttattgcttcgtcaattggtccaacagctgatactgcaatgttaaagcagcgtattcaaattgcaaagaaatattttggataa

SEQ ID NO: 64644 - DNA, 1980 bp, Acinetobacter baumannii
atgactacaaaaacacaaaatcttaaacctataaaaattgttgctatgcctgggcatataaaaactttaacagaagcatcagcaacaaaggctttaagtgagttgatttggaatggctttgatgcatcttctcagattgttactgtaacgctcaactataattctatggaaggtcttgactcaattgtagttgaagatcaaggaagtggtataccttataaagatgttgaattattttttggaggaattggtgattcttggaagaaaataaaaaaaaatacatatcatcacccattacatggacagaatggtaaagggcgttttaaagctttttgcttaggtgcagatcttgaatggaaaaccacttttgaagatcaaacagcttatggcacttattcaataattggtaatcataataaaattgaagaatttaaaacaagtgcagtggaaaaaaataaacatggtaaaaagggtaccaaagttactatttcgaatctgcataaaaaagcaaatgaattattaaaagataaaacacgaaatgaacttacaaaaagttttgcagttttccttacagaattcccacatctggagttaaatttcaatggctctaaaattgatccaaaaagtgtacaaaattattccaaggattatgatttaactgaggactgtgctgaaattacaatccatcctgttaaattgactattattgaatggaatattgaaactgaacgagtaatcaatttatgttcagcaaagggaatttcattagaagaatatgagcctaaaaatagaattaaagcgaaaggttttaactttactgcatatttgaaaagtgaatattttcaggaattagaaaatataggggggttatcattaaaagaacttgaacccacagtaggcaagattcttgatatcgctgtttctacaatccaagaacatttcagaaagaggattgcagaaaaatatagtggaattgttcaagagtggaaagaccaaaatatttacccttatcaagataaaaccagtttgacttctgtagaaaaagcagaacaagaagtgtttgatattcttgctgctaatgttcagacattcttacctaattttgaaaaaactgaaaagacttctaagaaatttatgtttaaattaatcgctcaagctattactgaaaatcctgaatctgttcaaaaaattattactgaggttttggatttaaagaaagaggatcaagataaattagctgagcttttagataatactacattatcttcaattatttcttctgcaacaattgtggcgaacagattaaattttcttgatgaattagaaaaccttttatttaataagcatactaaaaaagtattcactgaaagagaccaactacacaaaattctagaaaatgaagcttggatttttgatgagaactttacgttgtctcaatctgaagaacgattagagtctgtattgaaaaagcatttatcattacttggaaatcgtgaagacttaatggaagatactgatccagtattgctttcagatggaagaactgggcgcattgatttaatgctaagtaaagctaatcaaacacgacatggtgagtttgattacttgattgttgagttaaaaagaccctctaaaaaagttgatgctgaagttattgttcaaattaaaaaatatgcaaatgcagttgcttcagatgaaagattccataatattccagctaattggacatttttagctatttctaatgaattagatagttatgctgaagatgaagctaaccaaagaaataaaccaaagggtttgatacacgattcagcacaacagaatattacagtatgggttaaaacttggtcagaaattattgcgaatgcacgagccaagttacagtttattaatcagcatcttcagtatgaagtcactcaagaaagttctcagaagtatttgaaaaaggcacatgaaaagttcattcctaaagtttaa

SEQ ID NO: 64645 - DNA, 219 bp, Acinetobacter baumannii
atgaatgatttgagaattggtgatgttgttaagcattcaagttatccatttaactttaatgttgttaaggtttctaagcaatggataacatgtgaaggaatgtccgaaatagggaaaagagtagttgaggacttttcaccttcatttctagaagtggtttctcgaaagcctggaatgaaaataaaccttacagatgtcgagaaagccttctcaaaatag

SEQ ID NO: 64646 - DNA, 255 bp, Acinetobacter baumannii; identical to SEQ ID NO: 44740

SEQ ID NO: 64647 - DNA, 309 bp, Acinetobacter baumannii
atgtctcagaaacaaacagttattgttactggcttaaaaatgtctaagggtgaatttacacctgaaaatggtatgaataaaggcgtaccacagccttatgataatttgaatatttatgcatcagttccatttcctgaaggtgatatggaatcacttggagctaaggaacaacaatttaaattaaaaggctcaggtaatttttatcgttttaaagacgtacagttaccagcggagtgtgaacttgaatttgaatttgatttcactaagacaccgccaagaccagttttgaaggatattaactttttataa

SEQ ID NO: 64648 - DNA, 1221 bp, Acinetobacter baumannii
atgttagatcatatttgcattaacgctccatttgaatcgagctttttttcagtcgattcagaagggcgttatttttttgtagatgtcgatctgcattcaattgaaataccacttgcttcgcgttccgttcataagaatgacgatggttctatttctgctgctgctttatttcatccatatgagtcggtgccaacacactacactggtatggcaatgaaagtgttctttgatacaagttacgagccttatgtacagattaaggcttcgcctgcaaagttattgcagggtcataatgtatttggaagtgacaatatagagcagggggcaatggaaatgatcggctttctacatgaagcctatccagtcttagcaagaatgctagattggcctcgtgcttgggtatcacatattgatgtgacttattcagcacgattgaaagaccagagcacggctaaaaaagttttggatttcttgagtaatgtcagtaatggccagactcgtttaagtaataagcgtttcgacagttcagtctattggggaggtcagacttcacgccttgtgaatcacaagtgttatatgaagcatgacgaatttatcgctcaatttgaagagtataagatgcttgcaaaaaagaacgataaatccgctcaacgtgttgttgatgtcatgtctaatcaagatctgatcaactggactgtcggtcttttacgatttgagtcacgtttaaaaaaacgttggcttgaacgtaatggaattcccactaatctctttgatttaattaagtttcaacgttctaaccctaatttacttcaaacactctggaacaaagctactcatagcatttttgaagccttgcgaggtcaaactatgaaattaacagatgatacaagtgtccttgaagccattgaacgctcagaagttgttatgaccaaatctggcaaggtttcacagactaaagtacgtaatttatttgcaatgttttgtcttatccgtgaaaaaggatttgatgaaattaaaaataattacggtaagtctcagttttataacctaatttcccaattgtgtgagtgtggcttttccaaggcatatttacagaatcttcatgatgagaaggcatcaaacatcattccattcgtcaagcttgtagaaattgacttcaatcaacagttgccagattggtatgaagaaccagtctcgcaatttaattaccaaatcgcatag

SEQ ID NO: 64649 - DNA, 195 bp, Acinetobacter baumannii
atgagcaaggtctataaaatacgcagtgaagaagttgaagacgtgaaagaaacccttatgaaattcgtcgtacagaagaaatcactgatggctgaaagtgacgtaattcacgctcttatcaaatatcatttgaaagatttaaaggcagaagaagtaataagatacagacaggaagtgctaggtaaagacgaataa

SEQ ID NO: 64650 - DNA, 1332 bp, Acinetobacter baumannii
atggttaatcgtcttagttttcgtaatttgcgtattgataattttaagttaatcacctggctacagatcttcattatagccattacgcctaacttcattttctttcaatcagctaatgcaactactgttgcgggcgagggttggtcagtaactaagaaattagtccagggtgctactacattctatgatggcactaaaaatattgttctgaatggtaagaattacgctgctactggaacagctaaaattacacccgttgctacccaagtttcaaagatgatcgtaagaactggtgctgtacttgctgttgatttagcgattaaagcgttaattggtggtgtcgggtatgttatggatccagccaataatcgagtcaaatattatgaaggtaatactgactatttaggttcaggtattcatgtgcaaggtgtttacggttcttctgctactaatgcatgtattaactatgtcgcgttcttacaaaaagcaaatacatcatataaataccgttatgacaatgtgtctggtctaaaacttaatatcggaacgacatatacatttaattgtttgtattcggtggatttttttccgaccgattctgacaatagaatgactcagtatactgctacaggtaccattaataattacacccaaaccactcaagatgaaaaatacttaccttatgatgctgttgctacacaaattattagtgatgctgttgctgaaaaagcagatggcaaagcttacgtttcatctgtcgctgatacagcattagaacaagacgaacaaaaacaaatcgttcctgcgaacgatgtgatccaacaattaacccaatcacaagcaattcctactactggggctgctcaaggtactgctgtacctgctccaactacgggagagcctacaactggtgatcctgctgctgcgacccctccttatgatattaaattaaatttccctgttttctgtgattgggcacctcttgtttgccaggctgcacaagttgctattaactttcctggaactgttgcaggttattggactacttttaataaatggatgaatgaatccgcatctgatacatcagaaacaaaaccagaagttaaagaactagaactaaattttgatgatggtagtcgaattaatttcgatcaaacttgcccacagccacaacctattcaggtcacttttatgggtgttacccaggatgcaagtttttcttttgaacccttatgtaacttcatgatcatgattcgaccttttgtcattggatccgcttatttaattggggcttacatagttatgggcttatcacgggggaatagtgagtaa

SEQ ID NO: 64651 - DNA, 174 bp, Acinetobacter baumannii
atgacatttactttagaagagttggaagatatttatttaacttatctttcttatggtgttatcgataccccagtcattcgtaagatagaaacttgttatgttttttgtactatctgcgataaattggttgagcttcatgaatctgaatatcattttgaaagtcatgatgactga

SEQ ID NO: 64652 - DNA, 252 bp, Acinetobacter baumannii
atggaaaatcaagttgttgttcaagaaaaacgtggtgttttaacactttcaaatgcacaacgttttggggtgggtgctgttgttggggctgcgcttattactaatgccaatgctgctgttgacgtggctggtccagttgcaactttaacaactgacggtactgccgcgattactgctgttggtgctgcattactcggtcttgcgggtgttgctgttgtattcaaatgggttaaagctgctttctttagctaa

SEQ ID NO: 64653 - DNA, 300 bp, Acinetobacter baumannii
atgcaagtatcatttaacaaacgcacaattttcccaaccgtttaccgtggtcaaaataaaaaaggtgaagatgtaacttatctttcaacaactgttttatcaccacagaaattcaacttaactgcaatgccgggaatgatgccagtcgaacagatccaagcgattcttgaagaatgtgccgacaacgctcaagaagtagaaatcgaatttacagagcaacaaactaagtttggtgcacagatgcaggtgtttagtgttaagccattaccaaagaaaaacccaatggaatcaaaggcttaa

SEQ ID NO: 64654 - DNA, 924 bp, Acinetobacter baumannii
gtggtttttcaggtaattttaccaattttgattttattattgatggggtactgtagtgtcctcattaaactggtaacacctgaacaaattaaggctctgagcgcatttgttattaaaatttctttaccagcttttttaatccaatctttagccaataagaacttacaagatatttggcaccctgcttattttattgcttatggtggcggctctttaatcttgttttttggggcttttatcctttaccgcaagtattttaaaaatagcctgacacatagtgcagtcatatcgatgggcgcttctatgtcaaatacaggttttatgggtacagcgattctaaccatgctaatggggagtcatgctgcaatctatatatctttaaccttaattatcgaaaatttattaatagttgctttaatgctcattttggcagaagcgggtttgcatcaacagcaacggcttttgcctttactgaaaaaaacattcattaatttacttaaaaatcctgtaattattgcaattttagttgggatgagctgcatttttctagatattcatctgccttcaaaacttgggcaagccttagaacttttaggaagaacagcttcgcctttagcattatttgctattggtggcagcttggttggtattggtattaccgccgtgaatttccaaagtatattgttggctggatttaatgtcatccttatgcctgttgtgatttttgggctgttccttttactgccaaacgtgagtcaagagatgttatatgctggcactttacttgctgcgctgccaatgccgatcgcttttggtatttttggtcaagcctacggtttaaatgaaagagcattaacccccttaatgattagtaccattattggctttatgggtgtgagtgggcttattgccttgtggtggtaa

SEQ ID NO: 64655 - DNA, 906 bp, Acinetobacter baumannii
atgaaacaaggattaaggcacatcagagcatttctcactgtcgctgaactcaaaaattttgcacgagctgctaatcgattatgcatatcaccttcaacgcttactctacagattcagcaattagaagatgaacttcatttaaagttatttgatagaactcgtcatagcgtcaaaattaccccagagggacaacaaatgatcattcctctgaaatcagtattattagaatatgaacacgcattggaacttagtcaaaatatttcagaacatgtattaggaacaattaatattgctgttctaccgacgattgctagttcacttctaccatactggattcaagagtttaaaaaagaatatcctttagtcaaaattgttgtacatgatttgaatgcaaatgaaattcatggggctgtcaaatccgctgtagctgatattggtattggtactatcgagactgttgatcctcacttagctttttatcgcttgttcgatgatgaactcttagtcttttttaccgagggacatgatctacaattcaaagaacaaatctatttcagggatgtcatttcgttccctcaaatagttacaatgccaggaagtagcgtatataagacacttaatcgggctcttgaaaatattgatttatcaattgaaaatattgatgttgcatgtgaagttaggtatttaactactgcaataggactaattagttcccatattggcatcgctgttttacccgaatctactccactatcactatatgagaataaagtaattaaacgaaaaattattgatttcccttttagtcgaacgattaatttgattaaactaaagtctacacatcaatctcttattactgaaaaatttatcaagattgttcttaatacatttaaagatataggctaa

SEQ ID NO: 64656 - DNA, 1299 bp, Acinetobacter baumannii
atgttagcaggattaggattaatcacgattattctattatttgtcagtatattgacaaaaaagttatcaccattaattgcattaattaccattccaatcatagcttcactgcttggtggctttggattagaaaccagtaaatttattatttcaggaattaaaaatattgccccaatggcagggatgtttgtctttgctattttattttttggcatcatgactgatgcgggaatgcttgacccaattattaaccgtatattgaaaactgttggtttaaagcctgcgagaattactgtgggaactgctcttctcgctttaattattcatttagatggttcaggtgcggtagcatttcttattacgattcctgcaatgctgccgttgtatgataagttaggaatggatcgacgggttttagcctgtgtagcatctttggcttgtggggttaattttttaccttggactgggccagtcattcgtgcatccgcttccttaaatatttcagtcacagaaattttcacacctttaatctgggtccagataataggtttgatctttacatttactgtagcttatttattaggaaaaaaagaagaaaaacgtcttggattaaaaaatctttccggtgattctgattttttaacctatgacattgatgaacaaagtcaggctttgcgtcgtccacatcgtttttggccgaatgttctcattacaatttttgttttaggtgtaatgatcagtggcaaaattgatccagtcgtaatgtttatgattggtgtggttgctgctttacttattaactaccctgatatcaatgagcagcgacaacgtattgatgcacatgcaaaggctgccttgagcatggtaagtattttattggcagctggcgtgtttacaggtgtgatgacaggaacgggcatgttgaaagaaatgtcacaacatgcggtaaattttattccaccaagtgctgggcagcatattccatttgcattaggcatggtggcaatgccactgtctttattatttgatcctgactctttttattttggagtattgccagttattgcacataccgcaagtgcatttggtattgagccagtacaggttgcacaggccgcaattttgggtcaaatgactacaggatttccagtgagtccattaacaccagcaacatttctgattgttgggttatgtaaattagatttggcagaccatcaaaaatatacgattccatatttatttgcagcttcagtaattatgacaattgctgcaactgtatttggtatatttccattttaa

SEQ ID NO: 64657 - DNA, 1353 bp, Acinetobacter baumannii
atgaatactttaaataaaattcgtataggtagtggcgcggggtatgcgggagatcgagttgagcctgctattgaattagctgaaaaaggtaaccttgattatctggtatttgaatgtttggctgaaagaacaattgctttggctaatcaagctaaacttaaaaatccgaatgatggttatgatgttctattggaaaaacgtttccgtagtgtattgccatttattcaagacaaaaacggtaaaaccagatttaagatcattagtaatatgggagcagcaaatcctgtctctgcaatccaaaaaattcgggaaatattaacagagcttaagatccctaatatcaaggttgcagctgtagtaggtgatgatgtattaactgagcttactgatcaatctctgattcttgataatggtttaagtgttgggcaattgtcttcacagatagtttctgcaaatgcttatttaggagttgatggcattttagaagcacttggacaagatgcagatattattattactgggcgagtagccgatccatccttatttctcgcacctttaatccatgagtttcactggtcaaatactgattgggataaattagggaaaggcacattaatcggtcatttacttgaatgtgcagggcaagtcacaggtggatattttgcggatcctggagttaaggatgtgccaaacctagaacgtttaggttttccgattgctgaagttgatagtcaaggacaagctataataaccaaagttgaaggttctggtggcttattgagtgaagccacatgtaaagagcaactgttatatgaaattcatcaacctaatgcttataagactcctgatgtaacagctgatttttcgaatgtctattttgaagaaatcggaccagataaagttgctatttatggcgggacgggttatgaaaaacctcaaaaccttaaagtgacagttggtttttctgatggttttattggagaggggcaaatctcttatggtggaccaaatgctaaagcacgaacaaaacttgctagagatatcgtccttagccgcttaaaacaaactaatgttaagttcgatgaaattcgagcggatatgataggtgtggattcactctttggtgactattctaatcaagaagcacagaatccttgggaagtgagattacgagtagctgcacgctgtcagcaaaaacatgatgctattgcggtggctaatgaagttgaatctttatatacaaatggaccttatggtggaggtggtgcagttaaaagtgtaaaagaagtactggctgttacatcaacttttttatctcgtgatcgagttaaagttcaagttattatggaatga

SEQ ID NO: 64658 - DNA, 321 bp, Acinetobacter baumannii
atgaaattatatgaaattgcacacagccgtactggcgataaaggcgacagttccaatatttcagttattgcatttgatgcacagaattatgatgatttatgtgcaattttaactacagatctaattgctaaacaattacaaccagccttacaacattttttggtagatgagtttagtattgagcgatatgaacttcctagaattggagctttgaactttgtgattcggggagtcttaaaaggaggtgttactcgatcattgtcgttggatgctcatggtaaatctttatgttctgccattttaaatatagatttaaaatga

SEQ ID NO: 64659 - DNA, 1299 bp, Acinetobacter baumannii
atgtcaaatacgacatttttaggaagtattcctatatgggctaatgcctgcgtaggtgataatggatatataaactatcttacatatgccaaaggatactcaaaagcagcaaatctaattttagattatttattacaaaacaatggtaatgatgtagatttatttatttatccagtatgtttcaatatgcggcattcaattgaattacgtataaagggagcaatacaagaaattgatcaattagctgagattaaagaattgcaattacccttatttaatttagcaggttcccatgatattggtaatatttggaattattttagacaaaactctgaaattttagatttccgtttcaaagatttaaatgatttgttagaccagacaatcagagatattgctgaaattgactcaacaggtcaaacatttagatatccatttgatacagaaaataaaaaacatttaactgagcagagaacaattagctgtgtagtattaaaaaataagtttaaagaacttgaaaaaaatctagatagtcttaaacatttaaatgagctactaatagaggaatataagttaggtacttttacgagtaaattttcgagggctcaaatttttaattttgcacatacacttccaccaatagaaagatggaaatcagatttagacaaagaaagccttcgctctcaatattctttaacaagtaatgatctaacaaaaattattaatctagttaaatcaaactatgaaatttgttcaatagtaaaaattaaaaagaatttaatagcactatctgatgaatttattttagagctttgtagtatatgggctaatagtatttaccctaaatttagagagttatatacagtaggtttacctgctagttcctataatctgggagatggtaaaaattttgaaaaaattcgtgaagatgtaataaataagaagaaagtctatgaagttttagaacctaaactcaatatcgatttagtcgcagatttatggtctttattttatttctctagagagaatatgaaatattctgaagactatatttctaattttgagtatttccagaaggatgtagaaagtgagcgatcccttatagatgcattcaatcatatattttctaaacctaattttctagaaaatattattaagagcttattctttttacaacaaatagagttggctgaaaaaattattgaaaacaatcaattagagttatactttaattttattccagatattcgaagtcgagtcgcctttaaaaaatgggaactacttggttataacagttaa

SEQ ID NO: 64660 - DNA, 255 bp, Acinetobacter baumannii
ttgggaggttgttttgccttaacacttattgtggcattagaccattttgaagagccgaacaatgcgggtgctttatctgcacttatgcaaggaggcggttttttacttgctgcaataccgccttggtttgtagcagctttgcatgactttacagggacttataaggcaggttggatttttcatttatgtagtgtgatattggttattgtgttagtggtaaggttagctccaagaagttataacaaaattcactaa

SEQ ID NO: 64661 - DNA, 336 bp, Acinetobacter baumannii
atgcaagaacttgccaaccgattggcgatacaaaatttcgtcaacgcttatatgcaagagactggcaaaggatatttactttcttttgaccaacaaagttcaactcaacaagcgtttagctctggtttgacgctgttaactcttcctcttccttctatacaagcagaatgttctgtacctttatcttatgtaagtcgtgtaggacgccatcgtctcgctgctttaccgaaaatgtgtattgatggtcaatggattcaaattagatgctgcttcattgttagagaaatggatacaaagccgggacgcgctactacaattcttaaaacaacgccataa

SEQ ID NO: 64662 - DNA, 294 bp, Acinetobacter baumannii
ttgtataaagcattggaaaaatatgctgataaaaaaaattttattatttgtgatgattcccatgcaagagaaatagcagatatagaaatcgaaggctttaatttttttgataatgaggatgcttatcgattaggatatttaaagcgaaaaatgccaagtccataccctctacattttactatgaccgaaggtatgactgaagattttttcagtgcttgggactctgactctgatgatggacaattttctgttggtagcccgagttcatggcaaatcatttttgatattccataa

SEQ ID NO: 64663 - DNA, 492 bp, Acinetobacter baumannii
gtggtggggattgtacgtacagttcggattgaatcgatcaatgcgagtggtttaagacaagtcttgatgagttgtcaaccaaatgaagttctcgttattgatgcaagatatgatctacaacgtgcttgctggggagagcaaaggagtgtagccgctatacactgtggtctggctggggttgtggtcttaggtgctattacagatcggcaggctttacttaaactcaaacttcctatatttgctcatacaaccagttgtttaaccactcgtaatgaaggggaaagtctcgttgaaatagatgccaagattcatattaatcataccattgtacaaactggagatctgattgtaggggatgcagatggaatatttataataaaaatggatgtggcacagcaatatttaaaagaatttcaaaggcttgagcaaaatgaacaaaataagaaaaatgaattctttttaaaaaataatatagatgactattatttttaa

SEQ ID NO: 64664 - DNA, 231 bp, Acinetobacter baumannii
atggctgttgctaatactactgctttcgattttttaggcaagactgtttcttttgaatatgtccgccatattcaactaactgaacaatcttcgattgatttcagggaaaaaatctctggagttatcactaatgttgttcttagccttaattccgaacctgaaatttctataaataatggggatttttattctttatctgatttagttgattttacaatttctcaaatatag

SEQ ID NO: 64665 - DNA, 1260 bp, Acinetobacter baumannii
atgcaaaaagacattaaaaaacccctgttatccgttagtttggcgaccagcgataacaagggttcgaattctgttgaagcagatcaacatagggatagaataacacgttttggcattttgaaacatagatcgaagcaacaagaaaactttctgtggtcattggctaaatacaaggaaaactatcaaaatgacaagccaaacgaagagtccatcagggctactaaagctgctcagaaattgctgacttgtggcaacttcctcctattcaaaaatttttacacaatcaatcaggtcaaactggcgaaattacaggtttgtagtcagcatttgctgtgcccgttttgtgcaggaatacgtgcttcaaagtctattcagaaatataccgaacgtgttgatgaggtactgtctaaaaatcgcaagcttaagcccgttctaatcacgtttacggtcaagaacggcattgacctaggggaaaggtcatctcatctaatgaaatcgtttagaacgcttctagatcgccgtagagactatattaaaaaaggtcgcggatttaacgagttttgtaagattaatggggctatgtattcgtatgaaaatacgtttaatccggataccaaagaatggcatccgcatttacatatgttcgcccttttggatgattggatagaccaggaagaattatctcagtattggcattccattactggagattcaatgattgtagatatacgacgagttaagaaagaaaaaggcttaggctattcaaaggctgctgctgaagtatgtaaatatgctcttaaatttggtgatttgtctgtcgaaaatacatgggaagcattcaaaatattgaaaggaaaacgtcttagtggtgcatttggttccctctatggcgtgaaaatcccagacaatccagcagatgaaattgatgattcagatttaccctaccttgagatggtttataagttcgtttttgggaaaaaatcctactatgacttagctatgacacgtcatgtagagccacaaacaattgatcgaccgatggagaaggagcttcgacgtccgaccgagggagagaaagtgggtgtggcgatagaggacgaagtgaagggcgcagggtctgcgagggctcgcagtcagatcactgttgacctgaaacgaggacgtaaaaagcagcactggcaaatctctccgtacacacgtgtacgggtgaaaaaacgtattaaaagatgggatggttatttgtgtgttatacacaagtaa

SEQ ID NO: 64666 - DNA, 171 bp, Acinetobacter baumannii
atgattaaacctgaaattattagtaatacccctatggattcacttgaagaagcctgtgcttatttcaagcaggtattacaagaacatcttgataaaaaacgtgatatcacattatttgccatcgctgttgttggtggtcgtttaaaagtagtagaaggattgccaaaatga

SEQ ID NO: 64667 - DNA, 339 bp, Acinetobacter baumannii
gtgtttggaaaaatattaaataagtttaaggcttggtacaagggtgatcctggtgatatgagatgggatccacgtaccgatacttacgtaggcactagagagccaagcaagcattggacagcaaaggtattatcttattttgttgatttttccttactgatagctaaatcaattaaaaaacaccccagcgcttacataactcagcttttagcatttattgctatccttgtttcgtgtttttctatttatcttcaatattatgtagatgatgatgagtacaagcgctgcaccatagcacataccaacaatcaagagattgcattgaaatgtaagaaatga

SEQ ID NO: 64668 - DNA, 711 bp, Acinetobacter baumannii
atgaaaactaaacttgctacactcatgttgagtttggcttttttcggttctgctcatgctgatgttaaaacacttgaacaaaatctgaagacaaattatccagacctccctgtaaaaggtgtctatcagtcacctgtcgctggaatttatgaagtctatacaagtggccgtattgtttataccaatcaagatgcaaaatacttttttgtaggcaatttagttgatatcaaacaacaaaaaaatatgacagaagagcgaattgccgaattgggtaaaattgatgttaaaagtctcccattaaatcaggcaattaaatacgtcaaaggtaaaggagaacgtactctttatattttcagtgaccctgattgcccttactgtcagcgtctagaacaaaatatggttggggtggataacgtaacggtatatgtattcttatatccgctgaccagcttacatccaaatgctgaaaaggtttctaatcaaatctggtgctctaaaaacccttcagaagcttggacaaattatatgcttaaccgtaaattgccagcggctggcaaaagctgtacaagtccaattcagaaaaatattgctttaggccagaaattaaatatagatggcacaccaactctgttcttacaagatggtcaaagaatctctggcgtaccaagtgatgcaaaacagattgaagcattattacagtcagtaaaataa

SEQ ID NO: 64669 - DNA, 414 bp, Acinetobacter baumannii
  misc_feature (315)..(324): n is a, c, g, or t
atgattactcgtgaacagtgtttgtattgggatcaggaagatgaactcaaaaaatttaaagatgaatttgcattgccagaagacgtcatttatttagatggtaactctttaggtgctagaccaaagaaatctttggctgtcgctcagtatattatttcccaagaatggggagaagatctgatcaatagctggaataaggcagactggtgggggctaccaacacggctgggtgacaaagtcgctaaactgattggtgcggaacaaggtgaagttgttatttcagattcaactacactgaacttatttaaagttttnnnnnnnnnnctgataaattccctgaacacaaaattattgtggcagaaaaagatgcttttccaacagatatttacattattgaaggtttcattgacttaa

SEQ ID NO: 64670 - DNA, 885 bp, Acinetobacter baumannii
gtggcagaaaaagatgcttttccaacagatatttacattattgaaggtttcattgacttaattcaaaagggctatcaggttgaattaattgatggcgtagaagacttatctcgtgctttagagaaagatgttgctgtagtggtactttcccatgtgaattaccgcactggttatttttatgatatggcatctattaatgaacaaattcattctaaagatgctttggtgatatgggatttatgtcactcagtcggtgctgttcctatgcaccttaatcaaactgatagtgattttgcgattggttgtacctataaatatttaaatggtggccctggttctcctgcattgctctgggtcaatgaaaagcaccgtgatcagttctggcagcctttatcaggttggtggagtcataaaaaaccatttgatatggcacagcattatgagccagcgaatagtatccgccgatatttatgtggaactcagccggttatttctatgagtctgattgaatgcggagtggatattttcctgcatgccgatatgcaaaaaatccgtgagaaatcgttgaaattaacagatttatttattcaattggtacatcaagaatgttctgaattcggatttgagttaattacgcctttagatcataagcatcgtggtagccatgttagttatcgtcatgaattcggttatgaaattattcaggcacttattgcacgcggtgtgattggtgattatcgggaacctgcagtcttgagatttggtattacacctttgtatctgggctttgaagatatttggaatgcagtacagcacttaaaagaaaccatgctgaatagtgaatggaaaaacaaagagtatttagttcgtggtgaagtgacctga

SEQ ID NO: 64671 - DNA, 1053 bp, Acinetobacter baumannii
gtgcaacaaagccgttcaggaataaaaactggtataattgcagaagagggggaaaatttagatatattggtaaatggaagtaaaggttatcaaaaactaaaaacaatatctataactaaaggaatggaaaatagctgtatatcagtcccattaggactagtcagtgtgaaattgaagatacatgatagtaaaggtaaaattttaaaaaataataagttttttgtttcatatagaggtagagaaatagaaaaaataacggatagtaatggctttattcaattaaaaatgttgaatgcatttgtttataaattgcttcttttaaataagaaacctattttgacattaagaaatgatccaagtatttccgtaatcaatgttaacttaaattctgcagctacaacaatacagatgcctcgagtagcttcaaatcccccaagtaagacagtgccagcaaaaacaaaaccagcgaaagaaacgtcatctaagagagaagagagctttgttgattacttaattgattttattccttcattaggaaaaacagagaatgttcatacagaaaaaaatggtaatcctttaaccaaacagtatggtagtgatgtcgtttttactattaaaacaatcaataaagagacaggtaaggaagaaaatctagcttattcaattaagtataatggtgcaaaaagaacacattatactggacaagatgggattggattaaaaaaacatcggggtgaagagggaaagaaaattgaaattgttgtagatgttgatagtaaagaacaagtactttataccgctatattgaagaatcctatgccggttattgaaataagaatggataagccaaaagatgatgactcatatttattccctttaaaggcacggacaaattcatataaaaatggatttgctcgatttggttctaatcgtagtggtggaaaacgtaaacacgcaggttgtgatctgtatgcaccaacaggaactgaaattagagcgatggctgatggaaaagtccgtgtagaaaaggtttttattctggtactgatgtaa

SEQ ID NO: 64672 - DNA, 606 bp, Acinetobacter baumannii
ttggttgaattgttagtcgcgattgctatctttgcggttttatctttattggggtggaaaattttcgattacttgctcaaagttcgtgatcgtaatgccgaacatgaagtgcatttatttgaattacaagatgcttatcaacaaattcttcgtgacactttgcagattatccctttatccgcaaaccaaggtggtcaacttcatccagctttagaaatcgataatcaaattttacgttttagcaaagcaggcgtaacggatcctttaaaacaaggcttatcaccatttgaacgaattgaatatcgttatgatgcagatcaaaaaaaactatatcgtcttaaatatacaaatttaaatacttcgaacagagagcaacctttatcgagtactttgttaagtcaagtcgaccaatatcagattatggttttgactccgcaagaagtcacaaaatggcccgaggttaatattgatccaacgaaacctaatgagttaaaaaaattaccgaaagggataaaaatccaacttacagtcgctggtgtaaattatgaatggatttatagcttaaatcagggtgacttatcgctttcacaggaaggtaattcataa

SEQ ID NO: 64673 - DNA, 1263 bp, Acinetobacter baumannii
atgatttcggcagcaacgggtgctatggccttagtcatgacgaccctagtgaaagaacatggtcttcagtatttattcgcagctactattttgacgggcgtcatacaaattatagtaggatatcttaagcttgctaagctcatgcgctttgtctctaaatcggttgtgattggttttgtaaatgctctcgccatactcatttttatggcccagcttccagaactagtcaatgtaagttggtacgtctatctattagtcgctattggtttagcaattatttatctattcccttatgtaccaaagcttggaaaaatttttccatctccccttatatgtattgttatagtcacattacttgccctctttttaggccttgatgtgcgaacagttggcgatatgggagcactaccaaatactttacctatttttttaattccggatattcctcttaatttagatacacttcttatcattcttccttattcattggcgttagctgcagttggcttacttgagtcgatgatggcagccacaattgttgatgaaatgacggatagcccgagtaataaatttaaggaatgtaaaggtcaaggtattgccaatattgcctcgggtcttatgggagggatggctggatgtgccatgattgggcaatcaatgattaatgttaaatcaggtggtcgcacacgcttatctactttatgcgcaggcatattcttgctgattttagtagtatttttaagtgattggttgaaagttattcctatggctgcgcttgttgctgtcatgattatggtatcaataagtacttttgagtggcgttcacttacccaatttaaaactaatcctaaaagtagcaataccgttatgattgcaacggttgttgtagttgtagctactcacaatctagcattaggcgtattgacaggtgtactactctccgcgcttttcttagccaataaacttgaaaatgatatacaggtaataagttcattagaaggcaacgctcgtttatatgatttaagaggacaaatcttttttagttcttcagataaattcatgcacggctttaactttaaagaagaagtaaaagaagtcattattgatttgactcattcacatatatgggatgtcacttcggttgcaatgcttgattcagcagtagaaaagttccaaaagaatggcatacaagttactgtacgtggtttaaatgaagccagttcaatcatgattgacaagtatggtacacatgcaaaaatttaa

SEQ ID NO: 64674 - DNA, 804 bp, Acinetobacter baumannii
  misc_feature (773)..(782): n is a, c, g, or t
atgcgcgagtacgctgtttttacctcggaatctgtaagcgaaggtcatcccgataaaatggccgaccaaattagcgacgctattttggatgcaatcttaaaagaagacccatacgcacgtgttgcttgtgaaacactggtaaaaacaggcgctgttgtacttgcaggtgaaatcacaacaactgcgaatattgatgtagaagctgttgttcgccaaactgttaacggtatcggctatcaccattcagatttaggctttgatggttcaacttgtgctgtaatcaacatgattggtaaacaatcaccagagattgcacaaggtgtagaccgacaaaaacctgaagatcaaggtgctggagaccaaggtttaatgtttggttatgcaagccgtgaaaccgacgtgcttatgccagcccctatttcttatgctcaccgtttaatggaacgccaagctgaacttcgtcgttcaggcgcattaccatggttacgtccagatgcaaaaagtcaggtaacttttgcttatgaaaatggcaaacctgtacgtttagacgcagtagtactttctacacagcatgatcctgaaattactcaaactcagcttaaagaagctgtaattgaagaaatcattaaaccgatcattcctgctgaaatgttccatgcagcaactaaattccacattaacccgactggtatgtttgttattggtggacctgtgggtgactgtggtttaactggccgtaaaatcatcgttgatacttatggcggtatggctcnnnnnnnnnngcggtggtgcattctctggtaa

SEQ ID NO: 64675 - DNA, 414 bp, Acinetobacter baumannii
  misc_feature (16)..(25): n is a, c, g, or t
atggcggtatggctcnnnnnnnnnngcggtggtgcattctctggtaaagatccatctaaagtagaccgctcagctgcgtatgctggtcgttatgtagctaaaaatattgttgctgctggtcttgcggacaaatgtgaaattcaggtgagttatgcaattggtgttgcagagccaacttctatttcaatcaatacttttggtactgcaaaagtttctgatgagttaattatccagttagtacgtgaacatttcgatttacgtccgtttggtattactcgcatgcttaacctaattcaacctatgtataaacaaacagctgcttacggccactttggtcgtgaaggttcagatactgcatttacatgggaaaaaaccgataaagttgaagcacttaaagatgccgcaggcctttaa

SEQ ID NO: 64676 - DNA, 1080 bp, Acinetobacter baumannii; identical to SEQ ID NO: 49480

SEQ ID NO: 64677 - DNA, 1053 bp, Acinetobacter baumannii
ttgaaagtaatagattttttctcgggttgtggcggtgcgagtgaaggactccgacaggctgggttcaatattacaattggattagattttgatgagaaagctgccaagacatatcaagccaattttcctgaagcttcatttttccatgctgatattcgtacagtaaatgaaacagagtttacaaagttttttaagaaaaaaaaccttaccaaggagcctgttgtttttgttgcatgtgctccatgccaacctttttctaaccaaaataaattaaaatctgaagatgatataagacgtacacttttagatgaaactcaccgctttattaaaaaattgaaaccggactatatttttattgagaacgtgccaggtattcaaaaaattgataaagagaaagatggtccctacaagagatttattaatttcattcgaagtgagaaatatgagtttgtcgaatttattgctagatcagaagaatatggtgttcctcaacgtagaaaaagatttgtacttttagccagtagaattggaaaaataggactccctgaaaaaactcatggacctggatatttgccttacgcaacagtacgtgactatattggtcattttccttcaatacaagcaggtgagttaaactctacagataaatggcatagatcacctaaattaaatgataagaatttagagcgaattcgatgtacgcctgaggggggagatagaagaaattggccttatcatttaattaatgagtgtcataaaaaacattctgggcatatggatacatatggacgtatgagctgggataaagtagcacctactttaacaactagatgttatagctactcgaatggacggtttggtcatccagatatcaaacaaaatcgagctattagtattcgagaagctgcaagtttacaaacattcccggaaaactttatttttgaaggcagtttaggggaagttgcacgtcaaattggcaacgcagttccttgtaaaatggcaaagcaatttggattatctattttagagcattataaacattatagaggttaa

SEQ ID NO: 64678 - DNA, 438 bp, Acinetobacter baumannii
gtgaaatcaggtagaattgccgacttcgggtgtggagctggaattatcagttgctatttggcaaaagcaaattcaagtaatattatccatgccctagatattgatgccttcgctttacagtcaacggaaatgacttttagtcgaaatggaataggttcagaccagttgagattgcagcctgttacaggaattgcagacgccccaacagaacttgatgccattgtcagtaatcctcccttccatcagggtattcataccaactatgatgcaagtgaaggactctgccagaacgctaaaaaacatttaaaggcatcaggcgagctatggattgtagcgaaccgttttttaaactatccgatcttaattgagaagcactttggtcagtgtgagattaaaactgatcttcaaggctttaaggtgttatatgcctgtgcataa

SEQ ID NO: 64679 - DNA, 672 bp, Acinetobacter baumannii
atgattaaccgaaactctaatgcacttgcgatgaaattggttaatctcgcaagccttgatcctataataattgctagtgggcgtagaggtatgggaaatacctctgctttagataaagaagtgtgggaatactacagtaatagattggaacaattaacattagatgcagaaactcttcttaataatttaagaaaagcttctgaaagtcttatatatgatcagtattctcaactagaagaattgaataccaataatgattactatggtgaagagcgagaagttattacaaggcagcgtatacgtcaaaattttttccgttctactattcttagtaattttgaagagagatgttgtatttgtggattagctgaaccaaggctattggttgcaagtcatattgtgggatgggcagatgcacctgataagcgattaagtcctcataatggtctgagcctttctccgctttatgatcgggctttcgatcagcatctgttaacattaaacactaaattagaagtaatgatttcgcctaaacttcataaagtcgcaaaaacaacattctataatattggactatcggaaatagagggtaaatcaattatcccccctattagatttggaattgatatggatttactagcacaacatcggcaacaattcctaaatttataa

SEQ ID NO: 64680 - DNA, 141 bp, Acinetobacter baumannii; identical to SEQ ID NO: 56024

SEQ ID NO: 64681 - DNA, 660 bp, Acinetobacter baumannii
atgagtttcactgaaaaacttagcactataactatcccaatatctctttttatcggagttttcggtgtatttgtcggattagcactttcaaaaaaagtgaatcgtaataaattaataaaaactattaaaaaaatggactttggtcaagaatatctaaaatcagtaatcaatttctgggctgaacaattctactggatttttggccgctcatatttctcaaaacgccaattcattacaatccccttatatactctgacgatatcatcaatcttttttcttatctggataatacatatttatatttttaataatcctgaatataagtttttagctgactttccaataggctataaacttgcagttaaagattattatgaaaaaggaatttttggtggctttcttctagactttatagttatttttataaccaaattcatactcagatttactgaagaaagcaattatttttctttaaaatttgtgattttatttcttattagtattattttttcatatttactatttagtataattatttatatatatagagtaatggatatggtctcattatatttagatgtggcacctaatgatcctatacctgttttaacttatgaacggctttgttgcataaagcctttgacggcagagttttcctaa

SEQ ID NO: 64682 - DNA, 777 bp, Acinetobacter baumannii
gtggttgattcacgttttcgacaaggtggggtagttactgaagcagaagtagcaggtcagttagagtttgaattatcacttggaacatttgatctattcctaagtgctttagccttcaataattgggcgggtaacgctttaagttttggtggtacggtacgtaagtcattaacgctggttaaagttttcgaagatgttggccaagtctttatttatcgtggagtacaggttaattctggtgaaattactatccagaccacggggaaaatcactggtaactttggtcttgtaggtagctcgtttactcgtcagcaaacgaaccctgtagtgaatccggttgcagcttcgactcgtccgctggtgagtatgccgaacgtggaaaacttgcttgtaaacggccagtcaattcaaggcaaagcatgtctacagtctttgaccatttctattaacaataaccttgaagcgatccgttgtattggttcaggtaaatacacacctgagttttacattgaaaagatgatggatattgaagcgaatgcttcattcatgttctcttcaactgctgcagggtggattgatgcaatcaaaacccgtgatgtgtttacactgaccttcgacatcagagacagcaaaggcagtaaatactcgtttaacttccctcaattagaagtcatggaagccaatcacccggatggcggtggtgatgacatcattactgtagatatcaactttgcccaagttcgtacagcgccaacaattgtacgtgctcttgtgtaa

SEQ ID NO: 64683 - DNA, 813 bp, Acinetobacter baumannii
ttgactgaaaatgttactactgaagatagcagtgaagtagttgattcacgttttcgccaaggtgctgttgtaacggaagccgaagtaactggtcaactagagtttgaattatcactaggtacctttgatttattcttaaatgttctcgctttcaataactgggctgcaaatgctttaagttttggtggtggagtccgtaagtctcttaccttggtaaaagtctttgaagatattggtcaagtctttatttatcgtggtattcaagtgaatacaggtgaaatgacgatccagaccacaggcaaaatcactggtaactttggtttagtaggtagctcatttacgcgacagcaggttaatcctgttacaaatcctattccagcatcgactcgccctctggtgagtatgccaaacgttgaaaagctacttattaatggtcaatcaattcagggtaaagcttgtctgcagacacttaccatcaactttagtaataatctggaagcgatccgttgtatcggttctggtaagtacacgcctgagttttacttagagaaaatgatggatattggcgtaaatgctaatttcatgttttcagcaacatctgctgcttggatagatgccattaaaacccgtgatgtatttacattgaccttcgatattacagacaccaaaggaagtaagtactcgtttaacttcccacaacttgaagttaaagaagcaaatcacccggatggtggtggcgatgacatcattacaatagatatcaattttgcccaagtgcgtactagtccaacgattgtacgtgctcttgtgtaa

SEQ ID NO: 64684 - DNA, 576 bp, Acinetobacter baumannii
atggtaagcatactttcagctttagctactattggggcagcaataattgcagctagtttatttaatgattggagagattctcaaacaggcttaaatagatctgaacttgctagaaatacacaaacatctttatataaacttgtaagttatcttgattattatcataagtatgtaatgacacaaaaacatttatggaactcaaaaaacttcccagagattagtaaaaatttaatcgatcaggcagaaaaaatacctaacgaatgtgaagaaagaagaagtatatttcgcaatgaatgcgaagagctctataaacaatttctgatcgatttaaagatttatgaaaagaccttcgactccgatcttaatctagatttagatcgaatccgacattacagaggatgtattggaggaatgctaagagacctatcacaatcaaaatcagcttttgaattaaatgcaatgacaaatcatctaaagaattccgaaaaactatttaataaagaaatacttgatatagtaacttctgaaatgtctcaatatatttgggtaaaagtaataaaaaaaatcctcaattga

SEQ ID NO: 64685 - DNA, 315 bp, Acinetobacter baumannii
atgatattcaatcgtggttcggcatttataatttcttattttttaatttctttagtaaatgcgggtgaaattggagctaaattaactagtcaaattgaattattgccttcttgttctgttaataataatgttgtagaaaataatacggcaaatttaaattttggaactatagattttggtgaagctaccacagcttttaaaggggttttagaagctagtttagttaataatggtaattcaggttttcagatcgagtgtgcaggtatttcaactgggctttgttgcataaagcctttgacggcagagttttcctaa

SEQ ID NO: 64686 - DNA, 207 bp, Acinetobacter baumannii
atgctgagtggttgtgaaaaatgtgatgaatgcggaagccagtatttaaaaagtaaatctagcatggcctcgttgtgtcctgaatgcgcttctataatttatggatatgcaaattgtgagcatatttttgaagagggacgttgtatacattgttactgggatggcagcacaaccacttatattgaagacttaaagaaaaactcataa

SEQ ID NO: 64687 - DNA, 174 bp, Acinetobacter baumannii
atgatgtgtgtaacacatgaaatgggctttgcaaaacgcgtatctaaccgtttaatttttatggatgaaggtaaaattcttgaagattgcccaacccatgaattctttgataatttagaagcacgtcatgagcgcgctaaaattttcttggaaaaaattcagccaatgcactaa

SEQ ID NO: 64688 - DNA, 474 bp, Acinetobacter baumannii; identical to SEQ ID NO: 42070

SEQ ID NO: 64689 - DNA, 252 bp, Acinetobacter baumannii; identical to SEQ ID NO: 56364

SEQ ID NO: 64690 - DNA, 711 bp, Acinetobacter baumannii
atgaaaactaaacttgctacactcatgttgagtttggcttttttcggttctgctcatgctgatgttaaaacacttgaacaaaatctgaagacaaattatccagacctccctgtaaaaggtgtctatcagtcacctgtcgctggaatttatgaagtctatacaagtggccgtattgtttataccaatcaagatgcaaaatacttttttgtaggcaatttagttgatatcaaacaacaaaaaaatatgacagaagagcgaattgccgaattgggtaaaattgatgttaaaagtctcccattaaatcaggcaattaaatacgtcaaaggtaaaggagagcgtactctttatattttcagtgaccctgattgcccttactgtcagcgtctagaacaaaatatggttggggtggataacgtaaccgtatatgtattcttatatccgctgaccagcttacatccaaatgctgaaaaggtttctaatcaaatctggtgctctaaaaacccttcagaagcatggacaaattatatgcttaaccgtaaattgccagcggctggcaaaagctgtacaagtccaattcagaaaaatattgctttaggccagaaattaaatatagatggtacacccactctgttcttacaagatggtcaaagaatctctggcgtaccaagtgatgcaaaacagattgaagcattattacagtcagtaaaataa

SEQ ID NO: 64691 - DNA, 825 bp, Acinetobacter baumannii; identical to SEQ ID NO: 45759

SEQ ID NO: 64692 - DNA, 306 bp, Acinetobacter baumannii
ttgcttttaaatcatgaatttaaaaatgaaaatgttttaaatgatattactgaatcgcttaagagtaaaaattatacgattgaaatcagagcagtatcttcattcccccctaatgaaaactctttagataaaaatacacatcctgaaactttaagagcaatagaagaattagaaaattcaaaagctgtggatagttttaaagtttatgatcgtgttggtaaagaaatttactcaaacatacgtaatgatgaaggggtatggaaccaaacaataagctgcttaagaatatctttactccatatctaa

SEQ ID NO: 64693 - DNA, 417 bp, Acinetobacter baumannii
ttgctgacgcaacaacaattaaaagaaattgaaaatgctcatctaacaattaatccacgtgaaaaccaaaataaaaatataaacgggaaatcagaaaagaacttagaaataaatttagacccaccaaagattattaaagatcctggttcatttagagatgtagtacatggtatcgtgacggatgagtctgaaagggattttacactaaaaatcaataacttggttggaataaaatacagtaaagatcaattaaaggatcaactcgaaaaagacaataacttttatcgtggacgagagttatttattaatcatgctggggatttaccgcaattaatgaatgaaaaggaaatacaagattttcatattactcaagaacaaagcttacaacatgatgttggcgtagaactagacagataa

SEQ ID NO: 64694 - DNA, 414 bp, Acinetobacter baumannii
  misc_feature (398)..(407): n is a, c, g, or t
atgacatcttccaacacatcacgcattgcagtgcaacaaattgatccacatgaattaaaagcatggatcaaagctcaagcattagacttgggttttgctgattgtgtcattgccaaaccagatgctcaagagcaaatgccacgttttttagaataccttgaacgtggttatcatgcagatatgacctatttagaagaaaatctggaaaagcgagcagatccaactttattggtgcctggaacaaaaagtattatttgcgtacgtatgaattatttggtggaatcaccaaaaccacgatatgtacccttcgaaccaaactctgcgattattgcccgttatgctcgtggtcgtgattaccatagccaagatatccaggcatgggagcaacgttggtttgnnnnnnnnnnaccataa

SEQ ID NO: 64695 - DNA, 798 bp, Acinetobacter baumannii
atgacatatactcaggaagaaaaacgtagcaggatacgtgggattgtaggcgcagcctctggtaatttagtcgaatggtttgatttttatatttatgcagtatttgctgcttactttactcaagctttaaccgcgccagatatggatagcacaaccaagtctatttatgtttggggggtgtttgccgcaagcttctttatgcgtccgattggaagctggctatttggtcgtattgcagatcgacatggccgaaagaagtcgatgatcatatcaatctgtttgatggctttaagctcctttttatttgcagctttgcctacttatgatcaagtcggtttatttgccccttttctgttactccttgttcgtttacttcaaggcttatcagtgggtggtgaatatggcgccgttgccacttatatgagtgaattaggcttaaaaggtcagcgtggtttttactcatctttccaatatgtcaccctctctggtggtcaattgcttgcaagcttactgggcgttattttgttgacgttcttaagtgaacaacaattacatgatggcggttggcgtattccatttgttattggtggtatcgcagcaatcttatctttgcttgcacgtagtcgtttagaagaaacactttctcatcaagacagcgaacgaaaagagtctggtagcttaagagaactctttaaaaagcactggaaaacctttttattagtggttggatacacttctgctggttcattaacgttttatgtagagagggactgttctaaattttgtgtaagtacttaa

SEQ ID NO: 64696 - DNA, 1251 bp, Acinetobacter baumannii
atgattactcgtgaacagtgtttgtattgggatcaggaagatgaactcaaaaaatttaaagatgaatttgcattgccagaaggcgttatttatttagatggtaactctttaggtgctagaccaaagaaatctttggctgtcgctcagcatattatttcccaagaatggggagaagatctgatcaatagctggaataaggcagattggtgggggctaccaacgcggctgggtgacaaagtcgctaaactgattggtgcggaacaaggtgaagttgttatttcagattcaactacactgaacttatttaaagttttatctgcagcggtaaaaattcaggctgataaattccctgaacacaaaattattgtggcagaaaaagatgcttttccaacagatatttacattattgaaggtttcattgacttaattcaaaagggctatcaggttgaattaattgatggcgtagaagacttatctcgtgctttagagaaagatgttgctgtagtagtactttcccatgtgaattaccgcactggttatttttatgatatggcaactattaatgaacaaattcactctaaagatgctttggtgatttgggatttatgccactcagtcggtgcggttcctatgcaccttaatcaaactgatagtgattttgcgattggttgtacctataaatatttaaatggtggccctggttctcctgcattgctctgggtcaatgaaaagcatcgtgatcagttctggcagcctttatctggttggtggagtcataaaaaaccatttgatatggcacagcattatgagccagcgaatagtatccgccgatatttatgtgggactcagccggttatttctatgagtctgattgaatgcggagtagatattttcctgcatgccgatatgcaaaaaatccgtgagaaatcgttgaaattaacagatttatttattcaattggtacatcaagaatgttctgaattcggatttgagttaattacgcctttagatcataaccatcgtggtagtcatgttagttatcgtcatgaattcggttatgaaattattcaggcacttattgcacgcggtgtgattggtgattatcgggaacctgcagtcttgagatttggtattacacctttgtatctgggctttgaagatatttggaatgcagtacagcacttaaaagaaaccatgctgaatagtgaatggaaaaacaaacagtatttagttcgtggtgaagtgacctga

SEQ ID NO: 64697 - DNA, 1584 bp, Acinetobacter baumannii
atgactcagcaggcatgtgtaatatcacaactcactttggagtttccttcaaaagtgatgtttaaagaattgaatttctcacttgagcatcatcaagtatcagccttaattggccgcaatggtcaaggtaagtctttacttatgcaattgcttcacaagatttcacccactacagaaatgcatataagtggtcaaataaactggcaaacaaaccatgcatatttatctcagctcactcgtctccaatcagacacaattgcagaagctttagaggtcaaccatctttacaacgcttttcaaagagtggaacaaggtgaagctcgatacgatgattatgatttgttagaaggacattgggatcttcctaatatttgggaagctttactacgatctgctcagctaccaaccgatttagactttcctgttaagcagttgagcgaaggccaaaaaaccaagttagccttatccgcattatttttaaaaactgatcattacctattacttgatgagccaagcaaccatcttgatcaagaagctagacagtggttaattgctcagttaaagaaacatccagtaggcgctcttattattagtcatgatctgactttgttaaatgaagtcgaccatatttatcacttaaatgagcatggcctacagcacactacaggaaattatgaaaaattttatgcgcaatatcagtcccaaatcgaggctttagaacagtcagtacatcagcatcaacgtgaagttaagcacatgaagcaaaagcagcatgaagttttaatgaaagctcaaaaacgtgagcgtgctggcaacaaacttcgtgactcaaactcgcaagctaaaattttgctcgattttaaaaaagaacaggctgggcaaagcctaggagcaattcattctcaacatcagcgtcaaatcgatcaaagccagcaagactttaatagtaaaaaagtacttctagaaactgttaagccccaacaatttatatttccctcttttaacaaaagaacaggagaaattcttagaattgataacttaaaactcaactatgggacacaacaaccaattcatctcgcgttaagagcttgtcaaaagattcatttggttggccgaaatggtattgggaaatcaactttgctgaaacagattgatcaatctgctgtaactgctacagatgaaattaaactgtttgcaaattgcttctatctcgatcagaactttagctttttattagaccatctctctgctgttgaaaacttaagaaatattaacccaaatatttctgagttagagtggagaaatttattaggtcaacttcggattcgtggtgataaaagcacatatcccttagctcaactcagtggtggtgagaagttaaaagttgctttactaggtttgagccatgctcagcctatgcctgaacttttattacttgatgaaccagaaaaccacttagatatcgagtcaagagagttatttgcaaatgctatttctagttatgaaggttctgtgctattagtttcacatgatttaagttttgttgaaaaatgcgggattgttgattcaatttatttaaattaa

SEQ ID NO: 64698 - DNA, 651 bp, Acinetobacter baumannii
atgggtcgtagccgaggccagaaaattgttattggtgatgactttgtggtagaagaatttgaacttttaaaccgttcatttaaatacaaacaaatcgaaagtagctttacgcagcctaatgcacaagtttgcaaaaaaatgctgcaatgggcatgtgatgcagctgaaggatcaaaaaaacacctgttagaactttattgtggtaatggtaatttcacacttccactctctttaaaatttgaaagagtgcttgcaactgaacttgcaaaatcatcagtttatgcggcgcagtggaatatcgaacagaaccaaattgataatattcaagtagctcgcctctcggctgaagagttcactcaagcctatcaaggtgaacgtgaattccgccgtctacaagaagcagatattgatattcaaagctacgacttcgatacagtattcgttgatcctccacgcgcaggaattgacgatgaaactttaaaactattgcagagctttgaacgtattatctacatttcatgcaaccccaacactttatatgaaaatttaaaaacgctcactcaaactcatcgcgttactaagtttgctttatttgatcagttcccttatacgcatcatgtagagtctggtgtcttacttgagaagatttaa

SEQ ID NO: 64699 - DNA, 384 bp, Acinetobacter baumannii; identical to SEQ ID NO: 49258

SEQ ID NO: 64700 - DNA, 324 bp, Acinetobacter baumannii
  misc_feature (295)..(304): n is a, c, g, or t
atgatccgcattgatgaaatctggttgtctactcagcccatggacatgcgtgcaggtatggatacgaccatggctcaggtggtgagagcctttggctacatcaaaccgcattgtacttacctgttctgtaataaacgtggccatcgcatgaaagtgctggtacatgatggattgggcatctggctgtgtgcccggcggctggaacagggcaaatttcactgggctcaagttcaccaaggtgaaaccgtggcccccagcccggaacagttacaggcattaatccaaggtttgcccnnnnnnnnnncaggcatactgcggtcatga

SEQ ID NO: 64701 - DNA, 435 bp, Acinetobacter baumannii; identical to SEQ ID NO: 26756

SEQ ID NO: 64702 - DNA, 408 bp, Acinetobacter baumannii; identical to SEQ ID NO: 54072

SEQ ID NO: 64703 - DNA, 429 bp, Acinetobacter baumannii; identical to SEQ ID NO: 46182

SEQ ID NO: 64704 - DNA, 480 bp, Acinetobacter baumannii
atgatgaagcatgaaaagaatttctattataccgacgatgccaaaagtcgtgccttatggatgtggcatatgcttgaagaatctgagcataaagatattgcttatgacgtctatcaggttttaaacggtaattatccgttacgggcaacgggctttttaatggctttcattaccattttagggcttattccaacagcaactttatttgtacctctactgcgtaagccaaaagaactgttgaccagaaaattttggaaagatgcacgtcgtggcgtcaacttaatttttagtccaaaagatggcgtatttggtagcaccattggtcagatttttgattacttacgtccagacttccatccaaatgatcatgacacgaccgaatatctggagtactacaaaaagaaattacttaacgagggcggtgcaattgcgccttactttgtgaaggaatttacaccaccagttcgtgcagtttcataa

SEQ ID NO: 64705 - DNA, 279 bp, Acinetobacter baumannii; identical to SEQ ID NO: 48605

SEQ ID NO: 64706 - DNA, 255 bp, Acinetobacter baumannii
atgcaaccattaacaattacagctagactgtcaggattctactttagtgattatgcaacattaaacaatattatgcgctatttggcttttatggttgtggctacatactggctacacggctacatttttaattttttaggctacatcttggctacatttacaggcattaaaaaagcggcttatgagccgcttacattagacgtattagttccttttcttttctttacatactcaataacgtctgacttgatgtaa

SEQ ID NO: 64707 - DNA, 435 bp, Acinetobacter baumannii; identical to SEQ ID NO: 26756

SEQ ID NO: 64708 - DNA, 732 bp, Acinetobacter baumannii; identical to SEQ ID NO: 45721

SEQ ID NO: 64709 - DNA, 474 bp, Acinetobacter baumannii; identical to SEQ ID NO: 42070

SEQ ID NO: 64710 - DNA, 435 bp, Acinetobacter baumannii
  misc_feature (404)..(413): n is a, c, g, or t
gtgaagtattgccagtttttctctgttcttgccttaagtttaagtgctgccagctgtgcggttacttccggtttacaaacttatgatattccgagtgagggagtttataaaacggacctcggaactacggttaatgtagttaaaatttctcaagagacattaccggcaatacaaccagctcaaatcgattatcaacgggactacgcatcattatttaaaaatcaacaaactatttatcgtttaagtccaggtgatgttctctctattcagctgtgggcttatccggaaattactcctcctgtaagcaatattagtaatgaacaatctgttcaagcgaatggttacccaatcgatcagagtggttatattcagtttccgttggttggacgctacaaagcagctgnnnnnnnnnncacttgctcaagtcaaccgtga

SEQ ID NO: 64711 - DNA, 906 bp, Acinetobacter baumannii
atgaatagtattgttttatctctttttcctttagttgcattaattgcatcgggatacttatttaaaaaatatcgtttttttagcgatgagttttgggctggggcagagaagctgaattattatattttatttccagctttgctttttagtacgctatcgaccgcaaaaattgacttacaaagcttgagtacagccatcattgcgatgttggttgtggttttagcagtgaccgcttttttatacatacttcgaatgttttggcacataccacccgcacgttttggtgtgcatgtacaaagtatggttcgctttaatacctatattggtttggctttagtcacttcgctttttaaaagtgaaggaatggcaattctggcaattttattggcgctttgcattccgcttgtgaatgttatttcggtgcttgctctaacctctaaagaacatatggcaattaaacctgttttgattgcactccttaaaaacccgttgattgcatcatgtgtgattggagccgtagtcaatgcgcttcatattcctatttgggaaggctttactcagtttattaagcttttttcagtgtcgagtttgccactagggttgttatgtgttggcgcagctttacagtttatgcaaattaaaaaagacattgtggtattggcagcagacacgtttgcacgacttttagcagttcctgctttggcttatatggtctgcatgtggtttgatttaccaagtttgcaaacgcaaattttagttattttctttgcgctaccgactgcttctgcttcatacattttaaccaaagttttgggtggagatagtcagcttatggcagccgtgattagctttcaaactttatgcaccgccgtgactttaccactggtgatttggtggatttcttaa

SEQ ID NO: 64712 - DNA, 885 bp, Acinetobacter baumannii
atgacatttacccagcttgaaattttcgcactcattgctgaactaaaaagctttactgctacagcagaaaagctgggaatttcacagtcggcagtttcccatgcgcttaaatcattagaacaacaatggggcattaacctgatttcaagaactcaaagcgatattgagctgacgacgacaggtcagcagttattaacccatgtaaaagagctattgagtatttccgataccttagaaaaagaagtggctgcaatccatggtttaaacgaaggcacactacgtattggatcttttggggcttcatcctctatttatctattgcctgaaattttagaagcctttcggcaatgctaccccaaaatcgaaatttatattgatgaaggtgaagataaagaagttgctcagtggttattagagcgacgcatcgaagttggttttttgattatgccagatgagcgttttgatacatttcccttaattgaagatcgttttgttgccttaattccgagtggttacccgctcgcccaacaactctatattgatccagcacagttagaaaattgtcctttcattatgacaatggcgggtagtcgacatcaggtcgaattaattttaaaaaattttaatgtcaaaccagacatcaaattttatgtttcacaaattttgagtattgtcagtatggttcacaaccagttagggatttcgattgtctctgatatggtgatcaccaaagagctactctcgctttatccaaacgtagttaaacgcccttttaaaccaaaccttaaacgttctattggtcttgcagtaaaaaacaaaaaacacatcagtccagccgtaaaagcatttattgaagttgctcaagaggtttggtctgatcattaa

SEQ ID NO: 64713 - DNA, 1188 bp, Acinetobacter baumannii
atgcaaaatgtagatctgtttttcttattacttggtgcagttttggttcttgccatgcacgcaggttttgcattcttggaacttggtacagttcgccacaaaaatcaggtgaacgcgcttagtaaaattctgactgactttgccctctccgcaatcgcatatttctttgttggttactacatctcttatggccagcacttcttccatgatggtacggttttatccaatgatcatggctataaccttatgcgttgcttctttttactcacttttgctgcggccattcctgccatcatttctggcggtattgcagaacgcgcaaaaatgcgttcacaagcgattgccacactcgcattggttgcactggtttatccgttcttcgagggaatggtctggaatggcaactacggtctgcaaaagtggttagaaacaacttttggcgcagcttttcatgactttgcgggttcagtcgtagttcatgccatgggcggttggatagcacttgctgctgtcattttattgggcgcacgttctggccgttataagaaagatggtcgtgtaagtgctcacccaccttcttctattccatttttggcgcttggttcatggattttgatcgtaggctggtttggctttaatgtgatgagtgctcagcgtgttgatgcaatctctggtctcgttgcgattaactcccttatggcaatggtaggcggaacgattacagcaaatgcgattgggaaaaatgaccctggtttcttacacaacggtccacttgcgggtttagtcgctatttgcgcaggttctgacattgtgcatccagtcagtgcacttgtaattggtggtgcagcaggtgctatgttcgtgtatctattcacctatacccaaaacaaactcaaagttgatgacgttcttggtgtctggccgctacatggtgtatgcggtgcatttggtggtattgccgtaggtatttttggtcaaaaatggctaggtggtttaggcggcgtatcattcatctctcagctcatcggtacagcactcgcgattgccattgcactggctggcggtttcattgtttatggcatccttaaagcgaccattggcattcgcctatctcaagaagatgagttccgtggtgcagacttatctattcataagatctcagcaaactctgaagaaggtatgttttaa

SEQ ID NO: 64714 - DNA, 600 bp, Acinetobacter baumannii; identical to SEQ ID NO: 46493

SEQ ID NO: 64715 - DNA, 1335 bp, Acinetobacter baumannii
gtgcattattcattaaaaaaacgactgatttggggcacctcaattttcagtgtcatcttaggttgtattttaatttttagtgcttataaggttgcacttcaagaagtcgatgaaattctagatactcaaatgaagtatttagcggaaagaacagctgagcaccctttaaaaactgtaagcagtaagtttgattttcataaaacttaccacgaagaagatctgtttatcgatatctgggcttataaggatcaggcccatttgtctcatcatttacatttgctggttccacctgttgagcaagcgggattttattctcataaaaccgctcaaggtatagtcagaacttatgttttacctttgaaggattatcagattcaggtcagtcagcaagagagggttcgtgaagctttcgcttgggagcttgcgggcagtatgtttattccgtatttaattattttaccttttgcaatatttgccttagcagccattattcgtcgtggtttaaaaccaatagatgattttaaaaatgagttaaaagaacgcgattccgaagaactcacaccaattgaagtacatgattatcctcaagagcttttacctactattgacgaaatgaaccgtctttttgagcgcatttctaaagcgcaaaatgaacagaagcaatttattgccgatgctgctcatgaattacgaacacctgtgactgcattgaacttacaaaccaagattttgctaagccagtttcctgagcatgaatcattgcaaaacttaagcaagggtttggcgcgtattcagcatttggtgactcagcttttagcattggcaaagcaagatgtaactttaagtatggtcgagcctactggttattttcaactcaatgatgtggcattaaattgtgtggagcagttggtcaacttggctatgcaaaaagaaatcgatttaggttttgttagaaatgaacccatcgaaatgcatagtattgaacctactgtacattcgattatttttaatttaattgataatgcaattaagtacaccccgcatcagggtgttattaatatttcagtttataccgatccagatcactacgcatgtattcaaattgaagatagcggtgcaggaatagaccctgaaaattacgataaagtccttaagcgtttttatcgcgtgcatcaccatcttgaggtgggaagtggtctaggtttatctattgtagatcgtgcaactcaaaggcttggtgggactttaactctcgataagagcttagagcttggcggtctttctgtattagtgaaattacctaaagttttacatttacatgaaacaagagtgtga

SEQ ID NO: 64716 - DNA, 675 bp, Acinetobacter baumannii; identical to SEQ ID NO: 63206

SEQ ID NO: 64717 - DNA, 333 bp, Acinetobacter baumannii
atgattaatactctaaaagaaatatcaaaatatcagacaggtttatggtatttatctgatcatggcgaatcaaccggagaacatggtttatatttacatggttcaccttatgcaatcgcaccgagccaacaaacacatgtaccaatgattatgtggttctctgaaagttggaaacaacataatcttgctcaagtgaattgtttaagccaacaaactaaacaaaagttaagtcaggataatttattcccaagtttgttaagtttgctggatgtaacaactcaggtcatcaaccctcaactggacatgttgcactcttgtgcccatgtaaactaa

SEQ ID NO: 64718 - DNA, 351 bp, Acinetobacter baumannii
ttgtggcgagaggcattttcactggttaaagaaggggtgtgttcggcagaagatgttgatatagcaatcaccagtgggcctgggctgagatgggctttatttggcccctacataaatatggaacttgccaatcagaaggggtttaaagaggcaattcaccatttaggaccacctatgaccgaatggtggaatgatatgcaaaattttcagcactctgaagaaactactgagttgctagaagaacaaactaaagaacttttaacacattataaagatgtcgatttatctcagaaaagggataaaggactagtcgatattttaaaattgagacaacaattagagttggattaa

SEQ ID NO: 64719 - DNA, 129 bp, Acinetobacter baumannii
atgtatgcaaatgcaagaaccaaaaaaggcggtattttaggtaagatttatcctacggatttacagaaagatcttgaaacgattaaagaactttatgcgcaatatgatattgatgtgaaaattaactag

SEQ ID NO: 64720 - DNA, 1584 bp, Acinetobacter baumannii; identical to SEQ ID NO: 64697

SEQ ID NO: 64721 - DNA, 444 bp, Acinetobacter baumannii; identical to SEQ ID NO: 51455

SEQ ID NO: 64722 - DNA, 354 bp, Acinetobacter baumannii; identical to SEQ ID NO: 48622

SEQ ID NO: 64723 - DNA, 528 bp, Acinetobacter baumannii; identical to SEQ ID NO: 46241

SEQ ID NO: 64724 - DNA, 150 bp, Acinetobacter baumannii; identical to SEQ ID NO: 57938

SEQ ID NO: 64725 - DNA, 264 bp, Acinetobacter baumannii
atggcaaaaaggatgaaaacactccctccagaaggcgcaaagaaagttcgtgattggattggtaaaagagttacgaatacccgtgattttgaaagttactctcaaaagatgcctgcgaattctaaaggtacagtaacagatgcaggtaacgggtgcggtttaagagtcactttcgatcaatgcaattgttgtggtttacaagcaattttcactggcgtggatggtagggatttgcaattaattgaggttcaaaatgaaagctaa

SEQ ID NO: 64726 - DNA, 927 bp, Acinetobacter baumannii
atgaaaattacagaacaattgctaacccaatggggtgcttgcagtgaaggcaagcaaacgttcactcaaaaatttccagaaggtgctgaatataaggaagtaattgccgcatgtgatgagaacgggcatcgtgattatcgcacatggatttttaatcacgcatttcaacacttagttgcttctgagattgtagaagctgaaacagaccttgtgcctaaagaaattgagaaagggctagaaccacttcagtttcttgatagtactgaaacccaaaatacagacactatttctagagaagatagcaaccaacttgcagcatctggtgacgacagccaacttgcagcatctggtgacgacagccaacttgcagcatcgggtttcaacagccgacttgcagcatctggtcgctacagccaacttgcagcatctggtgacgacagccaacttgcagcatctggtcgctacagccaacttgcagcatctggtcgctacagccgacttgcagcatcgggtttcaacagccgacttgcagcatcgggtttcaacagccgacttgcagcatctggtgacgacagccaacttgcagcatctggtcgctacagccaacttgcagcatctggtcgctacagccgacttgcagcatctggtcgctacagccaacttgcagcatctggtgacgacagccaacttgcagcatctggtgacgacagccaacttgcagcatctggtgaaaattctgttatcgcctcttccggattaggttctactttccaaataggtaaaggcggatgcgcagcaattgcgtatcgggatgagcaagaaaaaatccgattcgcagtggcttatgaaggtgaaaacgtcaaagcgaatacttggtacaaagtaaatgccaaaggcgaatttgttgaagtcgagacacagtcatga

SEQ ID NO: 64727 - DNA, 2262 bp, Acinetobacter baumannii
atgcgtatcccacaatttaatcgacaagtttcggacaatagtgttccaaatgtacaagtcagtggcggcatgtcagcaggcgaagccgctagcttagttggtaataaaaccgatagtttagttggtgcccttaattctggtttgaacgcgtaccaagcataccaagatgaagcggaccgcgtacgggttattgatgcccaaaacaaactcgctgaattaaaactccatttgcaaaacaatgatgtcgatgggtacggcaacaaaaaaggggtagatgttgtaagttttgatgatggcaacggtggcgggtttgtagactactatacaaaagcatatcaagatggagttgggcaaattgcaaatactttaggtaatagtcgtcaacgtgccttgtttaaagaaatgtcagaacgtgacgcggtgcagttcaaaggctcattacaaaattactttgtacgtgaaaatgacgtttatcaacaaagcgtttattccgcggcaacagaccgacttgtccgagaaataggagagaatcctttagatttttctagtaacgatgaaaaacttttaaacctaaaagcagcgattggtaaaaaagttcaattagaagggaaatcggcacttgaaggtgaaaaccaatatcttaagatagcatctatagcacacacaacaaatttatctgttttaacagagtcaggaaatttaaaaggggctatagcgtaccgtaataaatataagaatgaaatttctttagaagacagctttaaagtcgaacaacgtattcatcaaaaattagaagaacaacaggtggagcagcttgccaatcaaattcttacaggtacgcaagactttagtaatcctgctttaaacgcaccacctcaagcatcggcagaaattgcaaaagaattaaaagcattaacgccagagcaaatgaaaagcatccgatacgatgatcagcgtttggatgtttacaccgtgcatgctgcaaaagaaaaaggtatggaatgggctgcaccattacttttaggaattcgcttagcaggtgagaaatcaaataacagcgctgtgtcccgcagaggcgcaaaatcagtaatgcagtttatgcctaaaacttgggaagaatatagtaaaggcggtcagagagatattaataatccggctgatactattgacgcttcattagagtttgtgaattggattagcaaaaaatataaaactaaagacccgatggtcattgccgcttactataatggagggcacccggccgcaaatgctgtgttgaaaggacaacagccacctgcaccagagacacaaaaatacttgcaacgtttggataattggatgtcagatggttttggagcttatgctaaaaaacctgctaaaactcggggccaagcgtacgaagaaattgaaaatagtaatgccccgataagcattaagcagaaagtcttgtcctatatagataggtattataacggtcaagataaagcaaaagaagaaaaacaaaatcaggtctatgattattacttcaaagcaattaattcggggcagttctcttatgaacagattcctgtagtagatattaattctttagagcccaatcaaattaagagccttgaagctgttagtaattctaaatttaaaaaagatattaaaactaacccaacaatctacagcatgattatgctaaataaagatgagcttttcaaagggaaaccacaatcagttttgcatcagtacgctgataaattatccccatcagattatcgtgctgtcacaaaaatgtacatcgatgtaaatgcttcaccaaaagatgcaagaaaagaagatgctattgaagttagccctaaaacggtttcggattatttaaatccttatctacctatgcttggtattacaaataagacaaataagaatcagatcgatcattatgctgctgttcaggcagacgtaacacaaacattgcgtgaagctgaagctcgaaaaggaagcaagctgaccaaggatgaatttagtcgagctgttcttaaaacgatcgggctaaataccaaaatcacaacatcacgttctttgttcggtgtgtcaattggcagttctgaaagcaatttaaatcgcatatactcagttaaaagtaaagacgatattgctcctaatactcaaaagaaaattgatgacttgtttaaaaaacaaggtcgtgatttatcaaaagtaacattggcagaatatcttaatgcttactactcaatggctagaagggggttttaa

SEQ ID NO: 64728 - DNA, 855 bp, Acinetobacter baumannii
atgtggtcagccattttaaaatatgaaaacccaatcactttaggttcaattgtaatccgccaagacaatgaaggacgtttttgtcttaatgatttacataaagcatcttttgctaaagtcagtaaaaagccttctgagtggcttcgcaatcaacaaacaagagaaattattaacgaattagtgatcgaagcgggaaatcccgcttcggtaattcaaactattaaaggcggactattacaaggcacctatgcagtcaaagaactggtctatgcatacgcaatgtggattagcccttcattccatcttcaagttattcgcgcatacgacgaaatgattgttaagcaattggagaaggctcgtaataattctatggggatgttgcatatccccgaacctatttcgcctgatacaaatcgttataccgtagttaaaagagacggtgttaccactttacgagatgcgaaggatgtatcttttgttaatgctgcacatgtttccgatttgcgtcgtgatctaggcacagtaattcgtgcattagaagagttgcgatatcgaacaaaaattgttgatggtgagctgagcgccaatgagttggcattgcccttaatttgtgaattgagcgaaaatggtcagcaatttgaacgaactatttcagacgatgaaattgcaaacatgactccatcacaaagcaaagccatggtacgtgataaagttgcaatcgctatatctatgcttaaaacaacttatcatcctgatgatattaatcgtatgtgtaaagagttcggcatccatcgagatacagcaaaacgtattctgagcaagttatatcaacaggcaacaatgttggcaggttga

SEQ ID NO: 64729 - DNA, 1434 bp, Acinetobacter baumannii
atgagttcagaagcacattcaattagcttgattgcccctgtagttttattggcggccgcggtaattgcagtccctatttttaaacgtattggtttaggttcggtattaggttatctcattgcgggtctgattattggccctttcggttttgcatttttccaagattctaccgcaatcttacatattgccgagttgggcattgtgatgtacctatttgtgattggtcttgaaatgcagccatcacatttatggagtctacgacgggaaatttttgggctaggaacactacaaatcataagctgtgctgtggcattaacaggcgtaggtttgctatttggttttacgtggcaagttgcttttatcggcgcagcagggtttgtattaacatcgactgctattgtgatgcaactactgggcgatcgtggtgacttaactcagcctcgcgggcaaaaaattgtagccatcttattatttgaagatttattgatagtgccattactggctattgttgcttttatggcaccgaatcatgtggtcgaaagcacagcggtacgtttagaaaatataggaattggtttattagctattgcgggtctgattgcagcagggcattggttacttaatccattatttagaatcttggctgccgctaaagcaagagaagtgatgaccgctgccgctttgctggtggtattgggtgcggcattgctcatgcaagtgagcggtttgactatggcaatgggcgctttcttggctggtgtgttgctatctgaatctacctttaggcatcaaattgaagctgatattgaacctttccgtggaatcctgttaggcctctttttccttggggttggcatgtcactggacttatcagtggttgctcaaaactggcagcttattgtaagtagcgtaattgctctcatgtttgctaaagccatcatgatttatatggtcgcgcgagtaactaagagttctcatactgaggccttagatcgtgccttattgatggctcaaggtggcgagtttgcctttgtacttttctctgccgcattaagtgaacaagtcattgatagtactattaaatcaaacctgactgctattgttgtactttcaatggtgttaacccccattgtaggtattatttttaagcgttttactcaatctaaggcgagtgtttcattagaaaacatcaatattgccgagggtttaactggtaatgttttaatgatcggtttcgggcgatttgggcaggtaaccagtcaattattgttggcaagaggagtagacgtcaccattattgataataataccgacatgattcgaaatgctgaaagatttggttttaaaatttattatggcgatggttgccgtttagatattctacatgcgtctggagccgcaactgcacaagcaattgtagtatgtgtagattaa

SEQ ID NO: 64730 - DNA, 375 bp, Acinetobacter baumannii
gtgactcatgaatttccgttggcaaaattattagttcgttcatatgatcgtgagcattcactacatttagtcaaacaaaaagtagactacatgattcgtgaaacttttgagtctgccattaaatttgggggcgttattttacaagaactaggtgtagatgaagacgaggtagagcgaattaccgaagaaattcgagatttggacaatgagcgttttgaaactgaaattgccgccgatgatgtatatgccggagcggatatgcaatatacgcatgcacatcatccgagaccaacagcaccattaattcggccaaaacaggaagggcgtattttaaataaagatgatgcttcggataatgaaaatatggatgggtaa

SEQ ID NO: 64731 - DNA, 225 bp, Acinetobacter baumannii
atgaactacgcagaaatgtatgtagaaggtgcactgcctaaaatagaatcagatattgcacaaaacggagtatgtactctttattcaaagatgactttaagtgaagaaacaacaacggccatttctaatctactttttgagaaagggttcagcactgaagttttaattgaagatgatcctgattttattggtacgagattgaaaataataattaccaaagtatag

SEQ ID NO: 64732 - DNA, 1413 bp, Acinetobacter baumannii; identical to SEQ ID NO: 48616

SEQ ID NO: 64733 - DNA, 813 bp, Acinetobacter baumannii
  misc_feature (799)..(808): n is a, c, g, or t
atgacaaatatgatcaataaagcccaagggttgggtttatcgctgatcacaaaactagctggaagcgatgtacttgatcaactcaaactacgtaaatttcttgaaaggtctctttaccaaggttcaaaagctggttttagagcattaagtcagactcagaaagcatttaaacctaagcaaattccccaacaacgcctgcgtcaacagaagaaaaacctatttgatttaagcctaactgaagaacaacaaatgacttcagaggcaatgtctcaatttgctcaagaagttttattgggattagctcatgatgctgatcagacagctcaatttccagaaagcctttggcaatatgtagaagatttaggattaaactattacgctcttccagaagcactaggtggtgtcgccgctgaacaaaatattgtaagtaacttattgattgctgaaaaactagctgaaggtgattttagtcttacagcagggctcttaagtacgtttagtgttattaataccattacacgttggggttctactgaagttcagtcaatgtatttaccttgctttgcagaagactccgacattaccgccactttcgctgtacaagaagctactccagcatttaacccttatgttttaaaaacaaaagcttctcttgaaaatgatcaatattttatagagggtgaaaaaacattagtcattttaggagatttggctgatgtgttcttggtgagtgcggactttaatggcaagccggatgtatttgtagtacaagctggcgataccatttctattaaaagtnnnnnnnnnnattaa

SEQ ID NO: 64734 - DNA, 351 bp, Acinetobacter baumannii
atggagttgtttaacattgtcagtgagttgccgatagtaaaatcagttttaccaaacaactcatcaacagaaacttttgccctttctaaagatttaactacaacatcagcagtcagttttccttctgctgccatacctcgaagttgtccaatattagtatcaagtcccattgcaattgcttttaataatcctggagcctgttctgcaatcgagttaaattcttcaccacgcaacactcctgatgctaaagcttggccgaactggactaatgcggcttccgcactagcagcactcccacctgagattgcaatagcttttgcaactgtttcggtcagagaagatgtttgctga

SEQ ID NO: 64735 - DNA, 399 bp, Acinetobacter baumannii
atgtatgctgaaaggaatgttctattagattgggcaaatggatttgttgatagagataataaatttgtaaaagaattccaaactacttttgagtcttctttttgggaattatatctaaataaaattctgaaatctgaaaatattgatatagactataaacatcatgcgcctgactttgtatgtaacaaaaataattcagctttttgtattgaagcgacaattgccaatccagaacaagatgggttgccagcatatggttttggcggtgaatatttagattttgaaattgactttaaagagttcaatcgaaaatcaattattagattgtatctaaggctcaaaaatttaaaaaatcatataaaaatttatctcatgttaatggcaaaccatttattttag

SEQ ID NO: 64736 - DNA, 201 bp, Acinetobacter baumannii
atggatgaagatactttttatcaaacatttaacgaagcggaaattaacttctatatccttcaacagagcggaaaagactacaagatagagaagttttctaacacgtacaataacggtggagcagaagaaagtaagatggcttttgaatgtttcttaaagttctatccatacacagacttaactttaatagccaatttttaa

SEQ ID NO: 64737 - DNA, 264 bp, Acinetobacter baumannii
atgtctgtcatagatagagctgtagaaaagaatgctaatttatcttatgttgccttaaaagtgatcgaatgctttaaggatgctggcttagacttaaattacattgatgataagataagtgaattttcagatttaagtaattatgctgctctacatcaagcattacgtattcttgatgataagaatataaatcgattagcagataaacttggtgtttcgatttcagaccttgaaacgactttgtttgttttaaataaaatttaa

SEQ ID NO: 64738 - DNA, 423 bp, Acinetobacter baumannii
ttgccaacagatccaaatgctaagaaattgattaaagattttcctgaatcatattattctaaaatcacaaatattgtcacaggccattcactttacattgcggtagcaaaacataatgtagctagaagcaaggagatagcttttttaactacttatgatttaaatgatgatcagttaagtcagactgaaagattaaaccatataggcattaactttaacctagtgattcaagaacatattgatttcctaaaaaaagagcatttagaacctcaaaatgaaatagagaaaaatttgtcagagggattgatcaaggatggagggatgtatattaagggtgctacatatgaaaaagcactgatgtttttaaaactagaggcttgggagcagttatatacttactcggttatgaaaaataatttataa

SEQ ID NO: 64739 - DNA, 966 bp, Acinetobacter baumannii; identical to SEQ ID NO: 45843

SEQ ID NO: 64740 - DNA, 480 bp, Acinetobacter baumannii
  misc_feature (365)..(374): n is a, c, g, or t
atgaataaacatttattagcaaaaatcactcttttaggtgctgcacaactatttacgtttcatacggcatttgcagatatacctctgacacctgctcagttcgcaaaagcgaaaacagaaaattttgataaaaaagtgattctgtccaatttaaataaaccacatgctttgttatgggggccagataatcaaatttggttaaccgaacgtgcaactggcaaaattttaagagtaaatcctgaatctggtagcgcgaaaacagtatttcaggttcctgaaattgtgagtgatgctgatgggcaaaatggtttgttaggctttgcttttcatcctgactttaaacataacccttatatctatatttnnnnnnnnnntttaaaaatccaaaatctacagataaagagttacctaatcagacgattattcgtagatatacctataacaaaactacagatacatttgaaaagcctattgatttga

SEQ ID NO: 64741 - DNA, 516 bp, Acinetobacter baumannii
atggctttaaaagtcggaattattaaaagctcggacgtatcaaaatggtgtgaatataagggttctgatggagaggtacaggctgagttcaaagtccgtggtatcgcatataagccttttcaggtagctattgaacgagcaggaaaccagatctcgtctaaaggctacgatgtaatggtcaaagatgaagatgccaagctttaccatgaattgttaatggatgcatgcgccgcccacttaatcgaagactggaaaggtgtggtatttgccgaaatcgtagacgataaaacggttgaatctgaaaagccctatacacctgagaatgcttcaaagcttcttaatcttggtgatattggtatttcaatctggctattcattaaagaacaggcccagaagattcaggaagaggccgacaaggacaaggctttaattctgggaaagtcatcgagctctacaaataccaaaaaacgtatgcgtcgaaaacgccgcacgaaatcgagcaaatcaagttcttag

SEQ ID NO: 64742 - DNA, 423 bp, Acinetobacter baumannii; identical to SEQ ID NO: 61579

SEQ ID NO: 64743 - DNA, 393 bp, Acinetobacter baumannii
atgtatttgatcgaagccggccaaatgcgagcagctcaagataatttcttcggaacctacaacgtgatggtggctaaagctcaattgaaaggtcgtcagcaagagttttacgctccaccgctacaactagaacacaaagaacctaaacacgttcctgtgagcaatgacgaggctcaaaagcatctcaaatcattgatggaaagattaaaaatcaatggtcgtaaacctgcaccagttcaaaaacttgaggcaaaagaaaaagagcctgagcttgcaaaagaattaggtccagatcctttcgacaatccgcacgaatacgctgagatgtgccgccgtgaaggtatgccaatacctagaaatattcttcagctaattgatggggcgaatgcatga

SEQ ID NO: 64744 - DNA, 870 bp, Acinetobacter baumannii
ttgtattttatttggaaaaatttttcagaagtattgaaaggatgggatataaaacttgtatatggtgctctatcattgatttttttagttattgtaggcacttcaggaacatttcttcatttgtactcaattagagatcagcaaaagtttacaaaaacaaatgaacaagatgctaagagtaaagaattcggaattattcaaaagcttggtcatgaaaatgatgtatatattaaacttggaaatacaaggacaagttgggctctaacaagattagtagttgtaccagatgcatcaggcgcatcaatgtatttaatgaacggatattgtgcattaaattattctgatgtttcgagccaagatatgaagcaagaaatgataaaaaatatatcaaaagataagcttgcaaaggaaagacttgatattccaaagatggcaataatgatgcatgagtttgcacattgtattgatattaagagagattatttaacattcaatataaatgcagcaaattcagataagacaacaattttaggtacaaacgctatagcaccaaaatttagatcccacgtaaaagatctaatgagttaccaagagcttggtagcgcctctacattgtggaaagaagtttttgcggatctttatatggcgggttatctgtatgtaaatcatcctagcattgcagaccaagctgttaataattggagtaaattaagagcaaaaaatacaaaagacgatgaagggcattcaacaagttgttggttgaatattgctcagacattgccaaaaccaagatcgaataacgaattaataaattgggcagataatattaggtcgaccagtaaatgcaaaagtgatttttataagtcttag

SEQ ID NO: 64745 - DNA, 228 bp, Acinetobacter baumannii
atgattgatctaaataaaaaaagagaagcttttgaaagatttcatgccaaagaatgtaattgcagttatgaaagtttaaaacgtcaactagatagacaagaggcactaacaggacacagatatttaccaactagtcctcgtcatgaagcttggttgatttgggatgccgcatggaatgacgccagtgctcaggtgttgccaacttggatcagcgtggatgatgaatag

SEQ ID NO: 64746 - DNA, 468 bp, Acinetobacter baumannii
atgagtttacagcaaagtactgcagcctccattattagaccaagccaacctaggacaaacagaccatgttttggtttagccaaactatttcttatttcatgttcatcaacaggagaaaaaaagtgtattagtttccctaatgaaattgaattcttaggttcaacatataaattagataaaactaaaaatctaatacaaattataggaaataatttagcttcagctgctttttgggtatgccaagaactagaatttcaagacaattcagatgagtttaataacacttataggctctttcatgaaagtattgatatctcaaaaccatcaaacatttctcatcagactacagtaagaatgctaccagtggactcttttgatgatcattcacaagcaatacaaggtatccaagataaaatccataggaataagaatacaatttgcttaacttatgaaaaattccacgattaa

SEQ ID NO: 64747 - DNA, 1002 bp, Acinetobacter baumannii; identical to SEQ ID NO: 51344

SEQ ID NO: 64748 - DNA, 852 bp, Acinetobacter baumannii; identical to SEQ ID NO: 51219

SEQ ID NO: 64749 - DNA, 153 bp, Acinetobacter baumannii
atgagctgtaacctcatttcgctcaaaacctctgaagccttgaactttgaaaatgagaaagttaaagaattacttcatgaggttacggatattatttttgcaaacaccggagtcgacattagtagtgttgaactcaatctttatactgaataa

SEQ ID NO: 64750 - DNA, 408 bp, Acinetobacter baumannii; identical to SEQ ID NO: 54072

SEQ ID NO: 64751 - DNA, 531 bp, Acinetobacter baumannii
  misc_feature (10)..(19): n is a, c, g, or t
atgaacaacnnnnnnnnnnaacttagacagcaaactcttaaaattgatagtttggcagatgaacttggggtgcatgtacgtcgttgggcacttgctcatactttagctcaaggtgatcatgctctagagattatgatgggtgaacaaggctacttacgacagtttgagaaaatatcaaaaccgtttctcaagactctagtcaagaagaactataagcttgaagaagagctcgtaagtcagtcaaaaggatgcatggatgaacttattaatgagttaaaccactatttaattgaaaaccaagcacgttatatggttggtgaccgcttaagcctcgctgatatttcagtatgttctatgcttgcacctttattagaaataaaaggtacaccatgggaaagggaagaagatggggaagtatcgcccgattggagtaattatcagaaatatttacttgatttgccgcttggacagtacgttttaagaatatatcaaactgaacgtaatgcacgcgttgattggcgaggaatttaa

SEQ ID NO: 64752 - DNA, 273 bp, Acinetobacter baumannii
  misc_feature (257)..(266): n is a, c, g, or t
atgcgggttttgtatcagtttcctttgtctcattattgtgaaaaagctcgctggttgttagaccataaagaacttgattacgttgcacataatttgattcctggatttcaccgtgcttttgcacaacttaaaacaggtcaaaatttgttgccgattttaaaagatgaccatcgctggattgctgagtcgactaaaattgcgctttatctggatgatacttatccggaacatgcacttttacgccgtgatgaacaacnnnnnnnnnnaacttag

SEQ ID NO: 64753 - DNA, 276 bp, Acinetobacter baumannii
ttggtagatcaactgattgaaggtaagcttgtatataaaacgttatatgaaacagataatgccaccaatttaaaagagctggttttacaaggtctaggggtggcttggattccaaaaattaatgttgaagaagatcttgcagccggaaaattagtcattttagaccaacaagaatattgccttgctcaagatatttatatcttcaaaaataatttgagtgataataagtcggtacagaaaatatggaatggttttaaaggccagcaagacctataa

SEQ ID NO: 64754 - DNA, 750 bp, Acinetobacter baumannii
atgcatgagattaccttgaacgaagtgcgtcaattaatcgcatctcttcgcactgtttacgctgctcagttcaataagcaatttccagcaacaggcgaaagcgcaattcctctgtcagtggttgagcaaatcgcacttaaaacactggttggcgttcaacaaaaccaatttaacaacgcacttggtcgtttacttacagcaggtggacgctttatgccgtcatttgccgagtttcgcacctggtgtatcggtgaaagttggatgtctccagaagaagcttggtctcgcgcatgtaagtttacaactgaccgttccgtggttattacccaaatcactaagtacgccttagacgaggttatgtatttgatcgaagccggccaaatgcgagcagctcaagataatttcttcggaacctacaacgtgatggttgctaaagctcagttaaaaggccgtcagcaagagttttacgctccaccgctacaactagaacacaaagaacctaaacacgttcctgtgagcaatgacgaggctcaaaagcatctcaaatcattgatggaaagattaaaaatcaatggtcgtaaacctgcaccagttcaaaaacttgaggcaaaagaaaaagagcctgagcttgcaaaagaattaggtccagatcctttcgacaatccgcacgaatacgctgagatgtgccgccgtgaaggtatgccaatacctagaaatattcttcagctaattgatggggcgaatgcatga

SEQ ID NO: 64755 - DNA, 324 bp, Acinetobacter baumannii
atgactaatttcaaaaaacaccctgacggctacaagtcatttttaggccgtgatgataagggcctctactctgttcgcattggctggcaagtgtacgcatctaatgctaatggctcagttctttacaaagttaaagacggatttaagacgcctttaaatgtgttcaggttccaaactgactatccaaaagtttggaatgaactcacacaagaaattgatttccaacgcagaaagcagctcgcaataaaactgcgtgaaacaaacatccctacttatgaccgcaaagcatataaaactaaacgcggttttacaggctcaagataa

SEQ ID NO: 64756 - DNA, 1035 bp, Acinetobacter baumannii
atgactccagaattacccggaacttatattaatttattagttgagatcgttaagcgcagaggtatctcttgtgagcagtttttagagggtagtggagtaacaccggaacaattaaaaaaaccgtattggtatgttgagtttaatatcttaaataacttacttgagcatgcgattcaactcactcatgagccagcattagcgggttatttggcattggaaatgaaagcttcttgttatggttctgtcggtatggcggccatggtgtctgcaaatcttgaggaggctttaaaaatacttgaacaatttattggttcgcgttgtgatgcctttaaacctgagttaaagcaagagcaagacgatgtttactggtctattcatcaacctttaaaaagttttcaattaagttcagatgcgactatttttttgttgttaggttttgtttacatcgcaaaacatctaacaggggtatcttctttaggtacagtgcaattgaatatgcccgaaccactaggtttttcaaaaataaaagataaattaggcgtaagttgtttatttgagcaaaaacataatatttggattattccaaaagaatatttaatgcagcctgtactcacggctgatcctatgctggcacctttactgaaagcacagtgtaaaaaagatattgataaattgaagttacgaagtgggtggaaagcagaaattagccaagtaataaaaaaattattgatcaatagtcagggggaaatattaaaagttaagcaagttgcccaaatgatgaatatgtcagaacgtagcctacagcggtatttggcaatagagaatacaagtttctcagcattagttgatttaactcgaaagcaatatgcacaagatcttttgcaaaatagttcaatgtcaattgaagctgtggcattaagtttaggctatgccgatacaccccatttcactcgtgcatttaagcgctggatgggtgtaacaccgaagtattatcaaactcagttaaaactaaaaaatttagagatacgtgaataa

SEQ ID NO: 64757 - DNA, 894 bp, Acinetobacter baumannii
atgcaacagaatgacttgacgaaaagtttggtagaggcttttttgtatttggctcctcaagaggggttatatcccactcatatttcaaatatcaccctgatgagggtagatcattccacacagccggttgctgtattgcaagagccttccattgttttagtcattcagggtgtaaaacgagcttatatcggaaaagatatttttaagtttcaacaaggccagtgtttatttatctcaattgctattccttttgattgcgatacgttggttgagcgtgaaccaatgcttgcaattgcgattaaatttgaacctcaaatgatggccgagctggcggctaaaatggataaagagcagcgaccacttatagaagattttgataacaaagagataaaactgagctgtggtttaaatattattgaaatgaactcggttatatctgatgttgctttacgcttgttgaacttacttcgttccaagcaagatactgcaatcttaggagagcaggtgaaacgagaacttatttatcgggttttacaagccggtggtggtgattttatccagaacctttcggctattatgagccgaagtggagtgatttatacgatttgtgaaattattcaaagagattattatcgtaacttaacggttcaggagttggctaaacaagcaggaatgagcgtttcgctttttcatcaagcttttaagaaagttaccaactattctccattacagtacatcaaaattactcggttacataaggcccgtgatctaatcctaaataaccaaatgggcgttgcagaagctgcctatgaagtaggatatgtgagtgcctcacagtttagtcgagagtttaagcggctgtttggagttccacctaaattatcaacaaactaa

SEQ ID NO: 64758 - DNA, 999 bp, Acinetobacter baumannii
atgaatcttccgacaaccatgaaaattgttgaaattacggttcctggcggacctgaggttttaaaacttcaagattcaaatgttccggtacctcaagctgatgaagttttaattgaggttaaagccgttggaattaaccgccctgatgtcttacagcgtatggggttatatccaatgcctaaaggggttactcaaatccccggacttgaagtcgctggagtagtggttgctgtgggtgagcaagtgcaacagtttaaagtcggggacaaggtttgtgctttaaccaatggtggcgggtatgcagaatactgtgcggtaactgcaactcaagtattaccaatacctgagaatttatcatttactcaagctgctgcgattccagaaacattctttacggtttgggcaaatctttttgatattggccgtttaaagaaagatgaaactaccctgattcatggcggtgcaagtgggatcggaaccactgctttagcgatttgccatgctttaggtattaaaacttttgctacggttggtagtgaagataaagttgaagcactctctgacttaaccacagcaattaattataaaacccaagattttgagcaggaaattttgaaccatactcaagaacaaggtgttgatgttattttggatattgtgggtggttcttattttcagaaaaacttaaatctattaaaacgtgatggccgacttgtcattattggctttatgggaggtcgaattgcaaaagaatttgatttacaaaaactgattttaaaacgtgccacaattacaggctcaacgatgcgagcgcgtaatagccaagaaaaagcacagattgctcaatctttacatgaacatgtgtggccattattggagcaaggcaagtgtttaccacaaatctataaaacctatgctttttcagatgtacaaagtgctcatgcatgtatggagcagggcgaccatattggaaagatcgttttagagatgaatgcttaa

SEQ ID NO: 64759 - DNA, 876 bp, Acinetobacter baumannii; identical to SEQ ID NO: 45932

SEQ ID NO: 64760 - DNA, 1356 bp, Acinetobacter baumannii
ttgaccaacgaatcttctacacttcaacgaggactaaaaaatcgacatatccaattaattgctatgggtggagcaattggtaccggattatttttaggctcggcgcaagtgattcaatctgcgggaccatccattattttaggatatgccattggtggcttaattgcttttttaattatgcgccacctgggagaaatgattgttgaagaacctgttgcaggatcgttcagccattttgcgtataaatactgggggaaatttcccggatttttagctggatggaattattggatgctctatgttctggttgcgatgagtgaactcaccgcggtagccaaatatattaattactggtggcctcatattccagcatggacttctgtcttatttttctttgtcgtgattacggcaattaacctaacaaacgtcaaattttatggtgagtccgaattctggctcgctattattaaagttgctgcggttatctctatgattgtttttggcctttatttgctatttacagcagatgtaggttcaagcatttcgtttagtaacctttggtctcatggtggattttttccaaatggctttagtggcctcttctatatgttggctttcttgatgttcgcctttggtggtattgaactgattggtatggccgcggcagaagcaaaagatccgaaaaaaactattccaaaagcaattaaccaagttgttttccgtatcttgattttctatatcggttcactagcgatcttactttcattagtgccgtggaaccaattagatcttggcggtctcgacaaaagtccatttgttatgatttttagtcaaatgggtattggttgggctgcacacttactgaactttattattttaaccgccgctctctctgtttataacagtgggatgtttgcaaatagccgtatgctttacggtttagctcaacaaggcaatgcaccaaaaattttcaagaaagtaaataaacaaggtgtacctgtaccagcagttttgctatcggcattactcatttttggctgtgttcttttaaattactttgtaccagaagatgctttaagccacttaatgtacattgttgttggagcactggtattgaactgggcgatgatcagtatgactcaccttaagtttaaatcagcaatgaaaaaactcggtcaaaaaactcactttcctgcactttgggcaccgtttagtaactatttggttttaggttttattgctgtagtactctacattatgtggagtcaaggctttaaagaatcagtgatgatgattcctatttggatcgttctcatgtttattttgtttaaagtactcaatgccaaagaacagtaa

SEQ ID NO: 64761 - DNA, 1188 bp, Acinetobacter baumannii
atgagcttcgtaccgcaaattaaaattccagcaacttacatgcgtggtggaaccagtaaaggtgtattctttaaacttgatgatttgccggaaaaagctcaagttgcaggtcaagcaagagatcaactcttgctacgtgtcattggtagcccagacccttatggaaaacaaattgatggaatgggtggagcgacttcgagtaccagtaaaaccgttattctcgccaaaagtacacagccagatcatgatgtcgactatttgtttgggcaggtttcaatagatcaagcttttgtagactggagtggtaactgcggtaatttaacagcagcggttggttcatttgcaatttcaaatggtttggttgatgccgatcgtattcctgaaaatggcctttgtactgttcgaatctggcaaaaaaatattcaaaaaactattattgcgcatgtacctatcatcaatggccaagttcaagaaaccggagactttgaactagatggggtaactttccctgctgctgaagttcaaattgagtttttagaccctgccgatgatggtgaagagggcggtgatatgttcccgacagggaatgttgttgaccaattagatgttccagagattggtagttttcaagccacatttattaatgccggtattccaaccattttcttaaatgcagaagatttaggctacgaaggtactgaattacaagatcatattaatggtgatgcagcagcattagcacgttttgaaaaaattcgtgcctatggtgcagttcagatgggcttaattaaagatatttcagaagcagccgcacgtcagcacacaccaaaaattgcttttgtctctaaaccaaaaaattacacagcttcaagcggtaaaaacgtttcagagaacgatgccgacttactcgttcgagctttgtcgatgggcaaacttcaccatgccatgatgggaacagcagcggtagcaattggtacagcggctgcgattccaggcactttagtaaatttagcagctggtggtggagaacgtgaagcagtacgttttggacatccatctggaacattacgtgttggtgcccaagctgaacttacaaatggccaatgggtggtgaaaaaagccattatgagtcgtagtgcgcgtgtgttaatggaaggttgggtacgcgttccgggtgacagtttctaa

SEQ ID NO: 64762 - DNA, 912 bp, Acinetobacter baumannii
gtgtcatcactctctcaagttaatgcggatgttttaaaacaagctcaacaacgtattcaacaagatttattgacgacactggctgcattctcaattcccgaacctttaaaaagcgctgtacaccatgcagttatgctcggtggaaaacgtgtgcgtccggctttgtgttacgctacagcttctttacaagataatccaaattttgcggctgctcgccgtgctgcggttgctgttgaactcatccattgttattccttagcacatgatgacctgccttgtatggacaatgatttgcttcgccgtggtcagccaacgtgtcatgttgcatttggtgaagataccgcgttacttgcgggtgacattttacaatcaatggcttttgaagttttagggagccgtttgtttgatgagcaagggcagggaacggatgctgcaattgtcttaaagcaaattcaaattttagctacagctagttctaaaatggtttgtggacaggttttagacttacaagcggaagctaaacaaatttctcaagacgaactagagaatattcaccgtaataaaacgggtgcgcttattcaggctgctattatgatgggggcagtgacaattttctcgggtacagatcaggcaattccaaaactacgtcaatatggtcaagcaattggactggcttttcaggtccaagatgatattttggatattacgtcgagcactgaaactttaggcaaaaccgctggtaaagatgaacaagtacaaaaatcgacttatcctgctctaatgggactagagcaagcacagatttatgccaaagaattgcatgatcaagctttcgatgccttagcgcatttcggtgaaaatgcaaaagaattagttgagatttcacaattcctgttagctcgtactaattaa

SEQ ID NO: 64763 - DNA, 369 bp, Acinetobacter baumannii
atgaatggtgaacagcttcatcaactcgcaatagaggcggcgcgtaatctcccttttagtgagcaaactcatccatttggtccagagtatgaagtttttaaaattttagaaaaaatgtttatgctgacagtggaagtgtctggcataaaaatgattaatgtcaaatgtgacccttataaaagtcaggaatatcaggaactctatccatttattattcccggctatcacatgaataaaaaacactggatttcgattaaaccgcataaaaatttaacaagcgattttctccgagatttaattggcgactcttatgacttggtcgtaaaaaagcttcctttgaaagatcagaaaagattaaacaaccaataa

SEQ ID NO: 64764 - DNA, 855 bp, Acinetobacter baumannii
atgccagttggtactattattgttttagcctttttggcttttgttgctgttaccatttttaaaggggtacgcattgttcctcaaggttataaatggattgttcagcgtttaggaaaatatcattctacgcttaatccggggcttaacttcgttattccttatattgatgatgtagcctataaagtcaccactaaagatattgtgcttgatattccatcacaagaagtcattacccgtgacaatgctgtattactcatgaatgccgtggcgtatatcaatctgactacacctgaaaaagcagtgtacggtattgaaaactatacatgggccattcaaaaccttgtacagacttcactacgttcaattgtcggtgaaatggatctagatgatgctctatcttcacgagatcacattaaagctaaactaaaagctgcgatttctgatgatatttcagattggggtatcactttaaaaacagtagaaattcaagatattcagccatcttcaaccatgcaagcggccatggaagctcaagccgctgctgaacgtcaacgtcgtgctacagttaccaaagctgatggtgagaaacaagctgcaattttagaagcagatggtcgtttagaagcatctcgccgtgatgccgaagcgcaggttgttttagcagaagcttctcaaaaagcgattgaaatggtaacaagtgccgtaggtgataaagaaattcctgttgcttacctgttaggtgaacaatacgtcaaagcaatgcaagatatggcgaaatcaagcaatgccaaaactgttgtgttacctgccgatgttttaaatacaattcgtggcattatgggaaagcataattaa

SEQ ID NO: 64765 - DNA, 462 bp, Acinetobacter baumannii
atggagtttgttgtagaaccttggcactggtttgtattgggtatcttacttattctttctgagctgattctccctgcctttgccgctctctggtttggtattgcagccataatggtttgctttctctattggttatttccagatatcagccttactactcaaatagtgctgtggattgtgttatcggtgctatgtacccttctctggtttaaatttattaagcctttatctattgataaaactaaagcaggtttacctcgagaagcgactattgggcaaattggtatggtgattcagaccggacttgctcatgaccaaattattgttcgtttccctatgcctattttaggggccgatgaatggaactgccgaagcaccacccctgttaaggtcggtgatcgggttcgagtcattgatatttcgggtaatgacttaattgttcagccccacagcacttcataa

SEQ ID NO: 64766 - DNA, 918 bp, Acinetobacter baumannii
atgaaaattgctcaatttgccagtatcggatttatctctttagccctattcggctgtgataagttcagcaaaacaccaacaccgaccacttcagttaaagcgcgcgaaccagtgattgcacttgcattgggtggcggtggagcaaaaggattttcacatattggtgttatcaaggttttagaatcacatggtattaaaccgaaaattgttacgggtacaagtgccggtagctttgtaggcagtatctatgccagtggacaaacgccttatcaactccaaaatcttgcgcttaaattgcaagagtctgatattcgcgatttaaccctgaatcgccaaggtattattcttgggcaaaagttacaggactatgttaaccgtaacgtaggtaacaagcctattgagaaattcccaattcgttttgcagcggtagcaacccgtcttgataatggacaaaaagcagactttattaaaggtaatgcaggacaagctgttcgtgcatcatgcagtattcccaatgtatttgtaccagcaaccattggtaagcagaaatatgtagatggcggactggttagcccaattccggtcaaaacagcacgtgatatgggtgctgatattgtgattgcagttgacatttctgcacgtccggcaggaaaccgacctgcgaatatgtggggattgcttgatcaaactattaatattatgggtcaacaaagtattaatgaagagttaaagcaagctaacgtggtgattcagcctaaagttgggcacttaggtacactcgatttaaaatcaagtaatgaagctattttagaaggcgaaaaagctgctcaaggtcaaattcgccaaattgaaactgcaattgcaaatttcaaaaaatctccagccgcatttaagcctgcgccacgtcctaaattttaa

SEQ ID NO: 64767 - DNA, 1305 bp, Acinetobacter baumannii
atggatctattccttaatcgtaaatcgtttgttgttaaaagtttagctattacagtaacagctttaatgatgagtggggcaaatgcggcaacttctgataaagaggaaattcgaaagcttcgtcaagaagttgaagcattaaaagcattagttcaagaacaacgtcaagtacagcaacaacagcaacaagtacagcagcaacagcaagtacagttagctgaagtaaaagcacaacctcaacctgtggcagcaccagtgtctccattagcaggatttaaatctaaagctggcgctgatgtgaacctttatggttttgttcgtggcgatgctaactatattattgaaggtgcagataacgactttggtgatgtaagtaagtcagacggtaaaacacatgataaattacgtgcgactgctaaaacaacacgcctcggtttagattttaatacacctgttggagacgacaaagttggtggtaaaatcgaagtcgattttgctggttcaaccacagattcaaatggctcattgcgtattcgccatgcttatttaacctataacaactggttgtttggtcaaacaacttcaaacttcttggctaaccatgcaccagaaatgatcgacttctcgacaaacattggtggtggtactaaacgtgtacctcaagtacgctataactacaaactaggcccaactacacaattatttgtttctgctgaaaaaggtgatagtactacttcggtaacaggtgatagtattaagtatagcctaccagcattaactgctaaaatcactcaaggctatgcagaaggcagaggttctgcttcagctcgtgttctggtagaaaattataaatcacaacttgctgatgatgataaaactggttggggcgttgcagttggtactgactttaaagtgtctgatcctttaaaactctttgctgacgcatcatatgttgtgggtgataatagttacttgtatggtagtaactctccatacgcagtagatgggaattctattgagcaaaatgaatttgtagcagtacaagtgggtggaacttataagattttacctaacttacgttctactttagcgtatggtgctcagttctctgatgatggcactgattatgcgagattaaatgcctctgcaaatgaaaaagttcaacaagcatggatcaactttatctatacgccagttaaaccaattgatttaggcgttgagtatgtaaacggtaagcgtgatacctttgatggtaagtcttacaaagataaccgtgttggtttaatggctaaatatagtttctaa

SEQ ID NO: 64768 - DNA, 309 bp, Acinetobacter baumannii
gtggccgcagccgtcgtgatgatgacgatgaagatgatgatcgcggtcgttcaggtggtcgaggccgtggccgcagtcgttatgatgatgacgatgaagatgatgatcgtggtcgttcaggtggccgaggccgtggtcgcagccgtcgtgatgacgatgacgacgatgatgaccgccgtggccgttcagatggtcgtggtcagaactctcgtaatcaaaaacgcgatgcttatggacgctttacgtcttaagcaaacagtttttgagaataaaggaggcattatgcctcctttatttttattattttaa

SEQ ID NO: 64769 - DNA, 237 bp, Acinetobacter baumannii; identical to SEQ ID NO: 44371

SEQ ID NO: 64770 - DNA, 612 bp, Acinetobacter baumannii; identical to SEQ ID NO: 62976

SEQ ID NO: 64771 - DNA, 456 bp, Acinetobacter baumannii; identical to SEQ ID NO: 62975

SEQ ID NO: 64772 - DNA, 1617 bp, Acinetobacter baumannii; identical to SEQ ID NO: 62717

SEQ ID NO: 64773 - DNA, 3465 bp, Acinetobacter baumannii
atgagtgttatgccagatacttcacgtccccaacaagcgccacaacgtgtgatcaaaacacgccgtgaatataatatttgggtggcagatgaaagtatcgaagattatgcactccgctatgcacctacctcagtacgaaaatggtcgccttggacggtaaccaatactgcaatttctacagttagctttttggctatggaagccattggggcaaccatgctttggcagtatggctttagcaatgcattatgggcagcaattgtcgtatgtaccattatatttttaaccagttggccgattagttactacgccgcaaaatataatgtagatgttgatttgcttactcgtggtgcaggttttggctacattggctcgaccattacatctctgatttatgccagctttacctttattttgcttgcgtttgaagccgcaattatggcgatggcacttgagctggccttaggcattccgcaagttattggttacttaatttctgccttagtgattttgcctttagtggtcaaaggcattggttttattaacaaagttcaggcagtcactcagccaatctggctcttattgctgttattaccgtggttttttgtactttggaaacaaccacaaattttaagtagtagtctgcattttgttggggcagtttcaaactcgaccgattttaatctgtattactttggtgcggcgtgcactcttattttttcatttgtgatccaaattggtgagcaagccgactatttacgtttcttaccgcaaaaagaaaagaatagaactgcatggcgttttgccgtttttttaggtggtccatcttggattatttttggatttttaaaagttttgatgggcatgctgctgatggtgttggcttttcagctgtttattcctgtctctgaactagacaatccgacttatttatattgggttgcttatcagcagtttattccaaatcctcagctagcgttaatattgactctagcactggtttgcttggcacaaattaaaattaatatgaccaatgcctacgctggctctttagcttggtcaaacttttttgctcgtttaactcatagccatccgggacgaattgtctggcttctttttaacgtgtttattgccattgttttaatggaaatgggcattagccatgcagttgaacgcattttgggactatatagcaatatcgctttggcatggattggcgccgttgttgccgatttaattatctgtaagcctttaggtctaagcccgaagggaattgaatttcgccgtgcttatttatatgacattaaccccgtaggtgtgggcgcattactcatcgcttcagtgttatcgatgctgagctatttgggctttttcggtctcatggcgaaaggtttagcaagttttattgctttggggagtgcggttttatgcgttcctgttattgcttacctaaccacaggcaaatattacattgcacgtcagcctgaaaaaattcaggcgactttggttgctaactgtgtcgtgtgtgaacgggactatgagcttgctgatatggcgggttgcccagcctataacggtacgatttgctctctatgctgttcactagaagcacgctgccacgatttatgtaaacccgatgcacgttggtcagtacaactcaaaaaagccatttggcattatttaccagaacgttgggcgagccgtttaaatagcagggtcagtttatatttattactgactctagggctgtctattgttttggcagtgagcttgagtctggtttatatccaagaaaaaacctatttagaaaccattaatgccgcagccgttccgcagttatttacactgtttgtaaaaatttacaccattttatttttattgatgagtgttgcagcatggtggttagtgttaaacgatgaaagccgacgtaatgccgaaatcgaaacgcatcagcaaacagcattattgattgatgaaattgctgcccatgaagtcacttcaaaagacttacaagacgccagaatagcagcagaacgggccaatgatgcaaaaagccgttatgtcattggcattagccatgaattacgaacgcctctaaatagtattttgggctatagccaattacttcaaaaacaagaacaactctctgaacaaggcaaaatggcgctcggggtgattagccgtagtgggcagcatttgacttcactcattgacggtttactagatttagcacgcattgaaacaggcaagatttctttaaatgtagtggatgtgcatttccccaattttattgaacagattattcaaatgtttcagccacagtttgaacagaagaatttacagtttgtttatgaaattggagaaaacctaccgcactacgttcgtaccgacaaaaaacgcttagagcaagtgctcatcaatttactgggcaatgctttaaagtttacgacaagcggcacaattactttaaaagtcgaataccgttttcaaacggcttattttgaaattagagatacgggctgtggtattgcagaggcagatttagagcgaatctttaacccgtttgaacggggcagcaatgtagtacaaggcggatttaccggaataggactcggactacccattgtaaaattgttggtcgatttactcggtggccagctatctgtgaccagtcagctcaatcagggttcacaatttaagattaagttttatttaccttcaaaagaagtagttcatccaatttctaatgtctactccaaccaaattacgggttatcaaggcgaacgaaaacgaattttggttgtcgataatgaagctgtggaccgaggcctagtcgctaattttctcaaacctttgggatttatgattgaagaagccgagtcgggcattgattgtttaagacgtgtacctatttttcagccgaacctgattttgatggatttaaatatgcctttgatgggcgggtgggaaacagcacgattattgcgtcagaataatattaccaatgtgccgatcttaattatttcagcgaatgcaggagagcgtgaagtcaatccacaagatgcggtcttaagtgaagactttatgttaaaaccaatcgatctcaatttgttgctgagtaaaattggagataagttgggcttggtgtggattgattccaaatcagagacactccttgaaaataatgaagttcaagcactcgatttaaatatatataagcaagagcaagttgctgttcatacgctaatccaacaaccggaaaataatgagctgctcgattttccgcaaagcttacaacagttaaatgacttgattggacaggggtacattcgtggaattcaacagactttaacgcaatgtcgtcaaaattttccaaagcataacgagttatgggaacagcttgaacaggcgattcaaaaatttgatttaaaacacgcccaacggttaattcaggataagcaatga

SEQ ID NO: 64774 - DNA, 345 bp, Acinetobacter baumannii; identical to SEQ ID NO: 48618

SEQ ID NO: 64775 - DNA, 279 bp, Acinetobacter baumannii; identical to SEQ ID NO: 48617

SEQ ID NO: 64776 - DNA, 1413 bp, Acinetobacter baumannii; identical to SEQ ID NO: 48616

SEQ ID NO: 64777 - DNA, 1071 bp, Acinetobacter baumannii; identical to SEQ ID NO: 48615

SEQ ID NO: 64778 - DNA, 297 bp, Acinetobacter baumannii; identical to SEQ ID NO: 48614

SEQ ID NO: 64779 - DNA, 138 bp, Acinetobacter baumannii; identical to SEQ ID NO: 48613

SEQ ID NO: 64780 - DNA, 657 bp, Acinetobacter baumannii; identical to SEQ ID NO: 48612

SEQ ID NO: 64781 - DNA, 723 bp, Acinetobacter baumannii; identical to SEQ ID NO: 48611

SEQ ID NO: 64782 - DNA, 150 bp, Acinetobacter baumannii
atgaatggcccattattaagccttgatcgcaccgatttaaaaattttggatattcttcaaacagatgggcgtatttccaacagcagattagctgaactatcctcttcgtcggcagcgtcagatgtgtataagagacagcaccaaagatga

SEQ ID NO: 64783 - DNA, 201 bp, Acinetobacter baumannii; identical to SEQ ID NO: 48494

SEQ ID NO: 64784 - DNA, 435 bp, Acinetobacter baumannii; identical to SEQ ID NO: 49446

SEQ ID NO: 64785 - DNA, 408 bp, Acinetobacter baumannii; identical to SEQ ID NO: 51374

SEQ ID NO: 64786 - DNA, 1683 bp, Acinetobacter baumannii
  misc_feature (1667)..(1676): n is a, c, g, or t
atgacttcaatgtcgaacactacccaaaagcactttattgttgagcagtttcctttaccgacttgggtcagtgatgaaaaaggcttaattttatactgcaatacggagtgtacaaaatactggcgcgatacttctcctccattgtttcaacaatggctagatttcgtgtaccctgccgatttagaagaagttaaaaacaaatggttagatgcgatacggttccgatcaagaattgaatttaaatgccgtcttttgcataaaacccattattatcgatggtgtaaaatttctattcaattgtcgaaataccatgaatcttctcaagaaaatgaatggtttattagttttctagatattgaccaagatatacaagagcagcaaagcttacgaaaagatatcgatatacaaaatcaaatgctcgatatcagtgtcgattgtattaaggttttaaatacagatggcactgtatctcatatgaataaatcaggatgccttgcattaggtatacctgtagatgaaaaaaaattcggtatgcgatggttagatcttttacccccccatattcgtaaacgcggaagaattgccttaaaaaaagccttacagggtaaagtggcccgattcgctggcatgagttgcttaccaaatcaagatccagaatattgggataacatgcttaccccaattcaacatacaaacggcgaaattattcagatattgtgtgtttcgcgaaatgtcactcaacagtatcttactgaaaaccgattaagagatattagcgagagagatgaactcacaggtttatttaatagacgttcatttaagctacaactaaaacgcaccctagcttactcaagagaaacccaaaccagtgtagggctacttttaattgatctagatcatttcaagcatattaatgacactataggtcatagtgctggtgaccacttattaaaaatactttctaaacgttttaatcagtgcgtagaccctgaaagatgttcagttgccagattaggtggtgatgagtttgcagttattgttagccatttggaaaatgagaatgatgttcgtgaacttgctgaagtattgcttcaacaactcaatcaacccattacatatgctgggaatgtgctcaacggcggcatgagcatcggctgcgccatttaccctcaagatgcagttgatcaatcgagcttattaagttgtgccgatatggcattacatgacttaaaagcccgtggtcgtggcggcatacgtatgtataacccaagtatgatgcagttaaccgaggcaatcgcctctcaactcaacattgctcgccagcttattcgtcatcataccattcagccctactatcaacccaaagtcgatctaaaaactcatgctgtagtgggctttgaagcattactccgctggcatacgacttcggcccaaagaggtttgccttctcagattgctgaagctttaaaagactacgatttagccagtaaaattggtgaaatcatgcaacaacaagttttgcatgatattgctaaatggataaaattaggttttgtgccgcttcctgtttctctaaatgccgcaccagttgagttcttaagagataattatgctgaacgtttattaaaaaagattaatcaacttgaaattcctacccatttaattgnnnnnnnnnntggctaa

SEQ ID NO: 64787 - DNA, 1404 bp, Acinetobacter baumannii; identical to SEQ ID NO: 45796

SEQ ID NO: 64788 - DNA, 699 bp, Acinetobacter baumannii
atgggtgctgcttggcgtaaccctcatgagcgtgatatgccttatgttttagaaatggtacgtgaagttaaagcattaggtatggaaacctgtatgactttaggtatgcttaatcaatcacaagcagaacgcctaaaagatgctggtttagactattacaaccataaccttgatacttctcgcgagtattattcccacatcatcagcacacgtacttttgatgaccgtttgaatactttagattatgtacgtcaagctggtatgaaagtatgtagtggcggtattgttggtttaggtgaaagccgtgaagatcgcattggtttgttacatgaattagcaaccttgcctattcatccagaatctgtgccaatcaacatgcttgttccaattgaaggtacaccattagctgatgttgaaaaactagatgttattgaatggattcgtactattgcggtagcacgtattattatgccgcatagttatattcgtttatctgctggtcgtgaatctttaagtgactcagatcaagctttagcatttatggcgggtgcaaattctctgttctctggtgataaattacttacgacgccaaatgcaggtgaaggtaaagaccaagcattatttaataaactagggttaacagctgaaaagccaaaaccaactgtttctgatttatcagttgatgcgatgagtgcttaa

SEQ ID NO: 64789 - DNA, 1194 bp, Acinetobacter baumannii; identical to SEQ ID NO: 62586

SEQ ID NO: 64790 - DNA, 1014 bp, Acinetobacter baumannii; identical to SEQ ID NO: 62731

SEQ ID NO: 64791 - DNA, 870 bp, Acinetobacter baumannii
atggaaactgacttaacagttgagcaagcattcgaactttctgatgcttctgctgaacgttcagctgctggttgtgcaatcacactttcagaagagaaagttgctgagtacttacgttctaacatcacaatgcttaagtggatgatttcacaaggctatggtgatgcacgtacgatggctcgccgtgttgaaaacatggaaaaatggttagcaaacccaagcttacttaaagctgatgctgatgctgaatacactaaagtgtatgaaattgacttgtcagaaatcaaagaacctatcctttgctgcccgaacgatccagatgatgcgaaacttctttctgacgttcaaggcgacaaaattgatgaagtattcatcggttcttgtatgactaacattggtcacttccgtgctgctggtcagttacttgagaaagtaccaagcggttcattaacaactcgtttatggttggctccaccaacacgtatggacgaacatcagttaatggaagaaggcttctataacacttatggccgtgctggtgcgcgtacagaaatgcctggttgttcattatgtatgggtaaccaagcacgtgttgcgccgaacacaactgttgtttcgacttctacacgtaacttccctaaccgtttaggccaaggttctaacgtttacttagcatctgctgagcttgcatctgttgctgctgtacttggtaaattaccaactccagaagaataccaacaatatgcagctcaaattgacagtatgtctgctgacatctacaaatatttgaatttcgaccaaatgggcgaatatacaaatgctgctgataaagtagatactaagaaaattgctgctgctcagttgacttaa

SEQ ID NO: 64792 - DNA, 468 bp, Acinetobacter baumannii; identical to SEQ ID NO: 51207

SEQ ID NO: 64793 - DNA, 225 bp, Acinetobacter baumannii
atgctattggatattaacctctcgaacttacgggaagagttaaaaatatctcaagctgaaattgcaaaaaatctaggtgtaagccaagctgctatttcaaaacgtgaaaaattaggtaaagatcttaagatttcatcattaaaagaatatgttgaagctatgggtggcaaagtaaggttagatgttgagttacctaacggaaagcatgttgcgatatctatttaa

SEQ ID NO: 64794 - DNA, 381 bp, Acinetobacter baumannii
atgatgaattacttaggtattgatgtttctaaggaaaaaatagattgttgtttgtttattaatggtatttcaggtaaagggaaatctaaaatattttctaattctgaatctgggtttattaaattaactgattggttatcccacttaaatatcaatacaaatgatttattagtaacacttgaagctactggaatatatcatgagaatctttgttattttcttcatgatttaaaaatcaatattgctatatcaaatccaatgcgtactcgtcgttttgctcagggtatgtctatattaactaaaactgataaggttgatagtgaggttcttgcaaaatacggggctttagctccaattaaatattggaagcctgacttctaa

SEQ ID NO: 64795 - DNA, 1428 bp, Acinetobacter baumannii
gtgtggctctttaatgtcattaaaaatggaactctggtcgacaatcaaatttatacagttcaagatggaatactgtataaccgacgattagataaccctgttaagctaaataaaagggctagtggacaatggacgtatccttataataacgaccaagcagtttggcactttattaataggttatctactgatgtcaatgattccttaatggagcgtggtgctgatgctttggttctctttaacgatagtgaatatgagcataatactgatgacgctttattaagagttagtggtattaatgcagctaactttactcttaccacaggaaatcttattggctttattaagcagggagattattcattaaagattagttcgcgatttggggataatttcttaagatttattatagctgacgctgacggatttcttgaactggagaatttcggaggtcaaaatataggggagggttatgaatggctccttgcatatctttggaacattaaatttaagcgggcgtatcgattagggcttccaaaaacatatataacaaaaaatgagaagttagggcgagtgcgtgggaagattgatgttgttgattattttaacaataagatgttaggaaaacatttatgtagttatagagagcatagctatgaaaacccttcagcttcacttttccttgctgcttatgaaattatagaacattactcattttgtcagcatacgaggaatatctataatacatttcttattgctaataaagggataaaaaggacgagacaggagattttgcgaacgcaatatttcacaaatccattttataatgattacaacgttcttatagatttatctaagaaaatcataagtcaaaaaagttcggattttagttcagatgaagcatcgagctcatttctatttgatgtatctatgctttttgaatattttattcgtaagttaataaaaagagcaggaataattgtgcgtagtaaatatgcgcaaattcataaaatatcagcaggtatcaatactggatatatgaggaaattagagccagatcttgttctggaaagtgctgaaggtctttatatatttgatgttaaatataaaactttcgatagtagatttggcgtaggtcgagaggatctatttcagctccatacttacataggtcaatacgctaatgaggcgaaaatcaaaggatgtggctttatatatccaatatcagagaaaagatgggcatcacttcatttagacagtactaatggagtaatttctactaatataaaacaacatggcgtggatattccttttcatgttgtattctttaaaattactgaatgtgatttagaatttaatctgtcgatgaggaatgagagtttagatttttgtacacgcttaaaagaaaaaattatacaaatggtttaa

SEQ ID NO: 64796 - DNA, 2037 bp, Acinetobacter baumannii
atgaaacctttatttgactctcaaattgaagttgtagaagttcaaagaggcgaagattggaatgactatcgacctgcacgtccacaggatttcgtaggaagaactaaggatattcaagagatttttgatttttttaagaagattagaacaaatgaaataaatactaggatttttgctattactggtaattctggattaggcaagagttctttgattattactctttctgaaaaagctaaaaatcgtcatcaaaaacaaaaattatttctttacgctattgatgttcgtgcggctaaatcaccagaatatatttactccgcattgttaaaaactttacaagaggcccaaataaaaggttttggtgatccaactattaaattacaaataactaacgtaaaccatcctttagagtctgaatctatagctaaatacttgaatagccttgaaaggtcaaagcaattagtagtattagtttttgaccaatttgaagagttgtttagtaaaccagagttattcgaactatttaataatgcaacgaacattctattagatgcggctagtttaaaaacaaatttatgcataggttttgcatggaagactgatagtacaacccactcggaacatcctgcttatttcttctggcatcgtttgtcagattatcgaattgtaagaaaattaaatccattttctgttagagaatctaatgcggtcataaataagtttgaggaagcaattggagaaaaagttcatagcgacttaagacataacttaattgtaagtagtcagggttatccatggttgttaaagaaactatgcattcatttacatgaaaaaatattgtcaggccaaaaacaagaggagcttttagagaataaattagatatctcaagtcttttcgctagtgatttagaagagttaaatcctaatgaagttagagctttaaaatttattgctcaaagagcacctgttgatcttgttgatacaatcgatacatgtggagaagatgtagtcacaaacctgcttcataaacgactaatcattaaaagtggtattagattaaatatttattgggatatttttagagaatatatattaacagagagtattcctattatttctcttcgctatttaccatcaaatgattttcttgctatctggaatgtagcgcaacatttaacaggcactccaatttccattcccgaattggaaattaaaacgaatttatctgatggtactattcaaaatattggtacagacttactgacatttggcattgcagtaagggagaatagccaatattcattgtcagaggaaatattagctacagggaattccatggaaagtattctctcattaatgagagaaaaatttaaaaaacatattattactttaagtttaaaggacttacctaacggtacaaatattactttggctttctttatagacttaatgaaaagtatttactctaacaatgattatgcagataaaacatggagatactatgctatcagaatgtgtaaatggctagaaattacgggctttttatctcggtcaattgaaacatacacatggttttataaagatataggttctgtaaaaacatctgtcagtaacgttagacgccagcaatcttcttttttcataccaagaaatagtcctcaattaactataaatatttataatgaacttaagggtaagaaaatttctgaatacaaaaatggtagtagtaatgccaaagctgtggaaattttcaagagatataatttagttgatgatgataataaaattagagatgttgaagatatcgaatcttatctttacgatgcgatttcaaatgagttaagtatccaagaaaccatattaataaagaaactgtattcaggaactaaaaaattaactgcatcattcgttgggcagctcctgagggataagcatgatattaagtgggctgaaggtactgtggagtatgcaggtaaaaagctaaacagttggggagcctgtaaattattttgtgtaagttccattttttataaatga

SEQ ID NO: 64797 - DNA, 291 bp, Acinetobacter baumannii
atgcttcttgataagataccggtaagagaagttagaagacggttaaatctgagcgggacgtcaattttaagaaggtggctcgctcagtatcataaagaagggattgccgggtttaatactacgaggatttataccaatatggttaaacaagataaaaccaaaataactaagcctataaaagaagacaaagataaatctcaacaggaactcattgatgaagtgaccgctttacgagcggaggttgcctttttaaaaaagctaaaagccttaaaactgaagcaacgtacttaa

SEQ ID NO: 64798 - DNA, 1524 bp, Acinetobacter baumannii
atgttgaattttcctacaccatatcccaatgaattaatttatagcacgatagctagagctggaattcatcatgctattacaagccctaagcaattacttgaagaagtatttgctaatcgtaaggttattgccacgattgatttacctagccatctcatatgcctgttaacgcatttatcaccgaactacacacttgaaaagattgtttatgaacatactctttttccaatccacgctctattttctcctgaaaatacacggttaaaatgccttcactggatggggagtcaatcaaaaggttctatccatttagcattaggcgttgcggcatccaaagttaagcagataacaatgcatcgctattgtcaccattgcttagaagaacaatatcaccaatatggagaatttttttggtcaagactttggtacattcaaggcgcaaattgttgtgacaaacataaagttaaattgtcagaatttttaacaccagccgatttgaatggacgacatcaatttattcctgcaagtttcatcttagatcgcaagcaaccttatacccctgctcatgagttagatctaatcgtgagtagacgtgttgatgaactcttaaaacttcctccaacaacatcacctacctttcatcaatggagtcaattttatcaacgtattgcaaagcgattaggtttcaacaaaggttttaaacacattgatcattcaaaaattcatgtagccgttataaaaatatgggatctaaaatggttacagcaacatcatctagatgaactggagtctgaaacatgttggcttagagctatttttagaaagcatcgtaagtcattcagttatcttgaacatattattgtcttagagacgtttttacctaaaggctggacatgggtagccattctggatgaaattcatcaattacctgctaagcactctaatactgatacacctagtgaaagaactaagtgcaaagacatattgatgctcaaagaaaaacgtaatgaatggatgtctttgattcaaaattttggaataaagccgtctagattcaaaaatgcagccttatatgcatggctttatcgcaatgataaaacttggttactcacaaaaaataaaagctttcacactttgcccgcaagtattccaaagaaagttgattggcctctgagggattggcacatggtgaggcgattattcaaaatattctatcaatcattagacgatttgagtttacctaggcaatctagaaactggtatctcaagcaactaccgcaacactccaccgtagagaaaaacctatatcagctgcccttaacacataaatttttgagtacattttcagaagatattagctcatatcaaatccgaagaatcactcgaacgattacgcaatttcaaaaaattaatcaatacccagcgagttggcaattattacgatactcgggattaagtgaagagcgattaacagatggagctctcaaattcctaaatcaaattaaaaggattaatcatggctaa

SEQ ID NO: 64799 - DNA, 327 bp, Acinetobacter baumannii; identical to SEQ ID NO: 56662

SEQ ID NO: 64800 - DNA, 2142 bp, Acinetobacter baumannii
atgctgcgaatcaatgatgtatatcagtatcaagatctctcgattagaatcctcaaaattttatctgaacatattgtttggattgatatcaatgatgtgaaagcacttcctgaaatcatcagcaaaacggaattatttcatgccattgaatcttttgaggtgtttcgaattgaagatccctttcaagatattgccttcatacaacccaaaaaagattccacctctcaacgaaaaagagatgaaaattacaatttaatcaaaaatatagttgatcatgaacagttttatataccaagtgcccgatcctcactaattaatgaaattataaatagtaagaaatctaccaaacagacaatataccgcttgcttagacaatactggcaaagagggcaaacaccgaatgctttgatccctaactaccaaaattcaggtgcaaaagggagtaaaaaagttgcaagtcaaaaattaggaagaaagcgcctctacaaagaaggtactggagctattattacacaggagattgaacgcctatttcatctcacgattagcaaatacttattatcaaataagaaacatactttaaaatatgccaatcgggaatttctaaagctatatcgcacacttcacccagatatccctgaaaatgaatatcctacactacgccaatttcagtatttttatcaccgagaatacaatcaagtaactcgtttacagaagcgatcaaacgacattgagtactctaaagatttacgccaacttcattctacagtaaatacacaagttctcggccctggttcgcggtatgaaatagatgcctccattgctgatatctatttagtttccaatcttgatcgaagccgaataattggccgaccaacaatttacttcgtcattgacgtctttagtcgtatggttactggcttatatattggcttagaaaatgcttcttataaaacaagtatacaagcactttattgcgcttttacagataaagtcgctttatgcaaaaagtatggaatagatattacttatgaaaactggccttgtatcggcttgcctgatgcgattttggctgaccgagccgagttatttggtcatcaagttgaaaatttagaaaaaagtttttcgataaggcttgagaatgcaccaccctatcgtggtgatctaaagccaattgttgaaagcagattcaaattaatacaagctgaatttaaaccctttgcaaaaggggtggttcaagatgtaatcacaaaaaaacgaggtggaaaggactaccgtctagatgcaacacttaatctagatgaattcactaaaattattcttttatcggttctgaaatataaccaatttcaccaaatcaacaattatgatcgtgatatcgatctaccacatgacctaccagccgtcccaatggcgttatggaactggggaatacagcatcgtacgggaaaactacgaacagcttccgatcaggctgtttatgtcgcattattgcctagagaaaaggcaactttatcaaatcgaggtttgaaaatttttggtgtgacttatacctgcccagaattatatgaaaagggttggctacaccgccaaaatacaataaatcgacccaagtttttatatgctgcctatgatccaagtaatgcagaaaaaatttatgtcttctatgaacaaagtagtctgaaatattgggaagcaactatttccgactattcccgtgaatttaaaggctatagtttttgggaagtttggcaaatcaatagtgttcagaaaaaaacttttgaaaaacaaaatataaagaacaacttagctcaatctgagttagagcagaaaatcatggatattattcaacaagctagtagcgaaacaccattgtctactcaaagccagaaaagtcgaatctctgagattaggagtaatcgaacccatgaaaaagagcttgaacgttctaaattgaaaggtacgacttccagtattaatgacactgctacaagggttatgaagcccaaaatcacacaagatgctcagagcaatgtcattcctatgccaaagcggaagaagtcatctgacgaacttgatgaggatttaaagttacgtttccctctataccacgatttactcagtgaagatgatgagccataa

SEQ ID NO: 64801 - DNA, 1518 bp, Acinetobacter baumannii
atgctaaatttccctctgccatatcaaaatgaactcatttacagtactgtggctagggctggaatccgtcttgctttaagcagtccaaaacaattattggatgaaatttttcagaaccgtaaagtcattgctacagttgatctcccttgtcacttaaacgctattatcaaccaatttcctagcaatcagttaagcctagaggatattgcatatcagcatacgctcttccctatctatgccccctttgtacctgaggatagacggcaacagtgtttacaatggatggctgaagtatcccaaggctcaattcatcttgctctgggtgttaatgcgtcacgacttaaacccatccataaactccgctactgcccagcctgttttaaagaacagttagaattatatagtgaactttattggtcacgcttatggcaaatacaaggtgcttgttgtccaatacatggtgaacttattgactcaaccattgaactaagatcattacatcgacatgatttcatcacaccaacataccaaacgtgccctgagcaaattcagtcgaaagcgacatcagatagcctatttattacaaagaaattattagaattattgtctcttccgtcttctgagtcacctcattatgagcaatggacaaggttctaccatcagcttgctcaaaaaaatcattgtatacgtggtcgaaaccacattagtcacgacaaaatcttagacaaaatcattgttcgatggccttccaaatttttaggacaatacaatttaggcggcttaaaatctgaaacaagttggttacgaagtatcttcaggaaacaccgaaaaagttttagttatctggaacatctcgttgtgattgaagcattaagtaataaagaatggactttttcagcgattctagaacaagttaaaaatttaaatgaagactcgaaagacaataatagtcaaaatttaaatatatgtgtgcaccccaaccactttgaatatagagaaaaatggctaaaactggtcaaagaattaggtattaaacccgctcgttctatagatcaagccttatatgcttggctataccgtaatgataaagactggctattgaaaataaatcaaaccttccatcagggctttattccacagggagctaaagttgactggtacaaccgtgatcttacttatgcaagacaacttattcggctctacaatgagctcatttgggatgtagatagtcctcgacgctctgcaaaatggtggcttacacaaatcacccatgtttcgactattgaaaaaaatttatatcgtttacccattactcaatcatttttgaaacgctataacgaagatattagtagctaccaaattagacggttaactcaagtttttattgaaataaaaatgcaaagccaagacttacctcgttggagaattttacgcaaagcaggtttgagtgacgagcgtatgacctctgaaacgacaaaatttctaaatatggcattacaatatttaaggttaaattaa

SEQ ID NO: 64802 - DNA, 1569 bp, Acinetobacter baumannii
atgaaaattaagaatttcccagaagatgcaaaaattacattcttaggtgaaatatttaaatttaatcacttaaaatcttggaatattaaattaggaatccatgctgattctgaactatccgtcaagcactcacggctatctaatttaccagcttttgcacgaggtcgatgtctgaatccaagtgacggtcaatgtcgtaaaggtgggtataaaattaatatcaatattcaatcaaacgaagattggaaagttaaagttgatccaaagaatagagggtattattttgaatttgattttaatagaggtagcgaacaaaacccagatcttctgcatatccgtataccccagattgaattagcacgcgttcttttctttcacaatgcctatttagcaaggaactgtattgatcaaggtatcttagcaagagagttttttgttgatcctatagatcagacaacgaccgttattcatgtgctaccacaccgcacatttcctttaggtcaattcaataatgagggcattcgcagattactctcatggatattattagatgaaaatgctaggcaatcctatgaaagtattgctcattacttcaaattagaagccaagcaatttgaagacaaaacatcatggcaatttcacttcacaccaccgcaactaataaatatctcactcaaaatgcttggtcgatttgattctacaaccaatgaatatttggtctttgaaattaccgatctacataatattaagacctctctgcctccaaacgttctttatgaaagccctgagttcaaatcaggcaaatcaacaggctctggaggaggctcttctggctctaatcaagggggagatgattcttcggtagatgatgatattgaaggtgactcaaattcgaaattagtacaaatagagatccctcaaacatccttaagtttttcgaatcctagtgaaacgagaaaagtcgtgaagaaaaaaacgaaaggcggatcaggtggacatcatgatgtgactgaatatgaagaagttggtgttggaacaggtgaaccaaccatgaatggaaatgggccccaaggtgaatttaatggattagaggatgacagcgacgtaatcgctctctatatgcaacgttttgatgcttttaaacttcttgtaaaacaacttgccttaaaacatcatctaaaatatgaagaaaaactgcactatttgcaaaaagttggacgttcacgtctgcatcgcacactagacggaaacaatcgatgcctacttgaggtcagattctttattgagaatcactggtatgcagtattagaaattgataccagtgataatgcaaaaccactctcaacattagttgtacaaatccatgatctcaatcaatggaatcataattttaaagatattgctaaaaagattgtaaaaaactctcttcgatggccatctgttgaaagcctgcaagatttcggagttccttatacgctaaatcatcctaaacatttagtagagctaactgaatctgatgatgagtttaatgggtggttacagaggatggaaaagatactcaatctttga

SEQ ID NO: 64803 - DNA, 2979 bp, Acinetobacter baumannii
atgcttaaagtatttaataacagaactgagcacacccacgaaaacgaacaattccgtagagttgctgaaataatcgagatatcttttaataagtatggatacaatggaatacttattgggaatccatttaacgaaacctgttatcgtttccgtgctgatgctatattatactatagcaacggcctaatacttattgatttcaaagattataaaggaataatcaaattaccccaaaattcaaacgagttcagttcgaacaaatggtataatgaaagtataaatgatagaagtaggttggagataaaggcgggtgctagttttatcaacccatttagacaattagtttcctatcgtaatgcttttagagaaatattagaaaataataaatatttgaatggaataaacccagcaagagtctgtattgcaaatattttttctggaccaatcgaagttcacaatgaggttccaagaaatctcccctactacaaactaatccaagaattagaattagctaattttatttatgattttgctagtgagaatacttacgaggaagacatcgcaaaagtcttgaaaagcatttttcctgccgaaagatgggataaaagcttagaaatttctatccctgaaaaaataattaaaaaagagatcattagaatagacaatgatatagagaaaaatatagttgatttccttaaggtggaagaaggtggaattcttgttttagaatctatgaatgctgatgatagagattcttggctgcgatttatagctgatgaagcagtaaatcataatattcctcaaattgaaaaatggtcgcactctgcgcgaatcagtaagaagatccaaatacgaagtggtattgaaacagaaggaatttacaatgttatttatggtggctctgttattgaagagcaaactcaagatttagaaaaagaggaacaagaagaagcattgcaggaagttatttctttgaaaaaaagcaatgatatcgatgaaaaagctttaattattattgctgaagctcatttgataagtcgtagccttagtcaatcagaattgttgcgatttggttctggtcgattattagaagatatcatcaaatttatagatactgaaagtaatcgcaagattgtatttattggagatccttattctttaacttttggaaaaaatgaagattctgcattgaacttggaaaccttatctgagttatacgataaagaaaaaattaagcactttcgcaaatctatagataaaaactattcaaatggaaaagagagtttgagaactgatttggcaaacagcattgaaaattcactttttaataatttgaactatagttttgatcaaactactttaattgatttacaagacagtaaccaaagaatccaaaatctacattcatggtttgctaaaccattttcaaatgaacctgataaagctgttttattctactcaaaaaaagattgttttaaaacgaacaagtggattaaaaaacaatgcttgaaaaacggagaaaacttagcatcagatgatttactcattgtgaataataatgtttctattcccgatgaaagcggctttcaaattccaaaacgaatcgtaaatggaatgttctttacagttcttcaaattaaagaaaccttgcaagaatccataaaaattcaccaatctcaaaatccgataatattgtcttttacaaaagtttgtgttagatgtttgagtatatcaggtttgcctgaaactgatatttggattttggacaattattttaatagtgaagacgatttgacaaaagaagaacaaattgctttcagagtttttgtaaatcgaaaaattgatgatgaaaaaaggaaactaaaatttgaagacagtttggaatacaatcgattattacaagacaagcaatataataagctttcaaatgaagaaaaagaagcaataaaaacacttgtcaagaactacaatttaccaaaagagaagaaagaaaaagttgaaacaagcagaaatacaagaaacttaatttcaacttactataagaagtattcaagaaatttatttttcttcgtaaaagaaactgacccatttgtcaacgcagtatttgtgaaatacggttgggcaattactgttcataaagcaattggttctagctacaatgaaattatcttaaaaggacatcgcaaagaaaatgatggaattacaaacgatagttatttccgttggttgtatagtggcgttacgactggaaaaaacgtaaatattatttcacctcaaacagtaaatccttttatgaattgtgtttttgaagacagttcaactaaaggtacttccacaaaatcaaaagaattattgatttttgaaaattacacagttgatacacggtttattgacaacgtcaaattacttgaaaatggaaatgtgattggtacaatttgtgaaatttccaagcaactggaactaaatggatatttactcgaaagcacaaaaaagttttcggattatctcacaaaagcattctattctatacctcacaacgaatatcaaaaattaattctgaatattgataacaaaggttccaaagataattttgctgttggtaatatccgtattgaaaaccttaacggtgctgatgaaagtattataaagcaatgtattgaagattgtttaactcaaaagaaaagtgtcagttcaataacagacgataaaccagaattaccatcagattttaggcaagaaatttattctgcttggtttgaaaactgtgagagtaaaaacattataataaaaattatacaaagccataataaccaagatatttttcgtgccacttgcgagaaagacagtttagcttttagggtatggtatggtacaagtgaacagaatcacacaaaaggttttttttcaaaaattgaagttttggaaaaatcctctgaaacaattttagaaaaagtaaaaggtttgatttatggattctaa

SEQ ID NO: 64804 - DNA, 2568 bp, Acinetobacter baumannii
atggattctaaagctattttcgcacttagaaaagaagccaaaaatttagacggaatatcaaaactcaataaattaactgaggcattaaatcttgcacaaagactattctctgccgaaccttatgatgaatggattcaaaaagcgtttgcatacactttaattgatttaagcaaatactacatcactaataaaaacatcaatcaagctggagtttatttttatcaactactttctatcgactttcaggaaattgacgaaataattgaaaatcaaaaaaactttcttcgtcccaagattgacactaattattcagaagttcaaagagcagaagaattgagcaagaatggaaatcatcaagaagctttagctattttcaaaaacttaatttctcaaaatagactaacacaacttcatcatgcatcttatggttggataatttatagacttatcaaaaccgaagaaagcaaccttacatcaattgaagtacgaacttttttaagagattacatgaatttggagaatgaaagaccatcaatgcttcattctatgattttaaattttgcattaaactattctaaaacacataacgattttaagttttataattttttccttttgtgggatcctaacaatcttcgaaatgaagatttaaacgatggatataaagacgaaaaaaagattccttcacttatttcacgcatttgtagacagtttataagttcaaaaaccgaagtagatattgattttcttttaagcaaaattaagcttgataaagaaaccgttttagactttttcagagaacccattttttgggatattttaaatgctcataaagaaaataagttttccgatttatggaatttatttgaccaatacaatgcaaatcattcaaaaaatgggcaatcaaaatggcattccgaaattctaaatcttgctgaaagatttatgaaagaaaaagatgagtggcgctttctgaatttctttaaaaattggaatcctgaaaactttagaaacgaagattggaaagaaagccaaaaagataataacacatacaaaccattagcgataaaggcacttaaaaagacttttgaaattctaagaactcaaacatctcaacagaatttatcttggcttattcagtgttatgaaaaagcaatacagttatttcctgacgatgaatggctgttgcgagaaaaagcattgctacatttcaaaaataacgaatttgagttagcaatccaaatatacaaacaacttgttttggcacttgcagacaaacattatatttggcaagagttttcagattgcattatttccaacaattctttaagaatcggaatgttgtccaaagcattggttttggaaaaaaatgaagattttttgggcgatattcatttggatttagcaaagactttgattgatgaaaatctattagaaaacgcacttgtagaacttgaatcatacaagcaccatagagaaacaaaaggttggaaattgtcattagtttttgacgaattgtataaaaaatcaagttcagttaaacaaaatttaaaagacaatcatgagttatacaaaaaatacatcccttttgctgaaaacttcgtctacgctgattttggttggacagaagttgttttggtagataaatggaaagacaacaacggaaaagaacgcttaacttttaatgatggaacaataatagagtttgtaatcggtaagaatcgttttgaaatattgaaacaatccgaattgggacaaattttcaaattcaagctttataatcaggcgattaaaaaagaagttgaagcaaagcccactatattaaacaaagctattgattcacaatacaaatatattccactcattgcagacacgacagaaaaaaaacaatgggaaatactgaatgatacctttgctattgttgaatatataaataaagaaaaaaatataattcacgcaattactacggacaaccaagaagtgttttttccgcaattaaaaaatgaattacaaattggagattttgtaacagcaaaaagttatatcaaaaaagtaaaaggcgaaagcagaacagaactgcaactaatcgaaaaaattgacaaagaaatagccatttcaaaattccaaacccaaattgctgtcattgatggagtgaacgcacaaaaacaattatttcattttatcattacttccaaattgcaaggaattgtcaaattctcagaaacaaatctaagaccaaaagaaggcgattttatcaaacttacatttgctacaaaaattgacaaggacaaaaaatcaagagtaaaaatattgtctattgaattaactgaaggagttaatcccaacttacgaaaggacattactggcttactggaagtaaaatacaaaggtgattacgaagaagaagatttgcctgattttgccttcattggagattactatgttcccaaatacctgttagaaaaacacagcataactgaagattgcaaggtaaatgcaagagtaatttatggagaggataaaatgctacgaccaagatggaaagtgataaaaattcaaaaaatatga

SEQ ID NO: 64805 - DNA, 2745 bp, Acinetobacter baumannii
atgctaggacttaccctacgtgatgaatttcgagggaaacgcctcaaaggcacagccattgaactctctaatgactcaaatacgggagcaactcagattgctgcccagcaatttttagaaattacttatccaactcatgatcttttgaaaggtatagaagctgtagccccaaaccaaggtcgtcctatagttgtaattggtgaacgtggtttaggtaaatctcacttgatggcggcactctatcacgcagttaatgatccaacgtcaactgggtcatggctgaaatcatgggctaccactctaaatgactccaatatcagtcaaatcgccttacgagaaggtatgttagtcattggggaaagcctacatcgccaacgctacaagttcctgtgggatttacttttcgagcgtcacccacgtggtgagtttatcaaaggtaaatgggaaggaatgggggcagcaaaaactgacattccttctgacaagctcatcatcgaattgttagaacataccccaacgatgttattgctggatgagtttcaaacttggtatgacggcctcactaacagcaaacaatatccttggaaacaatgggcattcaatttcattcagattctttcagaaattgcaaaagaaagacctgatttattagttctggttatttccgtccgtaatggtagcagtgatgcataccaacaagttcaccgtgtcaatccagtagctatcgatttcaaggctggtggaaatgctgaacgtatccaacaagatcgaagaagaatgcttcttcaccgtttattcgataatcgattacagattccaggtacctcaattgagtctttaattgccaagcatgtttcagagtatttccgactcctagatgtaccccctgcagaacaagatcgcaagcacagagagttcacagaatcttggccttttgcccctcatttattgcgtttactagaggaacaagttctagttgcgacagatgctcaagaaacccgagacatgattcgcattctggctaacctttacaaaagtcagggcgaagttgcaccaatactaactgctgctgatttccgactggatgatgatgcatcaggtattggagcattacttgactcagtatccaataaacaccatcgaacacttcgagaaaaagcccagcacaatatcatttcagtgactgaaactgtttatgaccacaaaaatatcactccgcatcttcaagaaattatcggtgctttgtggttacgctctattgccgtcggcaatctagcaggagccgacccagctacgctgcaagttgatatcacaagaaataaacctgtagatgacaatgcatttcaagtagaactagcaaccattgttgaaaacagtttcaacattcaccaagatggccaacgcatggtctttcgtgaagaagaaaatcctcgtgcaaaactaatggcttgtgcacgaaacgacaaactgttcactgatggttcagatcagtcccatcttgcgaaacaaatccgctacgtcataggtggaagtgatgaggtagcaaaaaacttccgagtgattgccttgcccaagtcttggcaaactaccccttggacgtcacttgatgaatctgagacccctgatcggtgggatgagcgcctacctattctagttctaccagaagaacctgatcagattgatccaatattgggacgttggcttaaggatcacttgcaaaagcgcaggaacacagttcgcttccttctcccacgttctggctctacaaatgcattcatggatagagatttactcatccttgctcgagcagagatgaaagctctagagtggagtggtcaaagccctgaattcaaaaagttgcaaaaagaatttgaagggatattgagagacaatcttaaaaagcgctttgaccgttttgctgtattagccagatacgatcaccaaaacccgcaacaatctatattaagcatagagcacctaagaaaacagggtactgaaattcctgaaaatatagaagaaacgctggctaatgatttatttgttccggaagatttcgaagacttcgtacttgaagctgccaaagaaaatgcccctcttggaaaactcctacgtgaacttcaggaacctcgcccagctggtcaagattgcataccttggctaggtgaaacctctgtgaaggaacgtatcttacgtttatgcgcacgaggtaagattgctataaatttaagacaccttgaacaacttcaaactcacccgggagaagatgaagataccgcttggaaaagattgcgaccaaaattatcttttacagggcgtcagcttgatgaagttttcttaatggaaccatcagcgatctcgtcaacaggtggctccacctcaccggccccccaaactcaagatgctgcaactactggaaatatttttgatggcaaccaaagccaaccaacaagcccttctagttccggaacaagcaattctttggagaatacaactcctaatggtggcaacatttttggtggaggcacctctcctacaacaaaatctcgaacacctttttacaacccatcgacctcccctctaaacttaattggcaagattgaaggttggggaattggtccagccactcctgtggcagaagtttcactcaaaatttcagcgctcaatggtgctcaactaaaagagcttcttagaaagttacccgatggtatgactttcgaattgagtcttgagaaggaggacacctga

SEQ ID NO: 64806 - DNA, 1008 bp, Acinetobacter baumannii
atggctctcgatgctagtatcttgcaaatcctaacaatgggaacaacttctgatgcttggcgttatatcattgatcgcacactcgaaattgcatctagaccactctccgagggcaatgcacctaatgaagtcatcaaacgtgatcgtgagattggtgaattagatcttttccttgcctcaagtggttgggatttatggcaaagcttcggtcagaaaaatatcagcggtgttgagcgtacatcagaacggttagcacaatggtggactgaaccttttgctgctaaagcagtattaattctcgatgctttaagcttacgcgaacttccatggttattgcagggtgcaaaagagcgtggcttcactctgcgtaatgtcacagccacagcctcggaattacctagtgaaaccaacgaattttcacgatcattaggcttaactagtcgtagtcagttacaagcaaatggtggtggtttgggacattatcttcaacctgctcagactgaaaccatcgatttaccctggaaagactgtgagagccttataagtaatgcatcaggtgcaaaaaactgggtgttttggcatcactggcctgatgcaaagttacatgactatggtgctggtcaagggctggagctattaactaaagatgctgctcaacagctttccagtgatgacttttgggcctttgttgaacggttagctacaggtcgccgcctagtaatcacatcagatcatggctacgcagcaactggttactttcctgatgctgatggtgaggttgcagcctatcttaaaaagacattctctagtggtcgaagtaaagctggaaacggcgagaccagtccgtttattccaccagttgcattgcacatcgacagcccacatggtcctcatttattagcggttggccgtagaaaatggcgcagtcaagggggctacccaacactgacacatggaggactctccctgttagaggtactctctccatttattgagcttacgaaataa

SEQ ID NO: 64807 - DNA, 3207 bp, Acinetobacter baumannii
atggccactaaaaaagaactacttcaacaagaagttgccaaagctgtaggtgcagggaaagttgtctcccttgaaacggttgatttcaacgaccctaatcgaccaaaaacttgcctagaagtagacttccctattctgccagttaatcaggtagcaattatcgaaggcaacgcaggaaaaccaatctaccaaatgtcaaaatggtgggctcgtcgacgctctagcgttttccgctcaatgctaattgcggcagccacaaaagcccctgaagataagtcacatgcagcaaaactagtgtgggacaactactacgcaaatcaccaaaaaaaaggtgcattcaagcatctaaaagttactgacattttcatgggcggtggtaccaccttagtggaaggctcacgtctgggtatgcagatggtgggtaacgatctaaatcccgtggcgtggttcgtggtcaagcaggaactggcgaacgtcgatctggaggaagtgaaaaagcttcttatcgatattgaggctgaagtcaaacctcagatcatgccttactattattgcgatggcccagaaggtgaaaaagggtcctggacacatctaccaacaggcaaagtcatgcctaatgattttgaccccttaacaatccctcatgaagagcgaaagaactataaatacgaaggtcctgaaattatctacacgttctggggcaagcacggcccttgtcaagtgacaggctgtgggcatcgtacgccaatcatgactagcccagtaatcgctgttaaaaaacttagtgtcaaatattgggagcacaactgtataaaatgtggcggtcaattccatgttgaggagaacgctgcgagaatggcccctgatgtaccattgtatatagcaccgtctgaacctccgttctctatcctcgaccataggaaaggtgttatttgccctcattgtgaccatgctgaaatggttaatcttggcaaaggtaagaacaaaaaagtcgaattaagcctacttgtacatccacaatggttggcaggctcaccaaagcaaaatgagagtggtcagtcttatgggggctcagctcaggatgatgtaagttcaacaaatcgttgggataccgagcgttcatcaaagattcgcctccttgaagtacgtggaacactaccagaagaagtgacttgcccagaaacaaatatctctttttcacctgaaattggtacggttccaaagaaatctcattatgcttgtgctgcatgcggtacagtgcaagatgtattgactacaatcaaggccacgggtaaaaccggaccaatggctgcctatgcagttcagggatatgccccaaaacgagcaggggcgggcaaaccatacaacggccggtttttctcccctttcaactcagcgttctctcgacaatacgatgctgcttttactgaatgggaaatacgaaaagactcagacctcaaagattattggcctcgctcagaactaccatatggtttcatgactcaccatctacaaggtggagttccaaaccatggtttcacccactggtggacgatgttcaaccctcgccagttgttagtgcacgctcaacttcttaaagcgattgttaacgtcgggaactacgactggcaagtacgagaatatgtacttggagctttccaaaattttttgagaaatcaaaattcacttgcattttggcacatgaaactcgataagttagcccctgccatgtcgaacagcaacttccacccaaagaataatgttgttgaagtaggtgtttttccccctatgggctatggtccttggtcttccacatttggagttttattcaaaggtggtgaatgggctaaaactccatgggaggtagttagtgccgagtacctaggccgtcatgcaccaagcatcgcaggtgaaatttctgggaaaagtgagaaagtgtaccctggagaccctctgcttggggcccaaacatattgtggctcctccactgaactgacccaaattgagaacaatagcctagatctagtaatcactgacccccctttcggcggcttacttcactactcagaattggctgattttttctacgtctggctacgtctagctctcaagggcaagtacccgcagattttcggcgcggagtacacgcccaagtcgctggaggctgtggccaaccgtgcccgcgaaccggaagatccggatggtttctatcagcgcctgctcacgcagtgctggcgcgaggcgcatcgcctcttgaagcccagcggcattttggccttcaccttccaccacagcgaggacgagccgtgggtggcggtgttgaagtctctgttcgacgcgggctactacctcgaagcgacctaccccatccgctccgatgaaacgaagggcgacggcgaattcggctccaagaccatcgaatacgacatcatccacgtctgtcgcaagcgcaccgaggagcccaagccggtgagctggggccgcatgcgccgcgaagtgatggccgatgtacgccaattgcaggccatgctggaaaaccacgcgaaagaaggcctgcccgccgctgacatccaagtgatccgacgcggcaaggcgctggagtatttctcccgtcactatggcaaggtatatgtcgatgaagggcgccctatcgatgtaagggatgcattaatcggtatcaaccaactgatcgatgatgatgcagacaaaggcaaagaaccgccaccaattaatgccgagccgatgacacgacagtttcttcgcaccttcggaacctccactgagctaaagcgtgaccaattccaaaagtttctacgcggttcaatcaccactaccgatgattttgtacaacgaggatggtgcagcgaagttaaaaaagtcttcactcgtacctctccactcgatttcgctagagactggcagggcaaacataaacgtaagctcacttccgatctagaccaagctttagttctgataggggcttgcgtagacggtagtggtattaacgctgccgatacgttgaagaatgaaaacttcaagccacatgtagccttaaaaccactcttagaatggctgcaaaaaaacagtccagatcaaactactcgaaatgcagcctctcgtgctgtatctattttcaacacatggcaggcaagtctagctccgaagccaatgcaaggttcactgtttgatgatgaggaatatgcataa

SEQ ID NO: 64808 - DNA, 501 bp, Acinetobacter baumannii
atgaggcagattctcgatacagtatggcaaagacgcggcaccagctggctatgggatgaggaagcacgtaataccgtgtgcaaagctaacgaagtgtggagcttacgccaatttttacaagcctcagcccaatggccagaagacctacctagcaatgacaaccaaacgctagtagttgccggattggaaggtagtctagatttgttgtcccctgaacaaggtgagctttggcttggcgatacgataaaacgggctatcctttctttccaggacacctttggcggagaggctgctttaatcttctggctacctcaaggagatagccgtctaaaaatacaatttcctactgaggctgtatcctggttgtgcgaagcacctttcagaggtagtcagctagactttggtcgcctgctttggggtgaggcaaacgaataccctcaagaaattcttttgcgtgaaggcgcaaaagcagctgggctattccatttacgcattacttga

SEQ ID NO: 64809 - DNA, 2769 bp, Acinetobacter baumannii
gtgatagaagaagttgcttttcaaccaggtgaaagaatcacacaccctgaattgggtcaaggtgttgttcttgagccatcacgagatggctacttacgtgcattctttagcgtgggtgaacgtcgtgtccctgttgattcactgcaacgccaactatcacgttccgaacgtatattgcgcagtgttgagggtggaactgaacgctcgcacaaagcatggctttcttacgaggcccatgccctacccgtaatggaaagtgcatctgcgcttacctcagctaagattgatcttctaccacaccaagtagtactaactcaccgaattgcaactgcctctccgcgccggtacctgatagccgatgaggtggggctcggtaaaactattgaaactgctcttattttgcgtgagttagccagccgtggtgaactaaatcgtgcgttaatggtggttcctgcagggctagtaaataactggcatcgagaattaaacgaagtgtttaatctcaattttgaagtatttggctccgagggggatattacggaccgtaaaacaaatgctttcgccaaacacgatagactcattgctagtatcgacacccttaagcgacctgcacgtataaaaaaactacttgatgcaccacggtgggatctggttgtatttgacgaagctcaccacctcacggcaatacgtactggtggaaaggttaaaaagactgagaactacaaactcgctgaagccttaaaagatcactctagagatctgctcttgctctccgccacaccacatcagggcaatcactttcagttttggatgcttgcacaacttttaaatccaactctttttagtagtccagatgagatgttggagcacagacaccgtctaaatacggtgatgtttagaagaaccaaggcggatgcatgccaaccagatggatctccactatttgcacgtcgatgggttcataccgaatcctttttaatgaatcatgaagagagaatcttctatgaaaaacttagagagtatttagaagatggttttgacttagcccgtcgacaaggaaaccaaggacgtgcacttggtttcttgatggctatattccaaaaaattgcagcatccagttttgcagcagttcgtcgaacgctcaaacgccgcttactcatgttaacgattcacgaagcgcatttacgtgataaagagcttgatattgatggacgtgagcgcctaactaatgaagcaagagagatgatccatgaacaatatgatctatcgaacgacatcattggtcgtagtgaagttgatcgcattcttgctgatttaaaatatcgactaattaagaaattagatgacgaagcattggaaatggcttctgatccatacggcaacgaatactcaatggctcaagcagaagaagctgcctcagctgttgtggaactacatctaccagaagaacgcctgcgcattgacgacctgcttcgtattttcccacatcagagagaaaccaaagcacagaaactacttgatggattaggcttcctatggagacaaaatccacaagagaaaatcgttatatttgccacctatcttggaactgtcgatttaattgcccgtgaaattgagcaagcctatcctggtcagggtgttgctgttctccgaggtggtgaccatggggcaaaactcgctgcggaacgaaaattcagattgagggacggacctcgtgtgcttgtttgtacagctgccggacgtgagggtttaaacttacaattcgcacgaatcctattcaactttgatttaccttggaatccaatggacgttgagcaacgtattggacgaatccatcgatatggtcaaaaccacacagcacaggtatataaccttgttttatccgacaccattgaaggtcggatttatctaatgcttgacgaaaagttgactgaaattgctaaaactgtagggaaagtcgacgatcgaggtaatgtcgctgaagatcttcgtgctcaaattctgggacagttatccgaacgactcaattacgaccgactctatcaagaagctttgtctgatccagaactaaagagaacacatgttgaattggaagcagctttatctaactctcaagaagcacgacaagtcgtttttgatttattccaagatctcgaaggatttagcctcgatgactacaagccattctcagatgtttcatcaagcctagaccgcttagtacgtttcctatcagcagctatcactgatcgacagcaacgattggtcaaaataagcgatgacacatacaaccttgaaatgagtgatggaaccccacgtgcaaaattcactctaaatcgtgacatggcaactagcaatgagaatattgaattacttggaattgatcaccccctaattcaggaagagcttggacgctggcgtagtttacctcctgaagatattggtcttgccgtttcaggcgatgtagactcacttgtcttacttacgctctggatggttgaaacatctacaagcagtggcgaacgtcgcaccatcatacagccaattgctgtgaagcaagatggttctcgggttccaactatagaacgccatgcggagcagtacttacatgcacctacaaactccccaaaactatcttatgagcaacggcaagagctctttatgcaggttgttgaaccgactctgcagcgagaactgaaccacaaaggtgctgcgactggtgatggtagttatacggctgagttaattggatatgttgagatatcaaactga

SEQ ID NO: 64810 - DNA, 183 bp, Acinetobacter baumannii
gtggcagaccgtttaaccggtactgactttatgatgggctttggactacatgctttagtttatcatatgggacaaggtgaaaattatccccatatccaacgttatgtagcaggtttaagccaactacctagctggcaagtcgcagtacaaattgaacaaaatggtgtgaaaagtcaaaaatag

SEQ ID NO: 64811 - DNA, 192 bp, Acinetobacter baumannii
atgcagggctttattatttttgatgattatggcagtcagtatccggaattcaatcagcaaatgtctgactggttgaaagacggaaaaatcaaatataaagaacatatggtgcaaggtttagataacatgatcaatgctttcaatggtatgttaaaaggcgaaaactttggcaaagtggttgtaaaaatttaa

SEQ ID NO: 64812 - DNA, 261 bp, Acinetobacter baumannii
atgcaaaccagacctgatatccgtgtcgacactataaataagcaggttcactttatatggaccgatggctcaagcgtatgtctgagtcatcaaagtttaagggaaatttgcccatgtggcttttgtcgagcgaagcggattaaacaaattaaaatagagcatcaaaatgttgaagtgacactatgtttgatcaaggttatggtgcccaaatttgctttagtgatgggcatgataaagggatttttccgtgggcttttttaa

SEQ ID NO: 64813 - DNA, 948 bp, Acinetobacter baumannii
atggcaaatgagagtgtaaatcaaactgatcaagaaattagacgaataagttatgaagaatatagggactttaagacaaaacttatagaagatataagaaatattattaataaaataaatggtttacaaattgcttcagacttaaaagataaggtcagaactggtttaaataatattatctcttcccttaattctatttttctacactatgatgaaatgggttttttagaaaactttaaaagagatgttgctgatatgtcagctttgctattagcagaacctacagcaaatactgttcaaaaaattaatagtaagatagaggaaattaattcttttattgataattactcagaaataaaaagatcatttaaagaattatcagtaaatgcactaagtcctattataaatgaggttaatacagagcttttaaattttagaagattaagaaatattgctgataatgctcgtacagaaaatatttatgataatgctgtaaataaatatcgtgggttagaagaaagttatagaacgtatttttattgggggttgggagttctattatgtttatctgtaggtttattaacacttaaacaggaattagttccttatcttttctcaactattgagttttgggctgtaaaagtatccctgttattagtaggtattactctaataagttactttttaaaacaatcggctcactatcaaagattagctgatcaaaactatcaaacccaagttgagctacaagcttacccaagttttatggaaagtattccaactgaagaagccgcgagtgtacgtaaagaactagcacttaaatactttggtcgtgaagtggatggggcagcacataaagatatgggtaatttagtttctgaccaaatgaaaagtacaactgaaatggttaaagctacaacagaagcaattaagaatttaaaggggtaa

SEQ ID NO: 64814 - DNA, 195 bp, Acinetobacter baumannii
atgaaaacattcgctttaaagaactcccctactcaaaattccgttttggaacatactccagtcaaagatttggctgcattcaaacaacgccagcaaaaactcaaacgtcaaaaactcatcaaaaacatattcgatgttgcaatcttcataaatatttccagcttcaccttctcaactttgttttggggagcctaa

SEQ ID NO: 64815 - DNA, 375 bp, Acinetobacter baumannii
atgaatgcctatattttaataaataatagttcaatagaaattatcaaatctgctgtaaatacagcacatacaaaagcgacacatattgaagtacaacctccctatgtctcagcttatatgaatgaaaagagtgattggtattggtatcagaaacagcttggggcttgggtttattgttttgataaatcagtccaacgagtttctattaatgaattaaatcaagctcttaaagattttagtttgatagaagattttggaggtttagagccttgtagagaaatagctaaagaacttgaaggatatgttgcaccaacatatatgctatgcattatgttgttggcattagaacgagttgaggaggggctaaactcatga

SEQ ID NO: 64816 - DNA, 912 bp, Acinetobacter baumannii
atggaaataaaaattcatatttcatggaaaaactgcctaattggaatacttcttatattttttatagtttttccaatatggtcatatttccctttaatattttctaaaattatcgggcatacattaggtgatttatccctatatggtgaaaatcttggttcaattggggatatttatggaagtttaaatactttagtttcttcaatagcactactcgcagtagcatttacgacttacttacaagttatttccttaaaagaaacacgtaaagcaaacagcaaacagttgaaccttgctaaagatgctcatgatgaacaaattaaagaatcaagaaatgcaatttttgctaatcaattttattctttgttaaattataaattatctaaatataagagcttagagtttgaatgtaatgatagtcagtatactgaacagggaaaatgtataaatggattaggggtatttcaaattttaacgcagtattttattaatgaaattgaaagaaggcctgaactgtttaacgatagggatgaagctgatcttagacatcattttatgactattagtacaattttctttaaacaaccaataactgctcttttatcctatttttatatttataaagatcttttagacttaataataaaatcaaaattggatgatgaagataaggctttgtatctaaatgtagtaagtaattcaatgtttctagaagagcaaatgctcctattttggattagtcccctttatttagatttaaaaaattcaattgaaaacagtagattactaaatcaaatttggtatgacgatagtctgaaaaaatatgcaattaaattccataaaaagaggacatttcgtgttaagacatggacaaaaatgtttgaggaattagaacaagaaaacccggcctaa

SEQ ID NO: 64817 - DNA, 432 bp, Acinetobacter baumannii
ttgcattacaagtcgactttgcataacagccattatggagatgcatacccatacattgctgaagttcctttatttggtcatagtgaaaatcactctatgattcaaattgcagatttcatttgctcagctttgctattccctatggcttcttatgtgtattgcaccaatttcatccaaaatgtacatgtaactcaaaaagataaagaaattcaaaatgattttattgatcgaatcaaaggtatttcttatcgatattggttacgtgacaaaatgagaggcggaattgttgtagttgatgctattagtaagagatcttcaactttgatgttgaagaaaacaacagttatgtatgagggaatagaaaaagtaaaagcagaggtttctttactttctacaacagttgatactccagaagttatatcttctgtctag

SEQ ID NO: 64818 - DNA, 528 bp, Acinetobacter baumannii; identical to SEQ ID NO: 52088

SEQ ID NO: 64819 - DNA, 822 bp, Acinetobacter baumannii
atgattaatacaacatataaactgatttcaaaattaaacctgaaaaacgcaacttatgggcaatattttgaaaaagagcaaatcgatactgaacgattaaaagtgatgtattccatttacgagcagtattatgaaaataccagattttctattttcgtagatgattttaaaaataaaagcggtgcgatcttaatttttgactcagaaacaaatgagattgttggtttctcgacggtagttgtgcagcatttctacttaaacggtaaagactacactgtgctctttagtggtgatacggtcattttgaaaaagttttggggcacgcgtacattgcaaagtaccatgctcaaactcatgatcaagcttcgaattaaatatccttttaatgaactttattggcttctcatttctaaaggctataagacttatctcttacttgccaataactactatgtgtattacccaaatatcaaagatgaaaaccaacatctttcggaagttgttgaacattactgtgaaaaattctttggtgaatactacgacaaagaagccggcttactcaactttggcgatgactatcaaccattaaaaggcgaagtcgcaccgattactgccgaaatgagagaaaagaacccaaatattcatttctttgagcagaaaaatccaacttggagagctggtacagaactgccatgtattggtcgacttggttggaaagatattgcccggttccctgtaaaactgatgacgaagccgacaagcaaaggaaaatttgaagcgcagttaagccataaaacaaaacgtagagaggctatccaatga

SEQ ID NO: 64820 - DNA, 243 bp, Acinetobacter baumannii
atgcctttttttctcccaaaaaagccagcagtgacttctaaacctgttctttcgggctgtatgactgataaacgtggtaatttgattggatacacacagcaaggaacgatgattcatggccttaagcaatctgattgtaaacgtataatcaatggtgatcgtccgtttaattactttgcacagtcttcaggtcaggctacaactgcccaagtcgctccagttgctacagttccggaaatctaa

SEQ ID NO: 64821 - DNA, 153 bp, Acinetobacter baumannii; identical to SEQ ID NO: 63999

SEQ ID NO: 64822 - DNA, 384 bp, Acinetobacter baumannii
gtgttaaagatatataaagataatagtgatgatctaggctttgtaatagggtgcttgttctctcaagctattaacctgtgtgagtttaggctttgggttgatagcgtaattgaaaaattaccggctgatttaatacctaactatatgtttgatttagctggcttcgatgggcatttgtttgaaatatcaaagattataggttttgtttctagtagtaaactatcgaatgatgaaaaagtatcattatcagctatcgcctatctaagaggtgcagatgtatatgatccacctgtaacaaaagaggaagctttaaaagctttggaaaggaatcctaatattttagaaagatttaaaagcacatttccttttataaagcttaattag

SEQ ID NO: 64823 - DNA, 1182 bp, Acinetobacter baumannii
atgactagaaatacatttaaaaactcatatcgttctaattatcggggaaaagtaacagttgaagatgctcaaaaacatcagaaatatattgatgacatgaagaaagatgcagctttttactatttagatcatttagaaagttcaattattccacatagtatgcttcataaaatcatccagaaattaaaaacgaagcagaatgacagtttaactttgccagaaaaagcctatttacttcgcaataatctgaatgctttatatgcccttgttgaagggaagatctcttttaatcaatataaaaaagaatcttcaaatgacagagttgtatataaaaaacgtttagaagaggaacaaatacgtctagaaaaacttaaggagctagagcgtattgaagagcaaaaacgtcaagaaaaattagctcaagaaagaaaagctagagaacaagctgaacgtgagagaagaaagaaactagaatctgatccaaaatatattgcacagcaaagagagaaagctcttttaaataaatatgaaatttatccttatcttattggcaataagcaaagatctaaactacttaatatattgaatttattggataaccaacaaagattacaggaacaagatgctatttggttaagttcagaaggacgagagttttttactggcgaagttaaaatgaaatttcatcgtgtagaagctgacttttaccttaaacaatatgaagtaactaaatcagattggcatgctatcaatgcctctagccaattaagaaaatgtaaagctagtaaagaagctgaaaaatttctagaaaatacaaaaatttcctcaaataaaaacagcaaactattatctgcctattttactactctaggtggagtaaaaagggatcttaagaaatcagataccgctatagagcatggattaaaagcacatgatcatagttctcaagactatagaccttgtaccttattaggggctatatacatggagaatcatgaatatgatcttggtcacgattggtatagtaaggctcgtgatagaggggctccagaaaactctattaatgctgacctcagaagtattctattgaggttggataaggctaaacgtagtgagatggtggcaagcttattgaaaaaggatccatatatttatggatggttaaaggatatgaagcagtaa

SEQ ID NO: 64824 - DNA, 705 bp, Acinetobacter baumannii
atgaatcctttccatggtcggcattttcagggcgaaatcattctttgggctgtgcgctggtattgtaaatatggcattagctatcgtgaactgcaggaaatgctggccgaacggggtgtgaatgttgatcacacgactatttaccgttgggttcaacgttatgctcctgaaatagaaaaacgtttacgctggtattggcgtaatcctacagatctgagctcgtggcatattgatgaaacctatgtaaaagtgaatggacgatggtcttatctgtatcgtgcagtcgatcaacgtggcgataccattgatttttatctttcttctagacgtaataccaaatcagcatattgttttcttggaaaaattttaaataatgtgaagaagtggcaaattccacaagtgatcaacacggataaagcacccacatatggacgtgctttatcacggttaaaacgggaaggtaaatgtccaccagaccttgagcacaagcagattaagtataaaaataacgtgattgaatgtgatcatggcaagctaaagcggatcatcagggccacattaggattcaaatcgatgaagacggcttatgctacaattaaaggtattgaagtcatgcgtgcactacgtaaaggacaagcatcgtcattttattatggtcagcctcagggtgaagtgtgtctaatcaacagggttttcggtctctaa

SEQ ID NO: 64825 - DNA, 531 bp, Acinetobacter baumannii
atgatgaaaaaaaatctcattttaactattgggttattcacttttacttcattatttactgcgtcttctttcgcagcaattacagggcaagttgatgtaaaattaaacatttcatcaggttgtactgttaataattcacaagttgaagggaacatgaacaagtttggtgtacttgattttggtaaatctgcatcaacttggtcaaacgtactgacagcagaagttgcatcatcaggcaatggtggtgacttgacagtgacttgtgacacaggtgttacacaattcaatgtaagcgtgaacggtggtgagcgtggcgacagaacattatcaaatgctacggataccgttgcatataatgtttatcaagatgctgctcgtagcaaactttatgagttaaatacaaatgttgcattccctgtaactgctggaacagcagtaccagttccgatgtatggtgctattgctgcaaatacaacgactgtttctgacggtgattatacagatactttacttgtaactgtttcattctaa

SEQ ID NO: 64826 - DNA, 558 bp, Acinetobacter baumannii
atgtttgaaaatattaaattcaaatctctctgtttgagtctgtgtgtttttttccattctcatcttctttatgcaggttctggcagcgtgagcttaaaaagcgaaatcactttagaacctgcatgcctgattaatcaaaaaagcactttaaatggtgcaaatctcaataaattgggtgatctggattttggtgatctagatgccagtttttcatcagtttcagcaatgctcagtaatgagaccaataatgctatccatattctttgtcctgtcggcagtaatgtaaaagttgcatttaatgcaggtcgtaacgcaaatcatgtgccaagtcagtttgctgcgaattatcaaagagcaatatcaaatggtggcggtgaatatattgcgtatcaaatttatgaaaataataaatctggcaaggtgcttacaccagaaaccagtatcgattttttggggggaagtgagtatgtcgttcgcctttatgctgaagctgtaaatgcacagtctctttccaaaggggaatacaccgatcaaattactgtcacagtaaatttttaa

SEQ ID NO: 64827 - DNA, 534 bp, Acinetobacter baumannii
atgtttaaaagtcttttaaaaataaacacatctattgtattgatgttaacttcaataaccgcattggctgcaacttcagccaatattgaagtgagtgcagtgattgaaaaaggatgcttatttcaggaatcaccaaaaggtttaaatttcggaacacatgcctctacttcgcaggaaaatgcaattacagccagtattactaatagtcaggatacatggaaaattgaatgtacatctgatgttcctgtcacgattacatttggtaatgggaaaagcttaaacacatctacacaaaatcggcgactcaaacatgttagctcggaaaattacatcgattatatgctttatcggaatgctaatttaacccagccacttggtacaagtagtgccaacaatactttgactctaaaaagtacagaacaaaatcatttgttgagttttcagatttatgggcttgtagacctaagccaaggggcaatcaataagatgcctggtcaatataaagatgatgttttaataacgattgcatggtga

SEQ ID NO: 64828 - DNA, 807 bp, Acinetobacter baumannii
atgatgacttttttaaagaaatttgcctcttcccacagcttatttttaaaagctttggcaataacaggcacgatcgtccctgcaacagcttcttatagccaagcaaactttctgatttggccgatttaccctgtgatcgaaaataaacaaaaagcagtacctgtctggctggaaaacgttggagatagccctgcaatggttcagatccgtgtttttaaatggactcaggatcagtacaaagaacagttttcaacacaacaggaaatcattgcaagcccgcctattgtcaaaattcctgcagggacaaaacaaatgatccgtttgactcaggccgtgccgacacctgatctaaaagaaaactcatatcgtgtggttgtagatgaattacctgtagcagtagatagtgagaccgataatagtcgtgtcaatttcaaaatgcgttactcgattcctttatttacttatgggaaaggaataggtagtggtacagggcaggaaactaaaaaaataaatagtaaaaatccactcgcgaagccagttttaacgtgggtttttactcaggctaaaggcaaagaagtgcttgaaattaaaaatacaggtgcaatgtcagcacgtatttcagagtttaaagccggagataaactatttaaagctcaagccgagaacaatgcttatggctatgtccttccaaatagtattattcacttttctttatccactgacctaaaaaataatataaataaaactaatgcactgggtgcaattgttggatcaaagaaagagattgttgctgttgaaaaacagtag

SEQ ID NO: 64829 - DNA, 2460 bp, Acinetobacter baumannii
atgaatcattatataaatttcaaggggagtgttttagcaaaatgtatattggcagtattctgtgcacaaaatataacagtgtatgctgaaacattttctgaaattcctgatgtagttcagtctgttaaagaaattccacccattaagctttatctggatttggtaattaactcttactccacccaaaaagtagtgactgtggttgtggttgatgagcattattatttacaaaaatcagttttgagtgatctggaaattaatcctgaccacttcaatacgcaacatgctctaagtagtgatattttgggacatctgggtatcaatgcgcagcctgaggagtgggtgcaaattgatcagcaaaaagatatacagacatcttatagtgctaataatcagcaaatactattaacgatgccatcgcactggttgcctgaacagcagttaggcaaagattattggtataaaagaacgcctgcacaaagcgggattggtttccttaacaactatgatgtgtatgtatataaaccacataaccaatctcgttcattgaatatttttacagagcaaagattctttagtccgtggggatctttgaaaaatacaggtaattatagctctttaaaaaatacagtaacaaatcaaaaagagaataactatctccgatttgataccaattggcagtttgatagcgaaaataatattgccacattagaaatcggggatatatattctgcaacaaaaaatagttggactcagtcagtacgtttaggggggattcaactacgtcgtaattttagtattcgccctgatttgattacttatcctttacctcaatttaccggtcaggcagccttaccaagtactgttgatttatttattaatggtcttaaaaactcaactaatgatattcagcctggcccatatattttaaacaacgtcccatttattaatggacggggtgaggctgttgtagtcacaacagatgcagtagggagacaagtttcaactactttgccattctatgtttctggagatttattaaaaccgaagctttttgattatgctgtttcggtaggtaaactacgagaaaactatggtattaaaaactttgattatggtgatgttctggcaagttttgatgcacgatatggtgtgaattcatggttgacggccgaaggtcatgcagaaggtaataacgatatctggaatgcaggcttggggcaagtatttaaactttataattttggtgtattaaatacctcttattcatacagtaaagccaaacaaaataaacgaacattaaataatgatgaaaatgggcatcaatttactgttggctatcaataccagcaaccgcattttggatttaatgctgcacattcccgccagagtgaaaattttaatacgattgccagttattacacagatggtttactttcagtgaatgcaattgaaagcacagtagcaaatctgcatttttctacaaagcgtttaggtacatttggtattggttattttggtatcaagcgagacagttttgaagattcggatttgttaagtctgtcttggacacctgtattacctagagatttattgggttcaactttatctttatcagcaaatcaagacttaaatcaggatatatggaatgctgcaattcagttgacaattccattcggtaccaccggtggtaatctgaatacaggttatcagtaccaagagaatggtggtgattcagcttatatcaactataactatcagatgccaaccgagggaggtttcggtttctacttagcacatagatataatgaaaaatcaaataattataaccaagcacagatgaactaccgtaaccgctatttaaatgctcaagctggtatttcaggtgatgatgattatgatcaatggtatggcttatcaggttctgtgatttggatgagaaactctatatttgcaacaaaccgtcttggtgagtctttctccctgattagcaccaatggccaagccaatattccaattcgctatgaaaataacctgattggggaaaccaataaaaaaggctatttatttgtacctaatgtgacaccttattatggtgctaaatactcaatagatccgttgaatctttcctctaactttgcgacaccagttgttgagcgtcgttctgctgcaaaattaggtacaggaattattgtggatttccctgtgaagaaaattcaggggggaaatgtttatctaaaatctcaaagtggagaaccattaccagcaggtgctgtagtttatcaaaaagagaagaatccgacttatgttggaatggatggtattgtttatattgaagatttggaaaaagaaaatctattgaaaattgatttgggacacggtcagcaatgtatcgcaagattccctgccgaattaggtcaagagcagatcgttactatttcagatgttgtgtgcagttag

SEQ ID NO: 64830 - DNA, 999 bp, Acinetobacter baumannii
atgcggagtaagatattttccctattagtatttggattattaggggcatttacacaacagacttttgcaaactgcactaccctaagtagttctcttactttgggacctataagttcttttaatgtcccctctttaaattctactgataatcaaatatcaggtggattaagttgtagtggaacattgactctattctcgaaccaatatatccaatacaccgcattaaatattccatcaaagttaatacatacagatgggaaaaactctgcaaatattacaatcttagattatgataaaaatattgttataacttcatcaaaacccatagatttaactcgattcgttgtaatttcatttttttcaggaccaaactctagcatccctttttatatcagagtgaacgaaaatactaatttagtacctggaacttataaaggtcaatttttagtaaaatggttctggcgtattccttaccttggcatcggtggtatatctctttattataatagccccaacttaaaaaccaatctgcttggaaatattacagattggggaactggccaagatgcaataattaatattgaattgattgtagaaaaagattgtaagattaatgcgcaaaatatcaattttggcacagctccattagtttccaaatttaatcctgttacgggtacagtacaaattacctgttctgcacagaccccctatactgttggtctttcaaatggtcaaaattatagccaaaaccgtcgtatgaaaaatgtaagtggtaatcaatatataccttatgaaatttataaaaatacaacgacacaacgttggggatatttaggtacagatcgttggtcaagctctaatgcatctcagaatgcaggtatctatgatgggtcagtaacacaaggctatagctatacagccaaaattattgatgatggaagtaatgcttctgcagaagggacttataaagataatctcattttagaagttgctttttaa

SEQ ID NO: 64831 - DNA, 552 bp, Acinetobacter baumannii
ttgaattatttgtttaaatttttgctaattgtaccagttcttcttcctataacatctttgtttgctaaggctgataatactaaatatcatgcagtagctgcttttattactggtaaagtttattcatgtgaatataaaataacttatactaattatgaaaagcagaaaatatttgaaaatgaaaaagtagcctataaaaatctaccatttatttatactaaattgttgcatagtgtttatcatagagaaacatattctagggataaattacctacaagtttgaaaactgatatggaaaatggctcaacggcgcaagcaccaagggagttaaacattaaagtagattttgatgtgaagatggataaaagagcttataacattagacttaccccaagtacaggttcagagagcttggaccatagtattaagaatgctttttcaagtgctaaatttgataccaagaaaaaattttggtggggagatactttagctttttctgatgaaatacgattagagaaattagatacttgtcaggtacgaaatcttcattaa

SEQ ID NO: 64832 - DNA, 864 bp, Acinetobacter baumannii
atgttacatccagattatgcaaaagattttaaagaattgtttggtgagccaattgataaagttgaagtcacagaggacttcataaaaaaatatcggggtaaactgcctgaaagtattttagaacagtggcgaattattggttttgcaggttatttgaatggtttgtactggattacaaacccagatgattatgctgaagtgatttatgactggttggaagagacgccattaccagatgatgatgtctaccatgtgttagcacgttctgcatttggtgaactattaatttggggtgaacgtaattatggtagatattacatcaaaactatggaaggtatcctgcatgataatgggttgcaagaggaaggtgctgagttctatggaaacctctttttcttctattcagataaagattcgttagaccatattgataaaaatgggaaaaagctatttgagcgagctgtaaaaaaattaggggttttaaaggcagatgaaatgtatgcttttgagcctgctttggcattaggtggggaagagtcattagcatatctgacaaaagtaaatcttcctgttcacatgaagttgctaaaacaggtgactccattaagactgagaacttttgaggatcttacggctgctctatatggtacatcgtatagtgtggacgatttaacaagtggacaagatactgagtcacaatatcaagaatctgttcaagctggagaagtttgtcctagaacaggttactggacaacgcctgcacaacccaatacacgccattattgtaagaaaggtgaagttcttcctgaaattaaggaacaagactggggggaagtatattggtattgggatggtgagaattaa

SEQ ID NO: 64833 - DNA, 294 bp, Acinetobacter baumannii
atggcaatactcaaagagtttactaatgtttataagactgatctggaggggttagggaaaatattatatggcgagaatgcttcttttagtaaagctattgagcaggtcagtcagatagaaaaaactcattctcaagttattagtattcaaagtggtcaaccatgtactaagtctggctattggtttactccagccaaagagaattcacgtcagtattttaaagaatgtgaaatatttcctaattttgttacagattggggagaggtttactggcagttcgatggtgatgaataa

SEQ ID NO: 64834 - DNA, 2826 bp, Acinetobacter baumannii
atgtttaataatatttcccaagttttagagagtataggttttctctcacagcatcgttcggtgtatctccagttttcagatgcatccctgaatagtcaggtttttttacaacgtatagatgggcaacattatcttaatcagggcatgacagccgagctgatttgtttatcaaccaatgctcatattccactcaaaacatttattgggttgcaggttgcggttgatcaggtcacagatcaaggccaacagtttcgtactacagggattattactggagcatcacaaggtcagagtgatggtgctctaaccttatataaaatcaccataagtgatccaacctacctctggcataaacgcagaaacagtcgtgtgtttatgaacaaaagtgtacgggatattagcgaaattctgtttaaagaatggcaggggaaaagtcctttatttgcatctagtctgactttagatttgagcggcttaaaacagacctacgatgtccgtccttttgttatgcagctcaatgaaagcgactatgactttttaactcgcttatggcgtagtgaaggtattagttggctcattgatgaagcagagcttaccgtggcgagcaatacggacaatattcagccacaaaaattacgccttattgatgacaatagccagtatcaggcactgactagaaggacaatccgttaccatcgtagcagtgcaactgaacagtttgacagtatgaccagtttgatcgctggacgtcatttgcagccgacttctgtttttgtgcagcgttggcagtcagatgtactacaacaaactgatggggcaggcagtgtacaaagtacacatcagcatagtaccagctatgacaatcaaagtttaagccttgaagatgcatggcacttcagtccggcatggatgcaggatttaaacggcgaagatggggcaacctcagcaagtaatcaacaactggaaaaatttaaccagaacttaagcgcttaccatgatgcccaatccaaacagtttgttgctcaaaccacagtacgggatacacaagttggttactggtttgaactgaatgaacaccctgaaattgatctgcatagtggggcagataaagagtttctgatcattggtaagcattactacaaccaaaataacttaccgaaagacttaaaccagcaaatacaaactttaattacacaaagccattggcaatctagtcatacaaaagagcgtcaaggcaatcaactgattttacaacgtcgccatattaagacagttcctgaatatcagcccttacaagatcgtcctcaagcctctgtacaacgtgcccgtgtagtcggacctgaaggtgaaagtatctatgtcgatcagtggggccgtattaaagtccgatttctgtttacccgagctaatgaccatagccatgatggaggcgcggggagtaacgacaaggatactgattcggcttgggttgatgttgtaaccccgtgggctggaaaagggtatggtgcacgcttcttgccacgtgttggtgaaattgttgtcatcgatttctttgacggcaatattgaccgtccgtttgtagtgggacgtattcatgaagccgaacgtcatccagcccagttcgaccagaaagggcagctacctgacactaaaaaactcagcggtattcgttcagaagaagttgatggcaaaggctttaaccagctacgttttgatgatacgactgggcaaattagtgcacagttacaaagtagccatgcggtcagtcagttaaacttaggcaacttaagccatccaaaagataaggccgagagtgatggtcgtggagagggctttgaactcagaactgaccagtggggcgcggttagagcaggtaaaggtttacttgttagtacccataaacaggaccaagctcaaggcacacatttaaatgcagccgatgccaagcaacaaatcgaaggtggtcttaataatgctaaggcactgagtgaagttgctaaaaaccagcaaactgatccattggaaatgcttgagaacttaaaaacgttcatagagcaaattgaacaacaagataaagagaaagctgccacttttaagcaagccttgatggtcttaacagcaccaaacagtattgcagtcgctagtaatgaagatattcatttaagtgcagatggtcagttaagccaaaatgctggggacagcattagcctaagcactcaaaagaacctgattgcacatgcacaaaacaagattagcctgtttgccgctcaacagggagcacggctctatgcaggcaaaggtaaagttgagatacaagcgcaaggcgatggagcagatttaattgcccgtaaaggtatccagattatttctacagaagacaaaatagaaattaatgcttctaaagaaattgtgattacctcgggtggttcccaaatcaagattaatagctcaggtatttttccagtcactggcgggaagtttgaggtgaaggctgggcagcatgtgtttatggggggagcaaaggcagattatgttttgccttctttaccaacacaagaaatcaagaccgatgacttattactagaatatttacatagtgatggcacacctgttaaaggtgctgattatgaggttttattatctgatggttccatccgtaaaggaaaactagatgcttcgggtaaggctattgtgagtggtgtacctgctggacgagccaaaatccaatatggagaagaccaaagtaaagatgaatttccagctttagaagtagatgactggtttactcaacttggaagcagtacaaagactggaaaagaggaataa

SEQ ID NO: 64835 - DNA, 2094 bp, Acinetobacter baumannii
atgacttcaatgtcgaacactacccaaaagcattttattgttgagcagtttcctttaccgacttgggtcagtgatgaaaaaggcttaattttatactgcaatacggagtgtacaaagtactggcgcgatacttctcctccattgtttcaacaatggctagatttcgtgtaccctgccgatttagaagaagttaaaaacaactggttagatgcgatacgactccgatcaagaattgaatttaaatgccgtcttttgcataaaacccattattatcgatggtgtaaaatttctattcaattgtcgaaataccatgaatcttctcaagaaaatgaatggtttattagttttcttgatattgaccaagatatacaagagcagcaaagcttacgaaaagatatcgatatacaaaatcaaatgctcgatatcagtgtcgattgtattaaggttttaaatacagatggcactgtatctcatatgaataaatcaggatgccttgcattaggtatacctgtagatgaaaaaaaattcggtatgcgatggttagatcttttaccaccccatattcgtaaacgcggaagagttgccttaaaaaaagccttacagggtaaagtggcccgattcgctggcatgagttgcttaccaaatcaagatccagaatattgggataacatgcttaccccaattcaacatacaaacggcgaaattattcaaatattgtgtgtttcgcgaaatgtcactcaacagtatcttaccgaaaaccgtctaagagatattagcgagagagatgaactcacaggattatttaaccgacgctcatttaagctacaactaaaacgcaccctagcttactcaagagaaacccaaaccagtgtagggctacttttaattgatctagatcatttcaagcatattaatgacactataggtcatagtgctggtgaccacttattaaaaatactttctaaacgttttaatcagtgcgtagaccctgaaagatgttcagttgccagattaggtggtgatgagtttgcagttattgttagccatttaaaaaatgagagtgatgttcgtgaacttgcagaagtattgcttcaacaactcaatcaacccattacatatgctgggaatgtgctcaacggcggcatgagcatcggttgcgccatttatcctcaagatgcagttgatcaatcgagcttattaagttgtgccgatatggcattacatgacttaaaagcccgtggtcgtggcggcatacgtatgtataacccaagtatgatgcagttaaccgaggcaatcgcctctcaactcaacattgctcgccagcttattcgtcatcataccattcagccctactatcaacccaaagtcgatctaaaaactcatgctgtagtgggctttgaagcattactccgctggcatacgacttcggcccaaagaggtttgccttctcagattgctgaagcttttaaagactacgatttagccagtaaaattggtgaaatcatgcaacaacaagttttgcatgatattgctaaatggataaaattaggttttgtgccgcttcctgtttctctaaatgccgcaccagttgagttcttaagagataattatgctgaacgtttattaaaaaagattaatcaacttgaaattcctacccatttaattgaaatagaagttactgaacatatgctgggtgaccgtggttctgaatatgtgattcgcgcacttaataaactaaaacagcatggagtacgcattgctttagatgacttcggaacaggtttctcttctttaacacatataagagactatcctattgattgcttaaaagttgattgtagctttatacaaaagatgcaacatgatccatccatttatgcaattgttcaggcaattggcttacttgctccaaatctctcactcggattaattgcagaaggtattgaaacaccagaacaagaagagttgcttcttcaatttggatacaacatagggcaaggttttttatttgaatcagctattgacgctaatcaggtgatctctattcttaaacagggtcaggcttatctagaaagtcactattctatgaattag

SEQ ID NO: 64836 - DNA, 525 bp, Acinetobacter baumannii
atgagtgcattagatttagaccaattaagtgaatatctagatggagaccacaatgagtatggtctagactttgctgcaactcatggatttttgtgtgcaattgcagtaggccctcagtttgaccgttggttagatgaattgttcgaaggtaaccagaaaaaggttccggctgaaattattcaacaaatcaaggtttggctagagtcgattcgtcaagatttagctaatgaaaatgggattgaatttccatttgaagttgaagaagctgacgttgaatcaagcctaggcgattggagtgtagggtttgttgatgcaatgttcttaaacgaagaggcttggtttgcccctgagtatgaagaacaattggttgatttgactttaccaatcatggtttttagcggaattgatgaagaagatccacagatggaatctttccgtcgcaatggacagttaatggatgaactggcagaagaaatcccagataatttgaatgagttatatttgatgtaccatactccaaattaa

SEQ ID NO: 64837 - DNA, 771 bp, Acinetobacter baumannii
atgatatatagaaaagaagcactcgaaaatcaaagtaataaaaattttagcaatatttcattagttaggccattctcaaaaacattatatatatatcttcttttattaacaacaacactcatagccacatttctttttactggagagtacacaagatacatcagtgtaaagggaataaccttaccagaagatggatacataaaaatacaaactaatgagtcaggtttaatcaaaaaccaatattttaaagttggagatcatgtaaaaaaaaatgatttactttacactttagaaattaatggttataaaaaagaaataagatcccccgtggatggctcaataagtataattaattcaatagctaataaatttcaaaaaaaagaaagaactatgatgataataactcctagtaacaaattaaaaataaatctatatttagaaagtcagtacatttcaaaagttaaaataaataataaagttttattaaaatatgattcttatccatatcaaacctacggaataagagaaggatatatatacaaaatttcaaatatggcatattctgcatcagacatagatcccgataacttgattctaaataatgataaaaaaggggagatctacttcctgatagaagtaaaaataaaagaaagtaataaaaaatattatgaaaataaaatagaggaaagagctggattgacattaacagcagaaattaagcaagatcgcaaaaaaattattgcgtggatcttaaccccctttaaaaattaa

SEQ ID NO: 64838 - DNA, 2037 bp, Acinetobacter baumannii
atgttaaattttagtttgaagagaaaagttcctgttattctacaacatgaatcggctgaatgtggtttagcatgcttagcaatgattgtaaattactatggtaacagcatctcaataatcacattaagaaacaaatataaaatatcattacaaggcacttcactgaatatgctgatgataatttctgatgatttgcaacttcaaacaagaccaataaaaattgatatagaaaatttagaaaacattaatttaccgtgtattttacactgggagttcaatcattttgttattttaactaaaataaatcataataactatataattcatgatcctgcaataggtgttagaaaaattaattcagaagatttttcaaaaagttttacaggtatagctttagagatatggccaaaaccaaactttaactcccaaaataatgaatataagattaaaaaatcaaactttaataatttttttaatgaaataatagggattaaatcagtcttagtacaaattttctttatttcattgagtctagaactagttatcttactaaatccacaattattacaatggattatcgatcaaattattcctactcagaatgaaagttcactgtcaatattagcattaagtttcgtttttattttagcatttcaagtaatattggatttagcaagagaaaatcttaatattttcatgaaattcaatattagtctaaaatggcaggccaatattgtttcaaagatactagatttaccagttgatttttttgaaaaaagatcaattggcgatattgcttcgaaatttggatcaatcaacaccatattgaatactataacatcaagctttatgacagccatatttgatggaattatgtcaattttaatacttagcttactattattttactcaccactattcaaaaatgaagaacgcattatacatactgcaaaacagaactctcattttcttgaatctatccgtggggtaaaaactattaagacttttaatgctcaaattgaaagaaaatctatatggttttccctacttactaaccaaattaactctgaaatacaagtagaaaaaataaacataatgactaaagaatttagaatttttctttttggactagaaaacattgtaattatatacttagccacattgctagtattaaaaaatgaattgagtgtaggttctcttgttgcattcgtcgtttacaaaacactttttacaaatagaattactgctttaattgataagttatcagaaatcggtacaataaaattacatcacgatagattaagagatatttcccttactgaacccgaaatcatttatcctcaagaatttatggaaataaattcaaataagttatcaattaaagttaaaaatatttcatttagttattctaattatgaaaaaagcattctaaataatattacattcgaaataccatatggtcaatcagttgccataactggtgcctctggcagtgggaaatcaactttattgaacattttgcttggtattctagctcctacaacaggtgatgtattttatggcgagcataaaatcaaagaattaggtttgtataatataagatcactggttggtacggtattacaagaagatgttctcttttcaggatccatagcagacaatatatctttttttgatgccagctcaaatttagactggattcaagagtgtgcaaaaatggcagctatacatgaggagataatcaatacaagtatgggttataatacacttataggagagatggggaccgtattatctggtgggcagaagcaaaggatcttattagctagagctctttataaaagaccaaagattctttttcttgatgaggcaacaagtaatttagatatatataaagagtttgaggttaataatcttatcaaaaagctaaaaattactagatttattattgctcacagacaagaaactataaattccgctgatagagtcttaataattgaagatggagttttacgtagtgatattatgaactcataa

SEQ ID NO: 64839 - DNA, 1584 bp, Acinetobacter baumannii
atgatgagttttaaatccatctctagtagctcacaagcttcgacatattacgagagcttggcaactgaagattactacgaattaggcggcgaacctgctggttattggcttggtcaactacaatcagcaatgcacctcaataatgaagtacgagtgggagaacttgggaaaattctacaaggttatcacccaactactggtgaaggattggcgagcaatgctggcgaagggcataaaagtggatgggacatgacattttccgccccaaaaagtctgagtgtcgcatgggcgctagctgatgctgaaaccaaagcagcaattcaaaatgcacaaaaaaaggcagttgaagctggggttaggtttcttgaaaaatatgcatttactagtcgtgatcggggcgaaatttcgagttcaattcatcaagttattgctgctgcgtatgaacatagcaccagtcgaatgcaagatccacaattacacacacatgtgcttgttgcgaatttaagcttacgtaccgatgggtcagtatgctcaattgattttgattcaagatggaagttggcaacaggtgctatttatcgtgcagaactagcatatgaattacagcaattaggttttcaaattgaaccagagatgaataagtcattttctatcaatgggatacctcaaaacctatgtaatactttttctaaacgtagaacagctatcattgaacaagctgaaaaacatggtgtaacaagtgcgcaaggtatgcaaattgctacatttgcgactcgtgaaaacaaaacaggagaaatttcacgctctcaactatttgcacaatggcaaagtgaagcaattcaattgggctatcaatctgatttggtgcagcaatgccaaaactttcaatccacagagcattcactacttagtccaatagaaatatttaacgaattgcatcaacaaatgtctacttttacaccacagcaattgcatcatgctatcgctgtggctagtcaaggtcatctgaatagtgatggtatctaccagtatgttgatgaaatattgcggcatcctgaattggttcagttgcaatccattaaccataaattggatcgaggtcttgatcaaaccgagttgcgttttaccactcagacacaattgattttagaacagaaattactagatcaggctagaaatcggcaacatgaaactatgcatcaaattcaggttgatccaatcttaatagaacaatcaaagctgacggtagaacaacaacgtgcatttgagcatatcaccattgaatctggtggcgtcaaagtcattcaaggtatggccggcacaggtaaaggctacttgctcagtgttgcacatctagcgtgggaacatgtaggtttagacgtacgaggtgcaacccttgctgcaaaagcagctcaaggcctgcaagaatccacacaaattccatctcaaactttgcattcattaatttatcaattggatgaaggaaaaacgaaactaagtgataaaactgtattagtgattgatgaggctgggatgattgggtcaagactgttagcacaaattcttgatcatgcagaacaatga

SEQ ID NO: 64840 - DNA, 1794 bp, Acinetobacter baumannii
atgagctcattaaataaaaaacctgagtggcgtattgaagaaggtgtaactgtagcaggtgcttgttttttgattacattaatagtcttccaatacctttcttggaaactaaaaatccctttcacgaatgacattgtgtgggcgaattggcctttattgcctaaagcacttttgggatgcactttatcgacctttggtatacaaactaagtcttggctagaaatttcaacaatgctcaattactttggttacaagccatggttctatctgcatttttatatgcctctagcattgtcacttccaatttctatttatttgggctatctaactgctagacctgtagatcaaaatcatgctcgtggtgccattttacttgatggctcagatgcagttagttatgcaaaaagaaaagttaaagcgtttgacaaaaatattcaaactattgattcaccaactggcttgttaatccatccgcaaattcgtttgccaattggtgctgatactagaggaacactgtattggggtgcaccaaatgcaggtaagacgcagaccttaatgccagcaatcttagatgcctgggaacaacaaccaaacgtgaagatatgtatactcgacaataaaggggactttacagaagtttttgatgaaaatcagtcaattatcttggcaccttgggatgctcgttgcatagcttgggatatcggacaagatatacggacagaattggatgctggacttattgcacaatctttaatcaaggaagtcaaaggtgataatgcggtttttagcgatgcaagccgcgttgcattgattggttttattgtttgtctacaacaaaaacatggtatgaattggggatggaagcatttagctgaatgcttagagtggtcactcgaacataccattggtgaattccaacgcttttaccgaattggtcttgggattttcaaagaaggtagtaaatctagcgatagcgtttattttagcttaattgctaatctttcatttttgcgtcaacttgcccaagcatggcctaagtctgtaggtggattgagtttaagagaatggattcgtgatgattcagatgagaaaccgattctgttattgcaagcaagcaaagcatttcctaccgtgagtgatacttatatttgtgcagtattgaatgtactaattaaactgattttatcccccaattttatcgactcatcaacacgacgaatccattttgttctggatgaaattgcacaaattccatatatcgagcagcttaaaaatttggccgcattgggtagatcaaaaggcgcttgcatttggttaggcattcaagattttgatttgctggtagataactatggacagcatgaagtcaactcactcattggtatgatgcagacaaaaatcattttaagcatggggtcaggcacaggtgctgattttgcatcaaaactaattggtgatcgtgaaatctttacacaagattttgatgaaaatggcaatcgaatccctttgacgcaagcacaacgattggttgcaccctctgaaatttcgcaattaccacaacctacactacaaagtggcatccacggatggataacagtaacaggttggaacgctgtacttcgcctaaattggccgatcaaaaagtttgaaaaagttcgcgaaggtatagaactcgctgaatggattaatcaaattcctgttgcaaatatcactggccagatggttcaaaccgctgtttcttcggataaaaaacgattgattagaaagtctaaaaattcggaggatgagttatga

SEQ ID NO: 64841 - DNA, 252 bp, Acinetobacter baumannii
atgaaaactaaaccagtagcggttcgactaccgctagcgcttgtaacttctcttgagagacaagccgagcgtgaagcaataactgtcgcggatgtaattcgtcatgtactagctgctagtcaatcaaatcgaaaagaccaaatccttgaaaaacttttaacgattgaatctcaagtgaaattgttacgtcagggacagaaccaactcatccaaaaactttcagaatttgatattgatctaggagagcaataa

SEQ ID NO: 64842 - DNA, 324 bp, Acinetobacter baumannii
atgaataattcacaacatccaattatgacagttacaggcatccgtaaggctgctggagactttacagacgacaaaggcaaaacaatcgagttttcaaacacggttgtaactgtgctgcaagaatattctgagcgtgagaaagaacaaggcgcaatcggttttaaatcgactgattacaagattaaaggcgctcagttcttcaatgattatttgcatcagaagttaccagccgaagctaagttgatctttgattgggatttcacaggcaaacaaccaaaggccgtgttagtagctttggattttgatggtgtggaagcagcttaa

SEQ ID NO: 64843 - DNA, 732 bp, Acinetobacter baumannii
atggatgcattagcaggaccatataagaaaaagggaatagatgtattagcaacagcctttacagcatcagcacattcaacgagtacagatgttgtagagaaaatgatcaacccacaatatgccaaagaagtgcctgaagctgaacgggataattatgagtcattatcaaatgaattaagtagcagtaagcagggcgctgagtatttaattaatgcagctgcaggaattgttgttggtggtattggtaaaggggctgttaagaacaataattctgatattgatatttctaagtcaggatttgagataggaaatattaatcctattacaggccataaaatattaggtactcataaagatgaaagtaataacacagttggtaattatattgttgaaggaacaaagccttctactaaagataaagtaataaaaacagatattcaatattatgaaaatcctggccaccatgaccctaaaggagggaatcaaattggttacaacaagacaaaatcagttctgccagataaccataagactttatgggacaacagtattgtagcttctgatgggaataggtgggcagtagaggtgataaacggaaaaaaagtttatcatcgcttccaaaatgatggtaatggtaatttccattggaacggttctacgaatggtaaaacagcaagtggggttgatagaagtgatgttggcaaaattccacctgaaatattgaggaagtaa

SEQ ID NO: 64844 - DNA, 738 bp, Acinetobacter baumannii
atgctgttggcttctggtcaaagtcaacaggcacttgatactatgcgaaaacaaggcaaccttcatattcagcctactcaagaaaaaacaatacaaaatttagttgaagattggtggaaaacaaaaatggaacagcctactgcatcaactctgatgctcgctggaactcgaagtgatctatataagctcaatcaatctgctcgtttaaaaatgcaagaatctgggcaactgggtacaagttgcgaagttgaaatcatccttaatgatgtgcattcatttcgtgaattttcgataggcgatcagattctattctgtaaaaatgcacaaaacttaaatattaccaatggcgatgttgggtcactccgacaacttagcatcacaccagagggctattggcaatttctggttgaacgtgaagatgggcgatttgttgagttcagtttaaccgacgacaaaaacataaaatcaggctatacagcaattgaccatgcctatgccctatctgtgcataaatctcaagggatgaccgttgatcatgcctttgtactcagctcagattcaatgatggatcgcgaatggagttatgtggctgctagtcgtgccagacaaaaaacacatttctattgcacatcggaatttgagcaacagcttaaacaaaaaatgggacaatcaagacaaaaagatacaagtcttgattatgtagtgagccctgaggttcagtatcagctcgaactataa

SEQ ID NO: 64845 - DNA, 1011 bp, Acinetobacter baumannii
atgtcacttatcaaacgcaatgaaatctggtgggttgacttcacctcaccaaacggtaagcgaattagacgctctactgcgacaaaaaataaagtcgaagcgcaagaattccatgatcgattgaaagctgaactttggcgtgtacaacagctgggggacaaaccaaattatacctgggatgaagcaggtgtacgctggttaaatgaaactcaacataaaaatacgcatttaggtgatgttagtaaattggcatggttacagcagtttttccgtgggaaagtgttaaaagagatcactagagacgaaattatcgccattggtgaattcaaaaaacatgaatctagcggtgcaacagctaatcgatatctagctttgattcgagctattttaaatcgtgcttgttatgagtgggagtggatagatcgagtacccaaagtaaagatgtataaagaaccaaaacgccgtgtgagatggattacgccagatcaagtgaaaactttgctaacgtatctcccctctcatcaaaaaaacgtagtgttatttgctctttctactggtttaagacaggctaatattttgaaattaacttggcaacaagttgatttaaaacgtagaactgcctggatttatggagatcaagccaaaggaaaagaagacatacatatttccttaagtgaagatattgttgacttattaaaaggtcagctaggaaatcatcctgaatatgttttcacttatcgcaataaacccatagcaaatattaatacacgagcgtggaggaatgctttaaaacatgctggtattgttaattttcgttggcatgacttaaggcatacttgggcaagctggttagtacaaaatggtacaccattatatgatttgcaagaaatgggaggatggcaaagttctgagatggtaaggcggtatgcccacctagctccagctaatttaagtagacatgctgaagttataggttcgatacttcgtgacacgattgtgacacagcactaa

SEQ ID NO: 64846 - DNA, 741 bp, Acinetobacter baumannii
atgagcacttcacgagtaaagctaactaagtcatttatcgatcaacttgaactcacaccggctatttatcgtgacagtgagattattggctttgctattcgtgtaaataactcttataaaacttacattgtggagaagaaagtaaaagggaaatcaattcgttgtaaattaggggattatgaaaaaattactgttgaagacgcccgtatacttgcacagcagaagttaaaagagttaactgactcaaaccctttaagcattaaaaataataaaatattaaaaaatagtttaaatgagaaaattgatcagccttatctcaaagaagctttccaagtatatataaatcaccacgagttaaaagaaaggacattagctgactatagagaagttatagaaaaatatttaatagacttaagtgaacttaaactgattaatattactgaacagaggattgaagaaaagtatattcagctatctcagtatagttatgcaaaagctaatttatctatgcgtgtacttagagcggtctatcgtttttcaattatgtattatcaaaataaaaattgtgaagtaattataccaaggataaacccggttaatttgttaaagaagaaacagctctgggaagaaattctacctcgaagaaactatatcgatgtggataatctaaccaagtgggtgcaagcaattattgaaaaggtaggggacaggaaaatgaaacaaataaggattttttattaa

SEQ ID NO: 64847 - DNA, 1194 bp, Acinetobacter baumannii
atgaaacttactcaaggggtatgtgggcttactttagctgttttcttatcagcttgtggtggaggtggtgatggctactataatcaaaactcagactcgggttcaacgacaacaccaactacaccttcaaccgatcaagaacttgccaattctgttttaaatagtgtaaagcaagaaggaaaatatttatttggtgcatatgatcttaataatgaaagcttatcaaaaggttatatcgatcatgcattagatacttttgcacaaggcccgctcaagttaactttagatattagaaaagtggaccttactaaatatactgatcattatcgtgaaaaatgttttattaatagtactacagattatcgcgcttgctacgtatttaaaggtgaagaaattaaatccttacttacaggttataatgattgggattttgatattacagcagatgatttaaagaatattaagcttgcttctgataatatttctccaaatttacaggaatatcaatctaataccagaatttatatttttgagaatgaaaataaggataaaaacttccaggatgtgactattactggagcctttgcatatccattccaacagtcatggggacttcaacaaactaaacaaaaaagatttgtcttaattaactcaacaacaagcgattataaaattactacaactaccatggtccaagatccacagacaggccagccaaatgaaaaagaagttaccacaggcgcaatgagcgtatataaagataatacctcaactgatggcgatctctatgtaatccaaggtggctctggtttcaatgtacttatcaatgataatcctaatgttcctttcgcagaaccaatatcatttgttgtaaactcaactcctggcaatacgaataacgcaacatatagagtgagattaggtaagaatcaagtattaagcttaccaaatattactggtattgaaggaagtagagttgagaatgaggctccaacgacgaatatacagaagtttaatggtagtatttatttagaaggacaaaatatttttacttttaaacaagatttgaatggaagtactttagactttaaacatgtaattaatggcgtaagtattgaaggtcaatctactaatcaaaatggagttgtttcaactaccttaaaatcaccattcgcgcaaaaatttacattttaa

SEQ ID NO: 64848 - DNA, 2208 bp, Acinetobacter baumannii
atgccaaataaaaaaattaattatttaatcggtaatgcagagttactgaccaagcaagttcctggacctaaaaggaaaatggaaaaggtacctctttactcagctaatgaaattaagacaagattaattcctcagctgaacatgttgattgagagttcaaatagtctcaacaatgagttatgtccaaaagatctaacggttagtgcagtaacattacatccttcttttatcgcaaaaactgcatttccatctaaattcctgagatcttttggtggtgtaaatctaggaagtaaatcagtaaagattctacccgataagtggaataaagttgtcccccccgaagaaactccaacaactaaattatttgttgcagtaaaaaggtctcagctaaatgaatttagacactcattagaagcattaactgacgaagatgaactaattaatgacttagaaaaaatttggaacattgaatttattcaacctgactcaaaaatcaaagataatcctgagcagattcaaggatactttgaaattggcttacatttacttccttcaggagatactgagtttattaaacgtgaatttattaagttagctcaaaaattagaagtaaaaattcatgcagatttagctataggaatttcaaacttatggtttgtaccttgcgttggtaacgaaaattcagttcatgaattagctaagttttcttttgttcgtgttattcgccctattccaacacttagatcttttacccctatttttaaagcccaacctatttctgcaaatataaaaattactaaacaaaagccattagactcgtcgattaaagtcgcaatattagatggaggattaccagaaagtcatatcttagaaccttggattaaaaattataaacttgcagatagtaaagctgatgatcatccagatggaccaagtcatggcttaggagtaacatctgcattcctatttggcccattaaagcctggcttaatcgatactaaaccttattcttatgtagatcatcaccgtgtagtagatggtaatatagtatatgaggatcctttagaactttatcgaaccttaaatcacatcgaagatattttattatcgcgccaatatgaatttttaaatctaagtttagggcctaatctaccgattgatgatgatgaaattcacccttggacttcgctaatagatagttatttagcagatggtgaaacattcctaaccatcgctgctggtaacaatggtgaatgtgatttagaaagcggtctttgtagaattcaaataccatcagattgcatcaatgcactttctgtgggatcttcaacccatttagactcacaatggagaaaagctagttacagtgcaataggccctggcagatcacctggacgcataaagccagatctcttagcttttggtggctcacctgatcagtattttcatatccctgatgcaataaattcttcacaaattgtacctacttgtggaaccagtttttctgcaccttacttattaagaagcgctgtaggaataagagcagttctaggagatcaggtttctcttatggcgattaaagcgttattaattcacaatgcaattaagaatgaggaatgcaaaaatcatattggctgggggaaaattccagaaaatttaaatgatattattgtttcacctgatggtgttgtcaaaattttataccaaggggaattaaatccaggcaaatacttaaatgttccgctcccaataccatctgacggtataaaaggaatgatttcaatcaaagcaacctgttgtatagcatgtgatacagaccctcaagattcagcaatgtatagcaaagctggaatcacaattaaatggaatcctcaaaaagggaaaatatctcaatcatttttcaaacaaaagtcgtttgcaacagaagctgaattaaggtcagatgcaggaaaatgggaaactgtacttcataatcagctcaacaaacgaggcagcagtatggatgaacctgcttttgaattacattattcagcaagagaaaatggggcagatgcaggttctagagcaagaccaataagatatgcattccttgtaacgatagaagctcctaaaaatcaaaatatatttactgatattttgactgaatattccgatattcttgctgaaatagaaccacaaattgatctaccaattcaaattcagtcttaa

SEQ ID NO: 64849 - DNA, 234 bp, Acinetobacter baumannii
atgtttatgtcagaactcactattcaatttgggcaattggttcgcaaatatagaaaagaaagaaacatgtcacaagagcagttggcattgctctgtaacatggaccgtagttatttgggacgtattgaaagaggggaagtaaatgctactcttgagaaaatttatgagctggcaactagcttaaatataagtcctaaagaattattaccagagcccaaaatggatcatttttaa

SEQ ID NO: 64850 - DNA, 243 bp, Acinetobacter baumannii
gtgacttattttgtagatagtgcaggtaacccaatttttgacaatggtaaagatccagccattgaaatgaatggtaaaatttacgatggggaatggcaagttaaaggcaatgttatctctgaaacatatggagcaccaccaactacatggaatactaactaccaatcaaaaagtgaatttgctttatacaataaagcaagttatgactttcttgttgcccaaatccaaacttactataagtaa

SEQ ID NO: 64851 - DNA, 489 bp, Acinetobacter baumannii
atgcacccaattgccaatgaaaagctttggaatcgttcatttatcctttgtgtattgaacaacctttttttattcatttattactatgctttactcaccatattacctctttatattttaaaagaattatctggttcaattagtcaggcaggtttggcactaactttattcttgatttcatcgattgccattcgtccttttgctggtttgatcattgaacgcttaggcgaaaaaactgcattgcgcggttcaggattactgtttgcatttttggcctttggttatttatttataaatcaactatgggtattactgttgatccgattcgtgcatggaatctggtttagtattttaactacagtaaccgtacctattgtgaatgaattcatcccagagcagaggaaaggcgaaggcatgggatattttgtcatgtctacgaattttgcagttgtgaaccgtaccgggtttgtcggagagtcaatattctga

SEQ ID NO: 64852 - DNA, 1029 bp, Acinetobacter baumannii
atgtgtataagagacaggaaaataacttggggtgtttttagtgtcctgctgttatttttagttgctggcatcttatattatttttttgtataccgattctatcaatctactgataatgcttatgtacaagccgatgtcacttgggtaatgccaaagatttcaggcgaagtgatggagttattaattaacgataatcaggtggtaaaaaaaggggaaactttagcggtattagaccatcgtgactaccaagctcgttatgaccaagcccgttctgtggtcagcttaaaagaagcagcgcttggtgtacaacaacaaaatgaaaagtctgcacggtcgtcaattattgaagcaaatagtggtgtagtggcagcacaagcagacctagtgcgtttgaaaaaagagttcgagcgttatcaagatttattaaaagatggcgtaattacccgacaaaattttgaagggattcagtctcaatatttaacggctcaggcacagctcagcaaagcgcaagccgccgtaaatgcagcagaagctcagttggggagtttacaagccagtcgagcgcagcttttagcagatattcaaagtgccaatgcaaacttaaacctgtatcaggtcgatttggcttcatcaaaagtggttagtcctgtaagcggtaaaatcggtagtctggcaattcaaaaaggctcacgtgtttctccacaaacccgcttaatggcgatcattcctgaaaatagtttgtatgtacaggcgaacttcaaagaaactcaaattgaaaaaatgcatattggtcagaaagttaaattaaaacttgatgcctatccgagcctcaactttaccggaaaaattgagagcttttctcccgcttcaggtgcgactttctcacttatgccaccagacaatgccacaggcaactttaacaaggttgtacagcgtattcctgtacgtattgccatagattcaagcccacatattgatttgataaaacctggaatgtcggtgagcgccaccgttgacctaagaacttaa

SEQ ID NO: 64853 - DNA, 303 bp, Acinetobacter baumannii
atggctaagagcttacaagaattattggctagtcgctctccagagagtcaaactcgtattcaaaaaatggctgatgaattacttttagaaagtcagcttcaccttatccgagaagagttagaaatttcccagaaagaactagctgcaacccttggaattaaacagccttcattatcagcaatcgaaaatcgtggtcatgatcttaaaatttcaacgatgaaaaagtatgtcgaagcaatgggcggaaaacttcgtattgatgtagagcttccaacaggaaaacacataggattcaatctctaa

SEQ ID NO: 64854 - DNA, 396 bp, Acinetobacter baumannii
atgaatacagatatggtgctcgatgcattagagcaagcattgcatgatcgaggcatgccaaagaatgtgattcatcattccgacagaggtgtgcaatatctttccattcgttatacccatcgtttagaagcagcaaatttacgagcatcagtcggtacgactggtgattcatacgataatgctttggctgaaacagtgaatggcttatacaaaacagaggtgattgaatatctaaaagcagattggcaaggtttagcagatgtacaacttgcgacactaaactgggtagattggttcaataaaaagcgtgtacacagtgcactgggttatgtatcgccttttgagtttgaagcaatgtactatgataagattaacccgttaggtcaggtggcctaa

SEQ ID NO: 64855 - DNA, 480 bp, Acinetobacter baumannii
atgaagcaggcatttgagctaattaaagcttatccaacaatgggtgattttttagcatatcaatttgtgactgatataaattatagtgagataacaaatttttcagagatggagtttgttgtgccgggtccaggagctcgtgatggtttacgaaaatgttttaaaggtaacaaaaaatttaatgaacaagaattaatacaattaatggcagatcaccaagaagaagagtttagtagattgggattaagttttaaatctctatgggggagaccattacaattgattgattgccaaaatttattttgtgaagttgataaatattctagagttgctcatccggagatcatgggtgtatctggtagaacacgtattaagcaaaagtacaattatacaggtgagcttgaacaaccctggtttccacctaaatggaatattaatgaaaaaatagctcagtcattcactttgcagacttctagatag

SEQ ID NO: 64856 - DNA, 1443 bp, Acinetobacter baumannii
gtgcgactgttcttaagtcatgcgaagaaaggtggtataggcgaagtatatgcaaagtctataaaagagtttattaatactacaaatatcaaagaattctttgatgcctctgaaatttcagcgggatatcgatttgatgaggaaattattagtcatattaatcaatctactctcatagcaattactactgatgagtattcatcacgctattggtgccagagagaaattctcgaagcgaagaagacgaatagacctatcattgctgtaaattgtctaaaagaatatgaagacagaatattcccaccagcagcgaatgtgccatgtgttcatataaccccttcggaagatccatctagacatgaagttttgaccattttagttgcagcattaattgaaactattcgttttaatttttcgaataaactattgaactattatcaaatgcaatcttgggttgataaagatgctgtgattctagctaggcctcctgaaattcagaatgcaatattactgaaacaagatctagaacaagataaacaactgacgatttgttatccagagccaccgatctacgctgaagaaatggattggacgaagtatttaaatattaaagtttcaactccattgtggcacagtgaagaagaacttaatctaaataaaaagattggaatctcaatttcagaagatggccaaaatgattttacaaaaagaaatactcatcccgatgagctaaagagattatctcaagagttagctagacatcttctcgtgagaggaaatactttaatatatggtggtgatttaaggcctaatggatttactgaatttattttagaagaagctagtattttacaaaatcgtcttccagataaaaaatttgaagtacagaatcacctctcttggccattacatttacatatacaatacaaggtagataactcagtttttttaattcctgaagatgtagaagctaaatatatttggtctagatgtttaacgttaatgagagagaaatctatcaacgaatcagatatcagaatttgtgcaggtggtaaagctacgggttatacaggaaaaatgcctggtgtattagaagagtttttgatagctgttgataattctaagcctatttatttgattggtggtttagggggaattgttaaagacatctgtgaaagtatccgaaataaaacgatagtttctacgttaacacaagattggcaaatagcagaaaataagctatatgcagatttattgactgttcttgaatctaatggttattccgtcaattatgataaaattaaagataaaataatggatttagatattagtgttttggcgaaaaatacaggtctaacttcggaagaatatattaaattaatggaaacaccttttatagatgaaattattcacttaattttgaaaggcctaaaaaacatataa

SEQ ID NO: 64857 - DNA, 132 bp, Acinetobacter baumannii
atgtgtggtgtaaatctaaccattaaatcaaaggaacattacttaatgcaaagaaaagggggcgcttttaacgattgtactggtggcgcttggtgcccaccaccagtagagcctgtaaattattttgtgtaa

SEQ ID NO: 64858 - DNA, 1155 bp, Acinetobacter baumannii
ttgaagaataataatgttgtagttgctagtcccgccaagggtgagtttgtttatgggaaattgaatattcttgtgaaaattattgaaattttttcacctaaattccacttttatgttgatcagttttatgagcttcaagaagacttaataaagtcaaatgttccattacacttagcggatgctctatcaagtaaacaggaatgctacaatttctctaaaatgctgtatggtttatataaaaaatatgatgcttactattctgttgatctcgaattgaaagagtcacagagattatttaataaaacgttggggattgaagtaacatcacaaattgatctcgataaatggaaagaagcaattaattttttatattttttttcagaaataacttataatttgtcaaatgataaaattgctaacgtttttaatggtagtgaaaaaaaacaagtaacaatttcagataaagatgttttaaattggtgtccatattgcttcaggaggtctaaaggtacaggtagtatagaacaacaatattctagaattgaatctttaaatgatataactgaatttttagaatctatgagtactaatctggggttggagaaaatagatgaattaaaaaagtattttaataaaaattctgtaggaggatataatattgatgatatagtggaaatattgaataatgatatattaaaagaaagtaaaattaaatattctaaagaatctatattggtaaagcgtatattaaaattaataaactataccccaaaaaaaaagttaacttgtagaattcacaattctgtagatgacaaaatttatagagcagcaaaaaatagagccgataaactcagcctagaagatagggattttatatatcaaatacattctgaacgaatttcttatgaattacacaaacctcgatacgagatagagtatgttaccaatgaacagtggcaagaggctggtgattcttggattaatgcacttaaaaaattatttccagatgaagatttgtctaagataatgaattggaatcaatttgtagctacgtttcacctattactccaaaattatgatgaaactacgaataatccaatatggattatggatatttttgtagaagctgaaatttggttcaatgatatacgctga

SEQ ID NO: 64859 - DNA, 669 bp, Acinetobacter baumannii
atgttccgacagcaaaatctttatcttttgctcttttccttatattgggcacaaggtttgcctgtaggttttatgacgcatgccttacctgtcatattaagagctgaaggtgtgtctcttgcccatattggtggttttgggctgctcatgttgccttggtcaatcaaaatattttgggcgccgtgggtagatcgacatgccatctcgcatttaggtcactatcgtagctggattttacctgctcagtttttgacggtgggtgtactttgtattttatcttatttccctatacaagttttagatcagcctctttatctctttatattttttattacgctgttatttatgaacttaacaggcgcaactcaagatattgcgaccgatgctttagcggtcaatttattgcaacatgatcagcaacattggggaaatacttttcaagttgtaggttcacgacttggttttattgtaggcgggggagccgtgttatggtgcctagactggttgtcatggcaaccaacttttctattattagccgctttagtctttattaataccttacctattttactatttaaagagccatctcatacttctcattcacctcatcaatatagccaaccaagtctagtgaaccgtaccgggtttgtcggagacttttttatttaa

SEQ ID NO: 64860 - DNA, 453 bp, Acinetobacter baumannii
atggctaaaaaaaatatctttataagtcacatacatgaagatgatgatggtctaaaaaagacaaaagatctaatgaaaactagagggtttgaaattagggacttctctataaactccaataaaccaaatagtgccaaagctgaggaatacattaagtaccaaattttagctccacgaataaagcaatgttcaactctaatggtttatataactcctcaaactaaaaacagtcattgggtaaattgggaaattgagtatgctcaaaaattaggcttaactatcgtaggcgtttgggctcatggccatcaaggttgcgaagtgcctgaacagcttgaaaattatgctgatgcaattgtcggttggaatagtaactgtttagttaatgcagttaatggggagagtattttcgaaggatacagttcaccaaatgttgcaaggcatctctgtggatag

SEQ ID NO: 64861 - DNA, 603 bp, Acinetobacter baumannii
atgcaccaattggccctacacgctttacatgtggcgctgatgaaagaccaagctacacaatatttatggattgattcaacaactctgccagtttgtaaaaatcaacgtattcagcatcataaatcattagtccaaattgcatcacgtggtagaagctcaatgggctggttttatggctgtaaattacatattgcgatgaatcaatttggtgaaattgcctgttctgctttatcaaatggacatgttgctgacataaaaatggttgagcaattggttgctggtatagaagcaaaactttacggggatcgaggttacatcagccaagaattaaaaatcagattgaaagatcaaggtattgatttaattacttatcatcgaaagaatatgcaggctattcaactctgtgcatcagatgaatatcacctaagacaacgcaataagatagaaacattattcagtttattgaaggggcaatacaatttagtgacgagtaaagcacgtagtcttcatggatttctgagtggaatttacgcctcactatgtgcatatcaattaacccatcaaaataagccaacaattcaaattaaggaatcatcggcttaa

SEQ ID NO: 64862 - DNA, 267 bp, Acinetobacter baumannii
ttgattgaatccgagaaagattatccatcgaattgggctgcgatcaccgctattgctcccaagataggttgtactcctgaaactctacgtgtttggtatcaaaaatatttagataaacaaaacccaattaaagtacagcaactttcagatcaagaacgtattaaacaactcgaacgtgaaaataaagaactgcaacgtgctaacgaaattctacgtaaagcagccgcttttttcgcccaggcggagctcgaccgcccacacaaataa

SEQ ID NO: 64863 - DNA, 540 bp, Acinetobacter baumannii
atgaatccagaacctactaatttaaatcaaacacaatccatccaatcaaatcatatagaaaatttaaaagttattagtgttaataagtttatctttctatccttaatttcctttggcttatacccaatttggtggatgtttaaagcatggcgattttttctaatcaaagataagttaaatattatgcccgctgctcgtgcaattttttctatattctttttatattcactatttaatcggataaaaacttatgcaaaagaacaagggtatattaatgatttctcttcaggttggatgtatctaggatatctcattacatctttactggttcgcctacctgatccttactggcttatctctctctgcagcattatatttttaataccagcctttaaagcgttgaattatgcacaaaaacaaatagaaacaacaattaagcaagaaaaattcaatacacctcaaatcattttaattattataggttctatcatgtggctgctgattcttttcagttttgttatattattcctatataagtga

SEQ ID NO: 64864 - DNA, 366 bp, Acinetobacter baumannii
atgattaaatctctctttcgattgtctttacgcatggtcactggctttgttcaaagtctcatccatctttgtgggttaaattggatagcgccagactacactacaatttgtagacgacaacagcatattgatattgtgattagctatcaaaaaagttgtgatggactgtatctaatcgttgactctacaggtctgaaattcttagatgagggtgaatggaagcgtaaaaaacatgagcctgaatatcgtcgccaatggcgtaaattacatattggtatagatgctaaaaccttacaaatacgcgctgttcagctcacaaccaacaatgtgagtgattcacaggtacttggtgatttactcgattag

SEQ ID NO: 64865 - DNA, 207 bp, Acinetobacter baumannii
atgaaaaaaaatgcaatacatcaagaaaatgcgttagattcaattaaagaaaaactaactaatgaaggtattaatggagaggctgaatctgcattaaagaaaatgctagtgttagctaagaaacgtggagaaaccctatctgaagaagaagccgtgttagtttcaggaggagcatacgccaagccaatgtctatacatcaaatgtag

SEQ ID NO: 64866 - DNA, 534 bp, Acinetobacter baumannii
ttggggtacttctctcaaaataaggaacttcgttcttggttaatcgtccttataacttttaaggttgcagatggtttagccgggccattacttaaacctttaatggtggatatgggtttaagttttactcaaattggtatttacatcaccatgcttggggctgttgctgctttattgggggcgcttagtgctggctggatgttaaaacatatttctaggtccacagcattaatgactttttcgatattaaaaattatgagtttagggggctatgcgtatttggcttatgcttatgaacaaaagataaaaatagatgcatggcttatctatgccgtaaatgccctggaagatgcctttgctgccatgctactggtcgtgatgttaactttggttatgcattacagtcggaaaaactatgcgggtaccgattttacttttcaggtttcagtcatggcgacagtcagtggtggtgtttacagctttagtggagtgatgtgtgctgaaaaaacaggaggttttaacttggtaaactaa

SEQ ID NO: 64867 - DNA, 303 bp, Acinetobacter baumannii
atggctaagaccctacaagaattattggctaatcgctctccagagagtcaagctcgtattcaacaaatggcggatgaattattgttggaaactcagcttcaccttattcgtgaagagttagagatttctcaaaaagaactggctgcaacccttggaatcaaacagccttcattgtcagcaatcgaaaatcgtggtcatgatcttaaaatttcaacgatgaaaaagtatgtcgaagcaatgggcggaaaacttcgtattgatgtagagcttccaacaggaaaacacataggattcaatctctaa

SEQ ID NO: 64868 - DNA, 303 bp, Acinetobacter baumannii; identical to SEQ ID NO: 64867

SEQ ID NO: 64869 - DNA, 168 bp, Acinetobacter baumannii
atgaaagcagcacgtttttatgacagaggcgatattcgtattgaagatatccctgaaccagaagtcactcccggcactgtaggcattaaggtagcttggtgtggaatctgtggtacagatttgcacgaatttatggaaggaccaatttttatagtcaaatcattataa

SEQ ID NO: 64870 - DNA, 207 bp, Acinetobacter baumannii
atgtgggttgaaattgataaacgttttgctgaaattaccggtgccgctataggtgaaacttataaaaaatatgtggaaggcattgctttaggtagagcccaaacaccagatgatgtagctgcattagttgcttttctggcaagtgaagattcggactatattacgggtcaatccattttaacggacggcggcattgtctatcgctaa

SEQ ID NO: 64871 - DNA, 165 bp, Acinetobacter baumannii; identical to SEQ ID NO: 56603

SEQ ID NO: 64872 - DNA, 291 bp, Acinetobacter baumannii; identical to SEQ ID NO: 64797

SEQ ID NO: 64873 - DNA, 519 bp, Acinetobacter baumannii
atgtcaaattttattctcccaacacgtgctttagaagttgtaaaaaaaggaataaatctgttccatcacggtgggtttcacatggtcggtgtcgacaaaattgtgaaggaaaccgaagtgaataaaatgacattttataattattttcactctaaagaacgcttcatcgaaatctgtttaatcgtacaaaaagaacgcctccaagaccaagtggttgcactggtcgagtatgaccatgacacaagcactatcgataaactcaagaagttgtatgttgtacataccgacttagaaggcccgtactacttattatttaaggctatttttgaaactaaaaatagttatccaaaagcttataaaaccgcggtgagatacagaacatggctgaccaatgaaatttatagccagcttagattacttaaaaccgatgcttcttttaccgatgccaaactctttttatatatgattgagggcgccattattcgtaagcgtccgctgaatcccatacctattttttaa

SEQ ID NO: 64874 - DNA, 876 bp, Acinetobacter baumannii
atggctttaatatcatgcccagaatgtaagaaagaaattagtgatcaagctaaaagttgtcctcactgcggttttcctatagaaaatcttagaaacccatttcttaaaacaaatgcatcaagaacaacgcctccgcctttacctgatatgttaagtaataagagcaacctttccagcagctcacaagaaatatcttcgtctcaaaactcaaagatacgtactaaactttttaatcttttactatgggttatcatcttaggtattccaataatgctcttcgctaatattggttcagagacaaaatcaaataataaaatcggagataaaagcaatatatcttcagcaaaacctattaatgaatatgcatataatgactatacaaaagatcaattccctaagctttatgctgaatggggaagtaaatgggttaagaaaattactaatgtagaaaaagcagcagtacagaaagtcgctaatagcgaaaatacttgtgattcaattgaagaagctggtatctctacaacgcgaagcatacctaaaaaagaaattgttatttatgttaattgcgcaaacggcgagcatttttatgtttcagaaaaggaattaaaagaggataaacagatactatctcaggcacaaaaatcagtagatgtagatgaagctataagccgatgtaagcaactaattagagttaatgaaacgcatcccttatcaatcaaatatgggaatatcgatacttttaaagcgcaaggtaatggcaatattgttgtatctgtattgtatgaatcaaaaaatgatctaggtggagaacttccacataaggtgaaatgctatattccacctgaaggaaaagatgaaatctcaaaaatagaataa

SEQ ID NO: 64875 - DNA, 1881 bp, Acinetobacter baumannii
atgagttcacatgagattggacgtcaaaaaatgtcagcaatgacattgggtgctttaggggtagtttttggtgatatcggtactagcccactttacgcttttacccaatgttttcatacatcacataatgttcctataaatgaagcaaatgttctaggcattttatcattgattttttgggcactgatgatcgtggtgtccttgaaatttagtatgttaattatgcgtgctgataatcatggtgagggcggcattttagctttattagctcttaacatgcacaataagcaaattgggcctaaagtgcgctttgggttaattacaattggtttatttggtgcttcattgttttttggtgatggcattattaccccagctatttcagtattgtcagcagtagagggattgtcggtagcaacccctatttttacaccgtatgtaataccaattacgattgtgattctaattggattatttatgattcagaaaaagggaactggatcagtgggccgtttttttggacctatcatgctactgtggtttttctcattaggtattattggcctatctcacattatcaagaacccttttatcttgaatatgcttaatccgtattgggcttttcctttcattgaaaataaccccgtgactgcatttgtagttatgggagcagttgtattgacgattacaggtggagaggcgttatatgcggatatgggccattttggtcgtaagccaattcaattagcttggttttttgttgcgttaccatgcttggtattaaactatgcgggacaaggtgcattaattctgcaaaacccgcaggccatcgagaatacttttttcatgatggtacctaaaatagcattatatcctatgattgctttagcaactgctgcgacagtaattgcctctcaggcagttatttcaggtgtgttttctatggcacgtcaagctatccaattaggttatttaccacgttttgctattgatcatacctctgaatctgaaattggtcagatttatataccagcattgaactggatgttgcttggtatgattattggtttagtgcttatgtttcaatctagcgctaatctagcttcggcttatggtattgcagtaactttgactatgttttgcgatacgattttagttgctttcatcatgtatcacttatggaaatggccttcgtgggttatgttgttaattgcgatacctttgctaattccagatctcctctttattgcttcaacttcactaaaaattgtagatggcggctggttcccattaatgatgggtgcgatcacttttataattatgacaacatggcgccgtggacgtgagttactactgcgcaagttgcaaagtgacactatgccattagatttatttattaagagcttggagtctagtgcttatatggtgggtggaacggctgtatttatgacaagtagtccaaaagttgttcctcatgctttattacataatttaaaacataacaaaatacttcatgaacgtaatattttgatcactatcaatactcgtgacattccatatgtagatgaatcagaacgtattgatgtcgaagtattagataagcattttttacgtgttagtgcttattatggatttaaagagcagcccaatgtacctcaagcattagaacaagctttaactaagttgaatcaaccatataacattatggacacaagcttttttgtatcacgtgaacgtgtaattcataacgtaggtgatggtattgtttcatggcgcgaaaaactgttcatttctatgcaacttaatacgagtcctgctagtgatttcttccagatacccgctaaccgagtggtggaaatggggagtcaagtagagatttag

SEQ ID NO: 64876 - DNA, 822 bp, Acinetobacter baumannii
atgtctcagctttctacgatcattgagcaagcatttgaagaccgcgcaaactttactgcagcagattgctcaagcgaaattcgccaagctgttgaagaagcaattgctggattagataacggtacacttcgtgttgcagagaaaatcaatggtgaatgggttgttcatcaatggttaaaaaaagctgttttattatcatttaaactaaatgacaataaaccaatcgagtcatgtgatcttcgtttctacgacaaagttgaaactaaattctctggttggactgaagagcaatttaaagctgctggtgttcgtgttgttcctcctgctgttgctcgtcgtggtagcttccaagctaaaaatgtggtgttaatgccatcttatgtcaacattggtgcttatgtagatgaaggtacaatggttgatacatgggcaactgtaggttcatgtgctcaaatcggtaaaaacgttcacttgtctggtggtgtaggtattggtggtgttttagagccattacaagctaacccaaccattattgaagacaactgctttatcggtgcgcgttctgaaatcgttgaaggcgttattgttgaagaaggttcagtcatttcaatgggcgttttcattggtcaatcaaccaaaatttatgaccgtgaaactggtgaaatccattatggccgcgttcctgctggttcagttgttgtacctggtaacatcccgtctgctgatggtaaatacagcttatacgctgcaattatcgtgaaaaaagttgatgcgcaaacacgtgcaaaaacaagtttgaacgatttgttacgcgctgactaa

SEQ ID NO: 64877 - DNA, 618 bp, Acinetobacter baumannii
atgttaaaaaaatctccaggacgtccctctcgaatccgcccaactcttatagcagcagcacgtgaactatttcttgaacaaggtttagaagtccgtttagaggctattgccactaaagctggtacaaatcgacaaactttatataaccattttccaaccaaaacagcgctgctgattgaagtcttcgaccatttaaaagcagaaatggaagctccttttattgagcatcacgtggatagtaacaaacgattagatcaacgtttatttgatattgggtacgctgtgcaaactcatttttataatgttgatgcaattcgtctgcaacgattactgattattgctttagttgaaatgaaagagattcttcctaaaattcagaatcgtactcaaggcaatattaagaggtctttaagtcatattcttgaaactgcacacaatgctggcttaattcaagttgaacatcctgatgaagctgctaaagcctttttgggtgctgtaatgggatattcttatcctgcaacaatgctagggggtgcaccacccactcctaaagaattgaaaaaactcaatcaagaagtttgttcaatgtttttaaaggcatggcagtataaagaataa

SEQ ID NO: 64878 - DNA, 1005 bp, Acinetobacter baumannii
atgttaaaaaataagtttgtaattttagccatcctaccaatgatgttaagtgcgtgtggcggtggtggttctagtgataataattccgtaaataacgatcaaagtagcgcatcacaagattctacggcgaacggaagtcgttactattttatggattacaatgcgaatgaaacagatgagttaaatatttcctattttgaaatattcaataaaaaatcaacagatgggtcttctaatcaagctttaggtgagtatttgctcacagagaaaaaactctatcttccaactgatcaagccattaatgttatgaatattaattcgctaacggattggacactggatcttattggtgatgttaaagaggattggaaacttcagagagttaatctttctggtcagaatatgtttgacgctgttttaccgggttatcgagcagtaggctttccagtaaatgatgcaagtacaactaatggacgtatatttcttaatacttatggacagaataaatttcctgacggaagtagttgctatcgtttaatttcaaaaaaatctaatcaagagtcttttgcattcaatgtcggtcaagattatgaaattaaccagagttttgacgagttcgatgcagacaatgcttcgtaccttaattatttaaatcaaactaatccattcggctttacttataaagcagttaaaggaacatggcaaacagttcagtggacgacaatttatgatactagtctaggttttgctgcgagcgatagtgttgcggtgcaatatcaaggtaagccatacacagcaagttatacaagtaatattggttggactgctgatcaagaagttaagcattgggaaacatacctaaaaaatgccaatgatccccaacgcatccgttttgctcagttaagaattgcacaattgaaatcaggctgttatgtctataatgaaaccgctgcaagagcacttgtttctctaaatgcgttaaattggaaaccctatcaaaactaa

SEQ ID NO: 64879 - DNA, 384 bp, Acinetobacter baumannii
atgaacgaagtaaaaagtttgtctatttccaaatcattattaattttaccattagtaatacatcaaccgacattgcaattactatctcataaacgaacaacttttaaaggatcagcttcctttgtttcaacatatccacgattattaacaaattttaatagacgttattttagcactctaccacttacgttgaactctattcaaattttaataaatttaaattacttagaattcaatgaaaatattgagctaagaaatattctggatatcgataaagaattcggtgagagggcaattaagatctcaaaagcagctaataaaatttcagagctgctacaagaatctgaagaagaactttatttaaactttagagtaaaattatga

SEQ ID NO: 64880 - DNA, 1848 bp, Acinetobacter baumannii
atgaattttggattagatgcgattgttctatggtcaagaaaaaatgaacttcgaaaattagattttaagagaaataaaattaatgtgataactgggggaagtcaaactggcaaatcaactttattaaagatttttgattattgttttttagctagtgaacataatattcctcatgatattattaatgataacgtgagctggtatggtattaagttttatattaataataaaaattattttctagctcgtaaaagtccatctgaaagaggtgtttcagatgaatattatttttcatctttaggtgttattccagaaattattaaaacaaatataaaagaagatgtattaaaaggaataattgcttctgagtttggattagatgagagggtaaaattaccttttggaggaagttctttaagagctgggagtaaagtatcttttagatattttttcctttttaatatgatttcagatgatattattataaatagtaaaaatttttttgataaacaagaaatcccaagataccgtgaagcattaccaagagtttttgatttagctttaggtattgatgatttaaataatattttggcccaagagaaaaaagattctttacttaaagatattcttaaatgggaaaaaagagaaaaacttttaaatgagggtaaaaattctttcgattttgaagttagaaatatagcttcaaaagctgttgcttatggccttattccccaagttgatactaatatattgccgatcgatttatatagtttattagagaatactaaaactattcctgattatgatttttcaacaaaaagacgtgaagaaatcaattcaagattatttattatcaataagcagttaaaagaatgttctcaatttaatgatgattattcaaattataagaaaattttaaaaaactctagagatagtttaaagccgattgaagctttagtaaaaagatcaaatgaagtggttaaatctgaagtttttgatgaattaattagtgctctaaaattagatctttcaaatattaaaaaagaaattcaagctaaacagccggtagaaagtcagataaattctgagataattcgacttaaagttgagaaagaaaagttaatgtatgagctccaagtactacctgaggctcctcaatcatttttggagttgcaaaataaatgggaatttattggtgaggcaaaaggcaaacttagtatttatacgcagctagaaagtaataagttatctaataatttgcctgaaatcaacgatattgaaaatgaatataattcaattaatgttaaaaatgttgaagatgaaagagtagctaccattggtttgattgatgaggttgctactgaattaatgcaacaggtaaatggtgcactagataattatgcaaattggtatgcaagctttaattataaagataagaagattcaactaagaaagccgaagtctaccctaattgaaaatattggtagtagttcaaatcatatgtttttacatttaattcattttttatctttgcatgaagtggcaattaataaaggatctaaatttgtaccttcttttttaataatagatcaaccaagtagaccttattggggtgatgatggtgcatcaaaagatgtaaagtatagtgatcaagagaaaataaaaattgcttttcagctgttaaataattttattgatactgtgaatattaattataagcatgaatttcaaatattaatgtttgaacatgtaccatctattatgtttaaaggtttgaataatattcatttgttggatccttttagaggcggtaatgctttaattccagaaaattggtataaggaataa

SEQ ID NO: 64881 - DNA, 879 bp, Acinetobacter baumannii
ttgaactttgctttcagtaacgcttcattaagcttatttgactatactctctcttggtttttgatcgcaacaggagcacgaccagtccaattatcacgcttaaaatatgaagacatacaaatcattgataatgaagtaatgattaaaatgcctttagctaaaggagaaggaattgtcgagcaaggctattttctaaggaaagcaccgactattttggctgactgtataattaaatatatagagagttatcctcctcctgttgatgaacaaacaaatttctttaagttaaatcctatccaaattagtcacaaaactaaacaaatcttcgaaaacttatctacttattcctcaagattagaagcgaaaattccagtaaatgcatatagattcagatacaccctagcaacaagagcattagctagtggcgcttcagatcaagaagtagcaagactactaactcatcgctccctaagttgtatacgttactatcgtgcctctatgcctgagttacagaaaccaatacaagatgctttagatgaggaaatgaacttttttgcaaaagcatttaaaggaaaaataatcccatctttagatgaagcaaaatttcaagaatcagcaatagcagattttttccgattagcaggaaaaactattggctcatgtgggacacaagctaaatgctatcaaaatgctcctatagcatgtttaacatgcccctattttgaaccattaatggatgcgccttgggataaacttttagaatatttactagaagatcaagctaaagaacaatcattaaggattaaagaaatcaatatacaggctatcagggcagttaaagatcttattagtcttatagaatcaaggtataacgaatga

SEQ ID NO: 64882 - DNA, 261 bp, Acinetobacter baumannii
atgtttagttcttctagggatattcctttatttgcagcatttgtagaccaaactacaagtttttcagtgagtatgttgttatcattttctaatcgttctatggttctttcaagcttttcaattttttcaaaagctgtttgcaatccagaactaccgaaattatttttttcgtttctttcggggttttcgatccatcttcttttatcccaagtatttttgaatcttgagtgtctcaatagagcagctttcgtatacttatga

SEQ ID NO: 64883 - DNA, 1176 bp, Acinetobacter baumannii
atgcttactgatgaacagcaaaaagaaatactaaatacaattcaaaaagcaagagaagagattaagcccgataatgtaaggctttcaattggggaggttatttctatttataaaaataatgaactaattctgaatccaaattttcaacgagtatttagatggtctttaattcaaaaatctagattaatagaatctattattttaggtatacctttacctccaatatttgtgtctgttgatatacaatcaatatggactgttatcgatggtgtacaacgtttatctactatcttacaatttactgataatttagaagctgaactcgcagataataataatgatgatatagatgaagatgatgaggacgttgaagttgaaactgatacagaattagaagaaagtgaaatagaaaagaagaaaggatttaaactaacaggtttaaaaaaactagataatttaaatggtttaagttggggcgaattgggtgttgatattcaacgactaattaaacgccattacttagacgttgtatcaatatcaacggttaagtatgaagaaacaaaatttgaaatgttccaacgtttgaatactggaggcagttctctttctgatcaagaaaagaggaattgtataattattatgaaaagtgaaaacttttataatagattaaaagaattcgttgaaacatctacatttaaagagttattaaagattaaaaaaggaaaaatagaaacagattatcatcttgaactacttttaagatatttaattgcgaaaggtaatatttatgatatgtctaagtatccatatacaacaacgttgatgaaagagtttattgatgatgaaactattttgttaattaatagtgagtttaatttagaaatggaacttaatattttagataaaacattaaaattcctaaaagaagaagtaaatgaaaatatatttaaaaagaaagaagttggggcgtttaatttaagtaagtatgaagctttattggttggagtggcaagcaatatagataatattattgaaaataaaaataaatttttagaaatttataaagaaatagagaatcaagattgttttaaaaatggatctaaacgtggaagaaaagctttagaacgcttcaaaattttaaatgacttttctcgagagtattttaaaaatgtgtag

SEQ ID NO: 64884 - DNA, 879 bp, Acinetobacter baumannii
atgtgtagtaattttgaagaattcgaaaatgaaatttatagggatttgagctggagaaaagcagaaattcaagacttcaatacagaaataaaatatccttcgactgatcgtttgattacggaacaagttgaaaaggctgttagaaagtctttgatattacttatttatagtcattgggagggatttataaaaaggactgctaaacagtatttaaaatatattgtaaataaagaaattccttctaaaagattaacagaaaactttcatgttcttgttattaaagggcattttttttcagcatcagatcaaataaagcaaagtcaaaaaaattctttatctatggaattgtttaatagaatagttaaagattatgctgaaaaaatggaaaataaatttttcttaaatattgatatgaataaagagcgagattcctctattattgatactaatagtaatttaagttcaagtatttataagaatatatttgactgcctaggaataaaattttatccatgttttgagcttccaccacaaaaatcttttatcaatagtggaaatttaaatcctaatattcttgtgcagatcctagataaaactcttatcgattctcgaaatcatatcgcacacgggaacaagaatgatcctcaaacacttatagatttacacaagtttgatgttttgaaagatttaatttttctgttaatggataattttgtagataccatcctaacttttgcagaaaaagaatattttcttcaagagaaaagtattgaggcagaacaacatatcttagatgttgacttaaatttatcagcaagtttaaatcaaaaaataagctcatatattagtcagttagagagtgcagaatgtgatgtatag

SEQ ID NO: 64885 - DNA, 1449 bp, Acinetobacter baumannii
atggatttacattttgaagaagcaaataattttttagagcacttagaactcttacaaattattcatgcatcaaatacttcaaatgagttcaaaaaaaatattggtcaattttttacatctaaagagatagctagcttcatgtcttccttgatctcagtagagggagatatttataagttattggattcatgtgctgggctgggaatgttatctatcagtacaattctttttttagttagtaagggcgtgaaaaaaatacatttagatgcttatgaaattgatttagatacagcaaaaaaattacaagataatttagaaaacctaaaaaagttactaaatatagatcttagcttcaaagtttttattgaagattttctattgaaagaaacgaatgaagaatatgatattacggtaattaatccaccctacttcaagctttctaaagatagtaaataccgaacaaataagaatggacttataaaaaagagtcctaatatttatgcatcatttatattaaaatcaataaatcaactcaaaaaaaatggacaattaatttttattacacctcgcagttttacaaatggttcaaattttgaagagtttagaaataaattaattaatgacaactgtatagaatacatacatttatttaattcaaggattgccatctttaaaaatgataaaattcaacaagaaaatgtaatttttaaaattaaaagatcaagtattcaacttgaaattactattagtaattcagattgtattgaacaattgacatcagaaaatttgaatattcaaaaatatccttcaagtattattttaaatcaatctcgaaaaaatattattgctatccctagaaataaaaaatctatggatctatatcttcagcttttaaattttacagaaacatttaatcaacaaggatacaaggtttcaactggaaaaattgtacaatttaggaataaaaatattattgatgattggcaacccaattcgattatagtttataattcacatcatattagccctaacaattttaatttattagaatataaaaactctaaaaagaataaattctttttaatgaggggagaataccaaaaatggttaattaaaaatcaaaattatatatttttaagaagaataagtgtaaaagaaagccgccatagaattgctctaggcatatacttttctgaaaaatctaatgaatttttagccgtagaaaatcatcttaactatatttatcataccagtagaaaaataagtaaattagaaatcttaggtttagcgatatttttaaaatctgaattaatcgataattatttttcagtaatctcaggtcttacacaaattaatgcttctgatattagagatatacctattccatctaaagaatatcttgaaagccttgggattaactatacatcacattctgcactctctaactga

SEQ ID NO: 64886 - DNA, 1008 bp, Acinetobacter baumannii
atgcagacggactatttatataacaaaaaagattttttattagaatatattaataataagccagtttatatattcgaggatcatgctacagcagttataccttggttgatgattaaagagagaatacaatcaaccccacacctaataacattagatcaccatactgatacgatgaaagctttcagactttattatgggactcaaatacaacaagcgagagattgtgaacaaaaacattacgaaattgagtctaaaatttctttgcttatattaaaacttaaagaattagcagaagtatataattatgatcaaatggaaccattgttaaaagatcttcgcaacgatgaacatatagatttatccattaaattaggcatattaagttattcaataacattacctagtagtaatatgattgaaccacctaccgagtcaaatttaatcaaagaatatcgccaaaaacaaactgagtatgatcgtaacataaaggaagcatttaacagtgggcaattagataaactaaaaactctcattgaacctagctatccctatgaagacgatttaagttttataaaaacctatactatgcctacagataaaatgtttattgttgaacctaatataaaatgtgatggtcttagtagtgcagatgaagattcatgtatgcatgcatataacagtaacgttattgatgattgttttttatttaatcagattgggctagcaagtagcatgacaattactacaacaggtaaagttgttacagaagagccatacatacttgatattgatctggattattttcataacactaagtcaattaatccacgaaattatgaatgtttttacgccttgatacggcatgcacaagctatcacaattgcaaaagaaagtgcatgtgttcttatgggtaaagaagaggctgaaaatgagtactcttttaactcagattttttgctaagcgaattaaaaaaacatatctacatagcaacatctcgcaataaataa

SEQ ID NO: 64887 - DNA, 1455 bp, Acinetobacter baumannii
gtgtatggggaaaaacagtctcaagaatctgaattaaactggcagaatattaaacaggaagcttctcatgaagagttagctaatttgatcgttgcaaagttattaagtaatgaaagtataaagcacttagcttctcttactaagaaagaaaaacaccaaacaggccgtgaaacctctaataattcgaactctgttgagcgtagcaataagcgattaagttttttatctaaagtctcagatgaaaagcatttagttatttttgaaaaaaaattcacatttatccaaagctatttggatggagtagagatagccaatcaagagctttatgaggattttcagttatatggctttcctgaaaagcgaataataaaagaagatcaagttgatttagctcaaaaagttcttgatagttataaaataagtttgcttaatcgtatagaaaaattcatgttggtactagctctaaaaccactacctgcatttattgaggaaaatatagatgagcagagagtattgcaagggtttgatagaagtattacttctatcgggaaagagttcatttatttattatcaaaatacgaaacgattagtagatttgatcatgaatatttgactgttagtgttaaaatttttgtctcttttattataaatagattaaatccaaaaagtagaaactgtgaattttatttggatacagatatctctaaagaatctatttatgaactaaataatttactctttatgctaagaaaagcttttattcaaggccgttatgatagtgtttcagtcggtgctctgaaaggattttataagaatggaatggggccgcaatttcgtaactacgcggagctttataaaaatcttcaaaatttagaaattaaagcagaaaagatgaggctaagattaaaacctcacaaaacgaaggatgttgcagtctatagatttcagctagaaattttcgaaaatagcgaatccgttcgacataatttctttggtgtttttcttacctcgttaattaaaaaagcaaaacagccaaatggtttgataggattgattgaccatatctacttgtggaaagaattagagtcctcaacattacaattggatattattttattttttgatgcaaatgcactggcagttcataaagatgaatcttatttattcggctcgataaaaaataattttgaaaaactaataggcactcttctggataagaaaaatagtggtcaagaagctaatgatcatattaagcataattttagtgttacccagattcctattctgtacaaatttttaccagaaaaagtcttattactggaaagtcggaatccaagatggaaagaaatcgaaggtaagcttattccctatttccttattatggctggcgtttatgaacgaagttttaaggataaaattacaaatcgaattggtggaggtagaaatataacataa

SEQ ID NO: 64888 - DNA, 519 bp, Acinetobacter baumannii
atggaaatggatgaaaatcaaaagaaggagcagtttagtaaagcttttgtttcagcaatatcagctcaatctggattaagaattgactctatttctgttgatgatgacagtattgacttaataataagaggtaaaaacttttcaggtatattccgtaatccccaaatagatatacaattaaaatgtacagcaaatgatgagggtgataaagataatttaaaatttgttcttcctataaaaaattataatgatcttagaggaaataatatagttacccctagatatttatttgttgtaatagtccctaaaaactgcatagattggctaattcatttagaggatttttcaacaataaaacattgttgttattattattcattacttaaccaccctgaaaaaaataataaaaaaagcgtaacactacttattccacgcacccaaaaactaacatctgcaactatgttagaattactagaaagtgccagtaatggtaaaagcattggagccaatcatgattaa

SEQ ID NO: 64889 - DNA, 1125 bp, Acinetobacter baumannii
atgattaaagaaatagactttagctctttcagtcttgattgcttaactgcttatttagactctaaaaaatggataatatctactaaagttaaatctaacaattttcagatttggcacagacctgagaaaaaattctatgattatgaaattgtacaaccattagatataaccgtactcggctataaacaacgtttgtatgaattattaaatactttatctgaatttgaaaatcgtgatatatcactgattacccaagaaatagagtattataattatgatattttaaaagtccgtttaattggtgaagatctaaaagaaggctttataaatttgcaggatggtgtattacttttcgaaaaagtaaaaaatctaataatttccatacttcattcaactgcaactaaaagaagtttctacacaagcccaattcccgtggcttttgagaactattacaattctcttaaatttggccaaactgaacacggtagctatattgtaaatgttttagcacctcatcaatctgatatagaaaatcatttagaaccaatcgaaaacgatctaactagtaatattagtgaaaattttgatcatacacttcgtgcgttaaatactgccttaataaaatataaaaataaacaaaagattagctttttccaagagtcagtttcaaatggtgttagtgctaacttatgtgactctttaataggaatgagtggtaaaaatgaaaactatgatattgaaatttctataaagtccagaaaaactaaagttactagtacacatcttttcaactcatcttcgattcaatatatgaaaatagccactgattttcttaaaggccaaaattctatagagaattatacagttataggcactgttataaatttaaaacaacagcctaatgaaaattatggaacagttactataaaattcaaacatgatggaaaaataagaagtataaagttacgtcttgaaaattctgattatcttgaagcagtaaaagcccatgcaaataaaaaaactgtttcaattaagggtgacttatatatcagtggaaaaaatactgatcttttaaattttaaaaaactaattataactgatcaaattactcttgactttttatag

SEQ ID NO: 64890 - DNA, 447 bp, Acinetobacter baumannii
atgactcattctgtctcagttttaaaattttcgcttggtcttaatggcttgtcatttgacatagacaaccaacgcatccaactcgaacaggtcttgggttttgttgattcaagaagtattagtcatggtgtaattgatgaacttgctatcgaaaagatgatttatttcattgaagaaatcatcgagtcaaagccactcagaaatttaaagataagtggtgtagccattacctctgatactgccatgacacaacttagtgagttattttttagcgctaaaaaacaaatcagccgtctcgagcttgagcatggatttaatgattttatagagcgtttgagctactacacaagccaagtggctccagatcagctttatatttttacctactttatatttgttcgagagatgatgcatcacttaagagttgaggaaattcaaatcgtttaa

SEQ ID NO: 64891 - DNA, 357 bp, Acinetobacter baumannii
atggaaatacacattaaaagaatttatgaacatgtaagtaccaatgatggaaaacgaatattagttgatcggctatggagtcgagggataagtaaagaaaatgcccatttagatttatggttaaaagaaatagccccctcaactgaactgcgcaagtggtttcatgcagagtccttacagcattggagtgagttcaaacagcgctatttaaaagaactggaaacaaacccagcagttaaagagttacaagacattgtgtccaagcatagagtcactcttttatattcggcaaaagatgtggagcataaccatgcgattattttaagagactatttattagagaaagagaagaaatga

SEQ ID NO: 64892 - DNA, 777 bp, Acinetobacter baumannii
atgaatagtagcgatatgatgtttataatccctttaagttatagcgaaagggagaaagaaatcttttttcttaaagatcttttaaataagtttgataaagatagtttaattggttgtaatgttgaaaatgaaatagaagaatttaaattttggattaaagagaggtactcatcaaaagctaatattatgcagttaaaatattgttttagtgattatttttttcatattcaaaataagggttacaatgctttttctctaactgatgctaaaagtgtagatgttttttttacagatataggtaatgatatgtttttatttcattcgaaacaggttatgaataaaattttaccacctattgatgactacttaagaaatgcaactatttttctatctcattcctctttagataaagataaggttgatagtgtatataattatttgaattcaaaggatatcagggcttggtatgataaatatgaaattgattttggcgaaagtataactgataaaattaataaaggtttagataatagtaacttgggattgatttttttgtcgaagaattttttaaaagcagagtcagggtggacgctaaatgagatgaatttctttttctcaagaagaatgagagatactcaaaaaaaatttattgtaattaatttagatttgaaacaatctgagttgcctccacttttacaggattataaatatatggactttaatagcataagtttttatcaagatctttataatactttaaagcgtttagatttttag

SEQ ID NO: 64893 - DNA, 462 bp, Acinetobacter baumannii
atgaatgcacaaaaaggttttacattaatcgaactcatgatcgttgtagcgattattggtattttggcagcgatcgcgattcctgcttatcaggattatattgctaaatctcaagcttctgaagcaatgactattgctgatggtttgaaaacgaatattcaaactaatcttcaaagcaattcttgcttttctggtggtgcgacatctgctgtcgctggaacagatactgtatcaggtaaatatggtagtgccactatcacaactataagtggcactgctgctgcaaataacctcgtatgcggtatcacttatacatttaaaacgactggtgtttcaagtaaaattgccgctaaagttcttgcattacaaactaacgataatggtgttttaagcaaagcagcttctggtacaactattgatgataaatatttacctaattcattaactgttgcaggttcttaa

SEQ ID NO: 64894 - DNA, 1311 bp, Acinetobacter baumannii
atgttaaaaaataatatattattccttttaataggattttatcttatcgcagccttattgggctatcaagttggttggtctatttttcaatatgatgaacttcgcttattacagtttcctttagcactatgtgctttattaataatgatcttcacaaaaaaaataggatattcaatctatactcacattaacttttttattatcggtttattcatattaattcaacaaataaattggggaatttttgaatttcaagaactttggtctgcgatagcattactatttatattttctactttaacttatgaattaagaagtataaaaaatatacaacatggcatagtcttaattatagtttcagcgtttattccatgtttatttattcttatttctattactaattttattattcatcaacaatggtttaattggcaatttaactctggtacgattcggatctatgatagcgttattgttcctctatttttctttctgatttttttacaaaataagaaatatccttatcttcattacttttatccattcgcaattttctttttctctctagcatgtttttttgatggtgcacgttctgctttgtctgcaatcataactgggttgcttatattttttctcttatcaaaggaaaaccgtaggctggctctaaaaacaactttttacatatttgctgcatttatagtttataaaagtacagtatattttgcaaaacaaaatacaatgacagtaataagagcgggaacatcgttgcgtgcagagatgtggtattttgtctttgatcaatggaaacagtatccgtttactggtgtaggaggaggatatttatctaaaatacaatataaatatggatatcatatacataatctttatttaaggttaatttttgaatgggggatggttggatgtatatttttagtttggatgacttatcaatttataaaattattcttagataaggagattttacccattgcaaaagctggtgttgctgcaattttaattgatgcaatgttctctggtaatatggtatatcccgcttcacaaattgcttgtatattatttctagcttttgcattttctcaaagcaaattatctcctagttccaaatattcttctttatttacaaaagtacttattggcttatggggaactttatttttatacattacaataatgtatttaggacaagatttaatgtgctggggatgcggcagttatgtaggaagaatggctccgaatttttggttttatggtggtgcagagcatctagttccagtggtacagattccttga

SEQ ID NO: 64895 - DNA, 822 bp, Acinetobacter baumannii
atgccaaaaagaatagagacacatcgtattgatactaaggcgatcagaactatttttactcacttaaatgaaaactggcttgtccgtaatcttgaggagagagattatggagtcgatctacaattagaaagatttgatttgaatgatgcgactggcgattttatctttgttcaggttaaaggtactgacaagaagttccagaagacggtaaaactttctagttttcctgttgatacaataaaatatgccttaatgtttgacgtacctttttttatcttccacacctcgaatacttcccagcagacaaagtatgtatggttgcaaaactacgtggaaacgcggcttgaaaaagataatccgcattggaaaaaccaaaaaagtgtaaccatctattttcctaaagaaaatgatctgcaagctaatgattctaaaattaccgacatcattaaaaatgataagctaaagaaaatgggagtcaagttcttagcaatttatgagtcattaaagtttcattcagaatcagtgttattaggacaaactgctgttgcaataggatgtgcgatagaagcaagaaagctacaaaagttgtcttcattcattaatgaatataaagatctagtttttaacggaaattataaagacttcaacacttttcatgctgcttacgacaacattgcaaatacatcagaaattgattctgccgatgaagaaactattacttctgcaatgtcttttcttgaggaaattaagttcaacttcttaaatcaagatcaaattgctgatgttttgatggaaaatactaccgactatcattcttattaa

SEQ ID NO: 64896 - DNA, 213 bp, Acinetobacter baumannii
atgtttatgttagaatttactattcaatttagtcaattagtttgtaaatacagagaagaaaaaaatatgtcacaaaagcaattagtactggtctgtaatatggatagatattacctagggcgaattgaaagaggtaaggtcaatcctaccttagaaaacgtttacgatttagcaaaaaattttaaagtattgccagtgcaattattgtcataa

SEQ ID NO: 64897 - DNA, 663 bp, Acinetobacter baumannii
atgaaaaatcaatatgctgaaattatggaagaaatgttagaattgcagaattctactaatagtttaatcaataaagaatggagaaatgcaaataatccttggtatagggctatatggactgaatgtgcagaattaatggatcatgtcggttggaaatggtggaaaaaacaagaaattgatattgaacaagctcaaatagagttaatagacatttggcattttggtcttagtgatattcttcaaagaagactcaaaatcgatgatcttttgaaggggttagaaaatgttaacttagatcctttagtagaaattcatcgtaaaactatcaataaagctgaaatattagaaaaaattgaagatttcatggcttttacaatacaacataagaaatttgatattgaaagtttcatgaacctttctcttctgttatcgcttgatatagtcgaaatccacaaactatatattgcaaagaatgtattaaataattttagacagcataatggatataaatctggagaatatataaagatttggaataatcgtgaagataatgaacacttatatgagattctgaatacatattatgaaggtaatcttgatactcaattatcaacttatttatataatcaattagaaaaaagatataagcaattagataaataa

SEQ ID NO: 64898 - DNA, 921 bp, Acinetobacter baumannii
atgtttcagagcgatgatcagtggaagtattttgtagagacaggagtttggccaagaagaaatcaatttgctccacaagaatggatgagcaattttgattcagacgagtcacgttttgcaaaaaggttattagaaaaattcacatatttttcagaagatatggttaaacaattatttaaaagtagttttgtatcactttcaaaatatattctgacaaataagacggattctattttatcagctagagagtggtcagtttttttagataatctttatataatgagggttactggagaggatccaagtgatgcggatagtggttacatattcacaagaagctctagagatgtgctaggtataccagaaacacaaataattacctcacaaaagtttattgaagtaattcaatctaattctgaagcaagctttgtttttgtcgatgattttgttggttctggtaatcaatttattagtttctggcatcatcaagaaattttaccgaatataacttttcaaaaaatatatgagcacttcccgaataggaaatttttttattgtccagcaatatgtactcagatgggatataacttaattagcaaattttgtcctgtaaaagtactacctgctcatttatatactgaacttcatagtgcattgaattcagaatcctatatatggagagatttctctaaagatggtccagattttattaaagaaatgagtatgaaagttggtatacctgaattagaaaatgctggggtgattgtaaatgcggatgggacaaagattgttagttggcaaggatatttagaattggggttagcattaagtttttcccacggttggccagatgcaacactgcctttattttatcataatgaaggagggtttaagcctcttttgaaaaagggagagttatga

SEQ ID NO: 64899 - DNA, 783 bp, Acinetobacter baumannii
atgtcatatcgatataaaatagcgacagtgtttttacttgggttctttattgattgcatcaacatttttatgtctgcaattgcattgcctaatattgcatcgtcattttcagtgagccaatccatggtcgtatgggtaacaaatgcttatattctcggcctcattttaattatgcccatgagtttatggttagccgccaaacttggggatcaaaaattattgtgttattcgatgctgttattctcgataagcatctgctttatgggttttagtgaatcgatttatagcttaattttttggcgatttattcaaggaatagctggaggtttattaattccagtcgggcaagcactcgtatatgcattcttcccgaaccaagaacgccaacgcatttctactatgattatggcaattgcactgattgccccagctttttcacctgctattggaggcgtaattattgattcattgaattggcgatgggtattcttatctaaccttcctttttctttactggcagcagctctggcatggttatgggttaaaacaacaaagaaggtttcgagtgaaagaccagatattaaaggcttagttatctttaatataagtctgttatgtttattactctccttttcattctatagtgattaccatcatgccctattcgctataacgagttttctaatttcagtgggaatgcttattttttacattcaacatgcgaaaaaaatttcccatcctgttcttaatcttgagttattaaaaaataaaaaatttacgtaa

SEQ ID NO: 64900 - DNA, 567 bp, Acinetobacter baumannii
atgtttgttgcaggcgtagatgaggcggggcgaggcccactagtgggttcagttgttgctgcagctgttattttagatccgaacaatccaattttaggattaaacgattctaaaaaattaactgaaaagaaacgtgaaaagttgtttatcgaaattcaggaaaaagctttggcatggtcaatagcagaagctacccatgcagagattgatgagctgaatatcttgcaagcaacttttttggctatgcaacgtgcagtggatggtctaaaaacacagcctcaaaaagtcattgtagatggcaaccaaattccaaaaggcatcattattccttgtgaagcgattgttggaggagatgcgagccatgccgagattagtgcagctagtatcttggcaaaagtcacacgtgatcgacaaatggcagaattagatcagcaatatccattatttggttttgccaaacataagggttatccaactaaagcgcattttgaagcgattgcagctcacggtgtaatcgatcagcatcgtcgtagttatgcacctgtaaaacgtgcattagggctataa

SEQ ID NO: 64901 - DNA, 255 bp, Acinetobacter baumannii
atgctgattctgacccgccgtgtcggggaaacattaatgattggggatcaagtcagtgttactgtgcttggcgtcaaaggaaaccaggttcgaattggtgtgaatgcgccaaaagaggtttctgttcatcgcgaagaaatttatcaacgtattcaacatgaacgtgcaatgcatgaacaccttcaacatcttgatcaagattatcaagtttcatatgaagatgataattatgcacagaaaaacttcaatcgttag

SEQ ID NO: 64902 - DNA, 369 bp, Acinetobacter baumannii
atggataaatcaatgaattttaatgaatggatgggtaagcaaggaaatttagctatcatccatgctaattgctgccgtgttgcatatgaaggcgggcagcagtcaatgcaagcgaaagtggagaagctggaaaaagaatggcttgagatgaaccaacaacatgaacaggctgttaaggaatgctttgagatcaattctgaaaacaggaagctgcaaaagcgggtggaaaaggcaattgaagcgctgaaaaacaaaatcgccaaggttcaaaaatatgaacaggattcatttgatcatggcgcaatcataggtcttgaatccgcgttgcgaacagtagagcaagcgctcaagggggaaggacagccatga

SEQ ID NO: 64903 - DNA, 564 bp, Acinetobacter baumannii
atggggaatccttctctttttttagttgatagggttggtaaaaacctcgaagaagcaattgacctattagcccaagtttcaaatgagttcaagtcacattggcaacgacgttatatggatggatgtaatcaaacaagcgaaatagcggttaaaaattttgattttatagtaaatgaaatattaaggttgagagatgacttacctgatgattcagaggaccaatattctaaagagtttaaaaatttactgaaattaaaagttgggaaaattgcttttgatattacatataaggaattggttatatttaatacatcccatcgtggatatgcaaagatagatgaagagaaagaaacgcaacaaatatcattaggtaggctacttaataaaattaagcacagatgcataagtcagattaattttcgatttgatcaaggtgagcatattttagttattggttctgatgcatttggaaaagatcctaattgtatagttgaatttagtgtgaaaaaattttgtagcgaatgtcaaaaaatttctaatttaatcaaatctaattctatttaa

SEQ ID NO: 64904 - DNA, 192 bp, Acinetobacter baumannii
atgccttttaaatataaggccccagaaggctataagccgactaaaattgttattgctggtcaaaaccttgaagttaaaaacggggtagttgagtctaatgatgacattattcatattttaaaacctttaggttttgaacggcatattgaagttattgagtccaaaaaacttcctacaacctcgaaagagtaa

SEQ ID NO: 64905 - DNA, 228 bp, Acinetobacter baumannii
atgagtaaagattacgactatgttcgtaatgaaatggatttacctagattaagagcattaaatgcgtatcagcaaaataaccctcccgcaaatataggaatacagcggctttgccgtatcttggaagcatttgccggaatagaagagacaaatccagcaatcaccgtttcagatgatgatgatgacaatatgctggaagttttagaaagttttcctcagggtggttaa

SEQ ID NO: 64906 - DNA, 492 bp, Acinetobacter baumannii
gtggctttaactaattgtaaagagtgtggggctcaagttagtactcaggcaaaaaactgtccaagttgtggagcaaaagtaaaaaaacgttcattgttgaagtggatttttttaggttttgtcgtttttattataattggaattattgctggcgaaggttcgaattcaaaaggaacaagagaattatcaccaaaagaggaagcattaaaaaacacagctttagattataactgggctaaagctggttttgataacgtaatgctagtagattttaaaattacaaataacagtaaatacgacataaaagacataaccgtagagtgtgaacactactcaaacagcaagacaaagattgatagtaatacgcgagtaatttatgaaattgtaaaagctggacaaactaaaacacttaaagaatttaatatgggcttcattcattcgcaagctgcttcatctagctgtggaattacagatctagttattaatcagtaa

SEQ ID NO: 64907 - DNA, 618 bp, Acinetobacter baumannii
atgattattgataaaattaaaaacactaactctatacctgaaatggttactttatttataactatcaattttattgtccagatcagctataagtttggctttttagcaaattacggaaattggactttatcccttttttctccaatagagctaatgatgggaaatttacagctaatttttttctacatcatgatttttacagggataattcatgaaaaagcttttttaacgatacttaatacaattctttgtataactgtatttccttttatcagtgtttggatatacacaggaaattttacaattccagcatcaagttatttcgctattgttattgggatagtaggttttattttaaaaaaagttgagaaagattcgaccatcgaaattttcctatttgtagttttattatgtatagcgccaatgatttatggatttatctctagtaaaaatttacctaggcaaaatttatctctaatagaattgaaagaacaagaaacagaaaaatggtacattttggaaaagttttctgacagctttctcttagttaatgaaaaaaataatagcctcaagattgttaaaattgaagaaacaagaaaaattcatataataaagtag

SEQ ID NO: 64908 - DNA, 1050 bp, Acinetobacter baumannii
atgcgattaagagaaactattttagctttgatgatacccgccatattagggtatctatttatatctggccgttatttcattataggtagtgttgaacagacaggttatgattatataaacctgggttttgactttcatgattatgtatttcaaggttttttagccaattttagggcttcttcttttttggcacttatactagcaccaccattaattcttatattgagacaatttttttactcaaaagagctttttgataaaataaatattatattttcatatcttatagttttatttatccataagtatatcaaaagaaataaaaacattgataaaaaggaattatttaaagaagaagagaataaatattttcaaaaaaaagaaaaagctgaaaagaaccctctctcgaaaacactattaacttcttattatttatctattttcttatatctttttcttcttgtttccttggtgaaaattttagacttttataagcaaggtaaagaaagtgctcaagcaaatatattaggtagtatcacgtatataaaggatgatgaatctcaactttttagagttatttgtggaaaagaagtttgcatatatgcaaataagaactttgactctttcaagaaaataaaagaggataactactcagataaagatctacagcaaattaataatttagaaaaaaattcaccatttttcttctttctactatctgaaaagcaactttcaccaatagagaaagttgtctatgtacagattcattcaaaagaaattaatttacactctaaaaatccatatttctttagagcctatacccgaaaagtacggccctatctttctaacttaaaatttgaaaaaagatgttataaagatattgaaaatgatgagattaaaggactgaatcaaaaagcatctcagaataaagaaaaactaccctattttgtggcatttaaaattcctgttgaacaaagtattgatcatattgatatatttgatcctaagaaaaatatccaacagtacaacttttgcaagcaactttattga

SEQ ID NO: 64909 - DNA, 843 bp, Acinetobacter baumannii
atgttgaaagattttaaactactaaaaccaggtaccattttaaataatgcagaattatgcgaatacttcctgtgctcacctcagggcgaaatgcgtagatctcataagacaaatacacttatcattgttttaaaccatgttgaatctatttatgaagatcaatggattggcgataagctacattacactggtatgggccaagtaggtgaccaagaattaaaaagtcagaatagaacattagctgaaagtcatactaatggcgtgtctgttcatctttttgaagtttttatcgataaagaatatatctatcagggtcctgtaactctcgtagctgatccgtaccaaaagattcaacctgatgctaatgatcaagatcgtttagcatggatattcccggttaaattgtctgattcatatacggcgattagtgtagagaccatagagcgcgctaaccagaaaaagaagcgtaagtataagaagaaatcgattgaacaattgatcgctgatgctcacgctacagcacaaacacaagttagttatcgtaataccaaaacgaaatactttattcgttctgttgcaattgcagagcttgctaagcgtttagcaaatggtgtttgtcagctctgtgaacaacctgccccttttaaagatcaacatggtgagccttacctggaaactcaccatattgaatggttagcgcacggcggaccagataccgtcgaaaatacagtagcactttgcccgaattgccataagaaaatgcatgttgtgaatgctgaggcagatcgggaaaagctaaagataataaattctcagctcaatacaacttattcatttcaataa

SEQ ID NO: 64910 - DNA, 909 bp, Acinetobacter baumannii
atgaaaataataatggtacacgggatcaaccagactgataaggatcctgaaactttgaaaaagatatggatagaggccttcttagagggggtatttcaggcacatataccgaatgttccagctacaactgaatttgagtttatttactatggagatctggtgaaggattatttaaataccccgacttctaataaagtcttgtttgatttacagaccaatggatttcatgcttttgaaaaaaactttaatgatttgtcattagacgagcaggatattttaatcaatattgctgactcgatggacggacatagtactgatgagatgggaacattacctattgaagcaattcctgttaatttaaaaagtactttaactccatattcttttatagataagggggcgaaggcattaatcaaaattacgagtagatttcaaaagtttcatacgtgggtgcttaagatatttgccaaagaggcaaatctatttcttgagaatgaacaatatagatcacaagtgagagaaaaattattaactgagataaaaaaggatccttctaaggaaattgtattggttgggcattctcttggtagtgctgtttgtctagatgctctacagcatttaaattcctcttataaaatttctcgatttgtgactttaggctctcctttaggtatccctgtattttatgattatttcaaagatcgtactaagccttcttcattaaaaggagattggtttaatttttatgacacggatgattttgtttcggcttatttattaacgaaccctccatataatgttaaaccagagattcagaacttaagggcaaaaacacagtatttccaaccacattatattgttggatatttggatgatgctcttgttgttaaaaaaatcttaggtgtctga

SEQ ID NO: 64911 - DNA, 345 bp, Acinetobacter baumannii
atgaataaaatacttctttctttaatacttttacctattttggggcatgcaggatattgtgagagcaaagcacaaatttatgtaatgactgcattttggaaagttgacaatgttactaaagaaattgctttagatagagtaaaaggattagaagttttatatacagatcttgatacaggtaaaacccaaactaaagattttaaggaaatagttgaagaaatttatagaaataatgattacaaagctaaggatctggttatttcagaatatacttcgcagatgacatatgactatgcaacgatattagctacgtgtttagctgaaaatgttgaagaatcccgttag

SEQ ID NO: 64912 - DNA, 738 bp, Acinetobacter baumannii
atgaataagcatgttgaagccgagtggaggtttcctgcaaaaactgcatgggcaatttttgctgccatgatttttggcaacttcatggcgattcttgatattcagattgtggcgagttctctaaacgaagttcaagctggtatgagtgcaagtcgttatgaagtcacttgggtacaaacggtttatttaattgccgaaattattgcaattccaatgtcgagtattgtctcgcgggtgctttcaacacgggtgtattacaccatgtgtgcaattgggtttacggtgagttctttactttgtgctttgtcatggaacttagaaagtttactggtgttccgtggcattcaaggctttatgggtggcggcatgattccgacttccatgacagcgttgtacttgcttttcccagaagcaaaacgctcattgcctttggtcatgtttggcatgatcagtactttaggtccagcgattggcccaaccattggtggttggcttaccaataatttctcatggcactggatgttcctgattaatattattccgggcattatcattgccacagtcatttactcaggtccaaatatcgaccgtgccaattattcactcatcaaaagcatggactggctcagtctggtgggtatggcgatgtttttgggtgggcttgaatatttcctcgatgaaggcgcacgacatgactggcttgccgacacaggcgttcgtattgcttttatgatctga

SEQ ID NO: 64913 - DNA, 210 bp, Acinetobacter baumannii
atgtctttgctgtatacccttgatgcggttgatactattacgcagaatttagtatcttttgaggtttatgagtctgatagtggttaccatatattgccattatctccagattgtaaaaaaggtgagcatttatgccatccatcggttagaagtttcaatgatataaaaagagaaatattaatagtatttcaagcaagaattatagaataa

SEQ ID NO: 64914 - DNA, 5124 bp, Acinetobacter baumannii
atgaatacaaataatctaatacaagttcacacactgacagataactccagtggatatttttttaagtcatttgatgatgagaagtcttttgttattacatctaaacatagcatttgtgaccaaaaaaaaagctgtgacttataccagagaaaagtggatagatgttgcagagcctgtcctaaagaatttgatataaaagatattaaattattaaaaaacaatgataaggctactcttcaaatagaaaaaatctattatgagaaaacaaaagatttagtaattgtacaggttaatgaaactgctaccaataaactaataattaatgaaaaaagctgtagcgatctctatgtagcttctggatttaatagcttagaatcaggggtgaccaacttaatattggatactcctagaagcattgatacgcttatattttataattcacattcaaatccaaccccgaacctgatagaaaaagagagaaactttcagggaatttcaggttcagtagtttttacacatcatgaaaagtacccgacagcaaaggcactgatcatccataatgaaagtcataacgattttggagctgaaagtctcgatacactaaatttcactgaaatcaataatttttttgaatgcaaagtgtttgatcaaaggctttatattccagaagttcagatgatcaaagaaattagtcaacagagcttagaccaagtacttaaaacaattgaggattttgaattaactagacctgcattacataatgaatttgaagaaaaattaaacacaggcagatttatccaaattacaggtttgtcaggtacaggtaaatcagttctcctcagacaaatcacagagtcaaaagctaatggcttaccatttttatttattaaatcagatcaacttgctggaagtaataattggttagaatatctatctagagttggattaccgagtttctcaatttcagaatggctaataagtttagaagctgttggaggggtgcctattgtatttattgatggtatagaccgagtaagcgaaaacagtaaacccattattgaagatttaattcgtacaattatcaatgcacctgatttagacaactggaaaattgttacaactttaagagacactgggcttgaaccgttaaaaatatggattggtgctcttttaaagaatactattatccaaactgtcaacgttgaacttttaaatgatgatgaatgtctagcattagctcaacaaatcccaagtattcagaagcttttattcagtgataataaagtcaaagagattattagacgtccattttttacgaaagtcttaactaacttaaaagccaatgattttgaacctgagtcagaattagaactaattcatgcctggtgggaacgaggtggattcgatgaaactggtcaatctacttacaatcgacaagattttttaaaaaggcttgccgaacttaaatctcaaaatcttagcaatagtgtcaaacgtagagagattcagcctatcgatgctttagatagcttggttgttgatggaatcattcatgtaaattctaaaagttctaccgttgattttacacatgacatattttttgaatggtcgctactttatgttctgcttgaagaacaagaagaatggctaaataaaatagaaagctttggacaacctccttatataagtagggttgtagaactgcttgctcaacgagaatttattgatgatcagtggattagtcatttagaaaacccaaaatttaaagagctaagatcacaatggttaagagcatgggtaattggaccaataggacattctaagttcattgagttgagtagtggatatacacaaactttgcggaaaaaggatttcgatctttttaataagttattaacatggtttcaagcagagaaaaccaaggcaaatccaatattcttgcaacagcctgataaattacaattagcgattcaacatccctggccatctgatgcattcttatggcgaacacttttagaatatgtttttaaattaataccaaatactccacatcgattatatccacaaattttaaaaatttttgaggtttggcaatatgtaggtattcatgtaccttcaaatcaaatgtctaaaatgattttggatgtatcaatcgactggcttttagaaatttctcaaaaagagagaattaaggattggggccaaatagttaacttaaaagattttaagtttagtctaattaatctaattttggtttcaatacaatcaaatccaacttatacgaaaagatatttaaattttttactgttggaaaatgaagtatctagagaaatttatacacatatagtaggtgcttcctctgttatttcacaacattatccacaattacttgctgatcttacgttaaaatttttattagatgaactacctaaagaatatatagaacgtgaggaaaggaaacaacaaaaaaaccatcaatattttcaggagttattagctaaacctgaagaagaaagaaccaaagaagaacaattaaagattgatcgtcgtgctttattttttcatcaagcaccatatcaacagattcagagtcgtgattgggaaaatttatcaattaaatatgagtctagacacttttatcctagctcacctttaaaggaaccgtttttttcattattgacttattccgaagaaacgggatttcagattatacgtgatttgtctaatcatgctattgaatcatggaaacaactatgtgaaatttctgaacaagtacctataccaactattattgaatttccttggggagtgcaagaattttggggaaatgaaaagcaatatatctggaaaaaacctgtttggataaataatgcgatttcatcggcctatatggtgttagaaaattggtgctttgaacaactagagcaagggcgagattttgatgaactcattcaaaaaattactttagggcatgaatcagtagcaattcttggtgtagtaagtgttttagccctaaataagcaagttgtttctaattctatatttccagttgtcactaattttaaaattttagagttagataagtatcgtttccagcaagacttacaggaacctagtacaactttaatttctcttcaaggtgaatcaaaatatcaaaaagatattaacgctgtcagacacaactatagtagagagggacataaatcaagtttagagtttttactacgaaattactttatcagccttgaatttcgtgaactaacaaaagataagttatctaatttcaaagctgatcttgcctttaatttcgaccatgagaaggtgaatgaaacaatagttaattctttagaacagagagctgattattatgctgaatacggtaatattaagaattatttttatcaagaactcgaaaatcaaattagctttgtctttaatcatccttactatcaagaaccaagtaactctaaagaatataaagaacaaattaattttttaatgtactctcaaattgcttattgggctgaaaaatcattagaagctcaggaaattcaaaataattacactttagattcagttattgagttatacaaagatttagaagaaatggatttatttcacgatgcttgtgatatttatgacgattcttctacatataaaagaatgaaacaaagtgcttttagtgcattagctagcatgatcttagtctttagagtagatcgtaatgaaggtgatctagaattagctcgtgatattttaagccaagtagtacagttaccatacagttcttatgagatagattgtccacaagcatcccttgtttctcatccaaagaaatttctagcacaggctttagtgagtgaaattattcatggcactataaataattcaactttgagtaatcttttaaatattgtagcgagcccatctcatgaaatttcattagtggccttaaaagaatgccttaaattattagatatacaacctaaattgacttggtctgcaatttattttgcatttgctctatgtaaagattatttaaaatatcgaatctatcgattagatgaatatccagaagcacaacaggagttaaaacaagtaaatgaacatctaaacaactattttaaatctgaagatgactggtgttcattacctataccagatgccccttggagaaaagataataaaaatggatcaagatggatagaaacaaataattgggacaatgagttttcaggaaaaattgttaaattactgcctgaaaaattactttataataccactcaaacctatattctggattttttagaaagttgcttagaatggactatagaaaaacaagaaccttcttggctcgaagagaatcagaggtttaatgacaaagatattatttatgaatggaattgtagcatatccagcgctttagcaagagttgttggaatatttcctacagaagaaattaaatcacaatttcttatgccaattcttaatcttaaaacagatgtttgttgggaattgctttacccattcattgaagattatatttgtcgttatatttatgatgcccaatatataccagtaaatgcattggaaattttagagttatgcctaaatcgggttttaaatgctaaaagcttcgataaaaatagttatagagctggagaactctttggattttatctacctaagatagctaaatcacttatgtttgtatcaatagatcaaaatgcaccattagccagtaggtttgtgaatggtgattggtctgaaattgatataatcttacctttagttgataagtatgtccgaacaggaggttggatcgaatatattattcaattgttcttaaaattgtgtgaacgatcaattcaaaattatccatcaaatatttatgctgaccaaatcttagaactaatattattagatgagcaattgaattggaatgagcaagtatatcaaaggatatctagccttatccaaatttttatagacaaggaacaatctatgccaatagagttgcgacgaaaattcttaaaaattattgattggttagtagatcatggtgatcgcggaagtgcagcacttcagcaaagcaaattttttcaaaatgtgaagagctcctga

SEQ ID NO: 64915 - DNA, 297 bp, Acinetobacter baumannii
atgtatattaggttgacttttaatgtgtctggagactttttggatgctattcaagctttaaaaaatatttctagtgataagatttattttgcttttgatgaagaataccccaattatattcagtttaactctaataaagatttttctaatgaatattatgatgaagaatatgattctatattttatgagttcatttctaaaaatattgaaaattttataaaaatggagctgatggttttattttatttatggaggtatatatttcagaagatgagcaatgtaattttgaggttttaa

SEQ ID NO: 64916 - DNA, 345 bp, Acinetobacter baumannii
atgaataatttaaaaacattattattgtatagagaaatttttgatagcaatcgtcctttagataaacctactattgaggataataaatacattctttcagaaaataatgctgatgaaattgtaaaatattttgagtctggattagttttattagaatttgtaagtccaatagaagatccttataatcaccaagatattttaccaaatatcatttattctgatggtgtatatgtttgggatgcaattataattaattgggttagaaaatatagagttagattacctgctgaatttattgattattttaaaggtttgagtaatattgttgttgataaaaaaagttag

SEQ ID NO: 64917 - DNA, 423 bp, Acinetobacter baumannii
atgatttctttttcggttccatgtaaggttaataaaccgcccattgaagttttagagaaaatttctaattttatatctgataataaaataagtggattaactctaaatattgaagatgacttattgtttgttgactctttgaaagctagagtttggattgatgttttaaatgttgaaacaacaaaacaggatttaagttgttttaatagtttgaattttgaaattagtaaagattctggagaagttttgtttaaatatttatatgatataagcgcaaaaagaagagattctgaaacattaagtatcatggtgaagctggcttatattttatcaaaaatagagggaagttttatttataatgataatgggctattggatggaaaggaagtatatttatcaaatgaatttgaaaaatttatttaa

SEQ ID NO: 64918 - DNA, 402 bp, Acinetobacter baumannii
atgagtagaatgatatttgttggttttgatcatagcaaatctgagggaggaaaaagtctttctgaatctattgctagtacatattgggatgcatttggtgatttattggatgaagtttttttgccaagctatccacaattacatgaaagcataaaatcggaagagggtaagtatttaaaattctatacttttgaagaattggacagagttcactttaatttatctattaaattgattagacaatatgttaagcatatgaaaatagaggattggggtaaaagagattatataacagatatggctaaatggcagaatatggctcttcaagtatgggaagatattgtagagccctatgttgtacgagatagtcgatatgatactagactagcaagtattgattaa

SEQ ID NO: 64919 - DNA, 1509 bp, Acinetobacter baumannii
atgtttgaaaaaatacgaagtgatatgaatccacatcaggcttaccgtatcaaaaaattacaacgtcaattagacatggctgaatcttatgaagaatggaagtcttttgcattaaaactggatgaagaaacaggtgcacaagagtggaagtttgataatagttcgccttacttcgatgccgagctcatttcttatcgttacactttactgaaaagatatcgtcagcaacaccgtactctggatttgatttatcttttaaaagaagggctaacctacgatattgcaaatattggccatcctatgttatttgctgccacacatgtaggcacaaaaaaattaattgaagattatattgaagaagtcagtcaaagcttggcttatattgcatctagtgaatgtattacgtttcaaagaaaagaaaaaatcgagttttttgaaaattgtgaaaaagcttatggtcagcctgctcttatgttttcgggtggtgcaactttaggtctttttcatactggtgtatgtaaagctctaattgaacaagatttaatgcctaaggtactgtcaggctcaagtgcgggcgctattatgactggtatgttgggaatttctgccagtgaagatattcaaaatttgttaaatggcgagcaattttttagtgatgcgtttcactttagaaaacttcgtgaacttataaaagggaatggtggtattgcagatgtccactatttaaaaaaattcctcattgaaaatttgggcgatcttacttttgaagaagcattcaaaaaatcaggtttgaatattaatgtcgctgttgcgccgtacgatgcaacagaaaatcctcggattatgaatgcaattatgacacccaatgttttagtttggagtgctgtgttggcttcttgtgctgtaccagttttatttccgcctgtgcgtttaaccagtaagcgttatgatggtgaacatacgccgtatatggcaaacactaaatgggtagatggcagtgtgcgtagtgactttccacaagaaagaatggcaaggctttataatttaaactacaccattgctagtcaagtgaatccgcatgttgtgccatttatgcaagatgatgcacaccgtttccgtaaggatgttttaagttggcctgaacgtattttaagacgccaaggtaaagtgctttcgatgggaataatggattttacccgtcaaagattaggagccatttctccagtaagaagattgcttgatcacggatatggtgtagtagggcagcgatattatggagatgttaatattattgccaaatatagcttaaaacattatgcctatacgttacaaaaccctcgtccacatttatttaaacgattacaacgagaaggtgagcgtgcgacttggccgaaaatatcttctatagaaactcatgcgcgtattggtaaaacaattcagcattgtttagaagttttacgttttgaagaaaagaaacaacagccagagtcttattatgctgaagcatga

SEQ ID NO: 64920 - DNA, 339 bp, Acinetobacter baumannii
atgaaaaaacaattgccaaaaatttctctagtaagcaaaactgttgctaaaagtttgttattcgcacaaggctttttagatcaagcaaaaaaatattcaacccttccttttactcaatctcatatcattcgcccacgtgttgacgaaaaatactatagctggacccactacggaatcttttttccacttttgccagaacctcatcgctatttaaatattatgattttaatcggtacgcctggcgcacttgcatttgatcatgatgatattatcgttggaaaccctagaaaacagcgactttcttttcaagtacagccgcccttgaacaagcattattga

SEQ ID NO: 64921 - DNA, 1380 bp, Acinetobacter baumannii
atggcaaagtatcagaaatatgttgaatataaagattcaggctgtgaatggacggataaattacctatacattggaatagtgttcatttgaaatggatatcgacaatttatgcaggtggaacaccatctaaaactatcgaaagctattgggaaaatggaacaataccttggattaattcaggggcagtaaatcagacgtatattttagaaccgtcaacatatattactcaaactgcttatgagaatagcagtgctaaatggattcctcaaaaagctttagtcatggcattggctgggcaaggaaaaactaaaggtatggttgctcaactgggtataaatactacttgtaatcaatcaatgggagcgattattcctaatgatttaagttacgcccgttatttattttggtggataacctcaaactatcaaaacatccgaaatatggctggtggagatttaagagatggtcttaatttagagcatcttggagatatggattgtccattacctaatgatgaagaaattaaaaaaattgcaaatttcctcgaccatgaaaccacaaaaatcgacaacctcattgccaagcaagaaaagctgattgaactgctaaaagaaaaacgtcagacggtgattagccatgccgtgactaaaggtttaaaccccaaagtagccatgaaagattcaggtgtagagtggttagggcaagtacctctggagtggatggtttctcgcttgggatatgaaacgtggattagagcaagacttggttggaaaggcttgaaagctgatgaatatgtagatgatggctatatattccttgctacacctaatataaaaggaaaacagatagactttaataatgttaactatattaataagcaacgttatgaggagtcaccagaaataaaattaaatattggagatatattattaacaaaagatggctctacattgggcacagttaatatcgtccgtgatttgccaaaacctgctactgtcaatagttctattgcggtaattacgccttataaaaatttaacaagtgaattcttactttatctacttacaagtagttttatggtaaataccattcaaagaattaagggaggaatgggagtgcctcatttattccaagctgatttgaataaattttatattcctattcctgagcttgctgagcagtttgaaatcgtcaaattcctagaccaagaaaccgctaaaattgacacattaattttaaaagctgaatccgcaattcaattgatgcaagaacgccgtacagcgcttatttccgcagccgtaacaggaaaaattgacgttcgtcattggcaaagcccaaataaaaataataatcaagataacatggagttaagtgcatga

SEQ ID NO: 64922 - DNA, 327 bp, Acinetobacter baumannii
atgaaaaaatttttactatatttaacgattgtattcactagtattcagactgctaatgcagaacaagattacgtgagcggaactataactagaataacaagtgtaacagctgggcttttaataaaattagaaccgggaaaccttccagatgtttgtaagaataaaactgcttatggttggatgcttattcctcaggcccgtaagactataattgccgtaacactatctcaatggtatcaaaaaaaaagaagtgtaactgtttatgttgatagagattattctaataatcctagtttttgtaccgtacaacaagtagagcctttataa

SEQ ID NO: 64923 - DNA, 339 bp, Acinetobacter baumannii
atgaaaaaactattattttttgtatttctaacattatgttttaataccactttatttgcagctgaaagtgtagagggtagaagaatcgtagatattggctgccatgcagattctggtatatgctatgttactttatcaggtaatccttttggctcaaccttaggctgtcgtttccctcaaacaaatgaatttagatttgaaaatgttgagacatctcatgggaaacgtgcatatgcttcgttattagctgcttttttagcaaaaaaaactgtagatgtttatctggctggctgtacatcacaaggacatcctaatttagtattctttcacattcgttaa

SEQ ID NO: 64924 - DNA, 1026 bp, Acinetobacter baumannii
atggatgaaaactatcaatggaataatatcaatgaaattgagtttgtagttgagtttcaaaaaggttgggttgatgcagaaatatttgagcgtaatttagttgagtataataatttatttgaattagatggaaaaatacgttttattttttcagaaactagattacttctagatgcaattatgagattgctttgtttatctaaccagttagggcaacaaggaaagctaatctgtcttgattttcgaagttgtataaatacttttggatatttggatcgtttaggtttttttaaacatttacataattcagtgcaagtcttgcctgaaaaaccaaaagcatcattagctgaaaaatatagtaaaaattctgaaaatttaattgaggtatttccaatttgtccaaacgatattgataatggggatgtccttagaatatctgatgtatttaaaaattcttttagtgaacacgaaatacaagtactgctacctaagttacaaatgttcgtcgcaagcttgattgataacgttagacaacatggtcagtcagaattagtaggttattcagcattacaaatttataatcttattggtcaaaatcagaaaaaaattgtacttgttattgctgataatggagcaggtctaatatctactttgcgtcatgcattaacttatgatcgttatagagatttagcattgctttttgaagagaattctattgaaaacaataagtctttattagcacatgctttaaataatggcgggattactcaaaaagaagatggaaatagaggggggttggggcttaatgaagcccatttagcaattgctaaaatctcgaagcaggaaacagtagaccagcttgaacttaaaaatattgatgtagatgtatctattcgattagatgactgtttatataactttccttataaatataatcaattgaaaacttgtgatttagttcataaagcgcaatttacaaaaatttatggaactcaatttattttgacaatactattgacaaaataa

SEQ ID NO: 64925 - DNA, 507 bp, Acinetobacter baumannii
atgccttttggtaatcaaaaaggtagagatgttttccctcaattgaaagcaattatcgattcagccccagctcaaagagtttttgaaatttcattttcaggaattgagtttactgattcgtcctttgcaagggagagtgttttactcttggcaaaaatgtatagaggaaacaaggggctctatttatctcattttgatcctaaaaatattgacatgcttgataactgggactatgccgctgaaaaagttgaacaacctattctagtgaaaatgggcgaggaggtccgtttgttaggaaatcgactttctagttcaaatcaggaagtatttgatctagtaatgaaaactaaggaaataactacaaataaagttgctgctcaacttaacttatcagtgccaaatgctagtactaagttaaaaaaattggttgatgagggatatattcttagagttgaagaagtagctgagtctggtggtatagaatttatttacaaaagtatttgctaa

SEQ ID NO: 64926 - DNA, 174 bp, Acinetobacter baumannii
atggcaacaaatcctccatcaggcgatggacatcgtaatggaatggttaaagaccgttctcagacgcaaactccaagtggtcactgggttaaacgtgacacagatacggggcgttttatggatgttaagacatctgaaaaaacaccttttaaaggtgtacgtaaagaaaagtaa

SEQ ID NO: 64927 - DNA, 537 bp, Acinetobacter baumannii
atggcacgtaatcgtacagtaaactatgctgttgttgatattaaattgcttcgagaaggtacaacagttgaaacatatgttgagctttttgaagagcttcggaagaatcctcgacagatcccattagaacgtaataactatttaaaatttcgatttataaagccgttaaacgaagacaagttacttaatggttttagtggagaagtttttaaaagtaatggaattacaagtgattggtatgacgaagaaaaaaatgaaagaagtcgtaataagaatgtagaggaaaattatattccatctaatttaaaagcaaatccaagattttttaaatttatattctttcctttacatcagaagctagtctgtgaagtaaaagatcctgagaatgaaatacaaattggattacttgaaaaatttttaaagaagctaattataacagacaaattacaagataagtttggacgaataatagttagtactgttcctgaagtaatttcggcagaaaaaattatcaactctaaaactctaaaactctaa

SEQ ID NO: 64928 - DNA, 276 bp, Acinetobacter baumannii
atggtagatatgaatacagactcttatatgcagacttatatcgcagggaaaaatgattttttaagcttaaatgatgaagtcaaagaacttattcagttcgccacagaacatgggattgttgaatacaaaactgaaaatcatgcagggttaattgaagataagagtactgctgaatcgaatcctttaattgttagggtgcagtatgatcctgatgtgacagatcagcattatttgatccaatctaaagcattagaaattgtaactagcattaactaa

SEQ ID NO: 64929 - DNA, 261 bp, Acinetobacter baumannii
atgcctatcataatttcaaataccttattagtaatgttatttaataagttaggttggaatttaatactgcttgatgacaatacatttttgtttacacaagtggcttcagtaattattggaattggagtagctgtagttgcagcaataaaatttattaacaatgaagtgctagtttctttgatcaaagataaaaaaatagtaataagtaaagatgaatttgaaaatagttttacctcacattatctaaaatatgaaatttaa

SEQ ID NO: 64930 - DNA, 1173 bp, Acinetobacter baumannii
atgcttacagatgcccaggtcagaaaaatcaaaccattagaaaagaaagtcaaatattctgatgaaaaaggcatgtatctggaagttacaccgtcaggtggaatgcattggcgtatgaaatttcgctttcatggcaaagaaaatatttttagtattggtgcatatcccgacaccacacttgcccaggcaagaagaatccgtgatgaagcacgcttaaatttaaaaaatggtattaatccgaacgaagtaaagaaacaaaaaaaattacaggtggatgaaagtatactttttaaagctcttgcaatggaatggatgcaagatcgtaaagtagtcattaaagaggctacctatctacgtgacttatctgtttttgaaaaagacctattccctactttaggcaatatgccaattgatcaaatcaaaggggaagacgtactcgcttgcgctaagaaaattgaagagcgtggagcgttggaaatggcaaaacgctctattcctttagctggccgtatttttcgcttcgcgattcgaaaaggtattattgagaatgatcccaccccatacttaggtgaggctctcaagccacgtaaagtaaaaaatatggcacgactggatatttccgaatttcctgcttttcttgaacgtatggatcgttaccatggaaatctaatcattcgatcagcattacaattgatgactctcacttttgtcagaacagcagaacttagaatgatggaatggaacgagattgattatgaaaatcatttatggaggattccagcgcataaaatgaagatggctatgcctcatattgtaccattatcaaaacaggctttagaaatactgaaacaaattcaaccaatcacaggcataaaaccttatgttttctataattacagtaaagctaagccaattagtagcaatgctcttttatgtgcaattcgtacaatgggctacaacggtaaaatgactggacatggattccgcggacttgcatccactactctgcatgagcagggttatatgcatgatgcgattgaaatccaattagctcatagagttggaagtggagtatcacaagcatacaaccatgcacaacatttagactatcgaattaagatgatgcaagaatggtctgacttcattgacggtttaagagcaaagaaaacgtag

SEQ ID NO: 64931 - DNA, 396 bp, Acinetobacter baumannii
ttgattagttcagcagaagagttcgttttccttagaactagtgaaatacttgaggaatatacacgtgcagcctatgatgatgcttctgatgtagtttggatggaagttatttccaaatttcctgaaatgagggagtgggtcgcacataataaaactgtgccaataaatatattaaaaattctagcacgagatacaaatgaatctgttcgggcaacagttgctagtaagagaaaacttagtccagagctatttgatttattatctcaagataagagtgaaacagttcgtgagagagttgcatgtaataaaaaggcgccaattcatattttgagaagacttggtaatgatcccataatgtttgttcgtgtggctgctttaaaacggatcggaaattaa

SEQ ID NO: 64932 - DNA, 1293 bp, Acinetobacter baumannii
atgttgggcctcccaattgatattttaagtgaagccttaatatcaaacactgtactagaaggtaaacagtttttcttcttaattgatgagtttgaaaattttcaagattatcagcaacagattttgaatacgcttgttaagcataataatagcttttatacttttaaaattggtgtaagagaactgggttttagacaaaaagctactttaaatcagaatgagcagttaacatcacctgcggattatgtgcgtatagatttaactgaaaaatttcagaatgctagtggaaaagatgctaataaatttaaggaatttgctgaagcagtaattgatagccgtttaaatgatccgagttttcttggaaatgagcaagagcttagaattactgatcttttacctgcacttactcaactggaagaggcaaatttacttctaagagatagtcatcttgagtggttaaaagagctagaaaataaattagataaagatagctttaaaaaagcaaaagagattgaacctgggtatctatattttataaagtattggagtgaaaaggaaaaagataaaagttttcctgaattagttgtagattggatatcaaatggtagagatatttggaataccagattaaataatcacttttacgcatcactgtttgccattcgatcaggtaaagtaggaatacgtaaatattatacaggctgggatacatatttaaatctagctaatggaaacataagatatttattagaattggtacatgcagcattacttgaacacttaacagctttagaaggaaaagaaatcaatagctttattcctatttcttttgaattacaaactaatgcagcaattcaaattggaaaaaagaatctttctgaattagagggactcagtgttgaaggtgccaaacttacaaaattattattaagtctagggcgagtttttggagttttggctgcttcacctttggggcatacgccagaagcaaatcaatttcagttgattcctgattctgatgtagcaactgaagataaggtaaaaatgattttagaccaagcagtgatgcatttggcaataactagaaccccaggtaataagcttacagatagagctgatactaaagcttatgaatatatgattcatccaatttttgctcctttctttgaattttcacatagaaaaaaacgcaaaattgcattgtcatctagcagtcttttaaagttaatacatcagccaaaagcagggattaaagatgccagatcagcttcaacttttcggaagctactatga

SEQ ID NO: 64933 - DNA, 996 bp, Acinetobacter baumannii
atgaataaattaaaaaatattcctatttttacagatacttacaatgatgtggctgaatttaaaccacttgataatagtgtgtatgtttttgggtttacagatgaagctagaagccaacacattgctgaatggaaaagttctactactaatgttagtttcattgaaatttcagagcaaacaatgagttcatttatcattaatggagataaatcgaatgaaattttcttaagaagcgataaaaatattgcaagtctttggcaaggaatccaaaaaagtacaaatatttatatagatattacaggtctgtctcattcaacttgggccagtattttaaaatcctcaattgataatggttttaaagtcttagttgtatatgttgaacctagtttatatagtcgaagttcagcccctttagaaggtcaaatatatgatttaagtgataaaattactgaaatttctcctttgccaggttttgctgttctagctcctaagaaagctgagacattatttatcccactacttggttttgaaggagctcgattaaaatatattattgagcaaactcagccagcaaatgagcatatttttcctatcataggcctaccaggatttaaaccttggtatgtttttgaaactttgaaaggtaataaagcttcattaagtgagactcattcatggcaatcaattcgatatgcacctggagattgtccatttagctgttattacttattaactgacttatatagcaggtttaaagatcaacatatcaaaatagctccaattggaacgaaacctcatgctttagcagcagttatgtttgtgttgaatcatccccaaatagagataatctatgatcatccagttagaaaacctggaaggactgatgggtcttcaaagctgcatgtttatcatgtttctagtatagttaagcctaatccaaccaggacacaagatttcatcagaagtttgagaacacgtagggcaagtttaacttaa

SEQ ID NO: 64934 - DNA, 1074 bp, Acinetobacter baumannii
atgatagatcaacactttactcctcctcttttagcaagtcttttggtggattccttgccaactgcatttcagccttcttatattgcagactttgcagttggtgaggggagtttaatttatgctgctttaaaaaagtggcctagaggattaaatgttgttgcaaatgatttatctataaatactctaaatttattaaataatgactgggataagttcaatgttgattttttagatagaagagctattgctaactctgaactaaagaaattcgaaaataaaattgatttaattttattaaatccaccatttagtcaaagaggaattaaaccaatattatgggagaatacagaagcgaaaatcaaatctggtgtggcccttaattttatttataactcccttaattttttaaaatcaggtggctttttagttgctgttgttcctaatggctgcttaacaagccaaagagataaaaaagcactaacctacttaaaagaaaattataaatttaaaattattacacataatagagaagctactttcgataaagtaagagtaaagacatcaatcattatgattgaaaatataaaaccaactaattatcaggaggatattcaattatctattgatagattaaatccaagagtgtttagaggaaaatttcagatgcatacggcatcaattaatagcttcgacaaaggttatccattagttcatacctcttcattaaaaaacaatactatcgattttttaaattgttttaaagttgctaataaaaactctatagtaagggggcctgcagttctatttcctagagtaggtaattttactcaggaaaaaatttgtatcttatcttcaggactagaaatagtaatttctgactgtattttttccataaaatgtaaaaatttagcagaagcagaatgtttgaaaaaagctatatacatgtattgggacgattttaaaaaaaattactcggggacaggggctctgtatagctccttagataaaatagagtattttataaatagtttgtatttaagcaagtgtgctcaattaaaagaaattgctgcttaa

SEQ ID NO: 64935 - DNA, 2619 bp, Acinetobacter baumannii
atgttcaatagtatttttagtattcttgataaattaggttatggaatacaaaaacgcgctattagtattcatttttcaaatatgcaactcaattctcaaattatgttgcaacgtattgatggctatcatggtatcaatgagggtttatccgcagaacttatttgtttatcaaccaatccgtatattgaacttaaacaatttatagggtgccaagtagcaatcgatcaaatcactgattcaggtaaattatttagaacaacaggcataattacaggtgctagtcagggacaaagtgatggtgcttttagtctttatcgcttaactatgcaggatcccacaagtttatggcataaaagacgtaatagtcgcgtatttatgaataaaagtgtagttgatattgtagaaattatattcaaagagtggcagaccaaaagttcattatttgcagctagtttaaaacttgatacaagtggcttaaccaaatcttatgatataagacctttttccatgcaggccaatgaaagtgattacacctatctaacaagattaatgcgtgaagaatctattaactggcttatagatgaatcaaattatattactactaataatagtggggacatagaatctcaaaagctgagattaattgatgataactttcaatttaagtcacttgatcgaagaacaatacgctatcatcgttcaaatgctacagagcaatatgacagtatcactagttttattgcagagcgtcatttacaaccgactgctattcatgtgcaacgttggcaagcagacagtttaagtcagcaagatggaagtggctcaattgtgagctcacataaacatagttcacaaagagacaatgaaagtctgagtctggaacaagcgtggagtttatctccatcatggattagtgatcttaaaggtgaagatcaagctacagtatcaagtaatgatcaacttgataaattaaatagacatcttagccaatatcaagctctgcaggctaaatattttacagcgcacagtagtgtacgcgatgcacaggttgggtactggtttcagttagttgagcatcccgagctagataaaaaccacgctgaaaatgataaggaatttttaatactatccaaacatttttacaatcaaaataatcttccaaaagacatacagggtcaagtcgaaaaattacttactcagagccattggcaaattagtcaagatagtgagcaagaaagacaagccaatgagctgatagtagttcgtagaagtattcctgttgttcctgagtatgatccactcgaacataggcctattgcacatgtacaaagagccaaagttactactgatggtgaggaaatccatgtcgatgaatgggggcgtattaaagttcgtttcctatttacccgtgcagatgatcatgctcatgatggcggtgcaggttccaatgatatagatactgactcagcttgggttgatgtacttaccccttgggctggggaaggctatggtacgcgtttcttaccgcgtaaagatgaaattgttgtgattgatttttttgatggcaacatagatcgtccttttgtcactggtcgtattcatgaagcccaacgaacacctactagatttgatattaaaggaaaattgccagagactaagaaactaagtggcattcgttctaaagaagttgatggagaaggttataaccaacttcgttttgatgatacaacaggacagattagtgctcagctccatagtagttacggcgcaacccaactgaatttaggaaacttaagccatcctaaagaaaccgcagaaagtgatggaagaggtgaaggatttgagttaagaactgataaatggggagctttaagagctggaaaaggtttgttaattagtactgctgaacaagcaaacgctacagacgtacaattaaatattcaaaatttattatcacagttatcagaatctttaaatcaattacaattattagaaaaaaatgcgcgtacaagtaaagtttttcaagatgaaaattaccaaattagtttagatttaattaatcagactgaaaaaactttagaaaagttcacggagcccaatattttaatgagttcagttaacgatcttatttctgtgagtcaaggcaaccagactcatgtagcaaaagataatataaaattaattgctggtaagcaatttgatataagttcttctggtgaacttacagcgcaatctgccaaggggcttagcttatatacacaagataaaggcgtaaatctgtttgctacaaaaggtaatattaaaatacatgctcaaaatgacgagttagaattagcttctttaaaagagtgtaaaattataagtacagaaaactcaataactttagctgcaaaaaaagaaatcatgctcacttgcggtggtggttatataaaaataaagtctgatggttcaatagaaattaacagccccggtctggtcgagataaagtcatctcaaactaagttcacaaaaggggtaaagcataattttccgcttcctaacatttctagtaagatttgtgtttcatgcttattagatgctgctagaaaatcactaccatttgttcatagagaaatttga

SEQ ID NO: 64936 - DNA, 507 bp, Acinetobacter baumannii
atgaaaagtatagaactacttgagcaaatatctgagaataatttagaaactaatttttatttactcattgatgcagcgaaagaacctttatttataaaaaaatggctgaaaaagatgcctcaaaagaaaattgttcagattggtaacttgtttgagggaactatagatgaaactactccattagaagtttcacccttattagtacgtataaattctgaattgaagtatgaaattgaaacgcaattattaatgaataatgattctgaaatgttttctattattgaaacaactctatctaaatatgaattaattaatcatttgcagccttttttacaagcagaattaccaaatggtgagttagcattgttcaggttttatgatccatccatcgtaagaattttaaataagatgttagatgaagaaaattttgttttattaactactccaattaagaattggtggtatcagagttcagataataattatttaagtttaaagagtaattga

SEQ ID NO: 64937 - DNA, 426 bp, Acinetobacter baumannii
atggtaattgaatttacgcaagaacatttagatgcttttcttgatgatcgtgaagaaacactagcattatggaattggaatcgattaaagcaattgtatagtgatttagcagaaaaaaactttggtaatgatgaagtaaaaggtgttcaatttcttattgttgctcaaaaaagaattagaaaatatcttaatggtatggaaaataatgaggattataataagtggagagcagcgtatggagaaatctgttttattttaaataaaaataatattgatgaggatccttggaaccgtagtcttcttgaagagcggttatggcctccttttttagcaattgatattttagcaggagtgctagaaagtagtttaaataattctgctagtcaaaagttctatgcttcattggagagccataaatgggagtag

SEQ ID NO: 64938 - DNA, 708 bp, Acinetobacter baumannii
atgggagtagcaattgatgcgggctcatttggcggttggggtgtagctgcagaaaaagttggtgaagctgcgaaagttgggactagagttaatcctattggcgtattgttgacaggtttatttacaccatctgagctagctgatggaacaattacaggaatgttaaatcgacaaattgatatggctactacagatattgaggatagtagatcaactattacacaagctgaaaaagataaggctttacaagctagtcaagctaaatcgaaagagcttgaaaggtcatgcaatagctctaataaagaatgtaataaagggcaacataatggacgaattcaagcccagaatggaaagagaatgatcgtcacagctactgaagctggaagtgtgtggaccaatcatccttttccacccccacttattttatgtaaacaatatgcgctttctatgcgtatagctatgttaaaacttgaagggcacagtaaaccagatactaaaattaaaagtcctattgattatcatcaaggagctacaaaagcatataaagcgcaggtagcttggatggaatcaaaaacaccatatggagttactgttggaaagcattcttttagttttagtggtaagcattatattggtgtaatccctccaactgatgattgccgaagaatcgatttagatgtccttaagggtgaaattttaaaaggttaa

SEQ ID NO: 64939 - DNA, 498 bp, Acinetobacter baumannii
atgatagtttcagtaaatgtagtaagtttttttaaaaatcatccgaagtttccatttttatactggcacaagaattatgatgaatatactgctatgtatctttgcttaacaaatttattaaaagcatatatacctgaaaaagatagaaatgactggactcatgcatatgattttatcgattttaggcgcaatcctgatggtgaggtagcctatcctttaatgtgtattaatagcaaactagaacttgtaataaatttaggcccaagaaaattagatgaaaatgaaattgatgaaaatttcttttctgtacaagtgagtagagatgatcgatggggggataagtggatggataatgcacccgaggatgaatggtataatgaaatatctataatgtttgattttaataatgctgcatctttagaaaaaattgattctatactaaataaaattatgcaaaaaaagttaagctacaatgagttattaattttagaagaataa

SEQ ID NO: 64940 - DNA, 504 bp, Acinetobacter baumannii
atgaatttatattcaatacctgctgattttatcaatgaaaaggtgaacctttcatggtgtgatatcaaatggggctatgaaaataatctgattacttcggaactgccaatcaaaaaagccgaaaatattatattaacggagatctatactaaggccgagcttgagttgtcattccttatacccactgagtcaaatgacatcagttcttttatttatgaattatgtccaaattttaaagaagatgaatatgagaccattagtcaaaaatggttatatgtaattcttagctggctctggcttaatcgagaaagttttgaagatcctttagatgaagtagaaagtatttatacagattttgattgtccagccgaaatggataattttattaaatatatgcctcctacggatggatataatccatcattgtattcttatgcagaaaatattaatcgcttaatgaagaattgggaaaattacttacaaaaaagtgctctaaagtactaa

SEQ ID NO: 64941 - DNA, 462 bp, Acinetobacter baumannii
atgattttatatgtctgtagttatgtaataagaaacctttttttatcagagtcaagaattggtgtaaaagaaatgggttgggagaaattatcaaatatagtcaagaatgtttatgctgttggtgggagtgtcattattcataaaacagatgctgattattctgaagagtctggacgattagcatatagtgatattgatagctacagcatggtttgtgattcaaaatatggttatttatttggatgcagtattagtgaaaatgaagaatatcctgaaggtacttatttgcgcctcgtgaatagaaaagctaaagatcctgaagaagtttatgtttttgaaccatatgaggatgaatggcaagcaaaatatgttaatcaagatttagaactggtattaaaattattcaaagatatttatgagcacggtgaattatcatttgaggcaaaaataatatttaagtaa

SEQ ID NO: 64942 - DNA, 333 bp, Acinetobacter baumannii
atggaacccaaagatttaggttcgtttaaacaagatatcacagcatgggttgagcaatattttgaagaatatgcttccgaggtgggacaagatttattacgagatgttctgtatacatcaaattcggattctaatgcacgtatgtgcgaaagtttaattattcagcaactcgacattattcaaaatcgtgcaaaattacgaaatgagttcactataccgaaccaagaaattatcgaaactgtaattgcacccatgttatttcggattctatttactaatcaggaattaaatttagattacgtacgtagtcttttaaaacgactatttatttaa

SEQ ID NO: 64943 - DNA, 306 bp, Acinetobacter baumannii; identical to SEQ ID NO: 57886

SEQ ID NO: 64944 - DNA, 690 bp, Acinetobacter baumannii
atgaaagagatgtgtacggtcattcaaaatgctgatttaaaatatcaaaatatatatgtagtcggcgatatacacggctgttattcacttttaatggatgcgcttgcaaacgttaattttaactttgagcaagatttattaattagtgtcggtgatatagtcgataaagggccgcagagttaccagtgccttgaacttatagaaaagaagtggtttacgatggttcggggcaatcacgaagagctatgtattcaaggcaactataattcttactttcgaaaaatccatgaaaaatatggcggtgaatggttttatacactagaggataagacccgaagccagattgtcgctcagctaaaaaaactaccgattatgcttgagttgcatacacgccgaaaaaagattggcgtccttcatggagatatgcggctcgatgattgggatgctttgaaagctcatgttgagatgaagaactcggaagtttctaatacgttcttatcttatgccgaaattttgtggggcaggtctcgcataaaaaataaagaagattacggcactgttcaaaatattaacgagatttatttaggccatacagtcgttgaaactatgctgaagctaaataactgcttttttatcgatacgggtgcctatcaatcaaaccgtcttactttagtgaagttagatggttaa

SEQ ID NO: 64945 - DNA, 366 bp, Acinetobacter baumannii
  misc_feature (352)..(361): n is a, c, g, or t
atggatatgcctgagatacaggaaccttttccgcaaagtctgaatcagcttactgttggaatacatggttttggtgctattggtggcggttatatagcgcaaatcttgtcgcattgggatggttatacgaaaccaaaacgtattattgcgtcaacacgaaatagtcttttccgcgaagctgtaaatgcgtttggtacctatagtattcgctatgggcaattttcttatgatgaacgtattgagaatatgaccattgttgactctgacaatgaacaacaaatgttagagatgtacactcactcaagtttgattgcattatgtttgcccgagcaagcaattgaaactgaatcannnnnnnnnntttaa

SEQ ID NO: 64946 - DNA, 435 bp, Acinetobacter baumannii
ttggttaatgtggttgttacagttactgctggtgcaaccgcatctactgtaccagttgatggtgctgacgggttgcccgctgggtcagttgcaacaactgtaactttgtctccatctttaagatcacctgggtttggtactgtccatttaccatccgggcctgcaactacagtcgctgttgtgccatccgggaagctcacagtaactgttgaaccagcttctgctgtacctgttacaggattagtcgcattgattggatcaattactggtgcatttggcgcagtggtatctacagtcaccacagcattagttgtacctacattacctgctgggtcggtggctgtcacagtcacggtatgcggaccgtcagtcaacactggaagtgtattgtctgcaagggtccaggtgccatcaccattattggttgctgggtag

SEQ ID NO: 64947 - DNA, 1734 bp, Acinetobacter baumannii
ttgattcccattatttatgctaaatatcttattcagttaggatatagtttggtagatccatgtgatacgaatttaaagaaaaaattttataataatttatgggtaaaaaaagttgttgtaggtggggtggatataagattgggagttttttttaggaattgggattttatatctcctcctaatgtctatttgttttctgatgatcttctagagattaaaaaaataaacaaatattttaaatttccactacctcacttttctatcgaacatgattttaaatatttaaataagaatgcttataatttttgttatgctttgcatgataaagtggaaattaatcgaaaaaattttacacaaatcttagcttttttagaggctcaatttcaacgtgtaattctagatttatttagtccatctggatttgtctcggagttaagaaaagaaatagttccaatttggatgatactatctaataagttcgaaaaaaaatttaaaatggaaagtttatttgtagaacttgagaggtgtgagggtattaagaatatttctttgacatattattctgcggatgctgatggagctcaaaaaacaattaaatctaattttattattttaagaatatctagcattaattttccattaatgtctaatttttttaatgaagacggtgatataacactagggaaaatgcttctatttatttataaattttctcagcgttgttttattttgttaaagaaatacttaagtgagtttagagctaataagaagttattcatttctttgtgttttgaaaatcatatgttttctttttttgtggattggaagagggtatatcagaagtcgttagatgtaaatattgaaatatcttcagaatttttgagagagcttgttttccctgtatatgtgaaaaattattgtatgcaagaattaattaatagaaatataaaagatattaaatctcaaaacttaagtaatttgaaaattctacaaattggagcaggtgctataggagggtatgttgcagatgcattgattaaaattggtgctagcttagaagaaggtaatttcaaaatttgtgatagtgatgattttaaagttgaaaatttaggaagacatatattaggtaggcagtatgttggtttgaataaagccgatgcaatagttaagtatataaaagagcaatttggcgataaaaatcttaatattcaatctataggtcaaagtgtaaatacaattactaattttagtgaatatgatttagttatagatgctacaggtcagattgaaattgcagagtatttaaatgaaaagatacttaaaatacctaaagaatatagaccaaatcttttacatctatggatatatggcaatggggaatgtgtgcaagcattgattaatttgccttcgaaatacgaaagtaaaggcgggtgtattagttgtttacatcaatcaggaatggacgattacaaagagaaatttgatccactgggaaataaggattttttaaaaattatgggtttaggaccttgtgcagcctatactccttattcagtttctgctagcttagcagtcgcaggccttgcaatcgatttgcttttagaatggagaaattctactcagttagtaaataattactttactcgatatagcgttgcttattcaggtacaaaaatttttgatatggaattaacagctcaagaatcatgcccacattgtcttacaaaatcatag

SEQ ID NO: 64948 - DNA, 456 bp, Acinetobacter baumannii
gtgttcttaacagacagagcacttcatttaattcatctgcatagacaatttcacggtactcagaagactgaggcatgtggaatcattattggtgagatacgtagtaaatcattacgagtaattgatattagtcctccagcagatgatgatgaaagatccatatatagtttttttagaaagtctcgaaagcatcaaaagtatttaaatagaatgcatgaaatatcagaaggagtattacaatatattggtgaatggcatactcacccggaaccttatccgcgtccctctatctgtgattataatggatggagtcagcttctagggagtgaggattttaatcaaactcctaaattattgtggattggaagcaataaaagctatagtgaggattggtttaatttgcttgtgaataaaaagtattatactctgaaaatcagagaggataataagctttga

SEQ ID NO: 64949 - DNA, 1185 bp, Acinetobacter baumannii
atgggtagtaatttgcatagaacttttagagccaaattagatggttttattaatgaaattaagcctactagtgagcaacgtgattatttaaatgagtgtcgtcaaaaagtaagagctgttttgaagcatggaatggcgaactttattgcagaaaatggtggtgatccaaatactatcaagccaaaatttcgtctacaaggctcttgggcttatggtacatgtaatcagccagcatacccttcacaggaaatggatgttgactatggagtatatttgcctaattctttattagctcaagggcgttcagatatagtagctaagtcatactttgtagtagtagaagctttattagagccattggctagcagagaaggctggactttatgcaaaacaaaaaatacttgctgtcgtctaatactagctggcaatgctcatatggatgtgcctctttatattgttccagacttaatgtttgaaagtttagttgaacgaaacaatatgattctggatgaggcaaaagcaacaattgccaaagatgaatatatatttaaaggttatcattattcaacagagagctttgagagtgaagccaaaatcatacaactcgattatattactaaaatcctcatggctttacgtgatggtaattggaaagaaagtgactgtgaattgattcgtaaatggtatgcagatcatttggctgaacaagaagataatggaagacaattgagatatattgctcgatatcttaaggcttggagagatcaagaatatgaagaaggtggagggccaagttcgatattactcatgataattgcaaaccaaaattatcaatattttgaagatcgggatgatcttgctttattacacgttgtaaaaaaacttcctgaaatactactaggtcctgtcaaagaagattctattcctgagcatacagatgaagattttaatagaattcctgtagatgaaagaagcgaggcgcatgatttagcttcagaactacttgatgtagttacggcagcaattgaggttgaatcagcaaaaacttcaattaattttctacgaagtaaatttggaaaaagaatccctgataatgaaagctatgtgattattgagaatactaatcaagagttaccattgcagactgtatccccagcgacaattcaacctacaaggggtgggtaa

SEQ ID NO: 64950 - DNA, 462 bp, Acinetobacter baumannii
gtgataaattctcttgaacacttcatacaaaattcccttatagaaataagtcaaaatgctggtaacgatttctctggtttagggataatttattataaggacttaagtcatcttccttacattggcttacatggcacaaatttgccctttgatttaattcctcaaaacttaagcacaactcttctaaaagtctcgaaaaactcctctatataccacgatggttttcatttcgttaacattaatactctacatataactcatatttcccaatttgtttctccttccttagaatctgttaaaaacatgagtattaatcaagttattccttgtggtgctcgtgaaatgacagcatttttaacatcaaatattgaaggtgtgttttgtgttggactaattagtgcaaataaaacgattaagatctttaaagacagctcaactatatatcaaaaggtaaacgcatga

SEQ ID NO: 64951 - DNA, 651 bp, Acinetobacter baumannii
atgagttttttagtattaaaatttaacgagctaactaaaataatttatttgtttattatacttacaggtcttattttgggattaatacaacttatcaactatctatttggtggaaatctaggtattgttcaatcactgaccccatctattactgcctctctctttattttaggcctacttcttagaaaagttacaattaaacatagattattaactcatatcattggaaaaccaattatacatgggctttggaaaggaaaactaataagtaactttgagattgatgggcaaaagctccctcctattgagatttatttttatataaaacagacatttctaataaccactataaagtctttcacctcatctcaatcatctgaatcagtgattactgctttatcattcaataaagatagtgaaacctctgacttcatttatatttatagattctatcgaactaaaaacagtgaaaataaagtcacttttggtagtggaaatttaagattgactaacgatagccaaacattagaaggtatttattggactaatgcaaatacatgcggtgagatagagttaaatttagttgatcgaaattgtgctaatgttgattcatatcagatggccacaaaattacaaacaaacaaaaaataa

SEQ ID NO: 64952 - DNA, 708 bp, Acinetobacter baumannii
atggtcaaaatgaatagaaataaaattgaactacttgcttctgccaattggtctcgaacaaactgggatttaagttgggagtccatcataaagttagatgagcttttgcctagagttggtgaaaggtaccaaatttctttacaagactctgaagctcaacatactaaaaatgggcgatattatttgctttggctccctccacattcagaactgaatactttatatgatcgaccaactgaagttttaaaatcttatgttattgaggctgaattatctcaaggtgagtggattaacgagggtcatagttttggggcagaacgaagttttagtgcaactataatttcaatcagaagagtgcttgagtatttaccagaaattcaagtcatacaggggcaaaaaatttctaaatattttgaatgccatccttatcgaactgaattcttgaagtgggataatttttgtttcttcatagtggaagatcagtatcagcatactgaattgttattcaatattgatcagggaaattattatttaatatttgtcaatgattggctttcatattcttatgatagctatatttgtaagtatttactcgatactcagcaaattgagtttttaaagaaatacatgattgaatcaaataaattgacatcatgtacagatgatttaaaggaagagcatctagttcaaggagcattgtatatgtaa

SEQ ID NO: 64953 - DNA, 327 bp, Acinetobacter baumannii
atgaataaaatattttttactctatttttgagcctaatattttgcaactctgtatttgcaaatagccctttcccacaaactaaggttggaaaattagttgttcatgacagtggctcatatgtaattgttgtgcttaaaagttcagtagcaactggtgaggggtgtgcatcttcaaatgaaataaaactaaatgcaaaccatccgctatttaaaattatgtatgcaacgcttttatcagcgctccatagtcaaacacttatagagggatgggtgaatggttgtgatggtagagaaccagttttaactcgcttagatatatccaaataa

SEQ ID NO: 64954 - DNA, 327 bp, Acinetobacter baumannii
ttgaaaaaaatattaatattatttcttttaaatttattaatttgtagtgcagtttctgcaaatagtggtttttataatacaaaaatatctgcaattactattcatgataattggaatgttttaattatagaattaaaaagtccggtagcaacaggcgaaaattgtggaatctcgaatgcagttattttgcgtaaagatcactatatgtttaaagaaatgtatgctgcacttttatctgcatttcatgcgcaaacagtgatcagtggttgggctaatagttgttttgggcaatatcctgttataactaggctagacttaagaaaatga

SEQ ID NO: 64955 - DNA, 507 bp, Acinetobacter baumannii
atgaaaaggaaaaataccaaaattggtgatgtatttactgttaaattagacaatggtaaaaaaaaatactttcaattgattgcttttgatttaactcagttgaatagtgatgtaatcagagttttcaaaaaagaatacccattggaaggtgatattgatttattgcaaataatagatggtgaagtagagttttatgctcattgtgtgactaagcttggattaaaaatgagtttatgggaaaaagttggaaatatcagtgaaattggtgatatttctatgattctttttagagatactaatgattatggagcacgagttggggcggagaaaattaaagtatctgagaattggtatgtatggcatattaatgataaagactttacacgtgtaggtaagttgacaggagaaaatcgtaaggcggaaatcggtgtcgttatcaatccctatgatattgttgaacgtataaaaacaggaagttatgactttatatatccaggatttgattag

SEQ ID NO: 64956 - DNA, 984 bp, Acinetobacter baumannii
atgagaacaataatgaaaagtgaaatgaaaaataacgatatgtactcaaagaaaatatggtcatctgctattcagttggtgctgttaagtttaattttactttttagtcagctcacgctggctaaggacaggattcaatatcatatacagaactttgatggatcaaccttaaaggtaataaatgaacaaggtattgttagtcaatcataccaatatgcaccctttggacaacagttacagttaaagaaaccgagtaacctaaaaaatccccaagcctttgtaggtggagtacaagatgcaaatgatctggtttacttaaaacaaaggcactataacccagtattaggacggttttatcagcccgaccctgtaacgtttatcagtggtgggcatggacaaatcaatccatatcaatatggatggaatgatagttacacctttagggattcaacaggaaaaatgcctgtgggaggtactcctgaggaaattaggtactatgagcaattaagaatagatcaaggaaatttgccgaatttacaagaagcaaaatatgacttcttcactttaaatgtgttgtcaaattttattccagtgggcacaagctttaatatatttaaagagtcttggttaacttatagcagtttaaaatttgctttacctgagatgacttttattactcaggcccagaaagcaactaatgttgtatatcagggtgtagataaatttggggacgtgagatacataggtattacacaacgagcacctgaagtaagatttgctgaacatttgaatgcttttggaactggtaaagaattattacaatatcgtgtgatagatggtgcaacaaatttatcaagacgggatgctcgtattatggagcaaactttaattaatcagtatggtctcgggaagaatggcggtatgctgttaaaccagataaattcaattagtccgaaatattgggaaaggtttagtattagataa

SEQ ID NO: 64957 - DNA, 3999 bp, Acinetobacter baumannii
atgcccttggtttacacaaacgcttatgcaaatacattgttgtccttacttcagttaaaatgggatggtcagttatcaaaatcgccatcgaatgagttatggagttttaataagccgacaacatcaacatcagatttttctctttattctaatgtagatactcgtcaaagaccaattagtctttatttgccaggtcaaaaaaatattattttttatcctatccaaaatggtgtaacgggttatccggcaaatacacgatatatatcacaggataactggattatttcttgcgaaaatagtggaaataatttcagagttagagcacctaatggggtcaattatttatttcctattgaaaatagagaaaatcaaacaggctttcctacaatattctcaagtcaatatattgctggacgtgtaagcctctatgcctcaaaagttgagaaccagtttggtgaatcatattcaatgaactattcccgaatcgagaatactaatccaacctatcagggatataacaactcttccaaattattcttagaaaatgtacgacatcagctagatggtagggatgttctatccactccagaactaactttaagttatgcaaaatataaagatggggctgtcattagtgaaaataaagatgaatttttgaatattaatggcgacattattttaactaatattaaaagatatataaatggaaggtatgtggtatggaaagcctatacgtattacacaggggataaaagtaattatttaaataatgaacctataccgggaagtactaatacggttgctcaagttcaaaataaacaggcagcgagtgtttatttaagaactgtaggagacgtaagtggtgatgctattgcttacgaatatgggggtccttatcgtattattggtaatcatccaaagtcgaataatggtgttacttcacagggttatatgtggttttacagtgatttgatgggagttaaattttttaaagcgtcttccaatggtttaattaatgtcaaatctgtgaattggtcatattcattaatcaatgctccacgcccgggatttgatgaagcacagtctttcaaaatcacttactcaaattatacgggtataaatgcgaacagtttgcaaattaattatggatatagtcgtaataaagagagcaatgaactgacgactacagtcacgaccaaagatatggtaacaggtttgagcaaagcctatacctatgtaatgaatgcatttgatggtggtgttgcagagagttttttacatggtctactgaaaaaagtaactattggtgatcgacaagaaaattattcatggaccacactttctttaattggacaaaatcctgcaacagcgaatgataattatacagggtataattctgtgtatttagttcggcctagtagcaaaacaatcaaccattttggtgaatataagacaacttatagtaattttgaccaatatggtaatgcgcaaacaatacaacaaactggtttaaatggtgggagcgcaattcaattaccaagtacaacgacgacatattttaatgcaaatgttggaagtgaagctgtaaatagcggaagtttaccttggattattggattaccaaagcaaaaaacatctggtaattttacagtacaaacgactgaatatgacgagttaggtgctattcaaagccagactcaggcaggccgaattacaaaatataaatatgaaactctttcattttcaacatgtcttggcaatttagttgattttcagtggtcaacttttgtagggtgtttttctaactatgtatcaggagatcgacatacaggcttacctattgaagtagatgtggggaatggaaagcaaattactcaatttgctgcatatcaaaacggtattccaacccaaatcaaacttgcaaatggcgggcaggagtcaaatatagttgatgattttggacatattgtaagacatacagatgctgatggcgttcgttctgaaaatcaatatgatgatgcaggtcgtttaattgtcgaaactccaatcgctggcttgagttataccacgataagttatgatggtttaaatattctaaagacagcacaaaacggtggaaattatagtaaagctgaaaaatataatggtgatggccttctgatccattctactgaaaatacatcaaataaatccgttgtgatgacaaatagttatgatgcttttggaaatataacgtttagttctaatccatcttctaatggtacgacaacgggtatttctactgactatgatgtatttgatcgtccgaaaaccgtgaataataatggtgtgacaatttcttactgttatcagtcgtgtgctggtcgttcaggtgcaattgctttagtgagcgatgcttatggtgttactgaatccaattatctgtcagctggtgattttagtccggagttaaagacgagtgtaagtcgaaaaggaaatgatggatcggtttttgaaacatttacagattacgatcttgcattattacaacctgtcacagcaacatctggggcatctacacaacgttatacctataacagcaatggttcattagcaacagaaaaagataatagtatcaacggacaaaaaacttatggctatgatgctacgggtaaagttaatacgattactcatcaagatggttcgttagagacaattgaatattatccaatcaatgatttaattgcctcacgtaactggcgtggtgtaacaacgagttatggttatactgctgcaggccgtttaacttctacaagtaatgccaacacggcgcaaagttatggtcgtgatagtttgggccgagttatttcactgacccaaagtattaactctcatgatgcaaattatgcatttacccttagatttggttataacaaccttaatcagattgtatctattaattatccaaatggaaaagctgttgatttgtccaatcaaaatgcatttggtgaaattggttcaataccaaatgttattcagtcacttaactataacgcattgcatcagctgatttttgtacaagcaaatactgatgttgcatgggattattcttattcaaataatggtttacctacaggcgtaagttcaaccagtctgaataaatgtgctgtaagtattagttatggatatgatgcattaaaccgtattaatagaatggttgataattgtggcgcaacgtataacgcttcaattgaccgctatggtacagggttaatgaagcagatcgaacaagatcacgcacgttatcaatatagctataacaatgatgacattaatacagtcaatgtgacggcaaaaagtcaattagttgcacccgcttcttatgtttaccaatatgtaaatggaacttcacgtttgggtagcgtgagtggatctccttatcagtttagttacgatggaatgggtaatgtaactaatgatggcattcgagcacttgattacgatgcttattaccgtataagcaaaaatggtaatgaaagctacatttacaatgcagatggcttgagagtgagggctgtacgggaaaatggaatcactgattatatttatgatttagctggacgtttaatttacgagatcaaccatagatctggctatagtcaagcttatgtttatgtcggagataaactggttgcaacgctcgagaattatccagatgcaaatgatggctatgattttatcaataattttgaggcagcagagtttggattactcagcttattagatagctatctggatagtgatgatgatggtttaccagactatttagaacgttttattggttcggatcctaataatcctgatacagatggtgatggctataaagatggttatgaatataagcagtttggagctaaaggagtattagacgcaggaattcatccgagtgaacctgatccagatgaagatatggctgcgtggttaccaactgttttagatcttattcttgaagatgactaa

SEQ ID NO: 64958 - DNA, 495 bp, Acinetobacter baumannii
atgctagccaaaaaaatttcatctactttaaagtatgttttagctagtttactgttatttgtgctttatgctttttttagttcagcacatgctggctgtacggtaactggaaccacaaatagtacttataattatacagcagcaacgattaatagtgacgctaccattacttatactggaactattcggtgtacgaatgttgggagtactgctcaaatatcaagatatatgtgcatgaagacagtatttactggagcaactacttcaaatagtaatgtttcattaccttatacggttattgcaactgtaggcggagcaggttcttctactgcaaatcaaacttcaaacttttggtatggtcctgtgactacggtggcaccaaataatattattagttactcagtaagtattaaagttccagcaagatcgggctctttaacagcctatccggtagggacttatattggctccgttcaagtattttgggacatgtaa

SEQ ID NO: 64959 - DNA, 480 bp, Acinetobacter baumannii
atgtctaatagttataaatttcaattaaaaatggagctagatctaaaattaatcacgcctgaagagattcagaactgggccgtgcatgcactagagaatgatccaataaatgagctagctttagacatctgttttttatcaaacactgagcaaatattacaatatttcagactcacagaaaaaagtgaatttagtgaaacttcggtagatgaaataacaaggaaagttttagaaaattttatttttaagtatataaatattgtgaatcataaagaccagatatattctttttttcaaaatattgtttccatacatccttacttagaaaaagaagaattacggtttttaatttactcatatgagactcaactagatatggcattagaaggcttttcagaattagagcctgaaacactatgggaaaattttaaattagagttaaaagaacacctttcatctccaactaattccaataactaa

SEQ ID NO: 64960 - DNA, 3105 bp, Acinetobacter baumannii
atggttgataatactaaacccatcgctgaatcaaataactttattattttagataaatacagtaaagattggcagatcgcagatagctaccaaagtgaaggtgatttagaaagtgaactaattcaggatttaatgaaccaaggttatgaatttctacctgcgttaaacaatgctcaagccatgttagtaaatgtgcgattacagttagaagtactcaataacgtacaattttctgatgttgaatggtctcgttttgttgaaacttatttagataaaccaagtgatagtattgtagaaaaaacaagaaaaattcacgatgactatatccatgatttcgtctttgatgatggtcgtattcaaaatatctatttattagataaaaagaacattactcataataaagtacaggtgatcaaacagtttgagcaaaagggcagtcaagctaatcgttatgatgtaactattttggtcaatggtttacccttagtgcagattgagctaaaaaaacgtggtatcgctatacgtgaagcctttaatcaagtacatcgttatagcaaagaaagcttcaatagtgaaaactctctttataagtacttacagttatttgttatttctaatggtacagatacacgatattttgccaatacaactgcacgtaataaaaatacctttgatttcacgatgaattgggcgaagtcagataatagtctaatcaaagatttaaaggactttacagcaacttttttccaaaaaaacacattgctcaatgtgttgctcacttattctgtatttgatgtaagcgatactttactcgtgatgcgtccttatcagatcgctgcaactgaacgtattttgtggaaaatcaaaagctcgtttgaaactaaaaactggagcaaaactgaaagtggaggctatatttggcataccacaggttcaggtaaaaccttgactagttttaaagccgcacgtttggcaactgagttggattatattgataaagtattctttgtagtagatcgtaaagatctcgattatcagactatgaaggagtatcaacgtttttcgcctgatagtgttaatggatctgagagtaccgcaggcttaaaacgaaatttagataaagacgataataaaattatcgttacgacgatccaaaaactaaacaatttgatgaaaacagaaagtgacttacctatctacaataagcaagtggtgtttatttttgatgaatgtcatcgtagtcagtttggcgaggcacaaaaaaacttaaagaaaaaattcaaaaagttttatcaatttggattcacaggtacacctatttttgctggaaagaatgcattaggggcagaagatacggcaagcgtttttggtcgtgaattacattcgtatgttattacagatgcaattagagatgagaaagtattaaagtttaaagtggactataatgatgtgcgtccgcaatttaaatccattgaaactgaacaggatgagaaaaagcttagtgcgtatgaaaataaacaggctttactacatccagatcgtattcgtgagattagtcagtacatcttaaataattttcgccaaaaaacacatcgtctacaagcaagtagtaagggtttcaatgctatgtttgctgtgagtagtattgatgctgctaaactatattatcaatcacttaaagatttacagaaaaataatgataagcctttaaaaatagcgactattttttcatttgccgccaatgaggaacaggatgctgtaggtgatattcaggatgaaagttttgatgtttcagctatgaatagcagtgcaaaagagtttttaagttcggcaattacagattataacttattatttaaaacgaattttagtgttgatagtaaaggttttcaaaactattatcgtgatttggccaagcaagtaaaagctaaagaaattgatttactgattgtggttggtatgttcttaacaggatttgatgctccgacattaaataccttatttgttgataaaaatttacgctatcacgggttaatgcaggcatattcgcgtactaatcgtatttataacgcaactaaaacatttggtaatattgttacattccgtgatttagagcaggctacgattgatgctattactttatttggtaatagtaatactaagaatgtagtgttagaaaaaagctataaagaatatttagagggctttactgatgtactgacaggtgaggcacgacgtggctttgtagaggtcgtggcggagttggaacaacgttttccaaatcctgatgagatatttaaagagtcagataagaaagcttttgctaaattatttggtgaatatctacgtgtagaaaatgtactgcaaaactatgatgagtttgtgagcttaaaagaactacaaaccatcgatatgaatgatgctgaggcagtccaagcatttaagaataagcattatttgagtgatgaagatttagttaatttgcaaacgattcatattccagccgagcggaaaatccaagattatcgctctagctacaacgatattcgtgattggttgcgtagagaaaaatcggctgaacaaaaagagaaatcaacgattgattgggatgatgtggtttttgaagtcgacttattgaaatcacaagagattaatctagattacattttagagttaatttttgaaaataataaaaaagtgaaagataaggcaaccttggttgaagatatgcgacgagtgattcgtgctagcctaggcaataaagccaaagaaagtttaattgttgattttattaatcaaaataatctggatcagatcggtgataaggcgagtttgattgatgctttctttacttttgcgcaatcagaacaacagcgcgaagttcaggagttaataattgatgaaagtttaaatgaggaggcagcgaaacgctacattatgaactcattgaagagagaatttgccagtgaaaatggtactgagcttaatgcagttctgccaaagatgagcccattaaatccgcagtatttgacaaagaaacaaaatgtttttcaaaaaattgccctattagttgaaaaatttaagggtgtaggtgggaatatttaa

SEQ ID NO: 64961 - DNA, 1128 bp, Acinetobacter baumannii
atggggaagacattagtggaaatagctcaacaactcaaaaatactcaaaagaaagtacaattgatttatgcctttaatggcactggaaaaacacgtctatctcgtgaatttaaagagttgattgcccctaaaagtgaagatgatgagggagtggagctttcacgcaataaaattttgtattacaacgcatttaccgaagacttattttactgggataacgatttggaggaggattctgagcctaaactcaaaattcagccgaatacatatacagaatggttgctcacacttcttaaagatctaggacaagatggaaatattattagatattttcagcattatacaaatgataaattgacaccaaattttagtgtcgattttactgaagttactttttctctcgagcgtggagacgatgaaaaattacgtaatttaaaaatatctaaaggggaagaaagtaattttatctggagtgttttttatacactgctagatcaggtaattgctatccgaaatgttagtgatgagcacttagcagatagggaaactaatcaatttgatcaacttgaatatatttttattgatgaccctgtaagttcattggatgaaaatcatcttattcaacttgcagtgaatctagggcaactaatcaagtcgagctcatctgaccttaaatttattatttctactcataatcccttattttataatgttatatataatgaggttagtgctaaaagtggatatgttctaagccgttttgacgatggaacatttgaaattgaagagaaaaaaggtgattcaaataaaagtttttcatatcatttacatattaaaaaactaattgagcaagctatagaaagtaataatgtacagcgttatcattttgcactgctccgtaatttgtatgaaaaaaccgccaattttttagggtatcagggatggtctgatttattacctggtgataagaaagcctatgctagtcgtattatgaacttttatccccatagtacattatctaacgaagaaattgcagagccgacaccacctgagaaagaaatggtaggtcttctgctgcgaaatttaaatgaatatggttattggcaacaaggggaaacaaatggttga

SEQ ID NO: 64962 - DNA, 1233 bp, Acinetobacter baumannii
atgagttttttacaaaagctgctagctggaacagaggtgaagtggaagacgttgggcgaaattgcaaaagttcaacgtggggcttcacctagaccaattgctcaatatataacggatgatgtagatggtgtgccatggatcaagattggagatacttcatcaggttctaaatatgtgaaaaatacagctcaaaaaattactattgaaggtgcgaaaaagtcaagagtattgaagaaaggtgacttcattatttctaattcaatgagttttggtcgtccatacatacttgatataaatggtgctattcacgatggatgggcctccattagtaattttgaagagaagttaaactcaaattttctataccattatctatcatctaacggtgttcagaattattggttaagtaaaattaatagtggttcagtaagtaatttaaatgctgatattattaaaacattattgatccctattccatgtcctgaaaacacgaagaaatctcttgaaattcaatctgaaattgtacgtattctggatgtatttagcgttatgaccgccaagctgactgccgagctgactgccgagcttagcataagaaaaaagcaatacaactactatcgtgaccagttgttgagttttgaagagggtgaagtggagtggaaacctttggaggatgtatttgatatttttgcaggtggtgatgtcccaaaagatgcactatccgactctgagacagaagaatttaatattcctattctatccaatgggatagaagataaatctctatatggatggactaacaaagcaaagattgaaaagccaagtctaaccatatctgcgagaggcacaatcggctggactagccttagaactaggccattttttccgatagtgcggttgctggttttgacgccaaaaattaaattgaacctgaagtatgcctactactttatgaaaactattgagaataattataaacttccagaagcgggtatacctcagcttaccaagccgatgatcaaggatatacagatccctcttccgtgcccaaacgatcctgaaaagtcgcttgctgaacaagaccgtatcgttgccattctggacaaattcgaccctctcacgagctccattattcaaggtttgtctcgcgaaattgaattacgccaaaagcagtatgaatattaccgtgatttgctgttgagttttcctaagcccgaaggagtagaggtgtaa

SEQ ID NO: 64963 - DNA, 1557 bp, Acinetobacter baumannii
atgaccagtacccaacaacgtgcactactacagcgccagatctggcagatcgccaacaaagtccgtggcgcggttgatggctgggacttcaaacaatatgtattaggtacattgttttatcgctttatcagtgaaaattttgctaattatattgaagggggtgacgatagtattaaatatgctgatctgcctgatagcgttatcaccgaagaaattagagatgatgcaataaaaacgaaaggttatttcatcgctccgagtcaattgttcagtaacattgaaaaaaatgcaagttgtaatgaaaacctaaatatcgatttagcaactatcttttctgctattgaaagttctgcaattggttacccttctgagaaagatatcgaaggtttatttgctgactttgataccaccagtaatcgtttaggtaatacagttaaagataaaaatatacgtttagctgccgtgcttaagggtgtggctgaattagattttggtaatgattttcaagatagccaaattgatttgtttggtgatgcttatgaatttttgatctctaactatgctgcaaatgctggtaaatcgggtggtgagttcttcacaccgcagcatgtatctaaattgatcgcacaacttgcgatgcataaacaaactaaagtaaacaaaatttatgatcctgcttgcggttcaggttctttacttttacaagccaagaagcattttgataaccatattattgaagatggtttttttggtcaggagatcaaccatactacttataacttagctcgtatgaatatgtttttgcataatataaactacgataagttcaatatacaactcggtaataccttgactgcgccgcactttggtgatgataaacctttcgatgcgattgtctctaatccaccctattcagtgaaatggattggttcggatgatccgactttaataaatgatgatcgctttgctccagcaggtgtactagcaccgaagtcaaaagctgattttgcctttgttttgcatgcactgagttacctctctagcaaaggtcgtgcagcaattgtatgctttcctggtattttttaccgtggtggtgctgagcaaaaaattcgtcaatatttagtcgataataactatgttgaaacagtgatttcacttgcaccgaacttgttttatggcacaacgattgctgtgaatattttggtactttctaagcataaagttgataataaaactcaatttattgatgcaagtagcttatttaagaaagaaactaataataatatcttaaccgacaaacatattgaacaaattatgcaggtatttgacagcaaagctgatgtagaccattttgcacagtctgtggcttttgatgtgattcaggctaatgattacaatctgtcggtgagcagttatattgaagctaaagataatcgtgaagtagtagatattactcaactcaacgcagatttaaaaatcaccgtagctaaaattgatcaacttcgaaaagaaattgatgtgatcgtggctgagatcgaaggtgaggaacttatatga

SEQ ID NO: 64964 - DNA, 231 bp, Acinetobacter baumannii
atgaatgcgttcacaggtcaaacttttcagatgaatcaaatcattaatattaagcatgtagttgaatttacagctcttagtaaatcaaaaatttatgagatgattaataaaaaatcgaagtactatgatcctacatttcctaagcctgtgcgattaacagaaatgcgtatcggttggtcagcttgggaaattcatcagtggatagaaaccaaattggagcagcgagagtaa

SEQ ID NO: 64965 - DNA, 1341 bp, Acinetobacter baumannii
atgactgaactaatagacaagaatcattctagtaataaaatagcagagttaaactttaattcagtccaatcagtagatttggaaaataaaataaaagtagattcaaaaagcttacctctgttcaatcagcttcttcaatttgctcctgatattgctatagcgaaagaaatttctactaatacatatatgcgagtaatagctaatggaaatttaatcaatgcgaaagatggtagtggaaaacttggattggtactaggtgataagggaataaactcgcatgcgagactacttgatcctgagtatttgaaaaatctgttcactgctagtgttgcttttaaagctgtatcaatggcagttggtcaagctcatttagcagagatatcctctcaactaaaaaaaatgaatactaaagttgctgaaattaagcaatttttagatgatgagcgcgctagtaaaattgcagcaatagattattatttcgatgaatattttctttcagctaataattcattcaacttgtcatctgtgcgtagaattcaaatagagcaagatagccgagaaattgatgcgattttattgcatttaacaaaagaaattaaacattcaataaatgcattggaaaaccttattgatgattcaatatttggtagcgataaatatttcgaggccctatcaaataagctggattcgcatttatccatccttggccaatggtttatggttgctagggtcaaagcaaaagcgatacaaaccttattgcttagtaatgaatttgatctatttacccaaagaaagagtgattttgtaaatcaaattaataatcttaataagtctgaaatagcagaattgagagaaatttggattaaacgaataaattcttttgatgcaaagttaagttctgacaaagaattagccttgaaaagaaacaaacttagagctaaattaactctatttttagaaaatattaatgacttcatttcttatataaacttaacaataaatgacatggacggtaattatgatcaaggtgaaatcctattagaaataattcagggtgaactagttaatgcttatttacctgaacctaatttagagttgatggcacaattcaaaaatagttttttaaagaatcttggtaaaagtgatgatcaatttgagctagttccagcttcattcagtgatgatattttagttgagaaaaaggcaattgaagacttaaaagatgaacaaagaaaagaagcaataaagaactctgtatctgagtctttagaatcaacgaaagaaatggtaaatgatgttggtaataaaatcgggggagtattaaagaagttcaaatggtaa

SEQ ID NO: 64966 - DNA, 273 bp, Acinetobacter baumannii
atgaacattacttgcccaaactgccattcagaacatatcatccgtgtagtgcaaaataacgcttcacaggcagggaatcaaagtctggcatcgtcagcttcatttgccacgatgggggctgcattatccaagagcttgcctatttcacctttggtgggtggaatcgcaggagccgtagtgggtggtttactaggttccatatttggttctgctccaacaccgtcagtgcaatctcacttccagtgtcagggttgtggatttactttctattaa

SEQ ID NO: 64967 - DNA, 480 bp, Acinetobacter baumannii
atgttaaataaacaaggcacgataataaaacttattattagttttttctttctcttaacaggatgtaacttatccgctaaaactaacatgtctccaaagaaaatctatgagctggatttaactgatcagggaattagtcctgaaggtggcgggatcgaattgaaaaaagagaaaaattattgttctcttatattaagtctttatggagaatcgggacaagaaaaatataagttcaattttaagaaggataatttgattaatacaaattacctaaaatatagatataagaatggtttgatagaagctaatgatgacttagatgaccttattgctgatgatagtaaaaaatcaaataaaggtgctatggaattaatagcaaataagtcatttgttggaaacaaagatagacaaattacaaaaaagtttgaactctataagaaaaaagttcctaaaattctattagacagaaactgtaactaa

SEQ ID NO: 64968 - DNA, 1317 bp, Acinetobacter baumannii
atggattgtctagccaatataaaattcttagatgccctgggccaaccaataaatgggttagctcatcaactttgggttggttcctcattaatttctgagtttgttactactgccaatggcgaatcagtatggattaaacgtccagttggaacagttattgatgttcgagttagaagcatagccactggagagtacaactctaaagttaaaatacaactaattggcgaaaagactatttttactatacgtagccctaaagtcttgcttaaaggtttaaagctaactactaaagaagtagcacagggaggatatgttagatcaacttatattgttgctgaaggagattatttatctcgaatcgcgaaagacaacaatacaactacggatgagttaataagaatcaacaacttaaaaaatgaccaagatattcatgctgggcaagtcttaaagatacctaccaataaaactgaggcttcttcgcctgcgcctgaaaacaagctaaaaccccctgtaccacagcaatatcaggcagagaaaactaagattatcgtagctcagcgaaccgatactttgcctttaattgctaaacttactggtaatagcattgacgaaattaagaaacttaatggattaagtgacggtaaaatctcacaaaaccaaacgataaaagtctatgatcgtcaaattaagtctactgtgcctaaaccacatactgagaagaaaaaagacgagaatcggcctgtaacaccacctaaagttgttcaggatgcctcacaaaataaggaaaagacaccagttgcaaaggtatcatcgtcaacctctgcatcttcaaaagtttctgcaaagaatgagagagctatagctagattacatccacaagtaagggacttaatcagaaagttcatcaatgaagtgtatgcaaagcaccaggtacaacttgttattgttcaagattatcgtacctatgcacagcaagatgctttgtacgccaaaggacgtacaacacctggaagtattgtaacaagagcacgaggtggtcaaagtaaccataactttgctttagctgttgatgtttttccattatgggaagatggtaaacttcacatggatgcaaagtcggatgctaaaaatattcaaatattgagaaaagtcgcccctgtcgggaaaagtattggattagagtggggtggagattggaaatcaatagttgataatcctcacttccaactaaaaactggaaaaactatgtcgcagcttagacaactaaccaaagatgcaggcggtgatccattaaaggtagtatataatgttaaataa

SEQ ID NO: 64969 - DNA, 441 bp, Acinetobacter baumannii
atggctggtggtacacgtattgtaattaatgataaaggtattagtttgataacagggggtaagtttgaagttaaagctggtcagcatatctttaatgatggacagcgagttaaagcggaacttcctaatttacctgtcgttaatgagattaataattatacaaataaatgggatttttatgatttattttataaatctaatttctcaaatgtgaaatacaaattaattaataataaaaacaatacttatatttcaggaacgctagatgaacatggtcgaactcaacgtataaatacttctactaatgaaggttacgatatgctgattggtatagatgagggttggactgtttcagttgaaactggcaatgaagatgatgaacatgattatgaatgtaaatgtggttcacacgaaaatcatgaatatgggggtgagatataa

SEQ ID NO: 64970 - DNA, 4413 bp, Acinetobacter baumannii
gtgttagccggatgcttacgtattattaaagtattttatgataaaaataaagaccttacaattattgaggtaaatgaaaaggctgatgataaactaatcattaatgaggaaatttataccgactcttatactgcaagaggttttaacgaaaaggataatgattgggttaatttggatctagataaacctaaacatttcggatctatgatttactatcgccattcaaattcaagtcctaatttagtggagaaaaaagataattttaaaggaatctcaggttcggttgttttcacttatcatcaaaatagctctcaacaaattgcaaaagcactcattattcataatgaaagccataatgattttggtgcagagaatcttgaaaaactaaacttcgatttaatcaataatttttttgaatgttatgtgtttcataagaaaaaagatatagaactagctgaaataagacttctattacaaatgaaccaagaatggttattaaattctttctcccacaatagagctgcaaaacacagttttggtcaacctttagctccaaatgatccaaatttgactaaattgttacctagaacaactttaattgctaatgttcataatggtttatatgaaaagaatatcatttttattttaggaaaagaaggtgtaggtaagtcatgggttgccgcacaaacttggctatctctagaagatagacccttacatatttttctgactgctcaagattttattcaatttagtaataatgacttggaattatttttaatcaaaaagattattgaacaaacaaatgataaagaaagcgaaatttcctttaaaaaatggttagatagattcaaacagtggggaaatcattcagatgaaaataaaataaatctcttactaactattgatgggataaaccaaaaacctaatatagattggtctattattattaataaaatttcacatttatttgaagaagataaagtaaaaattttagttacatcaagaaccatcttttttaatgaaaaagtcaaaagaaaaattatagatgattatggaacagtaacaataacagattggactgaagaagaaagaaatgaaattttaatctcaaagggaattaaccctagtttaattacaaattgtgtagcgcattctttattgaatccaagattattaaatatttctctaagtttatttgaaaaacaaaaaattcagaaaattgatgaattggacatcaatagaatattattagaacacattagacaaatggaatcagagaattatgaaaatatatcatattctgaatttttactaagtcttcaagatcatgcacagaaaattataaatagactagtcaatgatgaaagagatgacttgaattactttaaaggaaatctaaatgctgttgctgaaggtcgtttttttgaagtcgtcgaagatgatcttaattcatataaattaagagatgaaggtttaagtttttcattaggattagaaatcgttctacagttaaatagaatgaagcgaaatgaaaaaaatctcgatgatggtttagctaaagttattgaaccgataaatgcattagataaaacttcagatattattctctctagtcttacaatattgatttttgaatctaattattattctaaagaggttctttctgcattagtttcatgttttgtttctctgcaaaacactaatgaagcacaccttggttattttgctacaatcgttgaaaagaaaatttatgattttatcaatattttggaagaattatgcctagagggaggaaatcaaccaaatttcaattgggttaaaacctcaattacctgtattccttatacctcatcatcttggccatacattgaagaaaaaattaaaaaatggctaacttattattctttatcgccagaaaagaaactttcatatttttcaaaagaagatgataaagaccgtttaattgcaattgagaaaaatgagttagaaatttcagaaaaattaaaaaaattgtcaataaatgaaaaaaaattaatgacccaattgactgaaaatacaaaagatattgatacattaattattacttcattccatattttagcaggaaagccattagccaattttacaactgagtttgtaaaatggagcttcagttgtagtttaaattcaagttataggtctccacacacggattttattagcttaattagttacaaccttgttgattggcagaatacaaggacacatttattaaatgaagcaaaaattttgaactcttcagacagttcaaatgttgcacaatgggcttatataagaatactttatgctactggcgcctcggatgatacaaagtttgcagaagagcttgctgagcagcttagaactgatgcttactctggcggatggagaagaatagaagaatattgtgctacagatccatgcgatcttaattcactagaaccaaagaatattattaaaacagccaaagcatgtgaagagcttgatattaatcaaatttggaatgatcgtcatcagactcaagaaagcattttcctacatgatattcaaactggtctagcacgctttagaccacgagaagttatatcaaaaattagagaattaattactaatattttatgccgaacaaaatatcctttacgttctggaataataaatataaataaatataatcttttattcacaaataaacatgtcgataaattattagaattttgtaaaattaataaggattcagaaatatttgacgggttgactgaaaatgataaaaactttgtaaaacaatattcaattatgcaaattatgcaatatattaagccaattcaacaaattgaaattttaatgaatttcaatgaagaggacaacgtttttatcgaacttattaaaattatggaatctgtaaagtttcaagaatttgatcaaattcttgatagaaaactacaagaacatcaattttttaatttactttattacgcaaatactaatgaaatagatttgacagaaaaatataagaaagtattaaaggagaatttaaataatcataattcactgataagaacagaggtgtttagagcagtaagtatttacgaaaatttagatttattaaatgatttcattaagattaatttatcaggtttcgctacaaatattaaggaccatgagttgttttatagctcattattatggttattatctgcaaaaaacaacctagtagatgaagatattgctgtagcaaatattagtcttaatatttttggaaatgctagtgaatatctttcaactataggattgcgaaaaatagcatttgctattgactctatatttaaaattcttatgaatactggaattgattttccagatttagaaatttctaaaaacttaccatggaataaaaatcttatttcattatttgaaattgatagaagaatggaaaatattaaattaaatcaacacttaaatttacttgcggaatctgatgaagattttgagaaaagacaaaataatcaacatgagcaatttaagaattatcaaagatatttaaagacaaaaggcgctgatcttcttttgaatggaatgttaccggaagggtttgcaagtataataaactcagctcctgaattaaaaaatgaatggtttaatactttctctaatttatcaggttctcttatagcaaagttttataactttattttactgcttgcttatacttattctgagcatgatgctcaaaaggctcaattactttgggataaaataaaaaatagtgactcttttatgaatataagaatcgggcaggagaaaatcccactaaaagaaatgtcaatttggggtagtaaaaatcgcgatttagattcatatcgatttgaactattagataaggcactatcagatcaacaaatatatagtcatgtgttggctgcaattgtaaataataaccagactattatttatgattatattaatcagaaaatcaattgtatagagccatttcaagttgctagaggagttttagttgcaggttgtttagatgaaaaccctttatctcaagaggtctttgataattttaaagattatagtgggataattggtgaagcttacaaagcatctttatatatgtatgaaagaaatatttggtctaaatattggtttcaaaaaatggtatctacagaaaataatgaagaattttggtgttatatgatcttatttacaaagatagtggatttaagattttatagttggaaagagtctttagaaaatgaaaatgttattttacataaattttatcaaagttttgaaaaagatattaataatcggtgtaacaaatggcaaaaagagagaagtaaaaagtttttaggtaatgaactgccaaaccctatctatatttattcataa

SEQ ID NO: 64971 - DNA, 354 bp, Acinetobacter baumannii
atgaaaaatattgaaattttagaaataaaagaaattggcgattatgaagaatgtttatcgctactgttagaagattctatcaatagcggagcttctataggttttctagctcccatagaaaagaacgaagtcttaaattattggcgtgaggtcaaccataaattagtacaaggtaataaccgcctatggattgccattcaacaaggaaaaattgtagctagtgttcaattgtccttagtgagtaaaaagaacggagtacacagagccgaagttgaaaaactcatggtgcttacatctgtaagaaaacaaggaatagcaacgttactaatgaatgaactcgaaaattttgcatga

SEQ ID NO: 64972 - DNA, 951 bp, Acinetobacter baumannii
atgaatgacttaataacgagatttttaaataatctggggcagtggcatgacgtagcattgacgattactaaagcgatagttgcaataggggtgttgtgcttggttgcttatcttttaacaattagctacatcccttcggaaattagctttggtgatacgctcatttttttactgatttttgcagcattttctattgtctatactgcgttctgcatgatgctatttttctttggtatctctttaatgccagtaacttggttcatcttaagtgtagttgataaatatttgccatctcatgtaagaattggacaaaaacttccttttccaaagattagtattatcacattgggagtatctatttaccttctatatattattcgtgctttatttttattagattggaaaattaatgcttatatcggtattacagtaagtctaatttctttattttattatgctttttacgttaatcagaagagagtcaaagaatatcgtttaaagtttgaaaatttaagagatattatggatgatcctaaagcaagtgaaaatctaaaaacttttgcagaaacaaagttaaagcaattagaaatatggattaaaaactctatacaatcagctctatttcttattcttactccactaatctttatgtttttgattggagatgtgggcaaaatttttttacattacacaatgcaaaaaactggtgtaagaatagaaaaagcgaatttatacatcaaagaaccttatgccaatctaattgaattgccaaaactgaccactaaaaaactaagccaagaccaaatttttatttttaggggtatggaagttccatttcaaggaattggtaaaaatactttaatttcttacaagttgaaagatgttgaaaaacaaattgtgattcctaatgaatatattactgtggagcgaagtatgaaaattaaagagtga

SEQ ID NO: 64973 - DNA, 666 bp, Acinetobacter baumannii
atggctattgttgcaaaggataaaagcaaattgccaagaaaaataggagatgagtatcaggtcaaacaagttaaagttagttctcaacgttctttaactgctcgtgaaattacacttgcacgggaagtctttaaagattccattgactattcaaaagtaaaaattattaatggtggtctattaggaatgccaaatgctagtaagaatgctatgactccttttggaagtattcatctacctagtgaagattacaatgccacaaaagattttgggttggataatgttgatgcaacactaaaaatttggtttattcatgaaatgacacatgtatggcaataccaacatggttttaataatgcacgtgcaggaattaacacaggaattaatggaggctatacacagagaagtttagcttatgagtatagcttagctgacaaaagtaaaaagtttaatgaatacaatatggagcaacaagctgaaatagtttcacactattttgatgctacgcatacataccaaactattcacaatagtccacgtcttcataaacaaaatgttatgaatctacctaatcttcggcaagttttatctgaatttttaatcaatccagataataaacaattagtttcattatctagaggtcaggaaaactactggtttaaataa

SEQ ID NO: 64974 - DNA, 486 bp, Acinetobacter baumannii
atgaaattattatatttattactttttattagtagtgctgttaacgcctctccatatgccagcctatatgtaaaaattaaagacaatgatgtgtgtgtatttacaaaagtagactatgacaaagcatatgagaatcagaccttaatttatatgggtaaagtagatggaattaatgcctttcattcttcatattcaaaaacttatttgaatcttaaaatgcctattactgaagaaaactgcattaaaattaaatcttctgaatttaaagagccttttccatatgatattgttcttgaaacaggccgatcatatgcgcaaagcatttgcgtaaataggactaatgaaggaaaaactgtattattagaagctaaagcagaccttgttaaaggtatatattgtggcactaatcaatatgattactctagtaatggtctttggactaaattaaaaaatctctattattggttcattaatttttttaattaa

SEQ ID NO: 64975 - DNA, 285 bp, Acinetobacter baumannii
atgaacttttataaaactattttggttttaggccttattataggtgattacagtgtttcaggttgtgatatacacactcagatcgagtttgaaaaaatttgcctgtcgggtggacacacccaaaccagttgcgagtgtatataccaacggcttgaacaaatgtattcgtctaagcttatgcaaggtctagaacatgtcagtttgcaaagtcctgctctcccacaggactttgcccctactttttttaatgttatacggcggtgcgataaaaacgacatgggctaa

SEQ ID NO: 64976 - DNA, 510 bp, Acinetobacter baumannii
atgcttacttttgtagatgtaaatgtggccaagaataacctcgaaggcggcattgccgtttcaaagtttgatggtttttggatagaagataactttgccgtacactccgaccgcaactcggttttgacgcaagaccacggcaccaatccatttccaacctcgtcgactattggccctgactttaccaataacgatgaaactgccattgcccttcgcttgaaatataactggaaagactacgtgaaaggtttaaaaaccgaggcgaagtatatctatggctttggggctcaccaaagtaatatcagtagtgatgttgaaggtaaagagcgttactttgactttacggtgagttatgccttgccgtgggtaaaaaacttagatgtgcgttattcatttttgcattatgagtcaaagtttgaaaatgcaaacctaggtgaaaagataaatggcatgacccgtaaagattgggatcagcaccgtgtattaattaattaccgatatacgttttaa

SEQ ID NO: 64977 - DNA, 507 bp, Acinetobacter baumannii
atgaaaaaaatattaattacttctgtattagcttttactttaggtttaaatggctgtgcaagtattataactgggtcttcgcaagtagttacctttacaagtgtgccagagtcagcttctattgaaattaaaaatagaaaaggaaagaaaatacataccggtcaaacgcctgttactgttagtttgaaaaaaggagctggatactttaaacctgaaaaatatgaagtaacttttagtaaagctggttatcaaactaaaactgtagaagtaacaggaacacttagtggttggtattttggtaatattctttttggcggcttaattggaattttaattgtagatccatttaccggagcgatgtatagattagctccaaaagatgtcaatgcagttttagaagctcagaacttaaaagaagaatctaatcaaaagccaactcttgcagtgatattagctcaagatattcctgaacaagttatggcacgtgcgattcaaattaataaataa

SEQ ID NO: 64978 - DNA, 498 bp, Acinetobacter baumannii
atgtatcaaatccttcaccaccctctaaatgtcctattccaccaaaaagaaagcttttactgtagtgaagaatatcgttaccttttccaccataaagaaaatcactctccccaccacgagcagttaaaccattttcttcatctccagcatatagaatatcatttccatcaccaccatatattttatcatctcctccatttccaactaagatatcactttctgagccaccataaatattatcattacctatgccgccatataaatagttcttacttttatcatctaaatcttcttttttgtttcctgcatagagtatatcgtctccactatcaccatataatttgtcttcgcccaaaccaccatataatttatcattacctatgcctccatataatgtatcattacctttacctccaactaacctatcctggcctaaaccaccgtataatttatcgtctcctcctaaaccaaataaagtatcattgccaataccaataa

SEQ ID NO: 64979 - DNA, 738 bp, Acinetobacter baumannii
atgaataaagaaaaatctaatatacctcaagaaggggatattgttatatggaaacaaaataataatttaattgttaaagcaaaattaggagagcgtagaatacatattcctgatcaatttgattcagaattttatcgcccagaaagagagcattatttaggacagtttccaataaattatatacctgaaaaatttgcttcaatcactcaaaaagagatagatagtttaccaatgcctgattcaaatcggcaattacaatttaatttaattttaagaaactcaagttttcaggctacagatgggtatgtgccagatcataaagatcaagtgcgagttaagattgaaggtctaactatagatatgcgagagcagaaattagatactcataaaataatgctaaataattttaattctaaatatgtagatcttgaatctaagttcaaaaaaaatggtttggattgttataaaaggaatatatctgataacgcttttctttgttatggatattcaaaaaataaggatgttactggagtgcttttagaagtttttactttggaaaatacagttgataatcggtttgttcaaattcgtggaaatagttatgaacctaataaatatggtggagtatgggttaaatgggaaacaaatgtaaataattgggaagagtggcaagagattgataatgcaatttggcgtttattagatatctggaacgtagctcctttagaagttaattag

SEQ ID NO: 64980 - DNA, 393 bp, Acinetobacter baumannii
  misc_feature (372)..(381): n is a, c, g, or t
atggtttttgatttagtaaaagtaaaagagcagctaaaaaatgcaagagctacatcttctgaaagacaacttctacaattactaaaagaaaatagttttcttttctctgagttattttcaagacattggggaatacaaccaattttttcagaagttagttttggtaataattttagatgtgatttttgttggttaaatgataattcagatggtcctgagtgggttttagtcgaaattgaaaaacctaatgtaaagctctttaatcaaaaaaatgaacctagtgctgagttaaatcatggaattgaacaagtaaaaagttggcaaagatattttaatattcaccctgctgagaaaagcaggatctttggagcnnnnnnnnnnaagcaaatttag

SEQ ID NO: 64981 - DNA, 822 bp, Acinetobacter baumannii
atgaaaactcagaaaattggtgtagatcttggaggcactaagttattgatattatgtgatgaaattgaagaaatatttagtacaggaatttcattcactccagaacaattaatatcacatctaaaatcttttattttaaaacatggaattaaactcgaaagcataagcctagcagtgccgggtctagtcaacgaatctggacacattgttaattgtgatgtccttccagcattcataggctggcaaggaaatgacgcattaaaatcattatgtagtaaaacaatgatcttaaatgatgtaaaagccgctatgtatgcagaactcaatgatttttcatctcatgctgcaagcggcattattatgattggtacaggtattggggctgcattcataacaaatggaaaacccttactgggagctagtggttgggctggtgaactcggttacttaccagtacaaagtaatgaaggaattaagcgtctagatgaacttgccagtggagctgcaattaccaaactatgcgaactaagcccatctaatttagcattaatggctaacaatggagatcaatctactttagctgttataaaagacgctggacaagctttaggtcttggaatagccacagtcattaatcttttaaatccttcacaactagtaataggaggaggaacaatagagttacccggttatttagaggcggctttagaagctgctaaagaaaactgccttcccgagctttggcaaaattgcgatatatcaaaagtaaaggcggggaaaaaagtagctgctttaggtgctatacgtgcaattgaacaataa

SEQ ID NO: 64982 - DNA, 375 bp, Acinetobacter baumannii
atgaaattaagactttttatcttgggcttacttatttgtaccaatactatggctgcatcagacacaagttttgaagaggaatatcatagtcttttagaaaaattccatacagctcaagcacaaagagataattttattaaaaagaatgcgaataaaaatctaaccagttcgcaaagaaaaaagctagattcaatagaatgtacttatatgcaatctgaactgcaatatgatgaatttattattactagatttaaggaatataaagctttcgtgaagaaatctggtctagaagtaacgaatgataaagaattaattaaaatggatattgattctttaaaagaagaaataaacagccctcatgggaaatgtaaataa

SEQ ID NO: 64983 - DNA, 279 bp, Acinetobacter baumannii
atgtctgatcatcaggcaattgaagtcactgtcacaacttttgctaataaaactactttctggagtggtttagcaagtgcttttggttctttaacttcaattaattggttgagctatacaggtgcaattgtggctgttgttggcctattcattagtttcatttttcagtggagacgtgatcgcagagaacgtaaagaaagtgaattacgtgaaaaagaaagcgagttacgaatcaaagtcttagagcaagatagtttacgaaaaaggaaagatgaatga

SEQ ID NO: 64984 - DNA, 579 bp, Acinetobacter baumannii
atgattacttttgatcctgtgtacgttggtgaaaatacctaccaaatgcaagagcttagttttgagcaatgtctcaaaatatctatcattgctccaaattttaatgaaaaaagactttcagcttttctgaaatcagcattagacaatgtggatcctttacttttatcaattcaggaacggtatttattgctgcttaaatatcttgaaaaacaaagtaatactatgttggaggtgaacactgactggtctaaagttttccttcaatcagaaaataattggaagttgagttattctaatcatgaacacttagctttattgccggatagaacaaaccctcaattatttgaagaacaatttaagcagcggctagatttcattaagaaaatgccagctagtgattttgatttgtgctatcaagactttaataatttaaacaatgagttatttactcatttacggttaagcgttgataaccacggtattttagtggaaagaggtgcagatgacgcgcctgcacgatttcgcaccgcttccgtctttacaggaatcatcaaagagttggaccgatcttttgcttga

SEQ ID NO: 64985 - DNA, 141 bp, Acinetobacter baumannii
atggcagatttaacagcaaagaaagtaagtaaacttattgaagaatttcgccaaacaggtaaagaaccggaaaaattagtaattggtaaaaatctgaaaataaaacttattactgaaaagcactattttgaagttaaataa

SEQ ID NO: 64986 - DNA, 177 bp, Acinetobacter baumannii
atggacttccaagaaaaatacatcacagcttttttcaattttttaggcattaaagatatttactttgttagagcagagggaacatcaaaagccccagccattaaagatattgaaattcaaaaagctttgtcgagtattgatgaagtaagtaacaacttaagtaaaagagaagagtga

SEQ ID NO: 64987 - DNA, 891 bp, Acinetobacter baumannii
atgagtgttgcattaacaatttttactccagcatataatcgtgctcatactttaggtcgtttatatgaaagtttaaaaaaacaaactttgaaaaattttgaatggttaattgtagatgatggctcaacagatcatacagaaattgttgtaaaagagtttatacaagaaagtatcataaatatacgttacttaaaacaagaaaatgctggtaagcaggcggcatggaataaagctgtacttaatgcgaatggatttttattttgtggagttgactcagatgatgctctcgctaaagaaacaaatatagaagaaatattccagaagtatatatctttactaaattctgactctattataggcttgagatttctagcttattcaaatgttaaaaagaaatttgatggaaaaaaaatatctgaaaatattgtaataagttcatattttgaagaattctctaatgcaaaaaattttggtgaaagaattgatgtttttaaaacagatattttgaaatgttttttatatccagtcgcttcgaatattaagtttattcctgagatatggttttacgtccaaatttcgcatgcagggtataagtttgcatatatacctgaaccattaagattgttttttgatgatgcaacagaaaatcgtttaagtaaaagttcattattgaagcatgctgaaggacattatatatcccgtgctactatgttgaaacttattcctatatatgtgtactttggaaatgtaatggcttgggttaaaacaattattagatttggacagtgtgcacattatttaaacaagagtttcatgcaacgtaagcaagatacaaatattatttatgctattttttcgtatttttcaagatttataaaagttggtatatag

SEQ ID NO: 64988 - DNA, 429 bp, Acinetobacter baumannii
atgatgtcagtcacagtaccaagcggattgccgccagtagcgccaccagttaaaccaccgataaggtcagtcacagtaccaagaggattaccgcccgttacaccaccgatgatgtcagtcacagtaccaagaggattaccgcccgtcacaccaccgataatgtcagtcacagtgccaagagggttaccaccagtaacaccaccagttaaaccaccgatgatatcagtcacagtaccaagcgggttaccaccagtagcgccaccagttaaaccaccgatgatatcagtcacagtaccaagcgggttaccgccagtggtaccaccagtaacaccaccaatagcaccagttacgccaccaagaatgtcggttaaaatgccagtcgcagttgtgccatttgaaacgagagtgttgacaataccagtcgcatga

SEQ ID NO: 64989 - DNA, 132 bp, Acinetobacter baumannii
atggccatggctgctgatgtcaccattgcccaggtttctgaagtggttgagctggggggattagaccctgaacacatcatcaccccaggcatttttgtacagcatgttgtacaagtacagcccgcacagtaa

SEQ ID NO: 64990 - DNA, 258 bp, Acinetobacter baumannii
atgagaaaagctggtattccaacatcttctacgccaattaaacaaagggtaattcctaattgggaacaatatatgtatagtgttagaacgggagaaggagaaaaaattatgatagtttctcatcatcctaaagataaagagcatccatgttcgcattggcatgcagctccagctatgatggataatggtcaagttaggtctaataatcaaggcgcttggaaatatatttcaagtgggccagtggttactcatgactag

SEQ ID NO: 64991 - DNA, 492 bp, Acinetobacter baumannii
atgggatggcgcgatacgcttgcttatgagtccacagaggaactgactaagcattacatctatgaaaaagacagttttgtaccgatgctacaaactgtttatttaagtccaatagaattacaccaaacaccagattggtcagatagacctcataacatacaccgtgacccgctttggaaaactgaaaaacagggtaaagagtttgatgatgtatggttctatcactgtgaccatttaggcacaccgcaagaaatgaccgatcatacaggtgcaattatttggaaagccgaatataaagcttgggccgagtgtaaagcagagagagccaagtccaatttcttcgaaaatagtgaaattatttcaaataatatccgtttccagggacagtatttcgatgaagagacagggttacattacaatcgttatcgttattactcgccttatgtgggacggtttgtaagtaaagatccaattgggttgatgggggcataa

SEQ ID NO: 64992 - DNA, 291 bp, Acinetobacter baumannii
atgtctgtaaaggttgataacattgctactaaggttttaaaagttaatcttgaggataatgaagtttcatttgcgatcaaagctgatattactaattttaaagatagtgaatattccgatgaagatgtcactgttgaaatacaaggcgttgatgctgatggtttcgaaataatttcaatttatttgtctggaaaggttccatttaacactactaaaacgctcaccgatcgtgaagactatcaagataaagatgagtttgatcaagttgttagatggcagtataccaattaa

SEQ ID NO: 64993 - DNA, 336 bp, Acinetobacter baumannii; identical to SEQ ID NO: 49257

SEQ ID NO: 64994 - DNA, 384 bp, Acinetobacter baumannii; identical to SEQ ID NO: 49258

SEQ ID NO: 64995 - DNA, 183 bp, Acinetobacter baumannii
gtgaaatttaaagagtttaatcaacttgtagataagtttttggaacaggaagaatatgaaaaagttgatgaaatcttagctagatttgataaattgtttaataaggcagtatctttaggaaaaattaaacagactgatttaaaaaaacatgaggaatcatcaccagctaatagatggttatag

SEQ ID NO: 64996 - DNA, 132 bp, Acinetobacter baumannii; identical to SEQ ID NO: 64989

SEQ ID NO: 64997 - DNA, 426 bp, Acinetobacter baumannii
gtggttgttacagttactgctggtgcaaccgcatctactgtaccagttgatggtgctgacgggttgcccgctgggtcagttgcaacaactgtaactttgtctccatctttaagatcacctgggtttggtactgtccacttaccatccgggcctgcaactacagtcgctgttgtaccatccgggaagctcacggtaactgttgaaccagtttctgctgtacctgttacaggattagtcgcattgattggatcaattactggtgcatttggcgcagtggtatctacagtcaccatagcattagttgtacctacattacctgctgggtcggtggctgtcacagtcacggtatgcggaccgtcagtcaacactggaagtgtattgtctgcaagggtccaggtgccatcaccattattggttgctgggtag

SEQ ID NO: 64998 - DNA, 621 bp, Acinetobacter baumannii
atgctcttggcaacagcatgtgacggaacccttgccaccaccgcacaatttacctcgatccgagtagtgtgcaacaatactttagcgattgccttaaaaggacagaacagcagtgcaggtgtggtcaaagttccacacagtactaaatttgatgctgataaggtcaaacagcaactcggtatttcagtacgtgcatgggatgaacacatgtatgaaatgaagcaactgacacaacgtaaagtgagtcagatggaagcatccgcttactttgatgccgtgttcaataacagcacaatgaacaacgtggtggatcaggaggacaacatcatccagttctaccgtgatgtagccttacaagcccaagccaatggcaaggacaaagctgaaccaaatgccaaatcgatgagtcgagctatggaaatgtttaatggtcaaggacgaggtgcggagctaagttcagccaaaggaacagcctatggattactgtgttcaatcacagaatttatagaccacgaacgtcgtgccatgagtaccgatcaccggcttgattcagcttggtttggtgctggcgcatcgatcaaacaacgaggattggaacaggcacttaacatgcttgcatag

SEQ ID NO: 64999 - DNA, 183 bp, Acinetobacter baumannii
atgcaattcgtcatatgtttctttttagcgataatttgtacaattacttatgctgcacccattaattggacgatcgcaaccacttcatttccatctgatcaaagtatgggagatacaggacaagaaaaagttcctaatggtcatattgatttaatgagtgggcatattatagagcataagtaa

SEQ ID NO: 65000 - DNA, 240 bp, Acinetobacter baumannii
gtggatggtctagtctgggtagacatcataggtagtcgttctggcgatttaccaagttgtgcaaaagaccgcaattatatgatgattaaaaatgaaaatagtgcaacgggtaaaagacagttggcattattaatgatggctcaagcatcaaataaaacagtgaaaattgatgggatgaatacttgtactcgttggggagatggcgaggatataggtacggttcagatccagaaaaattaa

SEQ ID NO: 65001 - DNA, 336 bp, Acinetobacter baumannii; identical to SEQ ID NO: 49257

SEQ ID NO: 65002 - DNA, 300 bp, Acinetobacter baumannii
gtggaggtcggtggtgtacatggacagaaacaacaaaaattaaaagaaaaattgaataataaagacccgctcatggttactaatcatcctgagttgcaatggagagctgcatgcggcggagtaggtttagccgttctacctgactttttaggccaacaaggcaatttgataaaattaccagataatgacccgatgagcgctgaaatttggttggtcatccatgaagatctaaggagtagtcctgtggtaagagtggtgatggattttcttttgaattgttttgaaccatttagagtttaa

SEQ ID NO: 65003 - DNA, 384 bp, Acinetobacter baumannii
atgggttgttctaatggagtatatgaacaaccttctaataaatatccatttgaaacaaaaatgaaagtattattagggaataatcttgaaattgtaaattcgttgcgtaaagcagaagttcaaatttcttcttttgatttacccaaaaaaactaatcaaatagacaaagtaattagtctgttaaaaaaagatggatgggtattgaaaggaaaagggcagggcgtggaaacttattgcttagggagaaataatagaattaatattgttataccaacttctggtgggctttatgattttaaaggtgggaaattaaaacgaacagattactctgtgaatgctgttttatattcctatgataaatggggagatgatatgtgtgaataa

SEQ ID NO: 65004 - DNA, 201 bp, Acinetobacter baumannii
ttgtatggctatgctggcaacgatgtattaacaggtggtactggtaatgactatctggatggcggagctggcaatgacagttatgtattcaatctgggcgatggtcaggatacgatccagagttatgaaaataataaccttaagatagaccagatcattttcaatgaaggtattcaagcctcatctgtaagtgttaagtaa

SEQ ID NO: 65005 - DNA, 291 bp, Acinetobacter baumannii
gtgaaaacttggctcgaaaatgtcgacttgtctggttataccactgcgtattctgcgtttgcacaaggcgatgaaacctatgcagatgactggtcaaagatcacttgtcctgctttggtgttgaccggaacggatgatccgaattcaacagcggaaatggcattacaaatggcaaaacaggcaaagcatggcactgcaattgtcattgaaaatgaacgtcacatggtgaacttaactgcacctgacaaagtgaataatgcaatgcaagcgtggttggaaaccagcgtttaa

SEQ ID NO: 65006 - DNA, 237 bp, Acinetobacter baumannii
atgagccaaaacgaaaatagcaataatgctttcgctatcgaaagtcattctattgattatgttgctccctctgaacgtaatgggaaagttcgcgatctattcacattatggttttgtaccaatattgcaccgcttgccgtgattacgggtgcaatgtcaattttaacgtttaacctcaatattgtaagtgcattgcttgcgatctgctgcggacattttttggtgcagcgattttag

SEQ ID NO: 65007 - DNA, 1128 bp, Acinetobacter baumannii
atgattcagagccgtgcgcagttcgggcgttatggggcattgctggttgtactgtttactaccctcatttatttaggttttttcatctctaacattattttgtcaggcaaaacccttcataccgttgttcctgctattcctgtgccgactgcgaccgtgattggtgcaattgcagcaaccacaataggcgtgattggttatcactttattcataagttcaataaaattggaacttggtttatgggtggttcgttgctcatcggcctcatgattatggtgccgcatattaatgcagatgtacttgccaaaggctctttcaatatgaaaggctggtttgccatgtttggtttgtgtgcggtatggcaaattagtttctcgccttatacctcagactattcacgatatttaccgaagtcgattggtatttataagccatttatctttacctatttaggcgcatcgttaggaaccatttttgcgatggcatttggtacgatcgcggttagtattggctcaaccacagatgccatggaagcggtaaagtcaggcactgggttgttcggctatgtccttatgattttgttcttatgcaatatcattggtcataatgccatgaacctctacggtgcggttctttcttgtattacctctattcagacttttgcagggcagtggatgccaagccgaaatatccgagtcgtgttatcaatcattgtattagttctagcgactttaacggcgctttgggcatcaagtaactttattagtttcttcttgaatgtgatttttgccttgttatttattttggtgccgtgggtgtctattaatttattagatttctatgtcgtgaataaaaagtcttatgacattcaatcgatctttgcacgtgatggtggtatttacggcaaatttaatgcaaaagcgcttacggcttatttcattgggattgcggtacaaattccgttcttaaaaaatgcgtttttcacaggtgcactggccgatgtaattccggatgcggatatttcatgggttattggattggtggtgagtctggtggtgtattacgtctttaatctaggaaagattaaatgttctgcacctgcattaaacgcaaaattacctcaataa

SEQ ID NO: 65008 - DNA, 951 bp, Acinetobacter baumannii; identical to SEQ ID NO: 45771

SEQ ID NO: 65009 - DNA, 195 bp, Acinetobacter baumannii
atgtctaaattaatcgtgttatcgaatcgaattagtatgccatcgggtaaggcttcagcaggtggccttgcagtagctgtacaagacgcattaaatgatagtaacggcatttggttaggctggaatggtcagcaaattaccgatactgaagcgcctgaattcgatcaggcctctgtacacgataaaaatagataa

SEQ ID NO: 65010 - DNA, 1449 bp, Acinetobacter baumannii
atgaaattatctgttggattgaaagttgcgaattcattatcgttaacgcctcaattgcagcaggcaatccgtttactacaactttctagcctagaattagagcaagaaatgcaaattcaattagatagtaatccattacttgaaaaagtagaagatgaatcactagcagaaagtttatctactttagaacacaaagaaacagatgaccttacaacagagttgaatgctgatcacttacctgatgacttgcctgttgatactgaatgggatgacatttatacacatcaatccactgctttgggtactcctgagttcgaagagcgtgaagataatcgccaagttcacctgacgcttaaagaacatattttggagcaagtgaacttactacatttttcaaaaatagatcagttgattgcttattgcatagttgatgctttagatgataaaggttttctggatgctgaattagaagagattattttggcagtacagcatttattaagtgagatggatatagacgaggaagtggaagaggatgaagttttagtagtcttaaaacatattcaacgtcttgatccaattggtatcggagctcgtaatttagctgaatgtttaaaagttcagttggagttcttgcctcgagaaactgaatatttgaaagaagccagaagtctacttcaatattacgaattactgattgcgaatgatcttaataaattattgaagcaaacagggctttccaaagaacaattaaaatttgcagttgatttattaaaaacattaaagccttatccaggcatggattttgaaaagcaagaatcagagtatcaaattcctgacgtagtcgttgccaagaaggacttgcattggcaagttcagttaaaccctgatgtgatgccaaaattaagaatcaattctttttattcgagtatgattcgtagggcagatcaaagtgatgataatttatacctacgtaatcaaatgcttgaggctaaaaattttataaaaagtattgatgaacggcacaaaacattattaaaagttgcgacttgtattgttgagcatcaaaaagcatttcttgaaataggtcccgaagcaatgaaacctttagtactaagggatgttgcagaagaagtagaattacatgagtcgaccgtttctcgcgttacaacaaataagtatatgcttactccacgtggactttttgagttgaaatacttcttttctagtcatgtggggacaaccacaggaggtgaggcttcttctaccgcaattcgggcgatgattaaaaagttagtttctaatgaaaatccgcgtaaacctttgtctgataatgcaattgctgctttattgaaagaggagggaatagaagtagctagaaggactgtagcaaaatatagagaatcgttacatattccatcgtcatccgagagaaaagtcttgatctaa

SEQ ID NO: 65011 - DNA, 339 bp, Acinetobacter baumannii
atgcaaataacgattcgtggacatcatttagcaattacaccagctatagaagaaaatattaaagcaaaatttaatcagttaacgaaacatcttgatcaggtgaatagtatgcagattaaattaacgaaagatcatcagattgataagcgctcacataaaggtagctctaatcatgtggctgaagcgatagttcgattacctggaattgagctgtttgctcaagcaacagcggatgatatgtatacttcaataaaaaaactgactgaaaaattaaaaaaacaattgttaaaatatcggaaaatgcaatgtacgtattctcaagttgctgtttctatttaa

SEQ ID NO: 65012 - DNA, 252 bp, Acinetobacter baumannii; identical to SEQ ID NO: 44048

SEQ ID NO: 65013 - DNA, 1257 bp, Acinetobacter baumannii
atggataaatttttaatcacgggcggtgttaagctcgaaggggaagtacgcatttctggtgctaaaaatgcggctttaccgttacttgcggcaatgattcttgctgactctccaattacattaaccaatgttccaaatcttaaagatgtaaatactttggtaaaattaatcggtggactgggtgttacaattagttatgaaaatgacacggttaaggcggatacttctactttagataaccagtttgctccttatgagcttgtcaaaacaatgcgtgcatctattttggtattagggccattattagcgcgttacggaaatgccaaggtttcattacctggtggatgtgctattggctctcgtccagtagatcaacacttaaaagccctagaagcattgggtgcacatatcgaagttgaaaatggttatgtacatgccactgttgatggtcgtctgaaaggcggcgaagtggtttttgatatggttactgttggtggtaccgaaaatattttaatggcagctgctttggcagacggtgtaaccacaattcgtaatgctgcacgtgaacctgaaattactgatcttgcgcaaatgcttattaaaatgggcgcaaaaattgaaggtttagatacggatacattggttgttactggtgtagaaagtctacatggctgtgaatatgcagttgttgcagaccgcatcgaaacaggttcttacttagctgctgctgcgattactggtggacgtgtaaaaaccacccatacagatccttcattgcttgaggctgttttagataagtttgaagaaatgggtgctgaagttacccgtggcgatgactggattgaattggatatgttgggtaagcgtcctaaagcagtaagttttagaacactacctcacccagaatttccgactgacatgcaagcacaaattatggctgtaaatgcaattggccgtgggtttgcaacgatttccgagaccatttttgaaaatcgtttcatgcatgttcctgaattgtcacgtatgggtgctaatattcaggtcgaaggccatgatgctgttgtgacgggtgttgaaaaattacaagcagcacctgtaatggcaacagatttacgtgcctcattctctttggttttagcggctttggttgctgaaggtgatacattaattgaccgtatctaccatattgaccgtggttatgagcatgtcgaagaaaaacttcaaggtttaggtgccaaaattaagcgagtaagttaa

SEQ ID NO: 65014 - DNA, 684 bp, Acinetobacter baumannii
atgaatgacgtaagaaacgatgatcctaattttaacgtaatgggtaattttgatcatggtttaaccttggcactgagtaaaggacgtattttaaaagaaacattacctttacttgctacagccggtattaacttgcttgaagacccggaaaaatcgcgtaagttgatttttccaaccacacataagcaggttcgtattttaattttacgtgcgtctgatgtgccaacttatgttgagaatggtgcagctgacttaggtgtagcaggtaaagacgtacttatggaacatggcgctcagcatgtctatgagttattggacctgcagattgcgaaatgtaaattaatgactgctggtaaagtaggaatggaacgcccaaaaggtcgtttaaaaattgccactaagtatgtcaatcttacacgtcaatattatgcgagcttaggcgagcaggtggatgttattaaactttatggttctatggagttagcaccattagttggtttgggcgattatattgttgacgtagtggatactggaaatactttacgagcaaatggtcttgagccattagaagaaatttgcaaagtatcttcacgtcttattgtcaataaagcgagctttaagcgtaaacaggttttattgaacccaatcatttcccaacttgaacaagctgttcaatcacgttaa

SEQ ID NO: 65015 - DNA, 1323 bp, Acinetobacter baumannii
ttggtttttctttttcgccttgtgggtaaattgatgcgacgtttatcgactcaagatcagaacttcaaacaggtttttgccgagcttttagcttttgaaaccgttaatgatcctaatttagttcaaacagtagatcaaattattgctgatgttcgtcagcatggtgatgatcatgttttaaaacttactcaacagttcgatcgacatccagcgcatcaattttccgatctagaattgtctcaacaacaacttaaagctgcttttgatggtttaaatcaagagattcgtgaagccctgaaacttgcagctgatcgtattcgtacttttcatgaagctcaaaaacaagatagctggacttatgtggatgatttgggtaataccctaggacaaaaagtgactccacttgaccgtgttggtatttatgtaccaggcggacttgcatcttatccttcatctgtacttatgaatgcggtaccagcacatgtggctggtgtacctgaaattattatggttgtgccagccccaaatggtgaactaaatccactcgttttagctgccgcctatctagcaggtgttagccgagtatttaccattggtggggcacaagctgttgctgctttagcttatggtactcaaactgttccacgtgttgataaaattacgggtcctggaaaccgatttgtggcagctgctaaacgtgctgtatttggtcaggtgggtattgacatgattgctggaccttctgaaatattagtttatgcagaaggtgtgaataatgctgaatggttagcgatggatgtattatctcaagctgaacatgacacagtagctcaagctattttcattactccagatgaagcattattagaagcagtagagtctgcaattgagaaacatttaaatgaattgcctaaagccgagattgcgcgtacatcgattaaaaatcgtggtgcattagttttggtaaaagaccgtgctgaagcagttgatttaattaatcaggttgcaccagagcatttggaactatgtcttgatgatgctgaagcgatgagccaagatattcgtcatgcaggggcaatttttatgggtcgctatacacctgaagcaattggtgattattgtgctggcccaaaccacgtattaccgacatcaggcacagctcgtttctcttcgccacttggtgtatatgattttcaaaagcgctctagtttgatcatgtgttcaaaagatggcgttaagactttggctaaaacagctgatgtacttgctgttcaagaaaatctcgatgcccatgcacgctcggcgcgttatcgttatcaataa

SEQ ID NO: 65016 - DNA, 1086 bp, Acinetobacter baumannii
atgactgtatctacagcacaaatgcgtttttggagtcctgaggttcgtgaattagagccgtatgtgccaggtgaacaacctaaaatccagaatctattaaagttaaataccaatgaaaacccgtatccaccatcaccaaaagtagtagaagcagttcaagaggtgttacatgaacaagccgatgtgctgcgtctatatccagatccggatgcgacagtgttaaagcaagcaattgcgaaacaacagaatattgatgtatctcaagtttttgtaggtaacggttctgatgaggtattggctcatatctttaaagcattttttcttcaagatggaccaatcctgtatccggacatcacttatagtttctatccagtttatagccaattttttggcacaaaaacaaaagaaattcctctcaatgagaatttcgaaattgatgtgcgagattatacccagccaaatggtggggttattattaccaacccaaatgcaccaacaagtattgcgctcagcttggcagaaatcgaacaagtattacaggcaaatccggaccgcgtggttgtgattgatgaagcgtatgttgattttggtgcggagtcagctgtaagtttgataaaccgctatgaaaatcttgtggtatgccaaacgacttcaaagtctcgttctttagcaggcctacgagtcggatttgcgattgctcagtcgcacttgattgcagcacttgaggctgtaaaaaatagttttaattcatatccaattgatcgctttgctattgcagcagcggtagcttcttttgaagaccaggcttattttgaagagcagtgccaaaaagttataacaagtcgagagaaacttgttcgtgatttaactgaacttggttttaacgttttgccatcgaaagcgaattttatttttgctacgcattcacagcatgatgctgggcaacttgcacaaaaattacgtgagcagggcattattgttcgttacttcaataagcctcgcattaatcagtttttacgtatcacggttggaactaatgagcaaaacgcgcgtttagttcaaactttgaagcaagatattctttaa

SEQ ID NO: 65017 - DNA, 849 bp, Acinetobacter baumannii; identical to SEQ ID NO: 45784

SEQ ID NO: 65018 - DNA, 402 bp, Acinetobacter baumannii; identical to SEQ ID NO: 45785

SEQ ID NO: 65019 - DNA, 393 bp, Acinetobacter baumannii; identical to SEQ ID NO: 45786

SEQ ID NO: 65020 - DNA, 1182 bp, Acinetobacter baumannii
atgaataatcgatggataaagatgagtgtgttggctttaagtatgagtgccattacagggacaatttatgccgaagatcaagtgcaatcaacgcaagtatccgattctaatcagtctgtagaagcaaatgaaaactctggtgcttcagatactgctagttctagtgaggctacaacagatagtactacacaaacatctaatgtctctgaaactaataatgtagttccagcatctaatagtgaggcacatcaagcagcaagtgcactacagaaaaaagaaggtgatgctagccaggagacaaatttacaagaggtatttacttcaaatgagcgccaatattctttgattaagaagggtgtaatttcttcttattatgatcttgactacacttattatcgtgatactcgtattgatttagccttatcggataattcctctcagctcaaccgtttacgtgttgaggaagatgcaaaccatacattaacaaatagttttactttgcaatatggggtattagataacttaactttatccgcaactcttccttttgtagcaaagtctgaaattattcgtgatacaacaactgcaggattgggagatatttcatttggtgcacgttgggagccgtttcctttaaaacaaggtcgtttacctttggttctttttggtagcctgtcaacgaagactggcgatagtccttatgagattggtttagatgaattgtcaacgggtaaaggttattactcagttggtgtgggagcaagtacccgtaaatatattgatccagtcgttctctttgcttctgcttctgccaattacggctttaaagaaagtggccttaatcaagcccgaggttcgcgtacattaacttcatttgatccagggattagcggtggcttttcttttggtttcgcttactcatttaactatgatgtgtctttaaccatgtcatatcagcaaagtttcaatatggatgccgaattccagtttgaaaatggagaaagctataaatcacctgatcaaagtagtgcgatgttgtcttttgctttaggtgttcgggtttcacctgaaacgattgttaacggtaccgttggtattggtttaaccgaagatgcgccagatatttcacttggtttgtcattcccgttagatattttaggttttaataaaaaacaaaaataa

SEQ ID NO: 65021 - DNA, 1665 bp, Acinetobacter baumannii; identical to SEQ ID NO: 45788

SEQ ID NO: 65022 - DNA, 1260 bp, Acinetobacter baumannii
atggtaaaacaatataaagggatatttcgacctaaagtcgctatcacaactttatgcgttgcgatagccagtatttctgtatcttatgcagacggtttttatacaattattgggccagatgggcggcctatgattgtaccgagtaaaagaattgatcagaaaaaacaacctatccctaaaatagaggaaagaaaaccacaaactcagcagaatccactaatagtagattctgtacaaaaaacatctaaagaaaaagaacaaattaaaaattcaccgaaaaaactggaacaacatgtccaagaaaaattaaatactgcaccgactgcaccgactgcaccgactgcaccgactgcaccgactgcaccgactgcaccgcaaaaaactcagaaaaatacaaaaactgtttcagtagtcagtgatgatttaaaaacatccccagaaaaaaataaaattattgagagcggaaatgccccttcagtatctaataatgaatggcaaaaaaagttagttctcgttcctccaccaataaagagtacatctcaagctgcaccatcctccgattcttcactcgataaatctaaatttacaactattgatggcgtagagtatgtaaataatgaatatcttgaagatcaagaatttaaccttgaaggtaaaaagcggttttaccttatgcctgatggtttggggcgcactgaatcagtagagcggaaaaagggtgtaagtcgatcaactttagatcagcttttcaatcgacaaactcaagaccaagactctactgttgttttagcaccaacgtatatgcgtttgtcttcacaagagctagaagcagcttttgaacaagataagtgctttattaaagattataaaaaatcaattaaaacgcttagcataaataaggaagtaaacttatggccacggaagccattgaaagaaaagtttgaatatgagttggtacagttaaatccttctgttcagcatttaaaagttatatcttttgcttctagtaatgagaagcctctatattattggccactcgttgtatttttggatgataaaggctgtattttggaaggagtgagcgggtttaaaagcaaatcttatccttcgactatgttacagcatgcatcgattcaaggagttttaaaagtaccgccttcagcacattatattatgatgacgcctttatcttctgccgtggatgttacagaaaaagagttaacaaatcagggacaaattcaaatttcggtattacgttaa

SEQ ID NO: 65023 - DNA, 1950 bp, Acinetobacter baumannii; identical to SEQ ID NO: 45790

SEQ ID NO: 65024 - DNA, 558 bp, Acinetobacter baumannii
atgataattatgagtttctgtgtagcgtgtgggcataaaaccgaacaaaaaattcctttaggtgatcataaagtacgccgtgtttgtactcattgtggaaatattcactatgaaaaccccaaagtaatctgcggtgccttagcgttatgggaagacaaagtactactttgtcgtcgcgcgattgaacctcgttatggcttatggactttgcctgcgggttatatggaattattcgaaactatggaacaaggtgcggcgcgtgaaactcgtgaagaggcagaagccgagattgaaatagaacaactttattgcatgtacaatattccccgtattgggcaaatttatgtgttgttcaaagcacagctgaaagatggcattttcggtgctggagaagaaagtatcgaatgtcgactgtttgaagaacatgaaatcccatggggtgaacttgcctttcctagtgttgaacacacattaagacattattttgaagaccgtaaacaacaagtttttccaacacatctagagacgttaggaactcgtttagaccatacaggctaa

SEQ ID NO: 65025 - DNA, 618 bp, Acinetobacter baumannii
atggaagagcacttgctaacacaaaagttacagcaaagattgcgcttttccacccgcatacaagaagcacaagctgcggtacttattgcgattacgaatgaaaataatcctaaggtactgcttacacgccgttcaatacatatgaacaaccatgcgggggaagtttcttttcctggtggcaagcgtgaccctagtgatactagtaatattgttgtagcgctaagagaagcccaagaagagacggctttaaatccgtttgatgtgcagttgttaggcgatttgccgatgcaacgtgcaagaagtggcttgtctgtaaaaccgattgttgggcttattcctcctgaggtaactttaattcctcagcccaccgaaattgatcgaattttctttgtgcctttacagcaacttatagagacgcgtccgacgccatatgaagtgcgatatgctcatcaatctttatacttcccaagcttgcagattgataatgaaattatttgggggctcacagcgcgaatgttaattgccttatttaaatatggtttaggctaccaaaaagaatggccatttctactgaatgcaccaacgtttggaatgccaaaattttctcataaaaaataa

SEQ ID NO: 65026 - DNA, 531 bp, Acinetobacter baumannii
atgatgtatagctatcaagggcagcatccaaaagccttacatgagccatgggatggctgggttgctccaaccgcaacgcttattggacaagtagaactaggccgtcaggtcagtatttggtttggtgctgtagtacgtgccgataattgtgtcgttcggattggtaatttttctaatattcaagaaaattcggtattacatactgatgcgggccttgagctaaatattggcgaatatgtcaccgttggtcataaagtcatgttgcatggttgtacaattggcgataacagtttgattggtatgaacgccgtcattttaaatcgagctgtgattggtaagaactgtattattggtgctaatgctttaataccggaaggtaaagtgattccagataactcagtggtaatgggctcacctggaaaaattgtaaaaactttagatgaagaaggcgcagcaaaaatacgcttgagcgcactacattatgctgaacactttaaaagctataccgatttgaaagaattccacttttaa

SEQ ID NO: 65027 - DNA, 666 bp, Acinetobacter baumannii
atgaaactgctggcgttggaaactgcaaacgagcaatgttccatttcattaatcgatgaaacccaagaactctttttccaactcgatacgcgagcgaaagcacaaacccagaccattttgccaatgattgagcaagggttacagcaaaccggacttgacgtagctggtttagatgcaattgcctttagtcgagggcccggttcttttagtggtgttcgaattaatgctgctgttgctcaggctttagcttggtcacaagatttacctgtggttcccgtttctaccttacaagctctcgcacaagcagcttaccgacttgaaggtttagaacaggtgactgcggtactcgatgcacgtatgaatgaagtttacattgcaagttttgttctagatgagcgaggcatcatgcagtgtatagatgaagaaaaattaatgaactacgagcaagcggctgcctatgcaaagcattgcttaatcggttcgggtgctaagcttcttcaaactgatgcagaatatcaaacaatcactgccactgcacaagacattgcttcgattgcacgtgtgtatgcagcgcaaaagcagtgggttgatgctgaacatgctttaccggtttacttacgtgatgatgcatggaaaaaaattgcggatcagggcaaaacaaattaa

SEQ ID NO: 65028 - DNA, 792 bp, Acinetobacter baumannii
atgcacatatattttgaagtagattttcaagaacaagcacagcactaccaagctgtgctttattctagaggcgtgactgtcgatttacagcctattgaaaaacttaatgcccgttttttacgtttaaatcctgacttggctctttgtgtagatgaaaacggactttggttatctgctaatggcatgaaaatgcagcctgactggaaagctgaaattccgcgtttaaaacgagcaagtcttaaatcggaaatgattgctcgtgcttgtcagttaggtgaaaagccagtactagtcgatgctacagcgggcttaggtcatgacagcttacttatggcttatctaggtgcccaaatccagctcgttgagcgtcatccgattttatttactttacttgaggattcaaaagctcaggcacagcgtgatccatttttaagtcaatttatggatcgtattcaactgctcttcgccgactctgcaagctatttacagcaattagatcaagaagcaaaaacagttgatgtggtctaccttgacccgatgttcccacagcgcgatcaaaatcaacaagcaattaaaaaacaagcccaagtcaaaaagcagatgcagcttttgcatttacttttacccgaagatggagaaatggatttgggtgatcatttgcttgagctagccaaaaaagttgcaaagcgagtgattgtaaaacgtccacgacatgctatttttttagcaaatcaagaaccagcccatcagtggcagggggatgcttgtcgttttgatgcttactttcagtaa

SEQ ID NO: 65029 - DNA, 1452 bp, Acinetobacter baumannii; identical to SEQ ID NO: 51317

SEQ ID NO: 65030 - DNA, 846 bp, Acinetobacter baumannii
atgcaactcctgcaaaaaaaccgctgctttgaaggtgagcagcgcatttatcagtttgattctcaattattaaaaggctctactaagtttggggtgtatttgtcacctgctgctttagaaggcaaaccttgctcaactttgttttacttagcgggtttaacatgtactgaagaaacttttgccattaaggcacatgcacagcatatggctgcccagcttagtcttatactgattacacctgatacttcacctcgtggtgaacaagttgcagtaggtgacaattgggatttaggtcaaggcgcaggcttttatattaatgcgacgcaagcgccttggtctgagcattatcagatggaaagctatttaatcgatgagttatatccacttattttaaaaagttttccagtcaatgctcaacaagtcggtatttttggacattcgatggggggacatggcgccttaactttagcttttaaatatcctgagaagtttaagtcagtgtctgcatttgcaccgatttgcgcgccaactgaatgtgcatggggtgaaaaagcatttagccattatttaggtacagatcgtgagagctggttggctcatgatgccacggctttagtctcaaaaaatggtgcggtatttaatgaaattttggtggatcaggggttagatgaccaattttatgaacaacttcaccctgaaaaatttaagcaagcatgtttaaaggcaggacagcctttaactttaagacaacatgctggctatgatcatggctattattttatccagacttttatggatgagcatttgcagttccatgcaatccagttagaaaaggtatctggttaa

SEQ ID NO: 65031 - DNA, 273 bp, Acinetobacter baumannii
atgaaaagcacaactcatctattaacaaatgatggaaaacgcattgcaaaacgtctagttaatcattggaaacataagtttgaagtacaagaaactgaacaagattttaaaatcttaatgcctaccgcaaccattacgcttgcaccagaaacagagcagttaaatgttgctattgatagtcagttagatgaccacaaccacttagaaaaagttgttcttgatcatctaaaccgcatggctcaacaagaatttcaagttgaatggcaacactaa

SEQ ID NO: 65032 - DNA, 687 bp, Acinetobacter baumannii
atgtccaagccttatttgattgctccttctattttatctgccgattttgctcgtttaggcgaagatgtagacaaagtgttagctgctggtgccgatgtagtgcattttgatgtgatggataatcactatgttccaaatttaacttttggtgcaggtgtgtgtaaggctttaaaaaattatggaattactgctcctgttgatgtgcatttaatggtatctccagttgaccgtattattggtgatttcctagaagcaggcgcagatatcattacgtttcacccagaagcttctcatcacattgaccgttcattacagcttattaagtctggtggtgctaaagcaggattagtttttaacccagcaacaccattgcattatctagactatgttcttgataaagttgaccaaattttattaatgagtgtaaacccaggttttggtggccaaaagttcattccaatgactttagaaaaattacgtgaagcgcgtaaaattattgatgcaagtggccgtgatatccgtttagaagtagacggtggagttggtcctgcaaatatccgtgaaattgcagaagctggtgctgatatgttcgttgctggctcggcaatttttggtcaaccagattataaagttgtgattgatcaaatgcgtgcagagcttgcaaaagtcggtagtgtagacgcttaa

SEQ ID NO: 65033 - DNA, 822 bp, Acinetobacter baumannii
atgacagtaaaaattttagcggtagatatggatgggacttttcttaattctaagaagcagtacaacaaagcacgttttttaaaacagtatgaacaactaaaacaaaataatatccgttttgtagtcgctagtggtaatcagcttgcaaagcttgttacgtattttccagaaattaatcatgagattgcttttattgccgaaaatggtgctcatgttgtagatgcggggcaagagttagcttttgctcatttaagcaaagagcaattcgttgagattttaaatgcgattgacccagtgtatacctctaaaatggtgatctgcggaaaacagagtgcttatgtgcatagcagtatgaacgcggaagattatgctaaagtcgctcgctattttgaaaagctgacggttatagatgacttttatgcactagatgacttggtgtgtaaaattacttttactgcgcaggaaaatgaaagttttacaatttttgagcattttcagaagcaaagttttgtaaaagataaggttttggtaccagtctcaagtggctttaattttatcgatttgattcttccggaccagcacaaagcacatggtttgaagctattattgcaaaaatggcaggttcaacccgatcaagtcgttgcgattggtgataacaataatgatatccagatgattaaagcagcaggttatgggtttgcagtcgaaaatgcagttgaagccttaaaagccgttgctccttacacaactgcaaataatgagcaagaaggtgcattacaggtgattgacttagttcttcagcatcagcctccatttgcttaa

SEQ ID NO: 65034 - DNA, 399 bp, Acinetobacter baumannii
atgatgacactgcaacacttacgcaagtatgcttggtttgtgttcctgatgactttagttattgggtggagtggtgtgtctattgctcagacacctatgcagcatgatcttcatactatgccgtgtcatagtgagcaaatgaaacatcactctatgcatattcaagctgatgagcaggcaacgtgtcatcaatctatgagtcaggtttctcaccaacatggtaaacactgccaagactgtaacccggtccattgtcagatggtaaatctggctttacagcaagctataccagatattgaatcatcatttattcctattccatctcaatttagtagtatttatcaggcacagcatttagccggatactggcaagaaatcttacgtccaccaaaagcttaa

SEQ ID NO: 65035 - DNA, 1935 bp, Acinetobacter baumannii
atgtctcataaaacgattagcagcctcgtcgctgtatttggtctattggtttcaccatggactctcgcggcaattaaggaatatcaccttaatattaatgaacaacaagtcaatgttacgggcaaaccccttaaacgaattaccgtaaatggaaaatttacagcaccactccttgagtttgaagagggggatgaggctgttattcgcgtccataatcaattaaagaatcaagatacctctttacactggcatgggttgttactgccagggttaatggatggtgtgccgggttttaataattttaaagggattgctccaaatggagattttgtttaccgctttaaggtgaaacaaaatggcacatattggtatcacgcccatagtaaaggccaagagcaagacggtttatatgggccgcttgtgatttacccaaaaggcaaaataccagttgcggcgcatgaaaaaactgatcgtgattatgtagtgatgctttcagatttccatgattcttctagcgatagcattatgaagaatttgaaaaaatctgctgagtattatcaaaaccgccgtgaaactgtatctgatgtatggaagcaagttaaagcacagggcttaaaagcaacttggcaagatcgttcgatgtggaatcagatgcggatgttaaaaaccgatatgtctgatgtgacgggctataccttcttagtcaacggcaagactcctcagcaaaactggacagctaattttaaagctggtgataaggttcgattgcgatttattaatgcatcagcaatgtcattttttgatgtcagaattccaaatttgaaaatgacagttgtaagtgcagatgggcagccagttaaacctgtagcaattgatgagtttcgtattggtacagctgaaacctacgatgtcattgtggaacctaaacagccaaattatcagattgaagcagagtctattgaccgtagtggttttgctatcggtactttgcacaatgaaaatacgcaggctgtggggccagtccaaatgccaataccacgcccacgtgctttattgaccatggatgatatgggcatgagtcatggtgatggaagtaatgaacatgctggccatcaaatgaacatgcaacatgacatgtcggccatgcctgaaatgaaaaaagagacgagtcaggctaatcatgatcacacagtgatgaaaatggatcatgacatgaaaaatatgtcatctggcgaacatgatcattccatgatgcacatgaagcatgatatgtcagcgatgtctgaaatgaagcatgatatgcaggcaatgtcatctagcgagcatgaccacactatgatgaatatgaatcatgagatgcctgctcaatctgagaataagtctaaaaaggatgaaccagtttatggctgggcaaatgcttcaacgccagcgggtatgaaagcactgcaatatagcgatttgcaatctttaacacctcagccagatacccgtgcgcccgaacgagaattagtcattcgtttaggtggcaacatggagcgttatatctggaccattaatggcaagaaatttagtgacacgatacctttacaagttaagtatggtgaacgcatacgcttgaagtttgtgaatgacagtatgatggctcatccaatgcatttacatggcatgtttatgcaattggaaaatggtcaacaagctgaaaatttaccaaataaacatactattattgttccacccggaaagaccgttacggcgttattgacagccgatgctttgggagaatgggcgattcattgccatctgctctatcacatgagtgctggaatgatgaataaattaattgttgctcaagtcaacgatggacaacaacccgctcagtcccagccaactgttcaatctgaaaatgagaaaggagctagtcatgcgcatcactaa

SEQ ID NO: 65036 - DNA, 756 bp, Acinetobacter baumannii
atgcgcatcactaagttattttctcaaatgatatgttgcggtgctttctcgggtatatctgtatttgcttttgctcaagaacctttaacacacgatcatttacgcgaacatggtggacaggtttatcaagcaacaaagattgatactggctggactcaaaatgaagagggtgaaagcagtttttcttctgaattggaaagctgggtgggaacggatgaaaataaattgttcattaaagcccacgttgaaaaagcagagtcagaagatgccaattatggcggttcattactttatagccgcaatgtagctgactattgggatgtacaggccggggtaaactatgaacgtttacaacgggaagacgaaaaggaagatcgctgggctggtgtagtgggcttacatggcatggcgccttacttttttgaaaccgatgcttatctttatgtaggtgaagataagttatggaagttaagcctagagacagaaagagatttgctttttactcaaaagttgattggtaagccctatttaaaagcagatgttgttttacaagatgaatctcgctatgccagtaaaacaggcctgtcgagtttacaagctggctttcaaacccgttatgaaatcaataaaaaggtcatgccatttgttgatgtcggttatggttatgaaaaaggtttaaaacaaaccgcttggcaaactggaaccgactcagaacatggttggtattatggagctgggttaacactaaaattctaa

SEQ ID NO: 65037 - DNA, 996 bp, Acinetobacter baumannii
atgccattggtttatactgatggcattgttttttgtgtcagttatggtgcaaagatggctttagaaaaacaagagaatcaaataaatgtaaataaaagctgttctagctgtgggtgctcaaatgtagcagctcaggacttttctgtggcaagtgaacctagggtaaataaaacccaatgggtgagttattatcatattccccgtatggattgtgcagccgaagaacaaatggtaagaatggctttagcttcttatgctgagcatattcaagaactttattttgatttgcccgcccgccacttagcggtgtatcacagtactcaagatgaaaagattacgcagtgcctgcaacgtctaggtttaggagccgaattacaacaaacccaaccacattatgagcctattgaaaaacccaaaaaggttcgaccaagttcctcaactaatgcagcacaaaaacaggtactacaatggctgttactgattaatggggtcatgtttgtcattgagttaatggcaggcatcattgcctcctccacagggttaattgctgactcgctcgatatgtttgccgatgctgcaatttatggtattgcattattcgtggtgggtaaaaacctcgacgctcaattaaaggctgcacatctttcgggttggttgcagtttggtttagccataatcgttttaattgatgtgctgcgccgttttatatatggcagtgaaccagtttcaattttaatgattttaattgggggattagcgcttgcggccaacattagttgtctttacttaatgagtgaccataaagagagcggggcacatatgaaggcgagttatatattttctgcaaatgatgtcatcgtaaacttaggtgtcattattgcgggaatactggttgcaatcacaggctctcgttatcctgatttaattattggattgattattgttttgttcgttttaaatggtgcacgaaaaattttacagttaaaaaatgaataa

SEQ ID NO: 65038 - DNA, 321 bp, Acinetobacter baumannii
atggcttgggctattttaattttagcaggtgtatttgaagtgatttgggcatattctatgaaaatgtctgaaggttttacacgcttaacacctagtattattaccgtagtttttatgattttgagtgtagttctactttcaatttcaatgaaaactttaccccttggtactgcttatacggtttggacaggcattggtgcaattggatcatttttagttggtattttctttcttcatgagcctattggtgcgatgagaatgattgccgctgtactgattgtatctggactggttctaatgaaaatttcgtctccatcctaa

SEQ ID NO: 65039 - DNA, 480 bp, Acinetobacter baumannii
atgttgctgtcttataagtatatcaattcgcctgttgggcaattaaagctggttgcgaatgaaaatgctttggtggcagtactttgggacaatgaaaatccaaaacgtgttcgactggcagagctggtcgaacaacttgagcatccagttttattaaagaccgaacaacaattacaagaatattttgaaggcaaacgccgtgaatttacattgccactagatttcgaaggaactgcatttcaaaagcaggtctggacggcattacttacgattccgtatggtgaaacaagaagttataaagatattgccgttcagatcggaaatgaaaaagcagtgcgagcagtgggtgctgcaaatggcaaaaatccgatttcaattattgcaccttgtcaccgagtaattggtgcgggcggagctttggttggttttgccggtggtcttgataagaaagatattttattaagattagagcaaaaataa

SEQ ID NO: 65040 - DNA, 1221 bp, Acinetobacter baumannii
atggctgtcggtgacgtaacaatgccacaaatgcatgtggtaaaaggtgtaaaaattggctcaacagaagcatatgtacgttacccaaaccgacgagatctagtcatttttgaatttgcagaaggttcaaatgttgcaggtgtatttacgcaaaatgcattctgtgcggcacctgttcatgtatctaaagctcatcttgccgaaggcaatccgcgctatttagtgattaatacaggtaatgccaatgctggtactggtcctacaggtttgaaaaatgctcaggatacttgtgcaaagttagcggagcttgctggcgttaacagtttcgaagtacttccattttcaacaggcgtgattggtgagcagcttccgatggaacgtttactcgctggcttacaacctgcattaaatagcgtacaagacgctgcatggagtgatgcggcatctggcattatgacaacagacacagtgccaaaaggcgcatctgaacaatttgagcttgatggtatgacttataccatgaccggtattagtaaaggcgctgggatgatccgtccaaacatggcaactatgctgagctttgtggcaacagatgcgcctattcgccgtgatttagtacaaaagctattaaagactacagttgagcattcatttaaccgtattaccattgatggtgatacctcaacaaatgactcttgtatttttgtggcaactggtcaggctggtggtgctgaaattacatcggaaagcgatgtacgctacgctaaagtgttagaagtacttgctcgtgtaatgaaccgtttagcacagttaattgtccgtgatggagaaggtgcaaccaagtttattactgttgctgttgaaggtggtgcaaatactcaagaatgttgtgacattgcttatagtattgcgcattcaccacttgttaaaactgcactttttgcatctgatccgaactggggtcgtattttagctgcaatcggctatgctggagtgaaagacttagacgtgtctaaaattcaggtatggttagacgacgtgcaaatctgtaaagatggtggcgcagccgaggactataccgaagaagcaggtgctcgtgtaatggcacaaaccgaaattaccattcgtgttgacttaggccgcggacaagccaaagacacggtatatacgtgtgacttatcttacgactatgtcaagattaatgcagattaccgttcgtaa

SEQ ID NO: 65041 - DNA, 1065 bp, Acinetobacter baumannii; identical to SEQ ID NO: 56284

SEQ ID NO: 65042 - DNA, 300 bp, Acinetobacter baumannii
atggacaaaaagatagaagagaaaactaaagatattaatgaaaaaattcaaaaattggatttagctattcaagaactaatagaaactacagacaatttttttattaatgataagtactatggaattgaatgtgcttttattttagaccatgcactaaatattaaaatgcactttttcaacaagtatccagcatttgcaccacctcacttacgaggagtagaaaattatgatcgaattatacatattagagaaaataatcctgaagataagctagaacaaatttctcctcttaaagactaa

SEQ ID NO: 65043 - DNA, 300 bp, Acinetobacter baumannii; identical to SEQ ID NO: 65042

SEQ ID NO: 65044 - DNA, 300 bp, Acinetobacter baumannii; identical to SEQ ID NO: 65042

SEQ ID NO: 65045 - DNA, 492 bp, Acinetobacter baumannii
atgagtgggaataggtgctttggagaccttgatgaggggaaaagaatactggaggctccaaaatattttgagtccccagttaagatggcgagagaaataaatagtctatcgctttataaattttcaggagctccgatttacgaaacatcaaccgagctaaatattgtggggttaagtatatttttaagaacaaatattgcaccagattcaatgaagcatagttttggtttggttcagagagttggaaaaaagactaactggctttacgatctttgtatatatccagaacatcagcggtctcatgttgataaaaagaagcgtgaagttttttatggaccacacattcatcttcttgatgactcatttgaaattgacttatcttacaatcttgaagattggcaaaaatggtttcaactttttgctaaaaatattaatttgcaaattaggtcgagtgatataatggaacctcttgcgggggagttgctactatga

SEQ ID NO: 65046 - DNA, 711 bp, Acinetobacter baumannii
atgagtgcacatctttcagatacagtcttgaatgcttttatccaaaagttttctgatcaaggaaattcttgtggcttcactctacccctagtttttccaaatgggtctccagcagtagtttatgcgcataagaatacacgagatcaaattattctaagtgactatggactaaatgttcgtcattttgaagaatctgtatgcgtggaaaattttgatgcgattgataaaattaaatacttttgcaaaatgtatgaatctatttctgtacaagatgggtgtttggttgccgagacatcaataaaacaactagattttactgtaattgaatatactgaacttcttggaaagctaatcaattaccaatacaaatcaagatctcatcaagcaattgatgaaattctagattcaattagagttgtgctagaaagaaaatttcactcaattgaggtaagccctaaacttgctggtcgctctggggagaaatacccttttaatttttcacacaacagtacatttattgattacatacaagcagataagaataaaacaaattatcaattgagaaaaatgatcgatactcaaaacttaaatgataatgtttcctttaatattattattgatgatactgagaatgataaatacaaagcggagcaagctatcctttctgactatgctgtagttcaacccctatcaaaattccttcgtcactaa

SEQ ID NO: 65047 - DNA, 2340 bp, Acinetobacter baumannii
gtggccacaaatggactttacacagtttcttcaggtggaaatcagggagctgtaaacgtcacgattgaagttgaagtaacgccggttaatgaatctggtgcagccattggcaatccaatgctaaagcagatcattctaaagggttcggcaaagtcacgccaaacggttggtgcaacgctggatatggtgacttttcaggggcgctgtagtgtccgtgcacgccgtttaactccaacaccggcagttaccactgttgttgatgaagtaaagtggcaggcgctttacggtgcttatcctttacaaagcacagtgtatgagcatgaaacggtttttcgtgcgcgtacttatgcaaccactggagctttatctgtcaagtcccgtaagatcaatttcgatcttcagcgaatgttgccgacttataaaaatggagcaatgacgacagagctattcccaacatcgagttttgctgatgctttggtatctatggcacttgatgacaagattgggcgccgtacgatcgatgagattgatctggaaaacatttaccggacttataacgatgtagttgattattttggtactccactagcggcagagttctgtaccactattgatgatacaaacctgtcttttgaagagctggttaccaatctttgtgatgccgtattttgtaccgcatatcggcaaaacaataagctcaagctttattttgaacgtccaactgataactcggtaatgctgtttaacttcaggaatatcattccggatagttacaagcatgaccttacctttggcgtgatgaatgactacgatggactgatctatgaatacacggatccgaccgacgatagccgtatcaatatctatttaccggataaaggagccaaaaaccctaaagaagtgaaatctgttggtgttcgaaacaagtggcaagcgcatttcaatgcgtaccggctttggaacaagcttcgcttccagcgcaaatccattacctttgatgcagcacctgaatcagaattattggttttacgtgaccggatcgctgtagctgattatcgcaatggtattcatcaaagcggggaagtggtacagcaagaaggtttaatcctcaccttaagccatgatgtagatttcatagctggcaagagctatgtgatctatctgcaaatgggggatggcacagtggaccttattcctgttaccgctggatctgccaagaacaaggtggttttaggccgtttaccgaacggggccttaaagcttagtcctgatgattttgtgaatactatctatacggtggttaatgacgataccaaaggctcattgccttatctggttgcaaaaagagaaccggctgaccagttctctaatgccattacggcaattaattacgatgaacgttattacctcaatgacaaggactttattgatgtgccagtagatgattcaccgatttacattcgatatgaccagctggatattaatctggcgcgtttatatcagatgcaaagaggtgatttgccaactacaggtgagattagctttgtagttgaagctggtgcgctggtttcaagttcaagttcttatcgacctgaaacaaggatggtttataagtttgactataataatagtcctgcaaaacgagagtatatcgttccggctgcaactgaattaccagcgatagatacaggggagttcccacctgatctggtggtgaatctaacgattaaaggctcagttgttggacgtggtggagatggcgggttgccacatctagcttacggagattgggaaaaagattctgacttcaattttaccaaaacccggcgtgatggttttcagggagcaccaggtttattgaaccggcacagcaaactaaacctgattatcgatggagggacgttagctcgaggcggttcaggtggtggagcaacaccaagtggtatttacactggatcatcttatggggttcagggaattcctggtggtgctggagcaccatttggtcgggtcatgactggacagccgatttcaaatgactcacaagattatcgcctctatctggagagttatttattggttatgaaaatcactgatgctgaagctacagtacccggtaaaggttaccgaacccaaaatgaccgttatgggtctccattatcaggtgatggtggaaactggggcgaacgtggtaccaagtctaccaatgatggaacatggaattggcaataccatggaacgactgaaggtcagccggggccgggcggacctgcaattgttggggtggcaccgctaacaactcaattgattaacggagggaaaatcttacaaaccctttaa

SEQ ID NO: 65048 - DNA, 363 bp, Acinetobacter baumannii; identical to SEQ ID NO: 59579

SEQ ID NO: 65049 - DNA, 606 bp, Acinetobacter baumannii
atgggttatctaacaactgttactactggtgaaggtaaaaatgcccgcgttattaatttcaaaccttcgcctacacatcatgcgaaaaactcaggtgctttaggcggtgaaaccggtgaagtatgggtacctgatcttaaagcacaccatactttcttggctgacctgattactcaagctaaagatcacattaacaccttaacgcctgcacaacttgcagcagctaaagcccaagaagagctagaaaactggaaacaaagctgtgaggaagcagagcatgcaggtgaccttaatcaattaactgagtcgcttgataaagaacacatgtattaccagaacatgcgccaagcaatgttaatgagagctaaagcattgaattgcacgtttgataagcaacgtggcacttggattagtccaccagaatttaacggtatctcagatcaacaaagagatgaacttcagaacttcatagctgaacgtggcctcgatgtaaaaacagtttgtgagcacttaggtatcgatgcccttatccaaattgaagcggcaaaacttaaggcagttaaacaagaaattgaaaccttagctaaaaaggggatgacagcatga

SEQ ID NO: 65050 - DNA, 918 bp, Acinetobacter baumannii; identical to SEQ ID NO: 46092

SEQ ID NO: 65051 - DNA, 537 bp, Acinetobacter baumannii
atgttgacagttgtaggaattttaaatcggacccataattattcctttggtatttatcaagatgattctgatttttcaaaaaatattaataccataattatgaacagaaaaaatattaaaatatattctaatgtggacaataataaagtaattgaaatgattagagagcatcatataggccttttaccgacatgggcagatacatttggatattctgttttagagttccaagcttgtggttgccctgtaatttcaacggatgttagagcattgtcggaaattaataataacgatattggttggttaattaatgttgataaaaataaatatggtgagattgtagttgattcttattcaaagaaagacttatgcagaagaactattattgatcagttgaagaagcatattctcagtgcatatgaaaatcctaatgttgttattaataaaggtgttgaatcattgaatcgtattaaaaaagaacattctattgattattataatgataaaattaagagtgtttatactattggtatttaa

SEQ ID NO: 65052 - DNA, 162 bp, Acinetobacter baumannii; identical to SEQ ID NO: 46255

SEQ ID NO: 65053 - DNA, 354 bp, Acinetobacter baumannii; identical to SEQ ID NO: 48622

SEQ ID NO: 65054 - DNA, 354 bp, Acinetobacter baumannii
atgagcaattttgtatttaagcgtggtgacactttcaacttgaacttgcagctggttgatatggatgaaaccctgcagtatccaccggatgatgttcgccgtgcaattgatctcactggttatacatttacttctcaggttaaagctttggctgatggtgcagctgtggccacgttaacttgtactgcattaagtcaaagtacacagaagggatggctgaatattaaatcaggtgcaagtacagcagcttggcctttaggtctgtgccagatggatattaaggctgtcgtgaatggagttacccagcatacagatactttgattttccaagtgattgatggggtaacagcataa

SEQ ID NO: 65055 - DNA, 666 bp, Acinetobacter baumannii; identical to SEQ ID NO: 45552

SEQ ID NO: 65056 - DNA, 411 bp, Acinetobacter baumannii
atgagtgagtttgagggtaaatctggaaagtgggcttgggagattcaaaaagaacaacaagcgaaagtggaggagctgcaaaagcaattaagtgaatacatatttgtatcggaaacgcttgatgaaatgtatgtgaaagaagtccagaaaagtgacgagctgcaaaagcgggtgcaattccttgagcaggaattaggtgcatggaaagggaaatcaatagcagcaatggtaaatggcatgtgtaaacaatgtggcaaagaaccattgcaggcaatagtttctgataaagatggttatgcacttctacattgctttggatgtggcgcaaacaagattcttcaaaatagaaagcggcaatctaatgtgttggtacgaagaactaggcgcttggaaacatccggcagcttctaa

SEQ ID NO: 65057 - DNA, 399 bp, Acinetobacter baumannii
atgtacaagttaaagctaaatcctcagaccagcggctatggcgtaacaccgggtgatgatgtgaaacgtcagcagatggatggcggtcgtgggcgctattacatcgatgtgaaacgtaacagccacattgttgatgtgaactggaatttaagtaaatccgattttaataaaatgatggcgttctggcgggtctaccagaataagccagcttcattttatgcggatctggtgattgatcagggggaacgtcagcaatacctgtgtaacttcattccgaactcgttcaagaccaatgaggtgaatggcaacctttaccgggtaaatgcacaactcgaagttgttcaaaaccagcctaaccttgctgcagatatagcattaattaaagattgggaggtctga

SEQ ID NO: 65058 - DNA, 1104 bp, Acinetobacter baumannii
atgctaaataatgaattaacaacacaagtattttcaattgaaaatgaaatggaaaaacttgatcttgatattgatagaaaagatgaagttttagcaatagttgaaaacttagatctaattaagaacccacaaaaggtacttgagttgggggctaataaccgtgattcgttagctgatctttctaaccaaatgctgtcattagttactaatgatcagttgggagttatgggagaattaatgacggatattactgtaaaattaaaaagaacagacttttccattggtagtgataaatcaaatataccgttgataggggggctgttagcaaaaattggtaattcaaaagacaggcttattactaaatttaagacagtagaatcacaattaaatgataatttattgcaagtagcagaagctcaaaaagggttgcaattaaataatgatagcttgacgaaattatttgagcatacaatttctgtttatactcaactaggttttgctgtcatagctggtcgatataaaaaaaatgagcttattggcttgattgagtcacttaacagtgaaggtacagatctagcaaagcaaagagcaaatgcatattcacaaatcttagagcgtttagataagcgtattacggatctagaattgttgagattaagtgccttacaaacgttgcctcagattacttttttgcagaacaataatattgcgttaattgaaaagttccaaactatatctggcttaactattccagcctggcaaagacaattaatgttggccttgaatattttagatcaaaagaaatactcacaattaggtgaggaaattgataatttcacaaatgaaacacttctagaaagcgcgaaagattttaaagaaacttcaattcatattgcaaaacaaagcaaccgccaagttatagatattgagacacttcagaaggtgcagcttgatacattaactgcttttgaagaagttatggcaatcaacaaaacttcagctcagaagcgaaaagaaacacaattacaggcacaacaattaaatgatcagctcaaaagcctggtcgttgcggatccgcaacaattaaaaatcagtgcagattaa

SEQ ID NO: 65059 - DNA, 1935 bp, Acinetobacter baumannii
atgttgccgacttataaaaatggagcaatgacgacagagctattcccaacatcgagttttgctgatgctttggtatctatggcacttgatgacaagattgggcgccgtacgatcgatgagattgatctggaaaacatttaccggacttataacgatgtagttgattattttggtactccactagcggcagagttctgtaccactattgatgatacaaacctgtcttttgaagagctggttaccaatctttgtgatgccgtattttgtaccgcatatcggcaaaacaataagctcaagctttattttgaacgtccaactgataactcggtaatgctgtttaacttcaggaatatcattccggatagttacaagcatgaccttacctttggcgtgatgaatgactacgatggactgatctatgaatacacggatccgaccgacgatagccgtatcaatatctatttaccggataaaggagccaaaaaccctaaagaagtgaaatctgttggtgttcgaaacaagtggcaagcgcatttcaatgcgtaccggctttggaacaagcttcgcttccagcgcaaatccattacctttgatgcagcacctgaatcagaattattggttttacgtgaccggatcgctgtagctgattatcgcaatggtattcatcaaagcggggaagtggtacagcaagaaggtttaatcctcaccttaagccatgatgtagatttcatagctggcaagagctatgtgatctatctgcaaatgggggatggcacagtggaccttattcctgttaccgctggatctgccaagaacaaggtggttttaggccgtttaccgaacggggccttaaagcttagtcctgatgattttgtgaatactatctatacggtggttaatgacgataccaaaggctcattgccttatctggttgcaaaaagagaaccggctgaccagttctctaatgccattacggcaattaattacgatgaacgttattacctcaatgacaaggactttattgatgtgccagtagatgattcaccgatttacattcgatatgaccagctggatattaatctggcgcgtttatatcagatgcaaagaggtgatttgccaactacaggtgagattagctttgtagttgaagctggtgcgctggtttcaagttcaagttcttatcgacctgaaacaaggatggtttataagtttgactataataatagtcctgcaaaacgagagtatatcgttccggctgcaactgaattaccagcgatagatacaggggagttcccacctgatctggtggtgaatctaacgattaaaggctcagttgttggacgtggtggagatggcgggttgccacatctagcttacggagattgggaaaaagattctgacttcaattttaccaaaacccggcgtgatggttttcagggagcaccaggtttattgaaccggcacagcaaactaaacctgattatcgatggagggacgttagctcgaggcggttcaggtggtggagcaacaccaagtggtatttacactggatcatcttatggggttcagggaattcctggtggtgctggagcaccatttggtcgggtcatgactggacagccgatttcaaatgactcacaagattatcgcctctatctggagagttatttattggttatgaaaatcactgatgctgaagctacagtacccggtaaaggttaccgaacccaaaatgaccgttatgggtctccattatcaggtgatggtggaaactggggcgaacgtggtaccaagtctaccaatgatggaacatggaattggcaataccatggaacgactgaaggtcagccggggccgggcggacctgcaattgttggggtggcaccgctaacaactcaattgattaacggagggaaaatcttacaaaccctttaa

SEQ ID NO: 65060 - DNA, 720 bp, Acinetobacter baumannii
atgtcaaacaaaaaagtcattgcactccgtttgcctgacaaaatgccttctgatctcaaatttaatgaaatggctgaacttttcaagcaattttctcatttacttaaaggagtagatgataaatttggttatgttcaagagggttcagtttacgttggtagttctggtttaagtgctgctgaatgtgaggcagtaattgcaaatattttgaactcggaaggtggggatctcgatctgttcttgaataagcataaggactggggagatgcacaaattggtattcatgatgaaggtgctcacccacaatcaatgcggattcttagaacaatcgaatctattgaaaaacctctaaaattcaaacaaattgatgttctcagaggaacaactaggcactggtcatcgggtaaagatgaaactgatcatattggtattagtttcttagatggaacaaaaataagtgccaagtcatcaaaacttgttacagcaaaattaaataagtattttggtacggatactcttattgatttctctggggaagcaacttattgttatgctgataattttgagcttgaattagtcgattttcgtatagataatgtcgaaatacttgaagatgtttctatagataaatgggttgatgagtttgttggctatggtaaaagtggttggcaggaatttgatgatccatatgaaattttaaaagatgaacggtcaacatga

SEQ ID NO: 65061 - DNA, 447 bp, Acinetobacter baumannii
atgataatagccatagatgcaaacatacttatagctctatttgatgataatcagtttgcatttgccttcaagcaattttgtaaacaacatcaagttgctaaagttattttgcctatgccagctatgtgtgaatttatatcacatgacaatataaaccgttttcaatttgtcaaaagtaaaagtaaaacagttgttctggttgattttgatgagaaatcagctataactacagctagacttgctgaaaaatattatgccaatcgcttggatattgataaacagaaggttaaagttgatcttcaaattttaggtactgctatttccaatagagcacagtttatccttactaaggatacggactttgttaaatatctagaaaggttgaaaccaaatattggtcttaaaacaattaaagatctgatgatagaagcagacctatttagttaa

SEQ ID NO: 65062 - DNA, 711 bp, Acinetobacter baumannii; identical to SEQ ID NO: 56021

SEQ ID NO: 65063 - DNA, 192 bp, Acinetobacter baumannii
atgaagtataagtctgatactattcgagttattactattttcaaaacaatacagaaagatactgaagtatttcttgatcgagttgagtattttctggaaaacattgaaaaccaagaaattaatgaatattggaataatatccgtataacgttcgatgattttttacaaattaaatatgacttcaaacaataa

SEQ ID NO: 65064 - DNA, 1209 bp, Acinetobacter baumannii; identical to SEQ ID NO: 45825

SEQ ID NO: 65065 - DNA, 312 bp, Acinetobacter baumannii
ttgcaatataattacaaatccttatggttaattgctgccatcgctttctttgcaatctttgttttaaatctaccatttccactgatcgttcttacggcaggactgacgggttattttacaagtaagaagtatcctgaactcttttctagcaatgcgggacacaagaaaagccaaaaagattatggtattgctttaatcgatgacgacacactaacaccagatcatgcaaaatttagagggttacatctagttaaaattctgattattgcggcccttctctggtttattcccgtgcttgggcttgaccgctaa

SEQ ID NO: 65066 - DNA, 945 bp, Acinetobacter baumannii
atgtcagatctcgctattacagaaattggacaggaagaaaatacagcttggttttatcgtacagagttcctgaattacggtactatctttaatcatttctattgtccattctgctacattcccttgaaagattataatattagcaaagaaggaaaagttgttcagtcaccgcacttcagatgctttacagaccagcctcatttaaatggatgtgatggcacacctctatcaactacaaacaaagactctaataaaaaaccaaagtctcaatttgaaccaacaacaatgcaatcttacccagaagctctggttgatcgcagaccacctatccaaccaagaccacttactcagccaaacataacatctcgtacaccaacagcagaagaaatacaggctaaacgaaaaaaaatagggaataaaggaaaaaatataccgacatcaagtttattaaaaccatttatcgatgctcgtaatagtctcatgcatgatgcctatacgaaatttccagatccaaaagaacgttcaccttggataaaatcggctttgctaaacatgccattacgtttagatgatcagactacataccaagatgcatttagaaaacctcattttattgattttagaggcagacgacgtatttaccactcatcaggaaaaatcaccctacaacatgataaattcatcattcaaggagttgagtttttcaaaaatgatcaactcaatgtcgagttagtgattgatccttctctagttaatcaagactcgccccaagctcacaagaaactacttgaccaattacaggaactagctgagtcagaaacaatactcgtcgactggtatgcttttggaaaagcaactaaaaataatgaggaacggaactttcatctagaaatagataattttgatcatatatttcttaagaagaaatatatcaagcaccattaa

SEQ ID NO: 65067 - DNA, 1122 bp, Acinetobacter baumannii
atgatgaaaaaacaattactttgctgctgtattgccagtgttttatttctaggtggctgttcaaaaaaagaggaaccgcaaacggcgcaggatgaatatagtgatgtctcaggttcagttgagagtgaggcagaaaccgaaactggagtcctgtcaccagtgatcctttctaaaaccgctgttcaacctttgcctttaattgatggcgatattctgggtaattttccagatgatgattaccgatatgccagtcctgcgagatttccactcaacattgttgaaagacgggatgatcaggatacccattcatttgatcagattgctgcgatattaaaacaaaacctgaaattacgtgacgatcagattttagtgatgggacgtgaaagcgggccgatggaagggatggatcaggtgctgtttgatttaaccaatgatcagctctaccagtttgccaataatctggcgatcaactatatccgcatgttaaaaacaccaatcattaaaccaaaaggtgagtttgaaactacggaacaataccaattacgtgtagagcagacaaaggcagagctggaagcttatcaggttgattatgatgtcaacctattgcagaacgcattaaataaagccatgcgtcggctttatatcaataatggatttgcaaatcctgattatcaatacgatgccgataaagggattctgactttaaagcttgaagagagtgcatcatcccgaagacttgagaccttgttaactctccctatggcagcagcagatgcacaggaactggttaaaggttcgggttgggcgcgagcttatatcatggactttaaacaaaaccacttaaaagtatctggggtattgttctttaagttccgttcccagattacccaacagcaacgggtaggtggtgaatctctcatctatacccaagtttataaaccacttaagtttgaacagaaatcaagtgatacatgggtagagccgaacattgattttgcaacattaccgtttaaggatgtcttgaactcaccagcgaaccagtttgaatttggcttaaagcattatctttcagcagagacttataccaaacagtgggaagcaaagcgtcaacaggctgaatag

SEQ ID NO: 65068 - DNA, 1065 bp, Acinetobacter baumannii
atgagcatattggaacgaatccagcagagtcagtgggtgcagttattacgaggctgtgacaacatttattttgcgccagtcattcccaataaaaaactacaaggtgccatgagctatttacctcatggtgtaagtcccaacgatgtattgatgttgattgatgatacggtatttggtagtgccaaggctgggatgtgcctcactgcaaaggggcttttctataaagagagctttgaagatgaacaagcttatctgtttgaacacatccagcgaatagaggctgatattggaatactcaccagttccattttgatcaatggttgtgatgaactgaactttagtcaacttgataaaggtgttgtaagagcccttgtcgcatttttaaatgaatgttgtcagggtaaacaagcacccaagcaaacgaatgtaaatattgatgcagagatgcagatcatgattgatctgtttgcctacttcattacctttagtgcggggcagtggaatacccgatcgaaagcagcggtattcgatcatttcactaaattgaatgatgaggctgtgcatcagtatgtcgagaaactacttaaggagcaaacgcacttcgactatgaagacttgttgcatcgtctggcagacctgaaagatgaccttgcctataacttccgtagggatatgattgagcaactggtctatgcaatggcactcggtcaagttgagcagaatcaggctgatctgttcatgactcatttatgccgtgtaaccaacgtctctagagccgtctttccagaccttgtcaaaactgtctatcaatgtatggcaggggaaatgaaccagaaaaaagtttctgatctgaccaaggagcaactacaggcttgcaagcttcttgagattcagccggaagcattgagtgaacaaacccttcaagctgcctaccgaaaaaagatggcagactttcaccccgataaataccagagcttacctgaatcagtccgccaattgattgagcaacaggctcaacaactcaatcaggctagagctgtattaaaagcctatctgggagtgtag

SEQ ID NO: 65069 - DNA, 261 bp, Acinetobacter baumannii
atgataaataaaattttgatgggtgtggttggtgtcagttttttgatcatgactggctgttcttccgattttgaaaagggcatgaagcagggatgccacaacatggggggcagccgcagctattgctcttgtgtttatgacaaagtcgaagaacattatggaaaaactgttatgcaccagattgaacgtgtgaactacctacctactgattttgaccgcgtggtgtatcagtccggtgagcaatgcgtagacaagttttag

SEQ ID NO: 65070 - DNA, 1224 bp, Acinetobacter baumannii
atgaaccactgcattactaaaccgaacttagcttccactgctggacaatggtctttagcagacctagaagcacttcaattactcgatcagattcaagaagattatgcttgttatgaggtgaataacgatgaaggtgacgtagttgaatttcgattgccatctcatcctgaaactcagtgttttattggccgcttacagttagggattcattgtcatcagcaacgtcctttagcctcattgcgaacgactaaagacattcagggcaataagaaactatccgttgaatatgccaaagaccttccagttcaagtgatctcagcattgccttccatcttctccatgcccgtgtctgacacctatactgtgagcgtagagttagaaactattcattccgttattcaagacttatcggatacagagagattcgttctaggcacattctcttcaaatagtgtttataccaacgaacaggctcaagcctacgtggatgctttgaatcgatttcagagccttttgaatgagagaatgagcagcgctaaagtccgtaaacgattacataaccgtaaacttagtcgattaaagaccaaagagaaaatgatagagcttgtacatgcccttctccatgtacattccaagatactggtggtccgagtagacctcggtattatgagaagtccagagagtctaataaaccaccatatttcatctgaccaatggaagtctgagcaagatagccaatttcttctaaaagcgcttgagcgactcaatgagaatgcccgaatgaatcggatgaagcatgcgctggggtatatccatcgtattgaatacggccctcagaagggttatcacgtccatgcttattacttctttgatgggcaagaccattgggcagatatcacttggggacaatacattgccaaacaatggcaacatgtgaccaataaccaaggctcagtatttatctgcaatatgaagaaagaagattaccgttattgtgctttagggatgttggattattctaatgtagagatgctaaagaaccttgagcagagttttgattatctctgcaaaaatgatcagtacttccaatttacgacacagaaacgcatccgtggattccgttgtagtgaacttccagaaatcccagaaactaaaatgggatgcccccgaaagcatgatcagtcacatctaaaatatttccacgcacttgatctccgctcataa

SEQ ID NO: 65071 - DNA, 456 bp, Acinetobacter baumannii
atgattttaaaaaaagatatttgtgttttagtactttgttttatgatggtaggtagtgtatatgctatacctaaagatgtagaaatttatgtacgaaacacaaatgcaagttatgtgaatagaggcatgtgttcacttgcttttgatgtcattgcttatgatgctttagataatattgaaagcattgattttacagtgaccatgaaagataaaaacggaaagcttattgatcgtgatcaagttactgcggatgaatttaattttgttggtggtaaaacttacggtagatttttcatcgaaggtgagaaggcttgtgatgcttttggagaaaacctaaatatcagtaaagcaattgttaaacataacgatggtgcaaaatctgaagatatcgttaagactcagaaattaaaagtagatgacttcaaaccgatgaaaatcgttattggtggaaaataa

SEQ ID NO: 65072 - DNA, 936 bp, Acinetobacter baumannii
atgtctatgtcagcaaaagaatccaatcgccgtgacctgttggtccttggcgccggtcaactgggcatggcggtgctgcgtgcgctcgctccgcgcgcggccgagtgccgccaatcggtcacggttgttgtctcaccgcagactgtctccagctcccgccccggcgatatcgaaagtctcggtatcctgcaggcgttgggcgaggaggtcattggcttcgatctggcgggcgatgccgccgccctgcaagccttgtttgagcgctatcgcacggtagtcaattgcaccggctttgtcgctggccccggcacgcagttgaaaatcaccctcgccgcgctagacgccgaggtcgagcgctatttcccgtggcagttcggcgttgactacgatgtggtcggacaaggcagcggccagccggtgttcgacgagcaatacgacgtacgccaactgctgcgcgagcagcagcagaccgagtgggtgatcatctccaccggcatgttcaccagcttcctgttcgagccggcgttcgacgtggtgaaccttgccgccaggactgtccatggcctgggcacctgggacaccagggtcacggtcacgacgccggaagacattggcaggctcaccacggagatactgctggccgagccgcgcatcgccaacgaggtggtgtatgtggccggcgatacgatttcctatggcgagttggccgaggtcgtcgagcgcgtcaccggatatgcgttcgagaagacgctgtggtcgctggataagttgcgcgccgaccttgcattggctcctgatgatgtcatgactcgctaccgggccgccttcgcgctgggtgatgggatgtggtgggacaaggccaacaccttcaatgcaaaacacggcattgaaacagtcgatgtcgcgcattacctgcagcacctgttggaagcctga

SEQ ID NO: 65073 - DNA, 1104 bp, Acinetobacter baumannii
atggatagactgcaagccatggagacttttgtgcgcgtgatcgaggccggcagtttcaagcaggccgccgatacgctgaacgtgcttgcgtcaaccgtcacgcgcaacatcaaggaactggaatcgcacctgggcacgcggctgctcaatcgcacgacgcgcgctgtcagcgccaccgatgcaggtctgcgcttctacgacagttgcaaggcgatcctgcgtgaactgcaggaggccgaggcccaagcttctcaacaagccgaagcgctgcacggcacgatcaagatcggcaccacctcgtcgctggccaggcattgcctgattgcagctttaccagcgttcatgcgccgccacccccgagtcgaactggaactgcatctgtctgacatcacggcagatgtcgttcgacagggactggactgtgtgatccgcaccggcaacctgcgcaactcacagttgatggtccggcgcatcgctcgctttcactggatcgtctgcggcgccccggattacctttcgcagcacggaacgcctgacaacctccaagacttgcaacagcacgtcgcggtgggctaccacggcggccaagctggacgcctggcacattggaatttcctggacggcgcgcagaccactgccattgccatgcgggaatgcatccgcgtcgatgacaccgacgcctacgtggaagccggtatcgccgggctaggcctgatccgcgtggccagctacatggtgcgagatcacttggctgcaggccgactggtccgtgtgctggaggcggcgcatgccgaaccggagccaatttccgttctttacccacacagccggcacctttccccggccgcaaatcaggcccgggaatcaagagcaggcgatccaggccctgataggccgccaccaatgtctcgggttggtcctagtcgcccacgcggcctgcataggctcgatcggtcttgggcgtgcgcgaaatcgccaccagatcttcggtcgcgaccgtttccaccaatgcgtggaccactgcgctaccaagctggccactggcaccgctcacacctattctcatcatcacactccatagttatttattgttcgttaggataa

SEQ ID NO: 65074 - DNA, 363 bp, Acinetobacter baumannii
atggagaatttggaggctgaatgtcgcggcctggcagacgtgattgcacgcatcggcgacaagtggacggtcatggtctgtggccatctgtcagaagacacccaccgtttcaacgcgttgaagcaccgtatccccggcatctctcaccggatgctgaccatcaccctgcgcggactcgaacgcgatggactggtggcgcgcaaggcctatgccaccgtcccgccgaaggtcgagtattgcctgaccccattggggcgaagcctgacagaacctctggcagccctggcaagttgggcgcgagagaaccggccggcccttgaacaagcccgtgccgcatttgatcgtcgtaccgcgcaggactga

SEQ ID NO: 65075 - DNA, 558 bp, Acinetobacter baumannii
atgctcaacgagttgcctgccgaaaaggcctaccgcatcctcgaatccggccctatcgtgctggtcgccacgcgcgatgccgatggccgcgccaacctgatgacgatgggcttccacatgatgatgcagcacgatccgcccctggtcggggtcatcatagggccatgggaccacagccatcacgccctgtcggacacaggcgaatgcgtgctggccgtgcccacggtggatttggccgaggcggtggtggacatcggcaactgctcgggcgagtcgctcgacaagttcgcccatttcggcctgacacccgcatccgcgcaaaccgtggaggcgccactggtgcgcgagtgttgggcgaacctggaatgccgcgtcgccgatgacggctgggcacgccgctacaacctttgggtgctggaggtccagcgtatctggatcgacgccgcgcgcaaggaaacgcgattgatccatcaccagggcgacggccgcttcagcgtggatggcgatacgctcgacctgggctcgcgcatgaccaagtggcgcgacttgatgggatga

SEQ ID NO: 65076 - DNA, 858 bp, Acinetobacter baumannii
atgcaacaacaagcaaacccttccaaagtctggttcatcaccggcgccgcgcgcggcatcggcctgtcgcttgcgcggcaagccttgctccgcggggatgcggtggccgccacatcccgcacgctggccagcctgaatcaggcgtttggggacagcagcgagcggctgcttgcgctggaggtggatctggtcaatgaggccagcgtccaaaccgccatcgacaaggccatcgccaccttcggccgcatcgactgcgtggtcaacaacgccggctacggtcagcagggcaccatcgaggcgctgagcgatgccgaactgcgccgcaatttcgacgtcaacgtgttcgcgccgctgcatgtactgcgccacgtgctgccgcacttgcgcgcccagcgcagcgggcatgtgttcaacgtggcctccatcgtcggcttccagggcggctatgcgggctggggcagctacgttgcctccaagttcgcaatcgctggcctgaccgagaccttggccgccgaactgtccgagctgggtatcaaggccaccgtagtctatcccggcccggtgcgcactggtttcctgtctaaggataccctggtggtggccaagcgttcgatcgctgattacaccgaggcgcagtcctcgctggacctgcacttgaacggcctggacggcaagcaggcaggcgacccagagaaagtggccacgctgatcctgcaagcagcaaccgttgccgagccgccggtgcatctgttcgccggcaagattgccaacacgctggccgagcagaagatgcaggcggttcgcagggatctggacgcatggcgtggcgcatccgatgccactgacttcgcggagtaa

SEQ ID NO: 65077 - DNA, 948 bp, Acinetobacter baumannii
atgtccaatgctcaaccagatctgtcacggcaggtggaaatggccgaattgatcctgcaactggctccgcatgaaggccacacccgctcattgctcgatagcgtgcgcctgatgcgcgccaatcgcccgctgggacgcacacccgtgctctacgagccgagcatcgtcatcgtctgccaaggccacaagcgcggctatcttgccaatcaggtctatcattacgacccccagcactacttggtgctatcggtgccactgccgttttccaccgaaaccgatgcgagtcctgacgagcccctgctggcggtgtccgtgcgtctggacatgactgctgtggccagcctggtcatcgaggtcgatcaacaaaccagcgccgcgtccacagcgcccgccggcatcatctcgacgcccttggacgctacgctggccgacaccaccgtgcgtctgctgcgggccttgcgctcaccactggaagcacgagtgctggggccagccatcgtgcgggaattgtgtttccgtgttctgcttggggaacaaggaggtgccatccgcgcagccctggctagccatggcaacttcgggcgtatcgcgcgggtgctgcggcgcatccataccgactatgcccagccgctggacgtggctgcactggcgcgtgaggcgggcctgagcgtaccggccttccatgcgcacttcaagacggtggccgccacctcgccgatccagtacatcaagtcggtgcgactgcaccaagcaaggctgatgatgattcgcgacaatgttactgcagccggtgctgcagtgcgggtcggctacgaaagcccctctcagttcaaccgcgagttcaaacgtctatttggtcgcagccctagacaggaagcacgtgaaatgcgtaatgccttcgcattgatggaacctgcacaacttaacgaaacctcagcaatgcgctaa

SEQ ID NO: 65078 - DNA, 663 bp, Acinetobacter baumannii
atgaatacttatgacctttcatcatccttcaatgatcctgccgatatagcaaagatattggggcatgcacaccgcttgatgcttctacatcacatctctcaaggggagaattcggtagaacaattagccgaacgttgtggattatctctggcaaacgcttctcagcatctgcaactccttaaacgtggaggttttgtagtgactcggcgtgaaggtaaacatgtcatctacgcgatgggtaatgcgccagtagctgaattgattaccgcgctctggaaattcgttcaatacaaacgcagccaaatcacacaggtcgctattgatagcttgtatgaacgtgagaagctcgaaggtctaacagttgaagctttgctccgtcgactatctgaagaagcggtggtacttctagacgtgcgccccgaccatgaattcatagagggtcaccttcctaacgccatcaatatcccattagatcaactagctagtcgtctagaagagttgaagataggctctcctatagttgcatactgccgggacccttactgcgtactctcctctgaagctgtggctttacttcgcgcacgaggttaccaagcgctgagattgtcaggtggcttccctgcatggcaagctgcaggtttaaacattgatgtagaaagctga

SEQ ID NO: 65079 - DNA, 387 bp, Acinetobacter baumannii
atgtttaaaagtatattattgatcgttctgttctttttctccagaaagggaatggagacattatggataccccacctttattggacttttcctattattttaataattacatttagtcgttttgaatattcagataatattatacgacgtataagtaatgctaaattagtggaagtaaaaggtttgttagttgagcaaagaagctctaaaggcggcggtggattgtatatctatggtaaaacaatttctttacgtgataatggtacacaggtgcaactaaaagtggttgctgcactctctagtctctataagcttgctaataataaaaataaagaaaaaatcattttatttggaagggttcttgaccagtgtttatatccgatttaa

SEQ ID NO: 65080 - DNA, 315 bp, Acinetobacter baumannii
gtgtcatatcaacaaattgtaaatggtatccgcccatatttggcagagcaaatgctgactaatccaatgaataaatggaatctcttcgcccaggagttcttacttcatttagaaagttattatcggataaagaatttagatatgaattgtgttcaatttatattagatcattataaggaaatagaggagcttcaacagcttcgaactagtacgattagtgcggttgtgtacaacttaggtcagcagcttaatgaaatgattgatgattatgaatctgaaaataagtacgagtcttgggggccttcgtttttataa

SEQ ID NO: 65081 - DNA, 342 bp, Acinetobacter baumannii
atgcagttatctatctttgaacattataagcaactgctcaaaaatgcgaagaattataaaataccaccacgggaaaaaacattctttgatacagcaattcgtaaccattacgaaaatccaactacggaactattagagttctttctgaaccccacagaatcgcatgatcttggtgatttattttggaagggtttctgcgatgttttacagcaagaggaaagcctgtgcaaattggacctagataatattgtgaagctggaaagggagtatgttactcatcagggcaatcgtattgatctatggatggaaacagatacctgtttgattttgctagaagcttaa

SEQ ID NO: 65082 - DNA, 918 bp, Acinetobacter baumannii
atgacaggctttagcttaacttatcttgaacatcagacagctccacgttttgagcatgatattcatcaaatgtatcaacggattcgttttaaacaaggcggagattttgactccaaattctggtttgacagtttattcgcttactttcatgactggagtttattatgcatgcggatggagttttattcagggatttggattgaatcttttagacggtgttattttgccagtcgtagtgagcttcctgcgccttacaccaatcagatggactttgagcaatataaagccagactgattgaattgattttaaccaagctagttaagatttttagtttgccagccatattggaagaaattaaaaagaaaaatgatcagcacagaaaaacagtagagaggtatcaggaagattatgatgaagcaacagagcactattataaccttaacaagatcaacctgtttttagggtatcagccagaatatgcgaacaatatttccattatcgagttgaatgagcatatccggagcttgataaaatatctgcataatcccaagtattatccgattgattacctgtttcaatatcagcgggtaattcgtttgccgaataccaatgaatatggcctattattttcaatgacgctgaatggaaatatatattctgatgtgtcggtgatgattcaaatgatcatgcaaagctggatttgggccacacaacggcaggggatgggaatcaatctggaaaccgaggatgctcagaaaaatcatccattggcatttatgtttggagagtttgatgatcaaaatgatctggagtcattactgcaacgagatattgtgagtacgactgaggattcgattaatgtcagagtctggcctgttgcctttaaacactttattgctcgagcacctaaacgttag

SEQ ID NO: 65083 - DNA, 978 bp, Acinetobacter baumannii
atgcaaactgaagcaaagacattgctgcgaattgaaaaatttattatagcaactggagagttaccctttgaccagaggatgaatcctgaaaggctgaaacaagtcattcgggaatgttgtcagatcattcccgcctttaaacagatataccgaaacgatttacactatgctcacttcattaatgagttcaaacggcatgtcgtggactatatagaccggttacgtcagttcaagggatattcattggatgatcttgagaattgtgaagaaggctatgggattattcttgcgctttatcacgtttataacagttttagcttcagtgagaaaaatgcatatagacagcaggagaaacgcaatgcgtatagtttggggcactatgtgaagagtctgattgagcactatagccgtttactgtttgttcgtgttgatttgaagtatgagaagaatcatccgaaggaagtgactatctcagatgtttatgcacatctagcaatattatgtaatcgcctttctaatgctgatggttgttttaagcatttgcagggacatgcctgggctttagaacagggtgagcaggagggcggttaccatattcatttacttctcatctatgattattcgaagcttgacaatgataagcgtcaagggaagcttgttggtgaagagtggattaatattacaggtggttgtggtgcctatttcaatctgcatgatccaaaatatcgagagaaatatattaaaagtggaacggatggtttggggttagtctgccgagaggatcctcaaaaagtgaagaatgcgatcaatgttgctttatatcttgcccgacctagtaagtatctgcaacgattgcgggtcaaggcatctttgtctgcaaataccttcagtaagggactttatgtccgtagttatcgtcgtggtctgaattttgatgttgagtttaatttagatgattataattggaaggggcgttag

SEQ ID NO: 65084 - DNA, 261 bp, Acinetobacter baumannii
atgcttgctgccatatttccaatagttgtgtgcgtaactttagcttacccaatttttaagatcttttcggtaaaaggagtagccttttattcaagatgttcggctgtacgagtagttcaacaggaaggccttagtgggttatttatattattcctactactatctacgattatttatctactttctgtatatatcagatatcaactcatagtaatgctatcaccatacttacccatggcttatgtctgtatagagcaatga

SEQ ID NO: 65085 - DNA, 2283 bp, Acinetobacter baumannii
ttgaagaaagatccggcacgcgaacctatttgtttatataaagagtctgttcaggttgttcgggcagttaataagtttgtggatgatttaagggcgggtagtttaccttgggctgctcaactgggaattaggctgactgggcatgctgagcttgatagaacttatcttccttattttaatgagcttaagtttgaacgtgaaatgtttgatttaacctatcttcaactgggtttaaattggccttattatcaaaagtttttgcaagaagatgccgctaatcagccaggtcgtatgccgcatatcgaacaaatttgggtggatacttcaggattgtcagaactaaagcggcagtggtcgccttcggaatttcaatatgaaaaagcaaggcgattgacgaacttctttactgacttgcaaaaagatccgttatatatcgaggaaaaggataaacagactagtcaggtcgaaaaaactatcaacgatgtttttgcacaatttgacaggctattatcgatacatgaggaagtatatatctttgttattgatatccggttcatacgtatattcaatcaagcagataatcagcctttagagcatttgattgaaaaagtacttaaagatcggcctgctatccagaatgctatttctcaggtggttccaggtttactgcgagcatataccaagcttgaacatgactatcaaaatggtttaaagctgtcatgtattttaatattaagaagtcatactattgagcgggaaggagatactgttgctcgtctactggcattattgaaaaaagattttagtcactatgatcatgttgatgttattaatggaaatgagtttgtaaggatccacggcagtaaatatgctgttggtcgtgtagcaataggaatgcctactcgagttgaaaaatttaagtattgggtactcagctattttattaaaatagatttttttgccaagctcataaaccctaaaggacccttcgaagtcaatgagatcattgactatccaaattggcagcagcctgaagtaaagaagcaagttttgtcttccaagaaaagcctcccacctaaaaaactagtgcaggtattgtatgattggaaaacaccaaaaggaatatgggatgttaaacatttacctaaacgtgtggctgatcgtttgctagttgggcagatttactataaagaattttgtgctgaacatggatcatcaaaacagtgtggagatttgttgttccaaatagaagtatttattgagaccctattgcacaatcgatatccagcctttaatgagatgagatcagcacatcagcctcatttcttgaatactcgagatatacaagcatcagctacacaggttggtcagcagtatttatcgcttgtgcagcaagttacaagtgatcctggcttattagctcagattgaatatctaattcagaactggggtttgcgtacatggtggtttggacaagaatacgctttgatgctgtgggggaacttgttaaaaaaccttaatagcattatgttgaatcagcccgtagatgctactgtattaactcaatggaatagaaacctccagaatgtacagtattatctgttttcaatactggctcaagacaaggacaagcgtgaacttttagaaaaacattattctcagtgtacacggcggcatacggatacaaaagaatatcttaaaggcgtattggaacagaattgttgggcttatcgtattgtcgtggatgctcgctcatcagaaggaagtttttctcagtcacaactatcaaaattatttacagagtttatgcgtttggcaaaacgggctaaaccatgttactggttgcgtggctatataggaatctggcaagagaatagcaggcagggagtaccggaattcaaactagatgctgtattgttctttaatgatcgttgttacgaacagttagaaacggtcgttcatgatctggatcagcgctggaatagttttcttaatgctaaagctgctcagactttaaagcggcaagatcctgaaaatataaagtacaatggggcgattaaaccaaaaatattaatgcattcgattgatgtactgaagacagagatagaagctctaaatacatatcatgtctgtcttgaagcatatgatcgtcaaatgaaaaaaatggtcattgagcatgtcataccgtacttcgcttatcgggatgtctttcaggctccattgagccagcaagtacctaaagcttttattaagggttcgatgctaaaaaataagagtccttaa

SEQ ID NO: 65086 - DNA, 1245 bp, Acinetobacter baumannii
ttgaaacagcaagccaaatctcgtaaacctcaacaacccgaatatatttttcaggttgaaactctttctcatgaggggcggggaattgcgcattatggttctcatccagaccatccggcagataagcatggtaaaaaagtgtttattcgttatgcgttgcctggagaaacagtaaaagcccaaattacgcatgaggctaagcgacttgaagaagctgaaatggtagcgcttttagcagaaccttcagcaaatcgtgtagaggcagtttgtcctcattatggtatttgcggtgggtgtagcatgcagcacatccaccctgatgagcagatctgtttaaagcaaaatgtccttcagtcacacttgcaacactttgctggtattcagcctgaacaatggttagaaccaattcgttctttgcaaagtgattatcgccgtcgtgctcgaataggtgtgcgctatttgccaaaacaggaccgtttgattctaggttttcgtgagcatcatagtaatcgtttaacatctatccatacttgtagcgttttggataaaaagttatcagatagtctgccggaattgcgtaatttactccaaagtctaaaaggcaaagcgcatattggtcatgtagaattagcaaaaggtgattatgaaacatctttattagttcgtcatatcgaaaaactaaacaatgctgatgtcaaccaattaagacaatttgcgttacacaaaggctggcagttgtatttgcaacctaaaggacccgaaagtcttcgtcgtattgatgaagaacaaggagctatgcgattacattatgctttaaatgcatttgatgtaaattttgctttttcgccattggattttacgcaggtcaatgccacagtaaatgaacaaatggtgcagcgggcaacagataatgcaaagcgtaataatctggtgcaggcaagcttcttttcacaagatttaacaaaagatttttcgcatcattcttgggcaaatcaaggatttgatgcattattgattgatcctcctcgtgctggtgcatatgaaattatgcagtatgtaccgaactttggagcaaaaagaatcgtttatgtatcatgtaatccagcaacattagcaagggatgcaggtgttttggttcaacatggttaccagttaaaaaaagcagcggttatggacatgtttacgcacacagaacatgttgaatcgattgctttatttgagaaaattcaagagataaacgattaa

SEQ ID NO: 65087 - DNA, 1407 bp, Acinetobacter baumannii
gtgggtgaaaactttattattatttaccgtttatcaatgcttgatttagttgaaggtggttctactttagaagaagtgattcaacttgctaaagcgattgaaaaagctggggctacgatcattaatacgggtattggctggcatgaagctcgtattccaacaattgccaccaaagttccaagagctgcatttacttgggtcactgaaaaattaaaaggtgaagtttcagttccattaattacatcgaaccgtattaatacaccagaaatggctgaacatgtattagcgtcgggtcatgcggatatggtttcaatggcacgtccaatgcttgcagatcctgattttgttttaaaagcaagtgaaggccgtagcgatgaaattaatacgtgtattggctgtaaccaagcttgtctcgaccacattttctctatgaaaattgcaacatgtttggttaatcctcgagcatgttatgaaacagaactaatctttaaagaagcacaaaatcagaaaaatattgctgtcataggtgcaggaccagcaggtttaagttttgctgtatatgcggcagatcgtggacaccaagttaaaatctttgaagcaagtcatcaaattggtggtcagtttaatatcgctaaaactgtgccaggtaaagaagagttctacgaaacattgcgctatttcaatcgtcaaattgaattacgcccgaacattgaacttgtattaaaccatccagccacttatgaagagctaagccaatcagactttgatgaaatagtagttgcaactggtgtaacacctcgtcaattacaatttgaaggtattgatcatccaaaagtgttgagctacttacaggtgcttaaagagcgtgcaccagtaggtcagcgtgttgccattattggtgcgggtggtattggttttgatacggctgagtacctaacccatgaaggtgaaagtggcagtttaaatccagaaaaattttatgaagagtggggtattgatactcactatgaacatgtcggaggtttaaagcagccaaaagttgaagcttctgaacgagaaatctatttgttgcagcgtaaagtttcctcagtaggtgcgggattgggtaaaacgactggttggattcaccgtaccgggcttaagaacagaaacgtgaaaatgttagcaggtgtgcaatacgacaaagtagatgatcaagggcttcatattactgttgatggcaaaccaacagtgcttgaggttgataatgttgtgatttgcgcgggtcaagaatcatttactgcgatgtatgaccaattaaaagcagatggtaagaatgttcatttgattggtggtgctaaagaagcaggtgagttggatgctaaacgtgctattcgacaaggtgctgaactagcagcggttctttaa

SEQ ID NO: 65088 - DNA, 294 bp, Acinetobacter baumannii
atgggggcacattttagcctgtcttgttttgaaaactttcaattgaccgatattcttcctaaattcgatattcctgttttcgttacaagctctcatcgttcgactagtctttattcaaaagacctttcaaaaccatgtgtttggattttaggcaatgaaggacaaggtgcaagtgattatgctttagaacatgcacaatcagtgactataccgcagccaggtggtcaagagtcattaaatgtagcaattgcaggatcaatttgtttttttgaaatggttcgccaacgccaataa

SEQ ID NO: 65089 - DNA, 810 bp, Acinetobacter baumannii
atgcgtcgtcaaacaattgcgatggcaaaagaacttggtgtagttggtttaatgaacgttcagttcgcagtgaaaggcaacgatatttacgttcttgaagtaaacccacgtgcatcacgtactgttccattcgtatcgaaatgtattggtgaatctttagcaaaagtagctgctcgttgtatggcgggtcaatcacttgagtctcaaggttttactaaagaaattattccaaatcgtttcgcagtaaaagaagcagtattcccatttgcaaaattccctggcgtagacccaatgcttggtcctgagatgaaatctacaggtgaagtaatgggtgttggtcaaacctttggtgaagcattctataaggctgttttaggctcaaatgaccgcttaccaggcttgccaactgaaggtgaagtaaagcatgcgttcttatctgttcgtgagtcagacaagaaatacatcgctgatattgctaagaaattagttgaatatggcttcaaacttgtagcaacaggtggaacatatcaggtacttaaagaagcaggtttagaatgtgaatctgtaaataaagtaactgaaggccgtccacatattgttgaccgcttgaaaaatggtgaaatacaccttattgtcaatactactgaaggcaaacaagctcaatatgactctgcaatgattcgtcgtgctgccctacaaggcaaagtgtattacacaacgactatcaatggcgcagaagcggtttgccaagcctttgctgtgaaattgccaatggatgtataccgcttgcaagatttaactgtaggttaa

SEQ ID NO: 65090 - DNA, 330 bp, Acinetobacter baumannii
atgaaaagatattttatggcattcctctttgcttttttgataactgcagttttttacataagtttaagtttgattaagtctaatcatattgcatatgcaacaggttttgtatttggtttggcgctcacactcatttttcgaaaggaatctaagagttctaaagctgcagagctactaaacaaacatgtaaaagaatgggcagttcgtgaaagtaggcgggcaggtttattggctccagatcatgacacgactagtttagaaaattgcaaaaaacgttttaaagatagtccagtaagtatgaaagttgagtggtcaaaaaaagatgagtaa

SEQ ID NO: 65091 - DNA, 360 bp, Acinetobacter baumannii
atgtgtataagagacagattccatgttgagtgtaaaaaaattggtttaagtcattctttattgaataaaaaattaaaaatcattcgacgtcaaggtggggaaaagattcacctatatggtcgtgttgggcaatggcctttaaaaaaagcaattcaagaagcacatattttgccttggcttcgtcatacaattcaaatattagtcttagataatgttatgcttggggtttttacaccgaaaggattttggttggctcagtctccatattgtgaggaaggagggtggcaaccagatttaatttctcattcttgtaatctggtaaatggcgaatatagttatggcaacagcagtgaattgtaa

SEQ ID NO: 65092 - DNA, 831 bp, Acinetobacter baumannii
atggcaacagcagtgaattgtaatatctgttttattggtggtggtaatatggcccaagcattaattggcgggctcatttcaagaggattaccaccaacacgtattaccgtttcagatcctgtcgaacaaattcgtcaactattgcaagaaaaagaagttcatgtaactcaagataatacggctgctatccagaatgccgatgtagttgttcttgctgtaaaaccacaagttctggcaaatgttctacgtccgttaaaaggtttattatcggataaattggttatttcaattattgccggtgcggaaattaagacaatatcaaatttgattgatagtgaacgtattgtgcgagttatgccaaatacacctgcattagttcaaactggtgctcatggtatttacgcgactgatgtggttggtgcctcggaccgtgaattaacgagtcagattttagcagcaactggtttaacaatttgggtaaactccgaagctcaaattgatgcggtaacggcagtttcaggttcaggcccagcttatttcttctacctcatggaaagtatgattcgtgcaggtaaaaatttaggcttggatgaaaaagttgcaactgctttaactcttcaaacagcattaggtgcagctcaaatggcaattacgagttcaaatactccgtctgagctgcgtaaaaatgtgacgtcaccgaatggtacaacccaagctgcacttgaagtttttgatcgtgcacaaatctctcaaaatattcaatctgcattagctgctgcacagaaacgtagccaagaattggctcaagaactgagtgacagtgcaaaatag

SEQ ID NO: 65093 - DNA, 174 bp, Acinetobacter baumannii
atggaatttattgaagcaatcaacacattgattaaagaaaataaacttaaatttgcaccttgtgaaccattactctacacgggcgatggcgtatttctggactttcctattgcaaaagaatttaagaaatacgcatctatgcgttggtatccaatggtttttagtcctgtttga

SEQ ID NO: 65094 - DNA, 672 bp, Acinetobacter baumannii
atggatattaacgaacttcgcccacacattcaaagccgaatcgcacatgagttcggcaatacttttttagataacctagaattctctataaaaaacaaattattagaaaaagatttctttattcaggaaatctttgattctccagagcttgcgaaacaagaaagtccaaaatatgaaccgggcttgataatggatgctcttaactccacagcgatagagtctggccacaaagccacactgcaagatacaaaacccaaagggcatcaatttgtacaaatgaccactaactcttgtcatgttgttataatgagaagagactcaaagaatactaagaatgctaatttttatattgaacaatccagatcaaatatcggtctaattaaagaccatcaaagtgatctgttgattaaagcgatactcaatgaagaagtagagcttgatgacttactatttgtttgcgtaacaagttattggaattctgattttgaattacttgatctcgatttcataattccacatccaattgaaaacagacctattctacattttagtctagctgaacttaaaaaatctgctttagaaccgatgacggatgttgcagaagaacctatactcgcgatcaagaagcgccttgaacaagctgatgatgattctcgcgcttcaggtgagtaa

SEQ ID NO: 65095 - DNA, 1200 bp, Acinetobacter baumannii
atgttgggtatagataagttcgaaccagaaaggttgaaacttgcccgccaaatgtacgatgacttaagtaaaactgctttggcaacaatgattgatgtagcaccatctactgttacaaagtgggaagatggtactcatagccctcaaccagaggtactaagtaatctagctgaggctttgggtattcctttgcattggtttattcgtaaagttcctaactacggtaatcctctatttttaaatcgtgcaaaaaaacgtgtgcttaaagccccgtgtttcagatcaaatgcaatgctaatgaatttagctgaagtacatgcaattgcagatgagtggatttctttccctaaaattgatttgattgaacctctatccagagaagaatcactatcattagatgaaggaaaaattcagttattagcagagaaattacgtgctcattggggcttagggtcctctcctattccaaatttaatgaaacgtattgaacgtgctggtattgtagttgctagatttgagattggttatgaagagatggatggtacatccgcttggataaatgataagccttatatctttattgctgccgataaacataactactttagaagtaggtttgatttagcacatgaattaggacatatcgtaatgcacaaatatctaacggaggaagataaaaagaattggttcgataaactggaaaaacaggctcattatttcgccaattgttttttatttccaacgaaagcatttattgcagaaacgagaagtcgtatttcactagaatccttgatgttattaaaaaaacgttggggtatctcgttggcagcaatgatatataaagcgaaggatctgaatattatttctgaggatcagtattctaagctttggagaagttatcgttatcgaggttatacaaaaacagaaccttatgatatcgaaactgcccctgaagaacctaatctcctaaaaaacacaatcaagatgctacttgaacaaggaggattcgacaaagctaatattattgataagtttggccttaaaaaacatttagaactgttagctggattacctaaaggcttcctagatgatgattttggtcaaataatcaatataaagtctgctactgtcaaattaagtaaatctgaaaacttaccatcaaacaaagctgctgaaatcattaaattctcacggaactaa

SEQ ID NO: 65096 - DNA, 1101 bp, Acinetobacter baumannii
atggaactacagactaggctggtttttatagacacttgcgcttatgaaagtaaaaattttcaatttggtcagcatgcattgggacgtcttcaagagcttgttgaaaatgaaaaaatccatcttttaatcaccgatgttactagaagtgaaatagaggcacacttacataaaaagtctgatgatgctgcatctaaaattaagcaattaactaaagacgcgatgtttcttagaaatacgcctgagctagactgccatgggatttttactaaagtcgatggtgaagaaatttatagattaattcacaataaatttttagagtttgtggaaaatgagtttgttgaaactattagcgtaggcacagttaatccagaagtggtattttatgcttactttaataatcttccaccatttaataaagaatccaaaaaacatgagtttccagatgcttttgttttagaagctataaaagagattagcgtggcaagaggcctctcaatttatattgtaagttctgatggcgacatggagtctttctgtaatggagtagataactttatatatttaaattcagttgataagctaattgatttgacgcttcgtagtgacactgcatatgaagaaccaactaaatttgctgatgaaatatttgagcaactaaaagaacaaataatagctgatgctttacagactttggagggtagtgagtttagttatgaagaggcagatccttacgatgaggtaatagattctgttaagattgactcgataactattacaaacagaaatttgcaagatgtagacgctgaacatgcggaatatatacttgaattcgaggtaactattaccgctgattatttattccctgattatgaacgttctccatgggactatgaagacaagcattatgcttttgtactaaaaaatgagttaacacttaagcaccaagaaacctatacagcttatgtgacccttgtttatgatgatggattaagagcgaatgcacatattgctgaattgaactttgaagattcatattttgaactaacaaatcactccactgaagttcttcattctaaagagcttgatcttaatggagaatga

SEQ ID NO: 65097 - DNA, 444 bp, Acinetobacter baumannii
gtgtttaatgctgcgtctgagcaacgcccagctttaatgctgcaatatttagaaagctggtatgaggcgagttgtcgagaaccttatcatgatcaacatccacaaacggatataaatgacggtttcacatattacggttattggtcatgggaagcagcagcagtgacatggctgttagaaatagaggatactttataccgtgatcatgagttctacccaagagatttagtggattttgcgcggtcacaatcaaatgtggccccagatgaagaacaaccagaacgtataaaagtaaaaggtggcgaagtttgtattaaaacaggttgttggattactccagctagacccgatacacgactttattttaagcaaggtacggtattgccaatactttcagaaacagactggggtgaagtgtactggtattgggatggtgataattaa

SEQ ID NO: 65098 - DNA, 600 bp, Acinetobacter baumannii
atgtcaataacagtcaatgatcaagaaatagattggcaaagatggctagagctggaaatacatggaaatgatttatatagagattctttacttgacgaagaaatgtatcataaccgatttgatacatttgtgaatggattgtattcggttactgatggttttagtaattataagaatgaaaagaagtttggtggttatattgcagcaggtagaagaagaatcattgatgctctagatttaatgtctttacactattcagcggggggggaggatattggttttattaaagagctttatccttgcttactgcattggactgaagaatatgctgaaaccagtcatttatataatttaagccctgatgccggtgggcattatgtttggcatattagtttaggtacagaaaattattggtatgttgctttacgtttgatctgtttgggtttattgacgggttatgctgatcaaatgtaccggattatgccgattattgactatgttgaagctacaccagaagggcaagagaaagatggtttaattgaacgtttggttgctccctttgtagcagatcgtggcactccacctgatgaagctagatga

SEQ ID NO: 65099 - DNA, 1722 bp, Acinetobacter baumannii
atggcgaacaaaactattgcacaaacagggtcggcaacaagtccaactaccaataagtcgggaacttatgtagaggtgcctttacaggacacaattccaattatttttgtgcccggcattatgggttcaaatatttttaatacagctttaggtaagccagtatggatgattggtaatggtatttctggtcaagtatcaacattgaccaaacagatggggaaaagccctgctgtattacagacagagttagaccctttaaacacaagagtggatacaagcggtgatattgtagttgaccgacgactaaagctaagcgaaaaaacactgcgggaacgttattggggaactgtacattgggatagttatggtggaattctaacttatttacaaatggtattgaataacgttgatttaaatgaaaaaccgatttatgcaacaggtttgggaggaggatatgctgccgttcaacaaatgaaacagcaagaatccgtttatgagtggaaaagtttattaaatcaggctgagccctcaaattggtcccctcaagaatcatttgtgccagttaatcaacaagagatagaacatcttaagaaattccattttcctgtctatgcgatgggttataactggttacagtcgagtgaaaatggtgcagcgattgttgcccaaaaactagataaaataaagcaagagtatggtgcacggttccataagtttattattgtaactcactctatgggtggccttttaacgcgtagattagttcaattacgtagtgccgatattgcgggtgtggtgcatggggtgatgccagctgaaggagcagcagcggcttatcgccgtattgtggcaggctctggcgatgtcggtgctttaccagcctatgtgcttggtaaaaatacagaacatgttactgcggtgcttgcaaatgctccgggtggtttagaactgttaccaagtaaagcctataataatggcaagccatggttgtttttaaatggttcagggttaatgaatggtaaagacctacacactaatgttgttccccttccgaaaagtgacccttatgaagagatttataaagcggatggggtttggtgggaaatggttaaaggagagttgattgatcctgcaaaaaaattaaatccaaaattttcagcgaaaacaaactataatatcaaaattgattttgttaaaaaatttcattcaaaaattaccaataaatatcatccatgtacttatgttaattatggacatgactctaaacatttaagttttggaacactcacatggacattagaccaaccattgagaggtttaacagctgagcaaatgaaaaggttaccaagagcaacagcaaagcaaataggtacatatcgccaaaaaattgttcaagaacaaatgaaaaaaattaaagaaggcaaaggtgcagatgctaacaatcgtgacttagcgcttgagaataatggtatccgctatatctcgttagtaagtggtaatctgggtgtcttttcaatctccaatcaaaacgcagctggagatggcaccgtaccgtaccagtctggttctgctccactaaagcagtctggagttaaacaagtattcaaaatgaaaggttttgatcatcaaggtagttataacaatacacaagttaggcgttctgtactttattctatagtcaaaattattaaggaaaataatatccagccgagatatagataa

SEQ ID NO: 65100 - DNA, 1059 bp, Acinetobacter baumannii
atgaacttattaaagcgcttaaccctttgcttattaacaacagtttcttttagtgcatgttcaaatgttgagaaagaacaagaaggaattaaagtgattgattatagtaatcctaagaaagtatgttttggccgaattgaattaacagtcccgaaagagacccaagttgaatacagtaactttaactacaacggtagtgatatttcagttgatgaaagtataaaaacatacgaagcatatcaaaaactgattaatgacaaaatacagtatttaaagcatgaagctcatgaaacagaaggtgttttattaaaacaagaaatgcaaggtcctgtaaaccaagctggacgttcagttagccatgttattgtttataggccaacagaatatacagtcgagggatatgaaatttatggctatctttatttaagtcctggaagattacttgttctaaaaagtggtgcagataatgatttattgaatgaagctattgaagatataaaacaaacattaaaaaatataaaaattagatcgactaaaggcgaagaacaagctggtttatgttggaaagatttctttattttagatgatatgagtaaaaatattccatttggtggtggatatttacattttaaattccctagttatccgcaagttcgggcagatgtcgaacaccgtgtaacctatgcctcggatttgcacttaattgaactgatgaaaaagaatcagcaagagttacctgccattgtgaaaaccttgatgagtattgagaacctcagagaacataaaaagataataaatggtttggcaggtgaagaagtgctgaatcatatgtctcgacgtggatattttgaaagaggctatgaagtaggagaatggcagtatctaggcacactagataaccataatgatccttatattcagtttagttttgatagtgcagacatggtaagacctgatgaaccactcaattcaacaataagccagaaagaagctcttcgactgaatgattttattttaaacagtatccaaattacaccaaataataaaaaagagaaataa

SEQ ID NO: 65101 - DNA, 495 bp, Acinetobacter baumannii
gtggggattgaccgtattattacggaatccgatattgccaaagcgaccttttataagaatttcccatctaaagaagaactagtattcgcctgcttaaaggaattaaaactcaatattcaaattgctgtggaagaacatatctctgaaaagtcagctccactagaaaaactggaacaactctataattggtatatcgactgggtaaatcaaaatgatgccagaggctgcccatttcataaagcacgcatggatgtaagcgacttatacccatccattctggcggtactggatgagtaccgcaattggttattcgacaccaccacttcgattttgaaagaattagaattggatgaccctatccctctagctcatctatttacctcacttttagatggcatcatcaatagttcagtttgtgaaaaagtcccaattaagcctgagaaaacttgggaatttatccagacattaattgaactagaaaaaaacaagaaataa

SEQ ID NO: 65102 - DNA, 933 bp, Acinetobacter baumannii
atgaaagatttagtcgatttaaaaaataaaattcaggcaaaaacgcttgatttagttaatcagagagaaggggtttctgtatacaaagcggaaacctcacaaggaatagtttttgttaaagcggacatgaaccgaattgctaatgatcggtattgcgaaatattagaagctctaactgaatttgcacttgttcctaaagtattaaataaatttgagtggggtgattgtgcggtagttgtaatgagtacaatcgagggaaatcagatcaattatattttagaacattgctcaagagctgacaaaattttattgttaagaggggctggattaacactcggtaatattcatcaggcgtttaaaccaactcaactattaaagatgaaattctggcaagacagagatactgtattagtaaattcaaatttgtggaatctacatttagatgcaatgatatcaaagtggttgtcgcgagttaaccggtcctcatctgattataatgagttcaaagatcaattggatgagttattgaaatattgtaagaatttgcgtgagcctaagtgtctaaatttattgcattgtgattatacaggacgcaatattttagcggatgaaaataataatatatctggtgttttagatttcgatgctgctcgtattggggatgcagtttatgatctagcaaagctagtatgggttgatatagatttttctgacttagaattacgaaatgcatttttacagggatgggaacttacttatggggaaaaagttcctcaaaaggaatttttatgttatgtgggcattcaatgtcttgccgctattgcttggacagataaaaatccatctattgaaggttctgccctatttagagctacagcaattaagacattaaaagatgcattgagtgagttgcatgtagatttaggtcattag

SEQ ID NO: 65103 - DNA, 864 bp, Acinetobacter baumannii
gtgttgtttaccttgtgtgagcctgtatggttcaagtcttcacgtttaggtcttgaatgtgttgtttatatgggtgctgaagacgttaagcgtcaagcgatgaacgtttaccgtatgcgtttgttgggtgcaacagttgtacctgtgcaaagtggctctaaaacgttaaaagatgccatgaacgaagcaatgcgtgactgggtaaccaacgttgatacaacgtattatgtaattggtacagttgcaggcccgcatccttatcctcaacttgttcgtgacttccagtcgattattggtcgtgaagcacgcaaacagattttggagcaagcgggtcgcttaccagatgcattagttgcctgtgttggtggcggttcaaatgcaatgggcttgttctatccgttcttaaacgatgccagtgtaaaaatgtatggtgttgaagccgctggttttggtattgaaactggtaaacactctgcgcctttaaatgcaggccatgtgggtgtattacatggtaaccgtacttatttaatgagtgatgaacagggccagattattgagacacacagtatctcggcgggccttgattatccgggtgttggtcctgaacatagcttcttgaaagatatgaaacgcgtagaatacgttccaattaacgatacagaggctcttcaaggtttccgtgacttaaccaaaatcgaagggattattcctgcgcttgaaagctcgcacgcgatggcctatgtgtctaagcttgcaccgacgatgtctaaagatcagattattattgcgactgtttcaggccgtggcgataaagacttaatgacagttgcacgcattgatggggtagaaatggtcgagatgtaa

SEQ ID NO: 65104 - DNA, 537 bp, Acinetobacter baumannii
  misc_feature (497)..(506): n is a, c, g, or t
atgtttgaaaaaatacgaagtgatatgaatccgcatcaggcttaccgtatcaaaaaattacaacgtcagttagacatggctgaatcttatgaagagtggaagtcttttgcattaaaactggatgaagaaactggggcgcaagagtggaagtttgataatagttcgccttacttcgatgccgagctcatttcttatcgttacactttactgaaaagataccgtcagcagcaccgcactttagatttgatttatcttttaaaagaagggttgacctacgatattgcaaatattggtcaccctatgttgtttgctgccacacatgtaggcacaaaaaaactaattgaagattatattgaagaagtcagccaaagcttggcttatattgcatctagtgaatgtattacattccaaagaaaagaaaaaatcgaattttttgaaaactgtgaaaaagcatatggacagcctgctcttatgttctcgggcggagcaaccttagnnnnnnnnnnccttaggtctttttcataccggtgtatgtaa

SEQ ID NO: 65105 - DNA, 669 bp, Acinetobacter baumannii
  misc_feature (24)..(33): n is a, c, g, or t
atggagaaaagtgtgacacaagannnnnnnnnntctgtcccggtcattggccaacgttttcgtggcttcttacctgttgttgtcgatgttgaaacggcaggttttaatgcccagacagatgcattgctagaaatcgcatgcattccgattgtgtatgatgcgcagggacaatttgtccctggtcctgcatttcatgcacatattaacccttttgaaggggctaacctcgaccgccgttcgctagacttcattggtattgacccattcaacccaatgcgtattgcaatggctgaagatgaaagaactgctttacgtcgcatttttaaatcggtcaatgaagttcgtaaacagcaacattgtactcatgcagtactcgtaggccacaacgcgcattttgaccttgggtttttacaagcggccattgctcgctcaggcacaaaaaaccaaaacccgttccatagtttttcagtgatggatacggtcactttaagtgcagtaatgtttggacaaactgtacttgcaaaagcatgcattcaagctggaattgagtttgatggtaaagaagcacactctgctttatacgatactcaaaagactgctgaactgttttgctatattttgaacaaactgtctccttacctccttgacagtttggtggcggcttcttaa

SEQ ID NO: 65106 - DNA, 465 bp, Acinetobacter baumannii
atggctgcagtttatgtacccatttttattgctcttggcatcattgctatcttttcaattatttattttagtattttaggaacactttccgggttctcatcgaattctgtaatctttgggatatttatgatgtatgccattattggattatttatttatccattaattgctgcgcgtcttttcattactacatggaacaatactacagttggaaacagtcaatttaaaacagactgtaatcaatggcgttttgcatggattgtagcatcaaactgggtagtaaaaatcttaaccctaggtttaatgtctgcttgggccgctgttcgcattcacaaatatcaggttgaatcaatgagcttaatcttgctagatgatccagataaaatgatgaatctagctcagcaagaacaaagtgctttagctgaagaaatcagtgatatttttgatattgatatctccctataa

SEQ ID NO: 65107 - DNA, 477 bp, Acinetobacter baumannii
atgcaagaccaagctttgccatcattccctcaagatttaaatgaggatcaaagtattacacgtccaccaatttcatactcaggtattcatcattttaaatttcacggtaatgcctcagaatattttggaatttggatcgttaatattcttttaactattattactttaagcttatatgcgccttgggctaaagttcgtcgtttacgttatttctatggaaatacagagttttttgaacgtcgttttgattttactggtattccaaccaagattttgattgggcgtttaattgcattaggaatttacgtagcattttcaatttcatcacagtattcaatgattgcaactgtagttggaatagttgtgttatatatggctgtgccttggctaattcgcgctactttacgttttactgcaagaaatagtaagtatggtaacgcacgcttttattttggtggcactataaaagaacattag

SEQ ID NO: 65108 - DNA, 468 bp, Acinetobacter baumannii
atgagtgattgtaataaagctggtcatcagatagatccattagaactatttgaactttttttctcttcaattacaccggaaatgaccccaatgggtattagaagtcaaggaatgaaggccatacatcatttctggaaacaacggtttctaaatgtatttcggggaataccagaggataaagggcttgatcaattttcagatttaccaattctctggttgtctgcatggaaccatcaacaagaaaaagtggaagagcttgaaaaagaatggcttgagatgaatcaacaacatgaacaggctgttaaggaatgctttgatgttaattccgaaaacaggaagctgcaaaagcggatcaacaaagctaaagaaattgcaaatgaattaatgcaaagcgttgaaaattacaaactaggtgagttgttagaaaaagtacttaatggtgatttggatgaagtcagcaaaacttaa

SEQ ID NO: 65109 - DNA, 162 bp, Acinetobacter baumannii
atgagtaaagttactaagaaaagaaaatgcggatcatgcggtggatattgtggtgggcgaaaaggaagttgcaagtatgccgctaatgaacttaagaagcgtgaagatcaactatgggctttagctgtatgtggttatagaaaaggggccattcatgagtga

SEQ ID NO: 65110 - DNA, 237 bp, Acinetobacter baumannii
atgagtaattttgattcgctactttattcgagaggtaaatactggttgtttgaacattggcaagaggatggcaagaacatttataggaaagccaagtttgaggaaaaagaacaattcttggttggcgcaggcaaggtactaagtgaagaacagttagttgatttagaaagtggcaaaagtatcactatcaaacaagaggatggaacgacactcttctttaagtatgtagatgtttaa

SEQ ID NO: 65111 - DNA, 219 bp, Acinetobacter baumannii
atgattatagtggttatgaaagcacgctttaaattggctcagttgattgaagtgggttgtatggcgcatgcccgtcgtaaattccatgagccgcatgtgacgggtaaaagtctcattgccgaacaagctctgcaattgattcaacagctttaccaaattgaagcagaattaagagagctaccagattgtagtgctgaacaacaccacaagcgaacgtaa

SEQ ID NO: 65112 - DNA, 180 bp, Acinetobacter baumannii
atgcgacaattatatgactgtttgaaagcaagtcaggataaagtaccaaagagttcacctacagcaaaagcagtcaattacagtttaaaacgctggtctgccttaagccgctatcgtgacgataacaatttgcctatttgtaatatttgggtcaaaaatcagatgcgtcgcgggttttag

SEQ ID NO: 65113 - DNA, 507 bp, Acinetobacter baumannii
atgaacctcgatgtagacaaacaggtatggtttagccaaatttatcgttctcaacaaactatgcttttatcatggttcaaatacaaacttcagcaccatcatcagtctgaagacctaagtcaggaagtgttttatcgtgctttaaaaagtgaatattgttttcaaaaaattaaggaaccacaagcatggcttatggggatcgccaagcatgtcatgattgactattggcgccgtcagcatattgaaaatatttacctagatgccctaaagcatcttccagaagaatattatccctctgctgaacatgaagtttatattcaagaaaccctatatcaggttcatttaatattagaaaaactacccaaccgcacggctcaggtctttttgatgtctcagctagatggcatgacttataaagaaattagtgaaaaaataaatatttctgaagccactgtgaaaagagatatgaaacaagcttttttggcttgtatagacctctataattaa

SEQ ID NO: 65114 - DNA, 966 bp, Acinetobacter baumannii
atgtcagctattaataaaattcctcctcatgttttagatgcggccgcagactggttggtaatcctaaattcgggtgaaatgacaacattacagcaacaacaatttgagcaatggaaagccgaaaaaaaagaacaccaattagcactccagcaaatggaaaaatttagccacggtttatcaaaccttacaggtaacttcccttccgaagctttagttcagtctaatcaaaaatttaatcttgctgcaaagcgcaatatgctgttaagcctttcaggtttaatgatcgttggtttgtctgcctatttcataccttgggaaaaatggcaggcggactaccacaccaaagtgggtgaaactaaaaaagtatcgttaaaagatggttcacaacttattatggcaagtaattgctatgtcgatgtaaatttcacaaaagaaacacgtcagataaaactaattgatggcgaaatttatattgagacagcaaaggatgctcaacatcgaccattcattgtcgaaaccaaaaatggttcggtagaagccttaggtactcagttctcagtgagacaagaaaatagcgaacagaccaaagtcaaggtctataaacatgcggtcgctattgaacccgagtacttctctaaacggcaaatattaaaacaaggccagcgtgctttttttgacgaaaaatatatttcaaaatctcttcctctcgataacgatcagccttattggacccaacaacttttggttgtagatcaatggccatttcaaaaagtgctggatgagctatttcgttataaaaaaggtacttaccatctcgatgcacaattgaaaaatataaaaatttctggtgtattttctctaaaaaatcctgagcaaagcttagaaactttggcctatacccatcaacttgaactgaactattacagtccctatttgttaaatattaaaaaaagaaaaaaaatgtga

SEQ ID NO: 65115 - DNA, 2532 bp, Acinetobacter baumannii
atgaaggattatcaagcaaaaagtaaattggctttggctatacgtgcagtgctgttgagtacgccattggtggtcacggcgcttacctcaacgtctatttatgctgcgcaaacttacagtatttcaattcgccagagcgcgcttgatcaggccattaaacaactggcgattcaaacaggcacaaccattagctacgataataccagcctttcaaaaacaaaaagcaaagcgcttcaagggaattacgctattgaagatgctttagatctattattacaaaactatccatttgaagctgttaaagtaaaaaatggtggttacagcatccgggtgaaggctccacctgctccaattgaacccaaagttttccagttagaagccattaaaacaaaagcaaataacaacagtgaacctgatacggcaggcagtgaaacaggtacggcgcatttagcaacaattcatgttaatgctgatcatagtgaaaatttaacaaccgaaggttcaggtttatatacggcgaaggcgaccaccgcttctaatggcttagctttaagtttgcgagaaacacctcagctggtcagcgtaatcactaaccaacaaatgaaagatcagaacctgacccaattaaccgatgttgtcagtcaagcagcaggactctctattaaacaaggcggcaatattggtagtgataactcacctatttacgctcggggcaaagaagtagatagttatttactcgatggcgtgaagctcatgagttcatatgcaagtattttccaaagtcaggatatggctttatttgaccgagtcgaagtcgtgcgcggtgcaaatggcttaatgacaggtgctggcagtgcaagcgcaagtattaatatggtccgaaaaaaaccattacaggactttaaagcgtctgtgagtgctgacattggttcttgggattcttaccgtaccgatattgatgtttccacacctcttaatgagtctggaagtattcatggtcggactcttttttcctaccaaaagtcagactcttatatcgaccgctacagcgaagaacataaagtggcttatgccgtagtagaagcggatttaactgaacaaaccaaagcaagtttgggtgcaagttaccaacaaatcgatttaactggtgtggctagaggtggtttgccaagcttttatacagatggcacaccgattaattggtcccgttcagattcagcggcagcaagttggacgggttcagatcgctcaacgacatcttactttgccgatattgaacacaagtttaatgatcgctggaaattaaaaggtgtggtgtccagaaccattacagattcagatgaaattgtaggctataccttctcaagtaaaggaatcgataaagctactggtagcggggcaatgttgtatgcaacccgttgggactatcgccctactcaagacttattcaatttaaccttaaacggttcatttgatttgtttaatcaaactcatgacgtggtgttaggcacgacttacacaaaaagtaaaaataaacgccctacctattctggctggaataatgggatgacatgggatggaactctaaacaatatttttgcttgggatggcagtacacctaaccgccctgaaacaaaaatagatggttggtacagtggcgatgatcgtagccaatctatttttggtgctgttcgtcttaaagccaccgacaattttgcagtcattttaggtactcgaattgaagactgggaacgcgtaacgggcaaccattcagatgccaataatacgactacctacacaacccaagaagaaagtggcaaggtaattccatatatcggtattacctatgatttcactgacaactggactgcttacgcaagctacaccaatattttttcaccacaagataagaaagccgttacaggcgaatatatagacccattaataggtaatagtactgagctgggtattaagggtgagttttttgataatcagttaaatgtcggagctgctatttatcaaactaaagaagacaatacagcgatcaccttaactaatgtatttgccccagatggttcacaagcctatcgaacagaatctggcaccaaaagtcgcggctttgaaattgaagcgacaggtaaggtgactgatttatggcaaatttcaacaagctttagtcgtaacctatcaaaagatagtcaagacaaccgattaaataccggtgtgccaaataacacagccaagctgtttaccacctataccctaccttatcttgatgaagcgctcaccattggtggtggtgttcgttggcaaagtgaaatttatgaaaaaaatgcagtctctgcaacaggtcgattcactcaagaaagttacgcttttgtcgacttaatggcacgttataaggtcaacaataatcttatgctcaattttaatgttaataatttatttaatgagaaataccatttagccaccacaaatagctattacggcgctccaactaatttccgtgtaggcatgaaatatgagtggtaa

SEQ ID NO: 65116 - DNA, 486 bp, Acinetobacter baumannii; identical to SEQ ID NO: 52858

SEQ ID NO: 65117 - DNA, 387 bp, Acinetobacter baumannii
atgcaccgggaacaggctgactacttgcatttgcgagagttgggcggtttagaattattaaaagctcattatcaccaaacacaattttcaaagcatactcatgaaggatattgtattggtgtcattgaagagggtgctcagtctttttttaggacgggtcaactacatgttgctcctaaaggtgacattattttggttaatgcagatgaaattcacacaggctcatctgctgttgaatcgggctggcgttaccgtgcaatctatcctacacccgaaatgcttgctgaagtaagccaagatttttttgagcaaggccatggggcaccttggtttccgcaagctgtaattcaggacttgggattatctcaacaactctgttttatttga

SEQ ID NO: 65118 - DNA, 420 bp, Acinetobacter baumannii
atgacatcttccaacacatcacgcattgcagtgcaacaaattgatccacatgaattaaaagcatggatcaaagctcaagcattagacttgggttttgctgattgtgtcattgccaaaccagatgctcaagagcaaatgccacgttttttagaataccttgaacgtggttatcatgcagatatgacctatttagaagaaaatctggaaaagcgagcagatccaactttattggtgcctggaacaaaaagtattatttgcgtacgtatgaattatttggtggaatcaccaaaaccacgatatgtacccttcgaaccaaactctgcgattattgcccgttatgctcgtggtcgtgattaccataaggtgatgcgtggcagattaaaaacgttagccttttgcagactcggcacctatttttga

SEQ ID NO: 65119 - DNA, 1173 bp, Acinetobacter baumannii
atgggttattttactgataaagctattgagcaatacgaaaaatctaaactttctggattagataaaacaatttgtttcgaatgtatcaaagataaatatttagctaaattggttatagaaaatgctgtttccaatagatgttcatattgtgaaaaaaaatttagatcgaataaggctgcaaactatgaatttataaagaataaaatttatcaaacaatttatacgtattatggtaatgctcaagacttgaacgtgtccgttgtgaaaggccaatgggttattaaacctacgtcaatagaagatattctcttgggtttaaacccagaatggagcgatagttttactactgatttagcagagagttcagattctgattcatatctagtaagacattcaaatggcaattcgcttgaggttccagaaagtaaaattttaatgtacagctgggattcttttaaaaatcaaatcttgtataaaactagatatttatttttaaatgaacctattgatgagctaggtgataaagagattataccagcaagcttaatgctgaattctttagcagaattatgtatagagtttaatttaattaagagagttaaaaggaatagtattttttatagagttagaagtcattctaaaaatgaatcatttgaagagtttgatcaaatgggtgttgccccccaaaaaagagcaagcgcaggcagaatgaatccagtaggaatcccatatttttatattgctgattcattattaacagccgaattagaagttattaaagatcaagaatattggagctatgcaacgtttaagctaaaaaatgatattgatgtaattgattttagtaacctacctgaagttccaagtatttttgatatagaaaaaaataaaattaggcaaaaaatcattttcatgtacgacctagtcgacgacctctcaaaaccagtcggtccagatgacaatgaacacatcgaatacattcctactcaagtggtctctgagttctttaggtatagatttaaaccggaagttaaaggtataaaatataagagtgttaaaaatccaaaaggtttaaacattgctttttttgaatcggaaaacgaaaaacttaaagatttttttaaattattaaacatcgaaaaaaagtttattactaatccaatgcttctctaa

SEQ ID NO: 65120 - DNA, 375 bp, Acinetobacter baumannii
ttggtcgcaaatggccttcgtaatatctggacctttagtattattttctgtggtcatttcacgaaagatgcagaagtgtttccaaaatctgttttacaagaagaaagccgtggacactggtatatgcgccaaattcgtggttcttctaacttaacaggttcagaagcattccatattttgtctggtcacttaagtcatcaaattgaacatcacttattcccagatattcctgctcgtcgttatcgccaaatggctccaaaagttgaggcggtttgtaagaaatatggcttgaactataacaatgccagctttgttaagcagtttggacaagtggttggacgtattgtgaaatatgcgttcccatttaaaaaataa

SEQ ID NO: 65121 - DNA, 429 bp, Acinetobacter baumannii
atggcaggtatcgcattctctaactcgatggtaggccttgtacactcattaggacatgcattaggtgcagttgctcacctgccccacgggctgtgcatgaacttattcttaccttatgtgcttgagtacaataaacaagtcaatggtcagaaaattggcgagttactattaccacttgcaggtgccgatatttatgcccagactcctgctactcagcgtgcagacagagcaatcgcaactattttagcaatgcgtgatcgtttatttagcttaaccaaattaccacgtaccttacgtgaaacaggtaaagttactgaagcacagcttgatgaagtggcagagaaagcactaaatgatggctcaattatttataatcctaaagaagcaagcttaaaagatctaagagagatcttacaaaaagcttggtaa

SEQ ID NO: 65122 - DNA, 267 bp, Acinetobacter baumannii; identical to SEQ ID NO: 63278

SEQ ID NO: 65123 - DNA, 2232 bp, Acinetobacter baumannii
atgtcattgattagaacacgtaaaaaaattgtttcctctgcaatcgcctcatcgctctcgatgatagcaacaactgcgatggcgcaagaagcagtttcgcaattaccaactatccatactaaagcgactcaagaagaatctttaaaggttgatcaatcagcaaactctaaatttgttgctccccttctagatactcctaaatcagtatcagttatctcaaaacaacttatagaagataccaaagtaacaactttagcagatgcattgcgtactgttcctggcattactttaggtgcaggtgaaggcggtaatccgaatggtgatcgacctttcatccgtggttatagttcagaaagctctatgtatattgatggtatccgcaactctacctcacaaaaccgtgaaatgtttgcggtcgagcaagtagaggtaaccaaaggttctgcatcagcaatgggtggtgcaggttcagttggtggcagcatcaatatgatttccaaggtagctaaaaagggtgattttctagaaggctcagtagccgctggtactgataactaccaacgtatcactttagatggtaataaagactttggaaatggcattgcagcacgtgtagctgttttgggacatcaaaatgaaaaggctgtccaaagtaatggggctgaatataaacgtgttggtattgcaccaagtattacttttggcttagatacaccgacacgtgcaactttgagctactattatttacaaactgatgataaacctgattcaggtattccttattgggattcatctcttggaaaagctcaaggtaaaccggctgaagtcaaacaaggtacatattacggctggaaagatcgagattttcaaaagcaagaaaatcacatcggtacaattaaattagaacacgaccttaccgacaatataactattactaatacggccatgtatgccaaatcaaaaaatgattatgtctggacaaacccagatgactcaaaaggtaatgttggcaaaggtcttgtttggcatcgtttgaactcagctattacagatagtgagacatttaccgatcaattagcacttacaggtaaatttgatactggcttcttaaagcacagatttaatgtaggagcagagtacagcaaacaaaaaactgataaaggcggctataacattattgatgccaaaggtaatgtttctagtactggcttctatagcgattgttcagacttatcaacaaattggtgtacttcgctcaatggtccaactcaaaagccatttgttgaccgtttacaagcacgcccagactttgatgcaactgtagaaagtacttctgtctacttactcgacaatattgagatcacaccaaaatggttattagatcttggcctacgttgggataagtttgaagctgaacaaaacttcttagccacttctagtgcagcggcctatacagcaaaaaatgattcagatttcgtgacctatcaagcgggcattacatttaaaccaacagagaatggctcaatttatacaagctatgcaacctcagctagtccagtcggcttaaatgcaggttggggggataatagcgaaacaattaatgccaataatcaaatgattgatcccgaagaggcacaaacatttgaaatcggtacgaaatgggatttcctagataaccacctaaatttaacagctgctattttccgtactgaaaaacaaaatacacgtgtacaaatcgacccaactacttatgcaaatgtaggtgaaagtaaagttgatggttttgaattaggcttaaatggtgaaattactgataaatggaacatttcagctggctatacttatttagacagtgaactaaccaaaaatggtaaatcttgccgtagcggaaaatgtactgaccaatccatttataatggcaaccaaatgccaaacgtacctaagcaagctgctacgttatggactacctatagagtacttccacaattgacggtaggcgctggcgctgtttactctgacaaagtatatggtgatgtagcaaatactaaatgggttccatcttacgtacgttacgatgcgatggcacgttacaacgtaaataaaaatgttgatcttcaattaaatatcaacaacctatctgataagcgctatttcactaaagcttacgcttctcactatgcaacagaagcagaaggccgtagtgcagttctagcagttaactttaaatactaa

SEQ ID NO: 65124 - DNA, 459 bp, Acinetobacter baumannii
atggcacagcattatgagccagcgaatagtatccgccgatatttatgtgggactcagccggttatttctatgagtctgattgaatgcggagtagatattttcctgcatgccgatatgcaaaaaatccgtgagaaatcgttgaaattaacagatttatttattcaattggtacatcaagaatgttctgaattcggatttgagttaattacgcctttagatcataaccatcgtggtagtcatgttagttatcgtcatgaattcggttatgaaattattcaggcacttattgcacgcggtgtgattggtgattatcgggaacctgcagtcttgagatttggtattacacctttgtatctgggctttgaagatatttggaatgcagtacagcacttaaaagaaaccatgctgaatagtgaatggaaaaacaaacagtatttagttcgtggtgaagtgacctga

SEQ ID NO: 65125 - DNA, 297 bp, Acinetobacter baumannii
  misc_feature (21)..(30): n is a, c, g, or t
ttgatagtactgcttattatnnnnnnnnnngcttattataatccgacaaccaacacgacagggtacaccaccacagatgcagggaatggggctcaatttgttgtaccaaatggtacacctttacctgatgcactttacaataatggacgttggtatacgactacaccaaatgcagatataaacacatataaattatcaggagcacaaattagctcttcaattagtaataacatggggtcagctgttattgatggtgttttaattcaacatttaaagctcaccacaaaaggtctataa

SEQ ID NO: 65126 - DNA, 1797 bp, Acinetobacter baumannii
  misc_feature (1777)..(1786): n is a, c, g, or t
atgactacacttaattatacggtaaggtttcaaaaaaccgttttggcaactttaattgggctttgtataagccaatcgagtttcgctcttgaagaactctctgatgctggtttgagtgaaactactggtgaaggtattgctattttacctcaaaatacttacatggtattgcgcggagctggagcgaacgaaaccaccaatcaaattttaacggatcgtactaaagatacaggttatattaattatgtgcctgttgggcctttaagtatgactgctgcagatacgaataaaaacggtacgatcgactctggggaccgtgcagtaggtaaagctgatatttttctttatggcttagctctttctaaatcagataacgatacaaatacccgtcttgcttctaccgatacagcagctgcaatttcgagttggggtacagctattaatccgtggatttttaaagttgcgacagaaaactctgtgcctaatttcagtgcaacaaattgtagtggagcagctgatccaacttgccaagtaacctatttagctttagaagcgcctttatatgaagtagggacaagagatactgctggacttgatgcctataaacttaaattaggtttatggtcagatatttttgttcgtaatccaaataaaataaatggtgcaacagatcaatttaactatggtgactctaatggtttgatcggcacgagtactgatgcaagccgcgcgaatcgtttacgtctgcaaggtatttggaataattttagtttaaatggtagccgtctacagctcttccaaactttgggtggtgcaacatccgcaaatggtttgagtccattttataacaatactttaggttttgcgggtgttgtacgtttaaatagtggcgatgcaactaatttaagagcaacaattactgcaaataccccaacatctacagtaggaccatgggtaaatcgttatagtactcaatatactggagcgcctagcaataattcccctagttcagattggttatatcgtattcgtagtcaaacgactactattacttcaacaggttcatggactgcaccaactgatagcgctatgaataatgtattacgtttaagtactcgtgaatctggtactggacaggggaatttaattactcccgctattaatggggggcttgcaccaacctttgatgcaaacgaaggtttatatctttataaccctaatattaatcttgtattagggtctttatatcaacctttagttttgagttcagatggtaaaaactttagtttggaactagcgcgtattccgaataaaccagaaatctataagaaaatttatactgactatactggaacagatagtagttacctcggctccacctgtaatgtttaccaatgtggtgccaatgtaaccttaggtggtaaaacctatcaaggttctaacgcaacacatagtagtatctcgattggttctactgtttataatgcaacgactaatactctagaggcatttaaagggaataatgctcaagatgctgtaggtatttcttttgggaaattaccgacaggaactgttactgctacaacacaaactagaaacttctatcaattacaaaatcaagaacgtcgtgtaaacagctatacatgtagtttaatttttacttgttatgattggcaataccgtacggcaacaggctggacaggaaatgctggctcaggcttaagatttgattctcaaggagcaaactgggcgaatattgatagtactgcttattatnnnnnnnnnngcttattataa

SEQ ID NO: 65127 - DNA, 1029 bp, Acinetobacter baumannii; identical to SEQ ID NO: 64084

SEQ ID NO: 65128 - DNA, 1626 bp, Acinetobacter baumannii; identical to SEQ ID NO: 50192

SEQ ID NO: 65129 - DNA, 864 bp, Acinetobacter baumannii
atgcataccaacccatatagcattgaggaaggtagcctaaataatcgccagatttttgagatcatgcgtgaaaaaagctatctggcattacctgtaattaaaaataatcaactcgttaatattattacgcttgatgatttgattcgtaaaaagcgcaaagaaaatccagtttttattatggctggcggttttggcacacgtttgcgtccgcttacagacacatgcccaaaaccaatgttacctgttggtggtaagcctttactagaaaccattatttcaagctttaaaaatcaaggtttttacaaattttatatttctacgcattacttaccagaagtgattaatgagcactttggtaatggtgagaaattaggtgtacaaattcagtacgtacatgaaactgatccgcttggcacaggcggtgcgttgagtctattgcctgcatcagatattacattgccatttattgtgattaatggtgatgtattaacgaatatgaattttgaaaaattattagattttcatgagcagcgccaagcaatcgcaacaatgtgtgtgcgagagttccaatatcaaatcccttatggtgttgtgaactccgaagaaaatgtcattcaaagcatgatagaaaagccaagctatttctttgatatcaatactggtatttatgttatttctcctgagttgttggcacaggtagaagctcaatttattggtatgccaaccattttagaacagcaaatggaaaagcaaaataaagtactgagttacccattgcatgaatattggctcgatattggtcatatggaagactataaccgtgcgcagagagatattattaatttagattttggtaaattctaa

SEQ ID NO: 65130 - DNA, 714 bp, Acinetobacter baumannii
atgcaaaacttagtttttccatcaggattatctatccaaagagcaaaaaaacgcgctaaagaacttgttaaaagtaagcaagcaaaaaaccaaactgatgcacttgatgcaatttctttaaaagaagtgaataagccatgggctctagcaatggctcagcttcaacaaaatctagactcatcaaattatttaatcacacgtattgatattgcaagagtcttagagcaagaacctttattaacagctaatggctttggtcatgctgatacttaccatgaatctttttataaaagacgcacttttcatgattcaaaagcagaatatattcagcattttcacgcaagccaagaaatattaagaaactcaattgatgaatgccaaaggtgctgtatgtacttacaacatttaaaaaagttaaaatccgtccgttataatttggggagttacgggttaaaacatagtgtcgaaagatatcatcgtaagttaaatcaattcaatgatgcgtatgtatctaatggtgcattaatttgtgctgcgattcatatgggtttttcgatcatgcgaaaagatcatttaagccctaatgcttggattttcgctagtgtacaatcagacataatagtatgggaaaggctacttgaagaacaaaaatctttccgtaacttcacacagcagagactttttgagaaagtgaaaaagaatattggactctga

SEQ ID NO: 65131 - DNA, 1596 bp, Acinetobacter baumannii
atgattcatacgagcagagacactcttgcactagatgaatcattttcatttccaaataatcataaagttgctaattcatatacgaaagcaagtgatcaaggccatattgctgcaatgtctgcttcgtatctgaagaagcgtgggcctgttattgtgatgcactcaacaccagcatatgtatggtctctagcaaaaaaaatcaaaaagagtgaagtaaaatctaatactattcatgaagatattgcacttgttcaaaaatacctactgttagaattaggtaaagactttccactaattgaattattagaatatggaataggtattcaccattctggattacccgaagaagttcgccaattaattgaatggttatttgaaaatgaacgcctaaattatcttgtcgctaccactaccattgctcagggtattaatttcccagttagcggagttattttagcttcacatcaatatccatctaaaaataaggcaccagaagatatgccaccagaagatttttggaatattgctggtagagctggccgagtttcacaaggccagttaggtgttattgctctagctgcaaaagatgatgaacgtgcaaacttgcttaaaaatttcatcaataaaaatacaggagatcttaattcagcattaattcagatggcagttacagccaataatgaactcgatgatttaggcagaattgtttacaaatatccagaatggtctagttttttacagtatttagctcatacctatcgtcaaatggataagccagaaggctttattgaccaaattgaacaggtacttcgtggaacattaggttttgaaaaattaagattagcaaacagtaatattgctcgacaattattacagggtattcgccactatacagatacatacttatcagatccgagagcacctcttaaattagtagatagtactggtttctctatacaagggattaggtctgtttttacccataaaggcgacatcaataaaaattcctggaatcatgaaacattattttctgaacaaagcccagtactaaaagacatgatgggagttttattacatgttccagagttaagaaataattttaaagatgtgattggccatggttatgaagaaacggataaattagcttcaattatcaaagactgggtgaacggtaagagtattcctgaaattgcagaaagtcattttagtaaagcaaatgaagatgctgtagattctattactcgttgtggacaacggctatttggtaaagtcacgcaaacaacatcttggggactaagtgctttactggctattacagctagcgaccttccagaagatgagttaaagaaattgggcaacttaccatctcaagtattctatggtgttaacagtgatgaggctatcgtcatgcgtttactaggtattcctcgtactgctgcgaagccattggccaattactgtaaatctgactccaaagaatcactacctgcgcttcgtagccggttaaggaatcttacggattctgattggaatcaagccctaggtgcaaatggccaggtctatagaaaaatctggcatattctagaaggagtctaa

SEQ ID NO: 65132 - DNA, 324 bp, Acinetobacter baumannii
atgaaaaaatttataatttttgcggtcgtcggtttattgattactctattagttgagtcaatatttgataaagtaatgaagagtgatgaggatacaaaatacattgaaaaaataatatctgaggatcctgaattaaagaaggattacggagaggttggaagctatagtgttgtgtctaaaggtaggttttctggttcgcctagtgtacctgcctataaccattataaaatccgtattcagacaaaaaataatagccaagttatatttcttaatatatttaaggatgaatcagggaaattattgaagtatgaatactctgactaa

SEQ ID NO: 65133 - DNA, 366 bp, Acinetobacter baumannii
ttgttagtttctgaatttgctctatctccttttttattggataaatattcaattctagggctaagaggtattattgataccacacaagaaattaaagaagtaaacccaaaaattcagtttctagggctgcttccaaatatggttagtgctaactctgttactcaaaaaacaactttaaatgaattgcagaaacaactgagtcatttaatgcttgataagactgctttcatacctaatcgatctgcaattgctgatgcaagtgaacaacaagttccagtatggaaaattgataaaacgtcagcaaaagatgtagggcgaaaaatcaaaaaaattaatcaattagttttagagaaaatgggggtttaa

SEQ ID NO: 65134 - DNA, 1356 bp, Acinetobacter baumannii
atggcaaatcttgtttttaaatttagttgggatcatcggccgttcccgtataactcggctcagggaaaacggcaattcatgctgccattcgcttcaggtattcctaatctggcaccaaacttttcgcaggtccaaggtactgctgcagtctctcaaggtggtactggggcgacaactgcactagatgctcgaaataatctcggagcagcagaaaaaggggtgaatagtgacattacagagctaaaaggattaaccaaggctattgcaatttctcaaggtggtaccggtgcaacaactccatccgatgctcgaactaacttagggcttggtagtgcctcaactagaaatgttggtactacagctggtaatttgatagaagtgggcagttttggaattggtggagtaggccaaacttttgaaagaaaaatgattacgggagtaaacctagattctgtcgttagctatgtattgttatttccttattctgtcagcagctcacccaatcgaaacatgtttggtgagctagtgttttcgaggggtgattcaggttcagcaaatcaacattcgagaactttagtatcaattcagcaagcatatgatcgtgttacagctcggtttattagtattggtgtaacaactcatatttcaggtatggctgtagttaaatatcaaaatgtagactatgttgccattcgaagaacagcaagttcttcaacatcggcatttagatatttttccggtatttccaatattacatctgataattatttagttactgttcatacagatgacgttgttattgtcagtgagatacctgttgtaattgagcagctaagaacatctgcgaatacttctgtggattccaacggtttcataaaagcagcatcaccagtagttaagctatttaacgaccatatcgagctcaataatgatgcaaaaaaacagccgattgaatttaagagaattgatgttggtgattatttactagaaggttctttaggctttgctcaggaaggctggtatatcgaagtaccgaaagatgcaaacggcaacacaatcgtcgcagtagtgtatgacaccctagaaaatggtgacatctcaattaaaacttacaagcgtaagtttgattttgaacttgctgctgttgtggcagatctcgaaaatccacttgatattccagaaggccgctggattgatatccgtctgcatgaagaacctgaaccagaacctgaggttgaagaaactttgagtgaaacaccagtggatttccagcctactaacttatctcaggcagttgctgcagccatgaatggcgtggaaccgccagaaatctcagacacagacgaaacactttaa

SEQ ID NO: 65135 - DNA, 1404 bp, Acinetobacter baumannii
ttgcacacatttctgcacgcatgtaatgacgatgatgatgactacacagggatagacacaaataaagcttatgtctcagaaagtaattacgcaattgataaagttgataatgcttcatcaattaaagtaatgacttataacatggcaaatgttcaaggaaaaacagcaactgctacagcaatggtattgtttccaaaagcaacacaaccgaaagatggttatcgtgtagtagtatgggaacacggaactgttggggtgggtgatggttgtgctccaagcaaaaatgctattaatccgcggtttaaaatccttgctgagtctttattagcagcaggttatgtgattgtggcaccagattatgagggtttaggcaccccaggggtacatccgtacttaaacttatctagcgaagcaaaatcagcattagctgcagttaaagcagtaaaagagcattatggtgctcagttaaaaggtgattggatgtcgattggtcagtctcaaggtggccatgcatcattggggactgctgaatttgccaatacggatgcgagttataaaggtgcggtagccggagcacctgcttcaagtttgggaacaatcattcaaatttatattgatccgcaatttaatcttgattcaaacggaaaacctaaagaagtaaataaattggatgaaaacttgctgcaagttcgttatgcagtggctaataaattgattacagaagctgaaggtcaggcgatgattgaccaaattgctgatggttatgctgaattattagcatatgcagccttggcaagtgcgggtattaaagcacagcaaccagactatgatttgaaggcaatttttacgtcaggagcgggtgatattgcagaattggcttatggtcgtacaggggatgatggtgcttgtttaagttaccctacacctgataatgcaaatggtttacaagcgaagtttaaggcgggtattttagcttacttggcagatcctacccaccaaattgcacagtatggtattgatctaagtaaatttaaagcggatcaagtcgttcaaaactttttgacagcaactcaacctgcaacaaatgctacagccgagaaagttattaaaacaccagtatttattattcagggcgaaaaagatcaagcagtattaccagtagtaacacaaggcttatttgccaatatgaaagcgaatgctttgaagtttttccctcaagcaggctacgataaaggctatcaattaacaattgtaccaaatgcaactcatactcaagcaatcgtatgtcaaaatgccaatgctgtagattttattcaagctaaaatgtcagcgggtacaggtattgtgttaactgatgcgcagaaagatgccagccaaagccctcactgtacaggtaaattttaa

SEQ ID NO: 65136 - DNA, 1341 bp, Acinetobacter baumannii; identical to SEQ ID NO: 46048

SEQ ID NO: 65137 - DNA, 1341 bp, Acinetobacter baumannii
atggcagttactgataaacatccgcagtatattgctgcacaaaaaagctggttaattatgcgggatgccgtagctggcgaagagcagattaaacaggcacagaccaaatacctttctaaatcagctgggatgatcgaggcagaaaagcagggcgatacagctggagcgatttacaaagcgtatctaagccgtgctcaatatcctctttgggtccaagatgcattacgtacaatgattgggttggtttcaaagcttgaacctaacatcgtaattgaaagttctcttttaaagggattaatagagaacgccacaaatgacggatttgggcttaaacagctctttattcgtatttgttcagagttgctagagtttgggcgctgtggattgctggtcgacgttgatgctaacggggtgccatattttgcgctttatgatgctttatcaattattaactggaaggaaaacagtattggtggccgtaaggatctcaaactgttagtgctcgaggagcaattcgataatagcgaagatgaatttggccatgatacgaaaacggtccatcgtgttctatcaatggttgatggatccttagcagtccgattgtttgatggttcaaatgtggaggataaaactcccgatctcggcggtaatcaactttccttcacaccatttgttttttgcggtgccactagtaattccccggatgtaggtaccgtaccgcttttgacaatggctaaagctgctctaaagtattaccaacttagtgcagattattaccagtctcttcaccatacagctcatccgcagccttggattaatggtcttgaaggagatgaagatattagtgtcactggtgttatggctgtctggagtcttccgggtgattcacagtgcggttatctggaaatatctggcagtgggattgaactcactaaaaacgaaatggatgcacaaaaaaatgcagcattagaagctggtgccaaggtggttgatactaatacacaggaatcaggtgaggcacgccgtgcacgacaggatgaccagcaggcaagtcttcacagtatcgtaatgtgtgcagctgcagcaattgaacaggccattaagtatgcagcgcagtggttaaagctggattcaacaaaatattcatttacggttgagcctgagtttattgtgcaggtcacggatattaatcttgcaaaacagctttatgaaggtgccatttcagggaaaaattctttccgcacatattgggaatacctgatgacaggtaaattaccggctcatgattttcaggaagagttgaagcgtgttgaaagtgagcgagatagtttgccgctttag

SEQ ID NO: 65138 - DNA, 1335 bp, Acinetobacter baumannii
gtgcattattcattaaaaaaacgactgatttggggcacctcaattttcagtgtcatcttaggttgtattttaatttttagtgcttataaggttgcacttcaagaagtcgatgaaattctagatactcaaatgaagtatttagcggaaagaacagctgagcaccctttaaaaactgtaagcagtaagttcgattttcataaaacttaccacgaagaagatctgtttatcgatatctgggcttataaggatcaggcccatttgtctcatcatttacatttgctggttccacctgttgagcaagcgggattttattctcataaaaccgctcaaggtatagtcagaacttatgttttacctttaaaggattaccagattcaggtcagtcagcaagagagggttcgtgaagctttcgcttgggagcttgcgggcagtatgtttattccgtatttaattattttaccttttgcaatatttgccttagcagccattattcgtcgtggtttaaaaccaatagatgattttaaaaatgagttaaaagaacgcgattccgaagaactcaccccaattgaagtacatgattatcctcaagagcttttacctactattgacgaaatgaaccgtctttttgagcgcatttctaaagcgcaaaatgaacagaagcaatttattgccgatgctgctcatgaattacgaacacctgtgactgcattgaacttacaaaccaagattttgctaagccagtttcctgagcatgaatcattgcaaaacttaagcaagggtttggcgcgtattcagcatttggtgactcagcttttagcattggcaaagcaagatgtaactttaagtatggtcgagcctactggttattttcaactcaatgatgtggcattaaattgtgtggagcagttggtcaacttggctatgcaaaaagaaatcgatttaggttttgttagaaatgaacccatcgaaatgcatagtattgaacctactgtacattcgattatttttaatttaattgataatgcaattaagtacaccccgcatcagggtgttattaatatttcagtttataccgatccagatcactacgcatgtattcaaattgaagatagcggtgcaggaatagaccctgaaaattacgataaagtccttaagcgtttttatcgcgtgcatcaccatcttgaggtgggaagtggcctaggtttatctattgtagatcgtgcaactcaaaggcttggtgggactttaactctcgataagagcttagagcttggcggtctttctgtattagtgaaattgcctaaagtcttacatttacatgaaacaagagcgtga

SEQ ID NO: 65139 - DNA, 1644 bp, Acinetobacter baumannii
atgtctgagcataattcgattcaatttgatccaacagcgttactcatcattaaaaatgaaattgataattcaataaaactggtggaaggcgctgtaagtaccttaattgaagaacaggctctcccttttggtattgatgatgcattagaacaatttaaacaatgtactcaagtcttacgtctcattgatattccgtatttggcaaaaatcactcaatattcaaccgagttgatgcaaaagattatggcgaatccagagcgcatcaataccgatgacgttgttgctttaagtgaaggcacaaccatggttaaacgttatattgagttcatctgtttacgtgaagtcgaagtacctcagtttcttttagacaccttaaataatttagaaaaagctttaaataagccactaacctcttctggacaacagattgcatcaaagctttcaacagcttcacttgagttaccgttacccgaagtgcttattaatgaaagaactcagtttatccatcagctttataaattatcactacatcaatttttaaataaaactgaaaatgctcgagactttcaagcatttaaactgattggcggttatttagtgagtatggctcaaggtcaaccaagccagcaatactggcaattggtgaactctgcctttagtcatattgatgaacttgttttaaatgatgctcgcctacgtgtgttcattaaccttgaaaatgccataagtttatttttagcttcacctgaaggctttgaagcaaacttaactgctctagcagatatcctgagtattgtgattggacaagaagaccaacttgcgcagcaaatccgtagtcagttaaacattggtcatgagtttctcaccgacactcaacttaaagcactgagccaacacttgtatggtccagactttgataccatgcaaacggtaagtcaattaatcttaagcgaaatgaataaagttcgtaatgatattgaatataactaccaaaacatgtcaccagaaaaagctcagcaactacaaagcaatcttatgcagcttgctcatacttttaaattactcaacttaaatgaagctgcttcagagctttctcaacaagccagcagtttaagccaaatcaatatattgagtaatgaaaactatgctcagcagttgatgaaaagcattttatctgccatgaatgccattggtattttggtgcgccattattcatctaaccgtctacaaattcgtgtgaacaataccaatatctctctagatcgtttagatgaagcacatcagacattattgaatgagaccaaaaatttaatcgattttgtatgccaaagtttgactctctatgccaacgatcaaactcaaaatattgaagcaattgcaggctctttaaaagagttggctggcgcggctgaatttttaggaagtacagttcaacaaaatgctttacttgaaactgccaagtttgtacaacagcaaatcgatcaaaatcagcctttcaatcatgatcagattcactgtatttttaacgttttagctgggctagatatgttagttgacaatttaaaaaataaacagcctgttctacaatccatgtttgatgtagcattgctaagtagtcaacaacttcaaaaaaaggcagcttaa

SEQ ID NO: 65140 - DNA, 459 bp, Acinetobacter baumannii; identical to SEQ ID NO: 46717

SEQ ID NO: 65141 - DNA, 300 bp, Acinetobacter baumannii; identical to SEQ ID NO: 45476

SEQ ID NO: 65142 - DNA, 516 bp, Acinetobacter baumannii
atggctttaaaagtcggaattattaaaagctcagacgtatcaaaatggtgtgaatacaagggtgctgatggagaggtacaggcagaatttaaagtccgtggtatcgcttataagccttttcaggtagctattgaacgagcaggaaatcagatctcgtctaaaggctatgatgtgatggtcaaagatgaaaatgccaagctttaccatgaattgttaatggatgcttgcgccgcccacttaatcgaagactggaaaggtgtggtatttgccgaagtagtggatggtaaaactattgagtctgaaaagccatatacacctgagaatgcctcaaagcttcttaatcttggtgatattggtatttcgatctggctatttattaaagaacaggcccagaagattcaggaagacgcagacaaggacaaggctttaattctgggaaagtcatcgagctctataagtaccaaaagacctatacgtcaaaaacgccgcacgaaatcgaacaaatcaagttcttag

SEQ ID NO: 65143 - DNA, 246 bp, Acinetobacter baumannii
atggcaggcaaaccttttatttataaagggcaactggttcgaccaagccaagattctttaaaacgttatggcggcaatatcgaattaaaagcgattactcagcttagtccagcagcttatgaagaaaaattactagaagtagttttaccagactggaatccggctgatgatggttgccataccattaatgtcgaagataatttcgtggtacttgatgccatccgccttacaccaaaaaataattaa

SEQ ID NO: 65144 - DNA, 288 bp, Acinetobacter baumannii
atgaatatattcaaacaaaaaattcagccagattggtggacaaaaactttcatagggttattccttggattgagttttgctatagcaattggcgccttagttttcttactcacactaccatatatagaccgctctctgtcaggccagcttgcaatgtggacgattccttgggtttggttatttgtattttttattgcctattttattcctaaaggttggcaaagtttactaatctttagcattgccaatatcgctgcttatgtaatgctattcgggttaaggggttaa

SEQ ID NO: 65145 - DNA, 255 bp, Acinetobacter baumannii
ttggcaaacggctttagtgagttaaatgatccgattgatcaagctgaacgtttccaagcgcaagttgctgaaaaagatgctggtgatgatgaagcaatgcattacgatgcagagtttgttgaagcacttgaatatggtttacctccaacagcgggtgaaggtattggtattgaccgtttggttatgctttttgcagatgcaccaagtattcgtgatgtgattttgttcccgcatatgcgtcgtaaagaaggttaa

SEQ ID NO: 65146 - DNA, 828 bp, Acinetobacter baumannii
ttgagagatgctagagtcctgcctcaacaggttgaccagattattatggtaggtggtgcgacacgtattccagttgttcgcaaattagtaacaaaattatttggtcgttttccatcgacaagtgtccaacctgatgaagcaattgtacgtggtgcgtgtgtgcaagcaggtttaaaagcaaaagatgtatctttaaaagaaattgttttaacagatgtttgcccatttagtttagggattgcagtggaaaatgatgagcagttttcacctatcttagagcgcaatattgtaattcctgccagtaaggtaaatacgtatactgcgatgaataaagggcagagagaaattattgttaagatttatcagggcgaacatcgactgtgtaaagaaaacatttttttaggtgagctcaatgtgcctttacctccaaataatgactatttatctattgaggtgcgattctcttataatccaaatggtattttagaagttgatatagaagttccaagcacaggagaaaagctccaaaaagtgattgttaatcatcaaaatgtaatgagtacggaacaaatagagcaggcccgtcaacagttgcaggaattgaaaatacatcctcgtgatactttaatgaataagagcttattattacgagcagagcgtttatttagtgaatatacaggagatctacgtttacagattggagagagaacacaacaatttaattatattctaaatctgcaagatccaagacaaatacgtgaggcacaacaacatttcgaagcttttcttaatgaaattgaagatttaagtttgtttgaagagtattaa

SEQ ID NO: 65147 - DNA, 846 bp, Acinetobacter baumannii
  misc_feature (831)..(840): n is a, c, g, or t
atgatagatactaaacctcttatagcaattgatcttggaaccagtaactcactagttggtatttttgaaaatggtcagtccaaacttattaataatccttatggtatgaaaactacgccctcagctattgcattggatgagcaagggcaaatcttaattggacaagctgcattagagttaagaagtcgtggtaaagaggtattaactagttttaagcggttaatgggtacctcaaaaagattaaaattaggtcagcagagcttttcagcagttgaattgtcttcattgatattaaaatctcttaaacaggatgtggagcaggctttgcaatgtgaagtagaggaagccgtgattacggtgcctgcttactttaacgatatccaacgtcaagccactatatctgctgcagaacttgcgggtttaaaagttagtcgactcattaatgaacctactgcagctgctctagcatatggtttagggcaaacgcaggatagttgtttcctgatttttgatttaggagggggaacctttgatgtctcaattgttgagttgtttgatggcatcactgaggtgcgagctagtgcaggagataactatttaggtggagatgactttgttcagttgttaatgaaacaatactggaaacagcatgcaactatttttggctatactgaaaatactattccatttgatattgaaacagcattaagagctagagcacaacatagtcttcatgttttaagtaaagaagcgaaaacagatttaatatttaaatgggaagataaggaggccaccctagaaattactcaagaagaattcgcagtatgggcnnnnnnnnnngtatga

SEQ ID NO: 65148 - DNA, 678 bp, Acinetobacter baumannii
ttgttcatacaaggtcataaagttcgaaagaacacaccacgtttagcagaagccaaaggtgaacgagaaggtagagctggtcaaggtaaatctttatctctgcttattttgggggattctgccgcagcaggtgttggtgtagaaaatcagaaagatgctttgtctggtgctattattcaagaactgcaaaatgaattttccctacagtggaaacttcatgctaaaactggcgatacaactcgacaagtttttaatgctttgcagcatttagaagagcagaagtatgatgtgattgtgacatctattggtgtaaatgatgtcacaaagttgatctctgctaaatcatggattaaacaacagaagcaattatttgagcatatacagaaacgttttcagccaaagttgattatcgtttccggtgtgcctccaatgcaacatttcccggctttaccgaatccactagcttggttgtttgggcaatatgcagtgcaaatgaatcaaaaattacaacaatggttagcaccacaaagccattttaagtttcttgaatatgatattgaaacttttcaagccatgaacttgcctatggcaagtgacggttttcatccaagtaaagaagtttacgcagtttggggacggcaggttgcagccatagtgcggcaatcatttaactcatag

SEQ ID NO: 65149 - DNA, 534 bp, Acinetobacter baumannii
ttggtgcaaggtcaaatttatgtcgatgttgccaaagataagactagaccctttttagtcaaaaccagtcatggacaaattcaggcactcggcacagcttttagcgtaacctatgacccttcggcaaccgaactcaacatgttgcactcaaaggtaaaagtagaagccacacaggctaaaacgacccaattgcacgcgactcgtcaggctattgttgaagcaggacaagccattaaaatggaccaaaatggcgtacaaaaactgcctgcactgaatgtttataacgaacagcaaaaatggcaaaagcatcagcttatggtggaaaacttgccgctgaatcaagtgctacaagagctagaccgtaactacaaaggcaaaattatttttaatgatgtggcgttgcaacatgtgcgggtcaatgcggtgttgcctttagaccaaaccacagaatcgcttaagcttttggctacggtttttccagagctgaaaattaagcaaatcacgccgtttgtggtcatggtttctttaaaataa

SEQ ID NO: 65150 - DNA, 426 bp, Acinetobacter baumannii
  misc_feature (34)..(43): n is a, c, g, or t
atggcggtatggctcgtcacggcggtggtgcatnnnnnnnnnngtgcattctctggtaaagatccatctaaagtagaccgctcagctgcgtatgctggtcgttatgtagctaaaaatattgttgctgctggtcttgcggacaaatgtgaaattcaggtgagttatgcaattggtgttgcagagccaacgtctatttcaatcaatacttttggtactgcaaaagtttctgatgagttaattatccagttagtacgtgaacatttcgatttacgtccgtttggtattactcgcatgcttaacttaattcaacctatgtataaacaaacagctgcttacggccactttggtcgtgaaggttcagatactgcatttacatgggaaaaaactgataaagttgaagcacttaaagatgccgcaggcctttaa

SEQ ID NO: 65151 - DNA, 390 bp, Acinetobacter baumannii
atgaaatataaagggataatttctttatcattattaatgagtattactttgcagcaagccaaagctgaaagcgaagataactcggtgctaaatgaaaaaataattaaattacaacagcaaatagattatctcatggagaggcagaacttaaatcaaaataacagattgaataaagcacctgaattgagtccaaacaaaacatcaaacactgataagcctgtttcggctgatcagactaaaattaaattttatggaaatatacgggttgatgctgcatatgattttgaaggttcaacgcgttcaattgcgaataaaacagggtcaataccattagacaattcaaactcaacaagtaaatcatatgcagcatcaacccgtatatttccatag

SEQ ID NO: 65152 - DNA, 744 bp, Acinetobacter baumannii
ttgtctggtacaacaggccataataacaatatcaactttggtttaggggcaacctccaatcgctatgatgacaataccaatacttcatacaatgccaatgtaaattatttattgccttatatgaacttaggggcgacggtctatcacaataaccaaaatacccaatattcactttcaacacagggtgcaattgtcgcacatcgttatggtattacagcgaccaatactgcagcagatacttatactattattcatgttgatcatggtgctggagcaagcattgacaatgcatggggggtaaaacttgaccgttggggcaatgcaatttatccaaatgcttcagcctattcaatcaatacaatttcgattaatcctgatcagttgccgccagaaattactttggatggtaaccaaactcaagttattccacgtatgtatagttcaactcttgcgacttttaaagcgaatcaacaaagcaatattttaatgcgtattcatagtaaaaaaatgcaacagtttcctatggggagccgtattgaaacattaagtggtcagttggttggtttaatgggacaatcgaaccaatctttacttacccatgatattcgtgattttaaagagcctttaaaagtgatgtggggtgatcaattaaaacaaagctgtaatattcctctaacagaatttagttcaatggttaagaaaaagaatagcccattagatattgtaaatgtggagtgccattaa

SEQ ID NO: 65153 - DNA, 807 bp, Acinetobacter baumannii
atgcatcctgcatgggtcgatccaaatagcgaatatgaagatgtggaaacacccgtagttgaagtacaccgtttaaatcgactgaatttgcatatttttcttccagaagatttattacatgtttggaatgatgagcaaagtaatgatctgattttagagttttttactgagattggtattatttcccaaaaagttcatatcgaatatcactttttgggtgagcgtgtagcttatcaagaatttattcatttattaaaacgcattcaaaagaaagagcatgaggtatttctcatgctggctgtcgattcagagattgatcaagatcttattgatgaaaaatcatggatggtcaaagattatattccggctgaatttgctgcaagctgcctccttgcggacccatcattaaaaatcgaagaactcgaaccggctaaaaacttaaaaattgtggtgggccaagaaaaagcagccaaagttcttcatacgctgaacttaaatgaattaccgcagtatgagggagatgagccatacgtacttattctttcagaccagacagatataaaaacagcgaagcaattacagcagcagtttgcacaaacatctgttgaaccacatcactatatttatgtgaaatcttcattggggcatacccagcatttagttgatatttatggctttatgcttagtatgcattttcctgaacatatcgttccttttgtctttggagaaaatacagtgtcagcacatacatttgtgcagagtgtcactgaaaattcagaagatgatgcgatggtgttgaatagctaa

SEQ ID NO: 65154 - DNA, 681 bp, Acinetobacter baumannii
atgtttacaacacttcctaagaagatacttctactgctttttatcttcgctttaaatgctggattgcttaatagtcttactttaattactttttttcaccaacctgtcactcatatgacaggtaatgtaagtttgcttgcaactgacttatattttgctagttactcacatttaattttcctaatattcgtaatcatcgcatttatgatggggacaattttaagcggcttcatacttggtacctctgattttaaacttgaagctaattatggataccttctttccgttgaattaacatgtgttatctgctgtcttatctctgctatgcttgatctttcatctctagtgataatttttgcaacactgagcgcaggtatccaaaactctttactcagttcttataaaggtattaatatccgcaccactcatcttacaggagtcttcacagaccttggattagctataggcctaaaactcagaagagttaatgttcctatacaaaggtttactcttaatttagcaatattagctggtttcattacaggttgtttgctttcaattcctctacttaagtacctatctcaccttgcattcataggaccaacaatattgatattatttttatgctctagttactggtttaaatttttttcacattcaacagatcagacgaataaatag

SEQ ID NO: 65155 - DNA, 1011 bp, Acinetobacter baumannii
atgattgttttaggcttggaaacttcttgtgatgaaacagggttggcactttatgatagcgaactcggcttacggggacaggttctttatagccagataaaacttcatgccgaatatggtggtgtggttccagagttagcttctcgtgaccatgttcgtaagcttattcctttaatgaatcagctgcttgaacaaagtggtgttaagaaacaggaaattgatgcagtcgcatatacgcgtggcccgggtttaatgggagcgttaatgaccggagccttgtttggaagaactttagcattttcacttaataaaccggcaattggtgttcaccacatggaaggccatatgttggctcctttgctttcaagccaaccgcctgagtttccatttgttgcattgcttgtttcaggtggtcatacacaattgatggcagctcatggtattggtcaatatgagctattaggtgagtcaattgatgatgcggcaggtgaagctttcgacaaagtcgcaaaaatgatgaatctgccatatccgggtggaccaaatattgctaagttggcgttatctggtgatcctttagcatttgaatttccacgcccaatgcttcatcagggcttagacttttcttttagtggtttaaagacggcagtttctgttcagttgaaaaaattgaacggcgaaaaccgtgatgctgatattgctgcttcattccaagaagccattgtagataccttagtaaaaaaatctgtaaaagctttaaagcagactgggcttaagcgtttagtaattgctggtggggtaagtgcaaatttacgattacgtgaacagttggaaacttcattggcgaaaattaaagctcaggtttactatgcagaacctgctttatgtactgataatggtgcaatgattgcatttgcaggttatcagcgtttaaaagcaggtcagcatgatggtttagctgtcactactacaccacgttggccaatgactgaacttactattcctgagtaa

SEQ ID NO: 65156 - DNA, 1209 bp, Acinetobacter baumannii; identical to SEQ ID NO: 50799

SEQ ID NO: 65157 - DNA, 951 bp, Acinetobacter baumannii
atgggcgacacaaaaattgctgatgtaatcgtacccgagttattcactccgtacgtattaaataaaactgctgaaaagtctgcattatggcagtctggcattgttggggatttagatgtagatgtagctttcggaacagagggtggtacaactgtaaatatcccattctggaatgatttaagcggtgagtcagaagtactttcagattcaaaacctttatctgtaaataacatcacttcaggcaaggacattgcgattcttcatgcacgtggtaaagcatggggcgctaatgatttggctaaagcattatctggtgacgatccacttggtgcggttggtgatctggtggcagattactggtcgcgtgagtttcaaggttttaccgtaaatacccttaaaggtgtattcggggcggccagcatggcaggtaatacccatgatatttcggctggaactggagctgcagctgtaattgatggggtatcttttgttgatgcttcttataagttgggtgatgccgtagataaattaacggcaattgcaatgcactcggcaaccatgtcggctttagctaagcaaggcttaatcgaaactgttcgagatgctgatggtgtggttctctacaaaacctttatggaccgtcgtgtgatcgttgatgatggtatgccggttgaaggtgatgtctttacctctttcttgtttggccaaggtgcgattggtttccaagatattggagcaccggttggtgtagagactgaccgtgatagtttagcgggtactgacattcttattaaccgccgtcactttgtattgcaccctcgtggcattaaatgggcaggtgcgacaggtatcgcacctaataatgccggtcttgctacagctgataactgggaacgtgtctacgatcctaaacagatccgtattgtggcatttaagcacaagatcaaataa

SEQ ID NO: 65158 - DNA, 951 bp, Acinetobacter baumannii
atggctgagacaaaaattgctgatgtaatcgtacctgagttatttactccgtacgtattaaataagactgccgagaagtctgcattatggcagtcaggcattgttggggagcttgatgaaaaagtcgcttttggtacagaaggcggtaccacagtaaatattcctttctggaatgatttaagcggtgagtccgaagtactttcagatggtaaagctcttggggtaaataacatcacggctggtaaagatattgctattttgcatgcccgtggtaaggcttggggtgcaaatgatttatctaaagcattatctggtgatgacccattgggtgcgattgctgatcttgtagcagattactgggctcgtgaatttcaggggtttaccgtaaatacacttaaaggtgtatttgggtctgcaagcatggcaggtaatacccatgacatttcggctggtactggagcagcagccgtaattgatggtcattcatttatcgatgcatcttataaattgggagatgctgttgataaattaacagcgatttcaatgcactcattcacaatggcagcactagccaagcaaggtttaattgaaactgtgcgtgatgctgatggtgtggtgctttacaaaacttttatggatcgccgtgtgattgtcgatgacggtatgccagtggatggtgatgtatttacctctttcttgtttggccaaggtgcgattggtttccaagatattggtgcaccagttggtgtagagactgaccgagacagcctagcaggtacagatattcttattaaccgccgtcactttgtattgcatcctcgtggcattaagtgggcaggtgatacaggtattgcacctaataatgctggtctagcaacagccgcaaactgggaacgtgtctacgatcctaaacagatccgtattgtggcattcaagcacaagatcaaataa

SEQ ID NO: 65159 - DNA, 273 bp, Acinetobacter baumannii; identical to SEQ ID NO: 51247

SEQ ID NO: 65160 - DNA, 1242 bp, Acinetobacter baumannii
atggaaggccggtacgcccagacaccaggtatctatcaacaacgatatggggcaactggtgctgtggggactggtggggaatatgcgagttactatgctcgaggatcaaaaataaataattttcttattgatggcgtagtgtctgcacctgttacaagtggacgtaccggaatgtctttaagtactttagatcctgcgatatatgagaatataacagttgttaaaggggcgacaggattaagctcaggtattggtaacccaagtgcctcaattaatttgagacgtaaactagcagattcaaatgtagctaaaggaaatgtaaatattagtacttcagcttttgatgataaatgggctggctaccgtactactgttgatgtgcaaagtcctttaaatgattcagggacaatccgaggaagaaccgtactttcatataataattacgattcttttatgaattggggagactcacagtctgcattattctatagcacgcttggtgcagatttaggagaaaataccacattaaatgtgggagcactatttcaacgggctaaatcaaatggtctaactgtacatggctttactaattatagtaatggtgtagcaagtacacgcacccgagaagataatgcagcagcaagatgggcatacagtgatgtagatacattaaatgcttttgtggaattagaacatcgattcaataacggttggaaagtacagggtaactataattatcttacgcaagatacggatgctgtatatgccgtggttggaagtgctgctggatctacagcaaactatttaaataatacaggttcagtcacagctggttatcaggaattaaaacctgaaatgcatggcgttgatctctcagcagtaggaccatatcaattatttgggcgtgaacatcagttgatggtaggtgcaagttatcaaaacgtacaatctgatgatccaaattacggccgaaaatcagggacccagtgggttaatcttgatacatggaatgggaatattgaagttcctgctgggttgtatacaagtaatggtactcgcaataaaacagatattagccaatatggttattacatggccacacggtttaatcctcttgataagttaaatatcattgtaggagcccgaggtctaggttatgagtttaaggacattagtgcggataagttaacagctgattactcaaaaaatgctgtaacacctctgtctcttatacacatctga

SEQ ID NO: 65161 - DNA, 195 bp, Acinetobacter baumannii
atggatactttgcatattcgtacagagatgtgtcataactgtactatacaggccaatcaacttgctcaggagttgatgaaacgcattaaaaccatgattgggattagcgttactgtagaagttgtgacagaagcgaccttacctcgttcggaaggtaaggcaaagcgggtaatcgatatgcgtcagattgcttaa

SEQ ID NO: 65162 - DNA, 723 bp, Acinetobacter baumannii
atgagtaaagccttacccattgctgtcgctgtagttttaggcggtgctgcacttgtacctgtatattatgcaactcaacatccgaccacagaagtcggacgtaaagcagacaaaaatgcttctccaattcaaaaaatcagttatgttcttgggtatgaagttgctcaacaaactcctcctgaactggatacgaaagcatttgttcaagggatccatgatgcgcgcaataagcagcctagtgcttatactcaagaagatttaaaagctgccgttgctgcttatgaaaaagagttacaacaaaaaatgcagcatcaagacaaacctgagcaagcaggtacggctgctgactctgcagatgcacagttccttgcagaaaacaaaacgaaagctgacgtaaaaaccactgcatcaggtttgcaatatatcattactaaagaaggtactggtaaacagccaactgctcagtctattgttaaagtacattatgaaggccgcttaattaatggacaggttttcgatagttcttataagcgtggtcaaccagtagaattcccgcttaatcaggtcattccgggttggactgaaggtcttcaactcatgaaagaaggtggaaaagcgactttcttcataccatcaaatcttgcatatggcccacaagagcttcctggaattccagcaaacagtacactgatttttgatgtagaactcatttcagtgaaataa

SEQ ID NO: 65163 - DNA, 198 bp, Acinetobacter baumannii
atgattcaaaatgaaacgatcgaagtctcgccagttcaacaacaagactatactcaatggttagaatattgggttgcctatcaaaatttctatcaggtcaatttacccctccatatcacaaaaatgacttgggatcgttttttcgatgaaaaagaacctatttattgtgctgttgccaaaataaagaacgtatcttag

SEQ ID NO: 65164 - DNA, 591 bp, Acinetobacter baumannii
  misc_feature (566)..(575): n is a, c, g, or t
gtggatacaaatccaagcgcagttttatgtatcgatgcggatatactaaaacgtctagatttgcagccatattatttgaattcattggcccaaaaagactgtttgactgttaaagatattagcccagatgcatattatgactttgatctatcaactcaaaaattagcgatttccatccctcaaaagtttgttgtagatcgacctaaaggatacattgatcctgcattatttgatccaggtattacttcagcttttattggttataataccaactttaaccaaaatgagcaggaagacagtaaatatttggctttaacagcaggattaaatgtaaatggctggtattttcgtcatgctggaaattttgactcgaaggattctggtctaggggcatatcgttcctatcaaaatgtgctttaccgtgacatcaccgccataaatgcgcgtttaagcagtggacagttcaatacctctggattacaaaccgaaagtttacccattgtaggcatgcaactcgcttcagatttatctatgttgccttggtctatgcgtagctatgcaccagnnnnnnnnnnatgcaccagtcattga

SEQ ID NO: 65165 - DNA, 501 bp, Acinetobacter baumannii
atgaatacagaatcacttcaacaatcagaagaagatagactcattgggcttgaagaacaaaatgaaatctcgagtttagttcgaggatttgctatagaaaaattaggatattcacgtccatgggtttcatctatggaattaagtcaaaataaacctcaaacgaacgtgaatattgcatttagtaaaagttttgatgatctctacctcagattcggaaaatatgcctttgccaaccataaagataagaaatatattgttgttgctcgaattggatttaagaatgagaaaaatggtcatggaactgctttattgaaagaactttgcacttttggagaaaaatttggatatgaatatttacaaatagaatgcccaaataagaattgccaagctttcatgaaaaaattaggtttcaaagaggagttctatcttccaattaatcagttgaaagattctattcaagaatatgagcttttgaaacaggcgaaaatcagtctttcataa

SEQ ID NO: 65166 - DNA, 264 bp, Acinetobacter baumannii
gtgccatccacattgacaactacagtggctgttgggtcacttactgtacctgttaatgccggtgtgctgtcgctagtgagtacatcatcaagtgctactgtcggcgcaactgcatcaaccactgctgttgctgggcctgatgtattgcctgctggatcttctgttactgctgttaccgtatcaccatcatttaaaccagggtttggcacagtccaagtaccatccggtcctgctacaacacttgccgtactaccatctggataa

SEQ ID NO: 65167 - DNA, 432 bp, Acinetobacter baumannii
atgcaaagtattgtcaaacatatatttagacactatctggtagctttattaagtttaggaatatttattctgagttactttgttgggatggtatttggtaaattgctatttaaaaacatgaatgccgtagagatcggatctatttttacagcccttgccgttaatttttacctctccctcctactgtgtaccttcacttttgttgggcaattttttttcaattcattaaaaaaaattgcagacacccctttccaaaatctcttaattcttttaactggtagtttttggatggttgctacacgaactcctgaagtgattacgaacaatattcccttatataattttaatattagcctaataactttatttgcatttatgttgttcattagcaattcaaaatttataaaagcttttatttctaaacaagaatga

SEQ ID NO: 65168 - DNA, 414 bp, Acinetobacter baumannii
atgaacccacgctataagcagcgtttgcttatggtctttaaaattatgaaagaacaatatggttatgaacttgttttgcttgaaggttatcgtagtccagcacgtcaaaatatgttggcaggcaatccgaatacaaccagagcaaaagggtatcaaagttatcatcaatttggtttagcggcagatgtggcctttaagcgaaacggtaaagttgttatttctgaacgtgacccatgggctatgcagggttaccgcctatatgggcaagttgctgagtctgtcgggcttacatggggtggtcgctggaaatctatacaagattatggccatacagaatatcgaatgccaggcttgaagaaaactcaagaaatggcggaaaagctgattgccgaaagcttaaatgacatcagttaa

SEQ ID NO: 65169 - DNA, 804 bp, Acinetobacter baumannii
atgtttgaccctcgtcttcttcgtgcatttgtgaccatttttgaaagtggtagttttacagccgccgctgataagttgcatctgacacaatcaactattagtcagcagttagcacgcctcgaagaatcggttggtcactcccttattgatcgcacagcaagaccattacaattaacagcttcaggtgaatatttaattggttatgctcaaaggattttgacgcttcaacaagaggccgaggcggtcttaaaagatccagctggcagcatccctattcgaattggattgccagaagatatgatgagtactgctatggcagaagtttttggtctatttgctcaagaacatcgtactattcggttagatgtcacttcaggcttaagccgtaacctgacagagcgctatcgtaatggtgaactggatattgttattgtgaaagaatcagcagccagcgccgattgttatgcctcttttcctgaagaaatggcatggtttgaaagtgaaaatgcgattacgcctttgtctgaaccaattcgtttagtgacctttcctcaaggtggactttaccgagatgaaatgtttgaaacattagaacgtgaacgacgacgttggtatattgcttttacaggaagtagtttagaaagtgttctagtgagcgtcgaaacaggtttgggaatatctttactaccagttagtaccacaaaaggccgtcgtgtacgtagatataaatctttaggtgaagcttcacctatggttgtttcaatttatacatgggaaaaagctgattgccgaaagcttaaatga

SEQ ID NO: 65170 - DNA, 600 bp, Acinetobacter baumannii
atgctacatttgcaaattattgctctacaaaaacagttagatttagcaaatgaacgtgaaaaaatgtaccttaccgagcttgcaagctatcgacaacttttactctcgaaaatcactcaaaactcatcaacgcatgagatcgatgcgcaaacaaaactagagaatgatgtaattgatagagatgaaaactctcaaaaaacaatggaatttaaaagtgaaaatcaagcccttttagagtcataccaaaatagcaataaagaaacaaaatcaaaaaatacgacgacttcccattctattcctagagaatcaatcaacaatatgaagcttgaacttacccaccttcaattcacagagcaaaatgaaaccataccagcctcagaaatcacccctgtctcatcacacgaagaacgggatataaataaacttttagtgatggagcctgatgatttacaaacagaagaaaatccacttactccagaagatagtgaaaaagttgttctaactaaaccaataacccctgctaaggttgtaagcctcgggcatgctaaacctattcccgtgaccccaggaatgtttaaaagaaaaagaagacatcaataa

SEQ ID NO: 65171 - DNA, 441 bp, Acinetobacter baumannii
atgacttatgaaaatggggtgcagcaatgggttaactttatttggccaaatcaaggcagtattccgggtgctcgtattacggctgtagatttacaaggtcaaacacataccatttttgatgaaccaggcgaatacgggattaaccgtttaatcgatagtgcacagcgtaaagagcaaaacggtggttttgaaatgctttggcgcagtaagacagatccatcactctttgtgaaaatgaacttccgtcttattagtagtaattcaggaagtatcggttcaagccgtggctactctggtatgcaactggttgacaaagtaactgcggataaggctgctcgcgttgtatccgcacagcaagcaccagctcaggcagctgctcctgccaaaactgaaaatccagtttctgcactagcacaacctgctgcgggagttaagccatga

SEQ ID NO: 65172 - DNA, 378 bp, Acinetobacter baumannii
atggggcacattgggcatggcacaactttgcatggctgccgcattggtaaaaatgttttggttggcatgaacagcgtaattttggactatgccgaaattggtgaaaacactattattggtgcaaatagcttggtcaaaaccaaagatataattccggcaaatgtactggcaatgggtagccctgccaaggttgcacgtgatttatcagaacaagaaaaaaagtggaaaaccagaggcacgcaagaatacattgaacttgcacagcgctgcttaaactcaatgcaagaagttcagcctctaacttcagagttggatgaccgcctgacctataaggactttagttcttcaaactatcagattaaacaagatagcgtttaa

SEQ ID NO: 65173 - DNA, 207 bp, Acinetobacter baumannii
atggctatgcgcccagatgtacgtcgacatgctttagtcgtgattgtattctccctcgcacaatggtttttcatgcgctacatccttgcgaatgaattatttaacctcacaacgaaccaacgtattctttatttctgtgtaagtagtttagtcggtgcattacttatctttgttgccctaatttatatggtgctcaaaggtaattga

SEQ ID NO: 65174 - DNA, 207 bp, Acinetobacter baumannii; identical to SEQ ID NO: 65173

SEQ ID NO: 65175 - DNA, 708 bp, Acinetobacter baumannii
atgcgtaagttgagttttatactttcaatatttttaattagccagcatacaaatgctggtgtgagtatagatggtactcgcattatttttccctctaatgctaaaagtgtcagtgtacagttacgcaacgaatttgccacacctgcgttagtacaaacttggattgatcaaggtgatatgagtactattcctccagctgatcaaattccttttgtgcttacgccaccgttatctcgtgtagagcctaaaaaagggcaaattatccgaattataccaacaggttccccttcattacctcaggatcgtgagtccttgtattggtttaatatgttggatattcctcctgaagatcccgcaaatgcaggtaagaacatactaaccttcaatgtgcgtagccgtatcaaactattttaccgtccgactagtttaaaaatgtcttctgataaagcttttgcgagtattcggtataactacaatagcaatacacaatctgtcactttagacaatccaacaccatattttgtcacagtcaccaaagcggattttaaaaatcaaaaccaaacagcaagctatactgcagatgccattatgctagcgcctttttcacaacaaacattgaataagtttcagttaaagtttcagcctgatcaaatgacatataccattattaatgatttaggtggtaatcagacttttgaggtgaaataa

SEQ ID NO: 65176 - DNA, 432 bp, Acinetobacter baumannii
atgagtattattcaagaatttaaagaatttgccattaaaggcaatatgatggatttagccattggtgtaattattggtggtgcttttggcaaaatcgtagactcgttagtaaaagatattatcatgccgcttatcactgtaattactggtggtggtgttgatttctcgcagaaatttatcgtgttaggtgcaaaccctaataacttacaatctctagatgccttacaaaaagcaggtatcaatgtattaacttatggtaacttcctgaccattttaattaacttcctgattttggcttgggttgtgttcttaatggtgaaattattaaacaaacttcgccgtgataagaatgagccagaagctccagctgcaactccagaagatatccaattattacgtgaaattcgtgatgagttgaaaaaacaagcttaa

SEQ ID NO: 65177 - DNA, 327 bp, Acinetobacter baumannii
atggttttcgtgaaagacttagacgcaactagccctaaattatgggaagcttgttcagctggttatacatttgatgaagtacaaatcgacttctatcgcgcaaatggcgataaacgtatcaagtacttacaaatcaaattgaagcacgttttagtttctagtgtgactccaactgttaacgaagaaggcgttcctacagaagcattcggtttgaaatatgctgctgttgagtggacttataaccaacaagatattaacggtactgctaaaggtgctgttactaagaaatggtcactttctaataatacagcttcttacgcagcgtaa

SEQ ID NO: 65178 - DNA, 270 bp, Acinetobacter baumannii
gtggcacgagtaggcgatgaaattgattatctgaaagggaaaaaagtggctttttcgccattctcggcaattcctgatcagatacgaaatattatccatcgtgagttaccttttttctggattttgattttcttattgatttttgcattacttacctttgcaggtttaagatttatgcttaacaatcaaaatgataaagcattatctaattatcaaaatgtgatttctgccccacaagagcaggcacatattacaatttacttaccttga

SEQ ID NO: 65179 - DNA, 402 bp, Acinetobacter baumannii
gtgagtggggaaattttacctgactggaatctacatgctggttatacgcaggtgaagacaaaagcccaagggaatagaactggattagatatgccagaacagcaattcaagctctatacaacataccaactaccagttttagagcagcgtctaaaagtcggtggtggtatcagatggcaaagtgagattgttgactcttcactaactggagcagcttatgatgccaataagcaaggttcctttactgtggttgatttaatggcaaagtatcaagctacaaaagatataagtcttggtttaaatgttaataacttaaccgatgaagaataccgggttaatgtatctaacaatacctatggtgaccctcgaacctatattggttctatgacttatagtttctaa

SEQ ID NO: 65180 - DNA, 429 bp, Acinetobacter baumannii
gtgagaaaattatgtattgcctgccttattggtatggctatgttatctatgtctggttgtgccgtatttatggctggtaatcaaccaagtaaaaaaaatttaaatgttttaaatccgggtagctctcgtaattatgttattgcagagtttggggcacctgtcttgtctgagtaccgtgatgggacaagagttgaaatctatacattccagcaaggttattcaaagtgggtaaaagtaggtcgtgcatttgggcatggggttgcagacgttgcctcaataggtttatgggaagtatttggaactccagctgaagcatactttaatggtaaagaaacaacttatgaagtgacttatggtgaagatgatttagtaaaaagttataagctcattgactttaatcaagcttttccaaaagtaaaagaacaatga

SEQ ID NO: 65181 - DNA, 129 bp, Acinetobacter baumannii
atgaaaaaatatcaatgtatcgtttgtgacggcattgcagctggaacaaaatgggaagatattcctgatgactggacttgccctgattgcggcgtttcaaaagctgacttcgaaatgatcgaaatctaa

SEQ ID NO: 65182 - DNA, 201 bp, Acinetobacter baumannii
atggctgaaaatgatcagcttgtaaaaaaagaaaatacctttgatcttgatcaggcacttaggcaaagcggaaatcacagtcatatcgctgtgattcctaaaacaggtcatattacaattttggctagtttatcgagttttgtaagtcattacttccgaactaaacggaccattttgcactttctggatgaagtattttaa

SEQ ID NO: 65183 - DNA, 159 bp, Acinetobacter baumannii
atgaatatttataaaaaagtatttgaacctgcggatgaatacttcttgtctgttgccgcaacagcagaaggaccaatgccaaatgccacagcacattattggcgccgtttcggaggtttggtggcgacaaatgagaggttaaatcatgccttgttatag

SEQ ID NO: 65184 - DNA, 657 bp, Acinetobacter baumannii
atgttaaaaacaattaagctttatgggattctaggccaaaagtttggccgtgaatttaagctcgatgttgaaaatactcgtgaagctgtgagggcgcttgctgtacagttatcaggttttgaaagttttatgatgcatgcccatgaacaaggattggcatttgctatttttctgaaaggtaaaaatacaagtaataggcgtggtagaaagaaaccaactatttacgaccatcaaactaaacgaattatttccggccaaaatatcggagaagagcaacttgatatgaaaaccgatgcagaaattattcatatcgtacctcgtgtaattggcgctggcggtaataatggggttttgcaagttgtacttggcattgtgatgatggtagttggatatttcatattcggtgctacaacaacgactggcgcagctttaattgcttctggtttcggtatgacggttgggggtgtggcatctatgctcatgccaaaaattgataccatacaaaatcaaaatcaggatggaaatagagcaaacaagggttttggtagtgcggttacaacagccgctcaaggttatcctgtgccaatcctttatggccgtagagaagtgggtggttttgttctgagcgctggtcaatatccagaagatcagatgtaa

SEQ ID NO: 65185 - DNA, 1176 bp, Acinetobacter baumannii
atgaccattcaaactgtaaatttaggtacggcacctactggtgcaggtggcgatacattccgctctaccggcgcaaaaatgaatgaaaactttacaaacaacactcatgcagctagccgatatgtgggtactgctgctgggaatgtgatggaagttggtgcatatggtttgggcagtaattcaataacttatactggtggtgttaatggatttggaagtttccatactggtaagtcagctttttattttaataatacccaaggtgtagatattaatggaaagattattccaaattatgcatcttatgtagtttcaagtcttaacggtggtggtttttttgctattggtgggtcaactacagataaacgaatttttgctgtccgtggacttggaagtgatgcttatccgttgcaattagtcgatttgtggcacactggtatcacaacagttgatagtaatggttttataaaagctgcatcgccaattattaaattatttgctgaaaaaattgaacttaatgatgaggctaccgaacaaccgattacttttgaaaaaatcgatgtaggtcattatctgataaaaggatcgtcaggttttgcaaaagaaggttggtggatagaaattccgactgatacacacggcaacaagatttgtgcagttgaatatcaaacgctaggaaatggtgatcttgaaattaaaacttttaagaaaacgctaaatgatgaaggcgacattgttgcaaatctagaagcccctattgatattccaagtaatgtaaacggtgaaccacgttggattgatattcgtttaaatgaaatcaaaaagccaaaagtaatcccaatattgcgtactgaaagaaaaccacgcatggttcagcaaattaaatattcaatgcaaccaaccttcatgacccgcttaactgaactcattgatgatgaaggtaaagttgtaatggtagatggaaaacctttccagaaaaaagaaacttatctagtgaccgattcatctggaatggcaactcttactaaacaacctgttatgaatgaagcaggtgagccagttcttgaatgggttcaggcagttgatagccaaggcaatccaatttttgatgaggtgcctgtcttagataaagatggaaatccactttatgatgaggtgatccatgactctgaatag

SEQ ID NO: 65186 - DNA, 342 bp, Acinetobacter baumannii
atgagtgaacgtttatttatatgggctgaaagcttggctgaaaattcgggtactcatagttttaatactttgtcttcaaagtttggcgatgggtatgaacaaaatgtatcggtaggaataaataaccgaaaaggttcgtggaattttacaagaactggttcagaaagcttaataactgaaattaagaatttcttagatgaccataagggtgctgattcattttattggcaatcgccaatggatggtcgcatccgtgtgaaagctggagactatcagttagttgatcgtggttcaggtacctggaagatttccacaatatttacccaagtcttttacccttaa

SEQ ID NO: 65187 - DNA, 3789 bp, Acinetobacter baumannii
atggcagatgatcttttaaaacgtgttgaaattttgcttgaagctaatactgcaaaatttgaaacgggtatggcgaaggctgagaagattgcacaaaactctgccaatactatgaccaaaggctatgatagcgttaaaagtgaagttaaacgaactcaagcccaggtcgatgatttttctaaaactctggagcgccaagaccgtcaaatttctatgatggctaaaagctatagccttttagcatcatctgttaaatcggttgtagcaggcgtttcaataagtgaaataattggtaaatctgatgaatatatttcacttaataaccgcctaaaattagtaactcagtcgcaaacagaacttgcagaagcatctgcatctacatttaatattgctcaaaaaactggcgctgcttgggatggtgttgcagatatttattcaaaattttctgcaaattcaaaaactttaaatattgatcaaaaagaaactgctcgtttaactgaaactgtagcaaaagcaacggcaatgagtggttcaagcgcttcagcagctcaagatgcattaactcagttcggccaagcattagcaagtaataaattgcaggccgaagagttcaactcaatgaacgataatgcctctggtgttcttgatgcaatggcgcgaggactgggtaaaactcgtggcgagcttcgacaaatgatgcttcaaggcgagttaacaggagatgttattgttaagtctttgcttaaagctggggatagtgtagatcagttatacaacaaaactgataaaactgtaggacaagcatttactaagttaaacaatgaattaacaaaatttgttggagaagcatcgaaaagttctggtgcgtcagttgttttagctgatggaataagcactcttgcagataacttagataaaacaacagatgttcttatggttggggctgctttttatgccggaacttatattccctccatatacaattcagttgttgctggttatgcaaaaacaaaacaattaattgaacaaactgctgttcaaattacagcgactaatatggaaaaagcagcagctttggctgatgtcgcaaaagctcaaagtactctaacattgattgccgcggaaaaggctttagaaattgaacgtttaaaagctcaaatttcatctcaaggtcgaatggcaactgtcacccgtatggctgagcttaaaaagctcgagtcagtggtaacaaatgaattgactgtagctcaatcaagattgaatgcagttcaaagtgcttcaataggtgttgggcgaagtttattgggcatcctaggtggtcctgtaggtttgggtttaaccgtcgctggggtagccgcttcatatttacttctaaaagatagttcatcaagtacagttgagtcccttgatcttcaaaaacaatctgtagatgaacttagagataaatatgaaaaattaagtgttgctcagaaaaatacaacattgcatgaactcaaaaagcaagttgatgaattaagagtttcatatactgttgctggctcaaacttaagcgcttttgtagaagcaattccaatctcggacgaaaaaatcgctaccgtccgtaagctttataatgcttatagcagtggtgcgttatcatctgatgattttaataaatcaatccaaaagcttaattttttaacagatgaccagaagttaaaaattaatcagctttcagtaagttatgatcaaagtaaggtagcgtataacaatgcaaaaacagctcgtgatgcattgattaattctacacctaccgcagttgaggcacataaagcggaaacggaagaacttagaaaaaaacgccttgaaatggagaaagttattcagcttcagaagactaaagaacttcaggcaagtgcggaaaaggaaaacttaaaaaatcggtattttataagtaccgttaaagcaagtggtagtaatcagaatgctttagattatgcaacatttatgaccaaatttcgtgaagacaataaaattccgtttacacaaaatttgactgctgagcaaaagaaaattgctgatcatcaatttgcattgcagcaagaggttaaaaatcttcaagacaagattactgaatccgttaaggctcaaactaaagagtatgaaaaacagcagaagttactttctgttaatgcaacagttcaggctgcggcaaaacagtataactttgccagtcttgagcaaaaagcggggtttccactggggactctgtcagccttaatgatgcaggaatcaagaggaaatcctaaagcttataatccggagactggagcagcgggtgcttttcaatttttacctgcaactgcaaagcagtatggtgttcaggatcgttacaatgttcaacagtctgctgaaggtgccattaaatatctttcatatttaatgaaattttttaatggtgatttagagaaaacaattcgtgcatatcatgcaggtgaaggtaatgttcaaaagaacactaaaattggaccagttaataatgagtattggtctaattataaagcccgcattgcattcttaaatggggcaggtggttctacatccaaagattttgaaaaatatctgcaagatgaaactaaagctgtcaccaaatcattagaggatcaacaagctattcgagagagttattataattcttgggaaaagctagaaaatgaacataatgaaaaagttcaaaaagtccgtacaaattttgcgaatgatcctaaaacccgcgatttacttcttaaacgtgaagatgaacggcatgcaaaagccattgaagactggatgcgttatgaagataaccgtgtaaaagaggaggttaaggccaaccaagaaattattgtttcaagacaattggcgtttgaagctttaaatggcccaatgggacaaattgctggcatggcggcaaacgctactgctgaaggaaccttggcaccaaagcggcttgcaatgtggaaactaggttctcagcatcaagatggttattctcagttaggtgatttactaactcaaagccaaaaggccacccttgatgatcagactctttctgatcaagaacgctataagcaattaaatgatacttatcgtgagtatcttgaggcaaagaaagcattaagtttgcaatatgctaaagaggagcaagatttagttaaatcacagcatcaagagcaacttaatctttggggtaatttactaggtcaggcacagaccacctggtctcagttgacccaatcagttaaagatgcaaatggtgaacaatctgctgcttataaagcaatgtttgttatgcaacaagcattctcaattgcatccactcttgtggctgctcatagcgcggctgctcaggtagctgctgatgcaacgatacctttctttagtaccaaaattgctgcttctaaagcaatgctagcaatgggttatgcgcaagcgggtatgatcgcggctcaaacaatcgctggtattgcacatggtggtttggattacgttccttctgagtctacttatctgttagatgaaggtgaacgtgttttatcaccacgtcaaaaccaagatttaacccggtttatggcaaatcaacaatcgggcggttcaggggttaaagtcacgatcaacaactatgggaatgataaggttgaaacctcacaagatgctgatgggaacttaatggtgacgattggaaaaatggttgatcaaagagtagatgctggtattgccaggaacttaaggcaggggtatccattagctaatgcaattaaaggtaaataa

SEQ ID NO: 65188 - DNA, 366 bp, Acinetobacter baumannii
gtgaaaaaaattcgtttaggcataggttatgtatttttagtattttctgtgtttttagagtcgtcatttgctaaacccacacagccagtaagtgacagggagcatgaaaacaattgtcgaatgtatatgcaaatagctgaaggtattatgagggcaaagcaaaatggtttgtcattagctaaagcattagaatttaatgatgaaactaatattaaaatgaaagacgacaatatgcataaaataatgaaacttatgattgtagatgcctataaacaaccgagttatacaagttcctctgtaaagcaagagcagttaaatgatttttcagcaaaatattacattgggtgttctgaaatgtacaactaa

SEQ ID NO: 65189 - DNA, 750 bp, Acinetobacter baumannii
atgaatgcattagtttttcaatcttcaactttagaaccagttcaattattagataatcaagtctggattactgctagtgacctagctagagctttaggttattcacgacctgataaagtagctcaaatttatactcgtaatgctgatgagtttactgaatgtatgactcaagttattgaaaatccccagaacctcaatttgaggttacggatttttagccttcgtggttgccaccttattgccatgttttcgcgtacagatgttgctaaagcatttcgtaaatgggtgttggatgttatagaaaaaacagaggttcaatttaaaccttctgttgctatggtgactcaagcaacctatgataaattggctttgaaatatcatcgaatatttcgtcaatatgacaatatgattgatgatttacgtgtgcaaatcgcggctatgcaaagtaaatgccaccgttataattttgaaatgcaagtaaatgctattcctattgaaattgttgctgagaaattaggtactacagtttcaagggtgaagcatatattaatgattaatggcattattgaagaacgtaacccctatgttgagctagataagaccgtaattaacattaccgagcgtggaaaaaagcttgattatgtatatttagatagtcgtgtggttgatggagttgctcaagattctctcacaatttccaaagatggaatgagttatcttcaagagttgttgcaaaacgccttgcgctaa

SEQ ID NO: 65190 - DNA, 228 bp, Acinetobacter baumannii
atgacatatcatgaatatcaatattggcaggcatttaatattttagagcctattggaatgcagcgtgaaaacgtattccaggcgaatattgcgaaaacagtttttgatgtgaattgtcctgataatgggtttggattatcggactttctattattccagttgcatcaagaacgaactgttgaagatgtgatggatgatattaaggcaagaatggcaagtatgtgttga

SEQ ID NO: 65191 - DNA, 372 bp, Acinetobacter baumannii
atgacaagtaagacagtagcagttggattggcggcggcatttttagcagttgctgaaaataaagatttcattgttgatgaagtagaaggtcttggccgtattggacttaagcgcttaagccttgaagatcgtgatgcatgggttacagcagaaaacgattccattccaattattattaagggttcagtctgtgatccagaaacaggagagctttctcttaaagaattaactaatgatcagattaaaaaaatccctggtcatattgctgatgaattacttaaaaaaatttacaagcacaatggcattaaaacgatggctgaaattaatgctgagcgtgaagcgggtaaagaaccagaacagctaaaaaactaa

SEQ ID NO: 65192 - DNA, 432 bp, Acinetobacter baumannii
atggctgataaggctttaattgattcacagggaattgtaatttcctacaaattaccagtagcacaggcattttcagaattgcttgaagtaactgatagtcctttgccaacaaaaaaacgtgaagttgatgatatcaccacggttaaatcaacgcataaagaaacaattgctgctggtgtaattagtgctgacgatctggcatatgagcttttaatgatttcaggtagtgttcaacagcaagagttggaacaatactttgaagaaggcgaaatgatcgattggaaagttgtacttcctgatgatgctgctactacatatacatttcagggaacaattactgaactttcaccagttcgtgcggccaataagaaaaaccgctttaagttgactattgcagtcaatggaaaagtaactaaaacgactaccccttaa

SEQ ID NO: 65193 - DNA, 366 bp, Acinetobacter baumannii
atgctcgcgagtgaaattatttatcaaacacttggcccattattcaatgaccaagttgcaccagcaccactttctccaggagtggaaatacatggaacatatattacttttcaaacacttatcggaagcccattaaatactgtcaaaacttggactggatatgaccagttgcgagttcaaatcaatattcacaatgcggataaggtccagtgcgagaaagatgcagcacgtgtaaagcgtgctttagtagatcaaaaattatcgtcatgcagtttggtgggtgacagtgatggtggttttgatgatgaaacacaactgtttcagcaacaagtagatattttaatctggcaaatcgccgaggagtaa

SEQ ID NO: 65194 - DNA, 516 bp, Acinetobacter baumannii
atggaatttgatttcaagatagaggggttgtccgaacttaccgagcaactcagaagtcttgaaaagttaggtaaacaaaaacaacttactcaaaatgcactgttctatgcctctcaacctatttttgatgatattaaggcccgtgctccacgtgctgaaaaggcatattacagatattaccgtggttcattaagacaacgtttacgtggtaatccaaaaaaatcaagaaaacttaagcgcccaggaacattaagaagaagtatcgctagaaaacggatacgggtagatggtggggttgctgtaggtatttatattaaatcaaaagctttttattacagattcattgaaagaggcacgccaacaatacctgcaattccttttgttttacctgcttatgagcattttaaggaagctgctgttgagcgtttcagattgagatatggagagtatgttcaagctgcatttgagcgcaaacaaatacgcatagaacaggaatttgatgatgctcgcgagtga

SEQ ID NO: 65195 - DNA, 330 bp, Acinetobacter baumannii
atgcaatctggaattttagatacatgttttgaagtcttgaagaggacagagcaaaaaaattctgctgggcaaactaaatttgagtggtctgtgattggtcgtttttatggaggtgtaaaacctgtaagtgttcaatcatttgtgcagtcaagcatgcagggttcagcattagttgcaaggattgtaatgcgccctgatgatttccctgaaatttctgcggtgtatttaatccgtgatgttgatacacagaaactttataaaattgatggcgtattgcctgttagtaaatcacgccaagctttgatgtgcagtttaggaaaacttacttga

SEQ ID NO: 65196 - DNA, 1305 bp, Acinetobacter baumannii
atgactgcatatcaaaaactgccattggctcaaaacattcgttctgcaagcccattccatggtttgcgtactcgtgatgcactcgatgaagctgctgttcagcttcgtgcgcgcattacacagtttgatgagttgcttgcacgctatcaagggcggttagaaagcctagatggtttgccagatgatttgaaatcacaacttgaaagtcgtgccaaagaaatcaaagacttatctggtcaggttgaagaacttcaacagaagcttgttgaagatgttcaaaatcgtaatacaccaaatccgcatgaacttgtttcagcactcatccgcaataaagacgcggttgaatatgcaaaaatgatgcacgcgcgatcaggcaataaaaaagatgcggttgtctttgaaggtctgaatgcacgtaatgtcatcacgcttggaacgatgcctgcaaatgcaacattcgcgcaaaacgatattcaggccagtgtccgtgcaatgcctttatcggtcattgatttgattaactggggaacaacaagtgatccagtatcttattatcttcgtgaatctacatttgaaattatggccgatattgcgccagagaatactgacaaaaaagaatctaacttttcttttggtattactcagcttaatgtcggaaccattgcacactggattcgtacatcaaaacaggtgttatcagatatgccattattggcaaattatcttgaaacacgtatggcttacggtgttcgttacaaacttgaatattatgttgtaaatgggcatacgccagcacagggtcaacaaaaaatcttcagtggtttacttgaagcagataactatcaaaaaattgaaccagaagatgctgtaacagcgattgattatttaaacaaggctaaatatcaagctgccgcatcttatgttttacctgatagcgtgattttgaaccctgaagattgggggaaaattgagcgtattaaaggtgaagatggtcattatgtatttggttcgccaggtgcggttttacagcctgttatttggggccttccagttatttttgcggcttcaatgcctaaaggtaaattctgggtaggtaatatcaaactcggttttgatggtcagattcgtgaagatgtatcaattaccgtttcaactgaagatggtaataacgtaactaaaaacttggtaacaatcttggcagaaatgcgtgcatctggtgctgttgtattaccagaggcttgtgtatctggtgatttaccagaaattactggtactggcggtacaggtggtggtactggcggttaa

SEQ ID NO: 65197 - DNA, 732 bp, Acinetobacter baumannii
atgaaccaaatgcttcaaatgcgtaataaattcgcaccgaacatcccaaaagtacaatgtcggcgaatgccgattacagtcgataatctgcgttcagtgggtaaaagcgaatctggaaatgttgtaattagcggttatgccgtcaaatgggattcaatcaattattttggggagaagtttgtaaaaggggcctttactgatgtttgtgcccgttttgccaataaatctcaaaaaattcatgcttattacaatcatggctggcgaatgtggtttgttgattcacatatgaccatgcgggttggtaaatatcttcagattaaagaagatgacactggtttatttattgagcttgaatttaccaaagggctgcctattgcagaatggactgctgcgatggttcagcatggaacagtcgatggtttttcaattgctttttatccacctaaagatagcgatatcattgataaaggtgcatacattgaaatattaaaagctgatatttacgaaattagcgttgtagatgaaccagcagatgaagctgcgcgtgtaatcaataacgaaactattgattcattggaaactatcgatgatgctgaatcacttttacgttcaattttacccggcgggtatggagaaaaactactttctcgacttgctgatatacaaaaacctgtagaaaagccaagccctaaacctgatccatttgcgtttttagacgaacgtaaaaattaa

SEQ ID NO: 65198 - DNA, 426 bp, Acinetobacter baumannii; identical to SEQ ID NO: 53088

SEQ ID NO: 65199 - DNA, 855 bp, Acinetobacter baumannii
ttgcaaaatacattgttaaccaagcaatctgaagaaaatgaagtaatcattaaagagaatagtctcgataatgagttaccagatagtatttctgatgaagaagccgaacgtttaaaagccgacttaaagcgtttaaatgctgatcctgaatgggcaggtgaagatggtttacgttaccaagcattctttgaacgtatcaataaggctctagagggggattctgatgcagtagtttgggcacgtgaatggatttctgatctagatgaccaggctttggctcaacagcaagcaggattagaagcaaaaaaacttattgatgccgaaaatgaagctaaacaaaaaagagatgaagaagtattagcagcacgtacagctggtatagctgaaaacaaaatgatgcaagcatggttagacactttggaaaatcctgaagattctaacaacatagactttatggcttgggtttcagatcgccgtggtgaattcttaaaaaactggaatggggccgaaggttcaccagaatatttaacagcattttatgaatattcaagagcatgggcagatgaacatttagcggatcgcctcagtaataaagagccagcccaaaattcagataatgatgaatctaaagaactcaatgctccgacagaagttgaaggtcttcagcctagtacgacaaatgatgaaggtaatcaactttaccgttcagtaattgaagggcaggttaaagttaatcttgagttattagagcaaattcgagatgaagcagaaaaagacttaaatgatccacttcttattccagcggtgacagaactcttgaatcaagtgcaaaaaatggaagcggagaatatctaa

SEQ ID NO: 65200 - DNA, 702 bp, Acinetobacter baumannii
gtgattgatgccgattttattcaagaaaatgcaccggagaggttagatttaaagcaaaatttatatcaagaaatcacttcatattgccctgaaaaaacattaattgcttcaagttcttcaggcttaaaagtttctgactttcaaaaagatgcaactcatcccgagcgtatttttttaggtcatccatttaacccacctcatctattacctttggttgaaattgtgggtggaaaattaacagatccgcaaattttaaagacagcttccgagttttatcaaagtttgggtaagcatccgattgttttaaaaaaagaagttaaagggcatgtagcaaatcgtttacaagctgctttgtggcgagaggcattttcactggttaaagaaggggtgtgttcggcagaagatgttgatatagcaatcaccagtgggcctgggctgagatgggctttatttggcccctacataaatatggaacttgccaatcagaaggggtttaaagaggcaattcaccatttaggaccacctatgaccgaatggtggaatgatatgcaaaattttcagcactctgaagaaactactgagttgctagaagaacaaactaaagaacttttaacacattataaagatgtcgatttatctcagaaaagggataaaggactagtcgatattttaaaattgagacaacaattagagttggattaa

SEQ ID NO: 65201 - DNA, 603 bp, Acinetobacter baumannii
  misc_feature (586)..(595): n is a, c, g, or t
atgaaagaaattgtattaagtgatttgatcaatcagcagaaagttggaccttatcaaaaatttattttggttacctgcctattactaatgattatggatgggtatgacattcagtccatggcttacgcagccccactgattatagaagaatggggtgttcaaaaatcgatgctgggagttgtgtttagtgcaagcttgtttggtttgtttgttggatcatttttattaagttcactttctgatcgttttggtcgccgtccgatactactgatctcgacctttatattctccatattgatgctgttgacaccacatgtaggcaatattgagcaattgaccgtaatccgctttgttacaggaatttttttaggcggtatcatgccaaatgtgatggcttatagctccgaaattgttccatatcaatctcgtatttttaccatgatggtcatttcttgtggctatacggtaggggcaatgttggggggcggaatatcagccttactagttccttggggaggatggcaggcgattttttatttcggcggtattatccctttaattattttcattatcacattctttaagnnnnnnnnnnttctttaa

SEQ ID NO: 65202 - DNA, 1356 bp, Acinetobacter baumannii
atgaaattggtaatgattggtcatggtatggtgggccacaaattcatcgaagccattttagaaaaagcagatgatgaactggaaatcacgattcttgcagaagaacctcgtatcgcatatgaccgcgtgcatttgactgaatacttctcagggaaatcggcaaaagatttatctttagcacgctttgattttgccgatgcgtatggcattgacctgcgtttaaatactaaagcagaggcgattgatacagctgcacaaaccgtaacaaccaatcatggtgatgtgattagctatgacaagttggtgctggcgactggttcatatgcatttgttccgccaattccgggtaatgaccgcgagaactgttttgtttaccgtaccattgaagatctagatgccattcgtgcagcaagtttaaaggctaaaacaggcgtagtaattggcggtggtttacttggacttgaggcagccaaagcattacgtgatttagatttagaaacacacgttgttgagtttgcaccacgtttaatggcagttcaaattgatgatttagggggcaaggttttacgccgtaaaattgaagatttaggtgtaaaagtccatacacaaaaagcgactcagtctattgagtctggtgtaaataccactcatgtgatgaagtttgccgacggtagtgaactcgaaactgatgtgattttattctctgcggggatccgcccacgggatgaattagcgcgtaatagcggacttgcgattggtgagcgtggcggtattgtaattaatgattattgccaaacatcagatcaaaacatttatgccattggtgaatgtgcgctttggcaaaataaaatttatggcttggttgcaccgggctatgacatggcgcgtattgcagcaaaacacattttagatgaagagtgtcattgcttcgctggcgcagacatgagcaccaagttgaagttgatgggcgttgatgttgcttctgttggtgatgcacatgctatgaccccaggtgcattaagctatttctatgcagatgaacatgcactggtttataaaaagattgttgtaaatgccgacaaaaccaaattgcttggcgcggttttagtgggtgatgccaaagaatacaacgaccttttacaaatgatgttgaatggtctggctttaccggaagtgcctgaaagtttaatcatgccgggttttgagcaatcagcagcaaaatctggtggtagcggagtcgatttactgccagacagcgcaacaatctgctcatgtaataacgtatcaaaagcagacatctgccaagcaattagtgatggttcgacctctttaggtgcattaaagaaatgcacctaa

SEQ ID NO: 65203 - DNA, 1146 bp, Acinetobacter baumannii
ttgaagtcagagttacaacgtcaaggtgtgactgttaacaatcacatttgcgaacatttcccgtactcgcgtcaagagttgtatcacttggttcgtgtcaatgaaatcaagacatttgatgatttaattcatcaacatggtcatggtttaggttgtgatatttgtaaaccggcagcagcaaatattctggcatcttgctggaatgatttcgtacttaagccaagtcatgcaggtctgcaagacagtaacgactactacctaggtaacattcaaaaagatggctcttactccattgtaccgcgtatggcaggcggggaagtcactccggatggcttaattgcgattggccaaattgcgaagaaatataacttgtacaccaaaattactggtggtcaacgtgttgatatgtttggtgcgcaagttcatgagcttccatttatttgggaagagttaaatgctgcgggcttcgagtctggtcatgcctatggtaagtcgttacgtacagtgaaatcttgtgtaggtagcacttggtgccgttacggggtagataactcggttggtttggcgattgaacttgaaaaccgctacaaaggtttgcgttcaccacataaattgaaaatggcagtgtctggctgtacacgtgagtgtgcggaagcgcaaggtaaagatgtaggcgtgattgccactgaaaagggttggaacctttatgtatgtggtaacggtggtatgaaaccgcgtcatgcagaattacttgcatctgacctcgataaagaaacacttattcgttatatcgaccgtttctttatgttctacattcaaacggcagaccgtttacaacgtaccagtgtatggcgtgacaacatggaaggcggtctagactaccttaaatctgtgatcgttgatgactctcttggtttagcggccgagcttgagcgccgtatggaacacattattggtacatatcaagacgagtggcgtacagctgtcgaaaacccagaagttcgtaaacgcttccagacttatatcaatgcaggagcaaatgaacaagctgatccgcacattcaatttacaactgaacgtggtcaaatccgcccattaactgaagctgaacgttcagaagaccgtattccaatggttgaagcataa

SEQ ID NO: 65204 - DNA, 309 bp, Acinetobacter baumannii; identical to SEQ ID NO: 64768

SEQ ID NO: 65205 - DNA, 237 bp, Acinetobacter baumannii; identical to SEQ ID NO: 44371

SEQ ID NO: 65206 - DNA, 612 bp, Acinetobacter baumannii; identical to SEQ ID NO: 62716

SEQ ID NO: 65207 - DNA, 612 bp, Acinetobacter baumannii; identical to SEQ ID NO: 62976

SEQ ID NO: 65208 - DNA, 3465 bp, Acinetobacter baumannii
atgagtgttatgccagatacttcacgtccccaacaagcgccacaacgtgtgatcaaaacacgccgtgaatataatatttgggtggcagatgaaagtatcgaagattatgcactccgctatgcacctacctcagtacgaaaatggtcgccttggacggtaaccaatactgcaatttctacagttagctttttggctatggaagccattggggcaaccatgctttggcagtatggctttagcaatgcattatgggcagcaattgtcgtatgtaccattatatttttaaccagttggccgattagttactacgccgcaaaatataatgtagatgttgatttgcttactcgtggtacaggttttggctacattggctcgaccattacatctctgatttatgccagctttacctttattttgcttgcgtttgaagccgcaattatggcgatggcacttgagctggccttaggcattccgcaagttattggttacttaatttctgccttagtgattttgcctttagtggtcaaaggcattggttttattaacaaagttcaggcagtcactcagccaatctggctcttattgctgttattaccgtggttttttgtactttggaaacaaccacaaattttaagtagtagtctgcattttgttggggcagtttcaaactcgaccgattttaatctgtattactttggtgcggcgtgcactcttattttttcatttgtgatccaaattggtgagcaagccgactatttacgtttcttaccgcaaaaagaaaagaatagaactgcatggcgttttgccgtttttttaggtggtccatcttggattatttttggatttttaaaagttttgatgggcatgctgctgatggtgttggcttttcagctgtttattcctgtctctgaactagacaatccgacttatttatattgggttgcttatcagcagtttattccaaatcctcagctagcgttaatattgactctagcactggtttgcttggcacaaattaaaattaatatgaccaatgcctacgctggctctttagcttggtcaaacttttttgctcgtttaactcatagccatccgggacgaattgtctggcttctttttaacgtgtttattgccattgttttaatggaaatgggcattagccatgcagttgaacgcattttgggactatatagcaatatcgctttggcatggattggcgccgttgttgccgatttaattatctgtaagcctttaggtctaagcccgaagggaattgaatttcgccgtgcttatttatatgacattaaccccgtaggtgtgggcgcattactcatcgcttcagtgttatcgatgctgagctatttgggctttttcggtctcatggcgaaaggtttagcaagttttattgctttggggagtgcggttttatgcgttcctgttattgcttacctaaccacaggcaaatattacattgcacgtcagcctgaaaaaattcaggcgactttggttgctaactgtgtcgtgtgtgaacgggactatgagcttgctgatatggcgggttgcccagcctataacggtacgatttgctctctatgctgttcactagaagcacgctgccacgatttatgtaaacccgatgcacgttggtcagtacaactcaaaaaagccatttggcattatttaccagaacgttgggcgagccgtttaaatagcagggtcagtttatatttattactgactctagggctgtctattgttttggcagtgagcttgagtctggtttatatccaagaaaaaacctatttagaaaccattaatgccgcagccgttccgcagttatttacactgtttgtaaaaatttacaccattttatttttattgatgagtgttgcagcatggtggttagtgttaaacgatgaaagccgacgtaatgccgaaatcgaaacgcatcagcaaacagcattattgattgatgaaattgctgcccatgaagtcacttcaaaagacttacaagacgccagaatagcagcagaacgggccaatgatgcaaaaagccgttatgtcattggcattagccatgaattacgaacgcctctaaatagtattttgggctatagccaattacttcaaaaacaagaacaactctctgaacaaggcaaaatggcgctcggggtgattagccgtagtgggcagcatttgacttcactcattgacggtttactagatttagcacgcattgaaacaggcaagatttctttaaatgtagtggatgtgcatttccccaattttattgaacagattattcaaatgtttcagccacagtttgaacagaagaatttacagtttgtttatgaaattggagaaaacctaccgcactacgttcgtaccgacaaaaaacgcttagagcaagtgctcatcaatttactgggcaatgctttaaagtttacgacaagcggcacaattactttaaaagtcgaataccgttttcaaacggcttattttgaaattagagatacgggctgtggtattgcagaggcagatttagagcgaatctttaacccgtttgaacggggcagcaatgtagtacaaggcggatttaccggaataggactcggactacccattgtaaaattgttggtcgatttactcggtggccagctatctgtgaccagtcagctcaatcagggttcacaatttaagattaagttttatttaccttcaaaagaagtagttcatccaatttctaatgtctactccaaccaaattacgggttatcaaggcgaacgaaaacgaattttggttgtcgataatgaagctgtggaccgaggcctagtcgctaattttctcaaacctttgggatttatgattgaagaagccgagtcgggcattgattgtttaagacgtgtacctatttttcagccgaacctgattttgatggatttaaatatgcctttgatgggcgggtgggaaacagcacgattattgcgtcagaataatattaccaatgtgccgatcttaattatttcagcgaatgcaggagagcgtgaagtcaatccacaagatgcggtcttaagtgaagactttatgttaaaaccaatcgatctcaatttgttgctgagtaaaattggagataagttgggcttggtgtggattgattccaaatcagagacactccttgaaaataatgaagttcaagcactcgatttaaatatatataagcaagagcaagttgctgttcatacgctaatccaacaaccggaaaataatgagctgctcgattttccgcaaagcttacaacagttaaatgacttgattggacaggggtacattcgtggaattcaacagactttaacgcaatgtcgtcaaaattttccaaagcataacgagttatgggaacagcttgaacaggcgattcaaaaatttgatttaaaacacgcccaacggttaattcaggataagcaatga

SEQ ID NO: 65209 - DNA, 960 bp, Acinetobacter baumannii; identical to SEQ ID NO: 62972

SEQ ID NO: 65210 - DNA, 285 bp, Acinetobacter baumannii; identical to SEQ ID NO: 62718

SEQ ID NO: 65211 - DNA, 660 bp, Acinetobacter baumannii; identical to SEQ ID NO: 64545

SEQ ID NO: 65212 - DNA, 867 bp, Acinetobacter baumannii; identical to SEQ ID NO: 62720

SEQ ID NO: 65213 - DNA, 2664 bp, Acinetobacter baumannii
atgatcaatacatcgccattgctgaactatgtctcaagtcatcatgatattaaagccattaatcagtggcgaacggatgtagaaaagcaattgcaagattcatacgaaaatgggcaatctattcgagaaatcattaaagctcgttcagacttagtagatgaagcgctcgtctttttatggaaacatgcagaacttgaccagtcaaaactaggtctttttgcagtaggtggttacgggcgccgtgaaatgctgccctattctgatgtagatatcatgattttgtctgaagatgaaatcagtgaagaaaatgaaaaacgtatctctacatttatttcctctttatgggatgtaggaaatttcaaaccaggtattagtgttcgtaccattcaaagctgtgttgaacaagccgctaccgatttaactgttgccactacattaattgaggcgcgtttaatcacgggtaatacgcaacttgcgaaatggcctcgccgtattgtttcacagacctggacagacaaaacattttatgacgcaaaaatggccgaacaagccaagcgttaccaccaacacaacaatactgaaagtaatttagaacctgacattaaaaatgcaccgggcggtattcgtgacattaatcaaattggttggattgccaaacgccacttccgagtgaaccgtatctatgacttagtgcatttaggtttcatttcagagttcgaattggctgttttagaagaagctgaaagctttctttgggaaattcgacatcatttacaccgtttagccaaacgtgatgaaaaccgtttactctttgaccatcaaagagaaattgctgctaaatttggttacgttcgtcaagaaggccaacctgtaaattacggcgttgagcaattcatgaaacgctactaccgtacggcgcagcaggtttcaacactcaatgaaatgttgctggcgtattttagtgagtcagtcattactcctcgactccccaactatgaacgcaaaattgaagttgttaacgatcactttaaaattgtcgataataaacttgccgtacagcatcacaaaatattcgcagagcatccaagcgcgattttagagttgttctatattttagccaatcgaccagatattgaaggtattcgcgctcggactttacgcttacttattcttgctgcgaaacgaattaaccaaagttatcgtgataatccagagcatcaagcactatttatgtcgattattcgctcaccatatcgactatacgacaccttggtcgcgatgaaacgttatggtgtgttaggaaactatattcctgcttttggccaaattatgggtcttatgcaatatgacctattccatatctatacggttgatgctcatacattattattgctgcgtaatttaaatcgttttagagaacctgaatttgccaaagaattccctgtggtaagttcggttttccaacgtcttgctcgtcaagatattgtctttattgctgctttattccacgacattgcaaaaggccgtggtggtgaccatagtgaacttggcgcagaagacgcgattgagtttggacgtgcacatggctttactgagcgtgaatgcaaattaattgcatggcttattcaaaaccatttgctcatgtcacttacagctcagaaaaaagatatttctgatccagatgtcgtgaaagattttgcagaaaaacttggcgacatggagcatcttgattatctctatactttaacagttgcagatattaacgccacaaatccaaaactttggaacacatggcgcgcttctctcatgcgtcagctttatacgcatgctcgtgatgtaatccgtaccggtttaggtcgtcctgttgattatcaaatgctaattgaagacaccaaatttgcagcaagtgaattactggtaaataactttgcattggctgatgtcgaaaaagtatggcaagaacttggtgatgaatacttcattaaagagtcggcagatgaaattgcatggcatacacaagcaattttaaaacatggtgataatccagagccattagtcctcttgcgtgctcaccgtaaagcagctcaagatgcggtgcaaatctttatttatacacgtgaccaacctaacctgtttgctactactgttgctgttttagaccgcatgaacctagacgttcaggacgcaaaaattatcacagcaagtaccgcatttagcttagacacttatgttgtactcgatcgtttcggtacattgcttaccgacccagagcgtgaagaaaccgttaaaaatgcattagtgaaggcgcttagccaaccagaccaatacccgggactcatgcaacgccgtattccgcgtcaattacgtcacttcgatatcgaaaatacagtcgatgtaacattgaatgaagccttacagcaaaatatggtcgaaatttcaacactcgatcatcctggcctacttgcacgcgtgggtggtttatttatgatgcaaggtttagacatccattcagcccgaattgcaactttaggtgaacgtgccgaagatattttctttgtcaccaaaaaagatgggaaaccgctgaataacgaagaggtcaaactcttctcggaaaaactgaaagcagcattagatgaagcatctaatcaaatttgtcagcactga

SEQ ID NO: 65214 - DNA, 402 bp, Acinetobacter baumannii
atggtggctcgtgcaattaaaccagactatgctctaggtaaccacactgcttcgttaggtcttgcattttatacagccgaactcatgccacaatttagaggcggagcatttattggacagcatggttcttggaaccgtaaaccacatagtggatataaagtcatttttgtgccatttagaagtggtcagccctctggtccaccgcaagatattttgacaggatttttaagtgaaaaagggaaagcgtatgggcgtcctgtcggggtagcaattgatttttcgggtgcagtattagtcgcagatgatgttggtaatacgatttggcgtgtctcaccagttgctgaaacaacttatgagagtccaacccagcaatccattcgtagttcagtgactcaaccttaa

SEQ ID NO: 65215 - DNA, 612 bp, Acinetobacter baumannii
atgatcgcattcaatcacgttgttccggtacttaatctgtcggtgttcaacgtcagacgggcaccggccttcgcgtttgagcagagcaagcgcgcgaccataggcgggcgctttatccgtgttgatgaatcgcgggatctgccacttcttcacgttgttgaggattttacccagaaaccggtatgcagctttgctgttacgacgggaggagagataaaaatcgacagtgcggccccggctgtcgacggcccggtacagatacgcccagcggccattgaccttcacgtaggtttcatccatgtgccacgggcaaagatcggaagggttacgccagtaccagcgcagccgtttttccatttcaggcgcataacgctgaacccagcggtaaatcgtggagtgatcgacattcactccgcgttcagccagcatctcctgcagctcacggtaactgatgccgtatttgcagtaccagcgtacggcccacagaatgatgtcacgctgaaaatgccggcctttgaatgggttcatgtgcagctccatcagcaaaaggggatgataagtttatcaccaccgactatttgcaacagtgccctcatcctttaccaacgttaa

SEQ ID NO: 65216 - DNA, 300 bp, Acinetobacter baumannii; identical to SEQ ID NO: 49175

SEQ ID NO: 65217 - DNA, 168 bp, Acinetobacter baumannii
gtgacggcagatgcagctcagccattaagtcagttaaccagtagccaagatgttacatttactcttattcctggcggtcatttaggtctaatgtcaagccaagcaagtgcgcaggaattctggccaaagctagcaacatggctgagtgagcgttcaacaaaaatctaa

SEQ ID NO: 65218 - DNA, 1188 bp, Acinetobacter baumannii; identical to SEQ ID NO: 50936

SEQ ID NO: 65219 - DNA, 387 bp, Acinetobacter baumannii
  misc_feature (371)..(380): n is a, c, g, or t
atgcaacaacaatcgaatatgcaaaataaattcttgatagatgctgagatcggggatgacgatgtcacattgcctaatttacctgctatcgatgttcctatcgttgagtcacctgttaagcaagaagtaaaagctgaagaagttgtcgaggctgcaccttctacagaacctgagcaaccaaaatctggtttctttggacgaatgaaagaaggcttgagcaaaactcgccgtaatttcaccgatgggatggttaatatcttaattggtgggaaagaaattgatgatgagttgcttgaagaagtcgaagagcaattattagttgcagatattggtgttgatgcaacaaaaacgattattaccaacttaactgnnnnnnnnnntaactga

SEQ ID NO: 65220 - DNA, 252 bp, Acinetobacter baumannii; identical to SEQ ID NO: 56677

SEQ ID NO: 65221 - DNA, 321 bp, Acinetobacter baumannii; identical to SEQ ID NO: 50618

SEQ ID NO: 65222 - DNA, 213 bp, Acinetobacter baumannii
atgctaataattgcttatttccttgttttcttcatcggtatagcaagctgctttaaagaagctaaattggcttggttatcgcgcaatagtgttggtttaactatctttgaaaaacgtgcctacattttaaaagcagctgttgccattcttatcgccatttttggcctattgggtcttatagaagcaattatccgttctggagtgttgctatga

SEQ ID NO: 65223 - DNA, 288 bp, Acinetobacter baumannii
atgaaaacaatgaggctgtcagatactgaggcacagataatcttagaacgtcgtgctgagcagcaccacaaaaaggcaacttttgcttttcaagttaagtcgattcaagtagcaaatgcatattttgaatgggctaagaagaacagttttctagaacctacttttggaacgtttgttaattcattttgctatgaaggcgatgataaacaattaatgcagaaagcagttcttgagatatggcatctggtattttcgcttcaaattccaatggagaaaccacaatgctaa

SEQ ID NO: 65224 - DNA, 1941 bp, Acinetobacter baumannii
atggctcaacaaatcgtgattgaagtgcccggcactaaaatcagtgaacttgaaaaaacttctagtgtttcacgtaaggatgtaatgcctgtagtgcaagccgatgaaactaaacaagctgacatcgggcaggtagctgatttagttatatctgaactaggctctgctgcattaaaagatgaaactgcatttgcaactcccgctgcgcttcaggaagtaagtgctagtagtcaatcacgtgatgatgctcagaatgaacgcattgatgctgttgagcatggcttggtttctatcgcaaatggtgcagatgcttcttttagtacttatgctaaaatgcttgcgtatgtccctccaaaacccaatgtatctgtacgtaataatgaccctgattctgcattgcgtggcacttatacatggacaggtacacaatatgtaccgggttatgaccctctcgataaatctattgagtatacaaatgagaagtttgacgagattccgaaggctgtttctcttagtgaaaatcagcctgtatgtgaattaaaagataaaatcgggaacgttgttgcgtggttcactgttgactcactattacgtctctttggattagatggcagtgttcaagatgaaattctcttatctaaagaaaatattaaactactaagccagcgcatctctgagaaaactgattcattacttctgaatgtacgtgataaaaacggtaatgtggttgcttttatagataaagaatcggctcttcatgtcgacgatttatttataaagaatcaatcaattagtgcattaattcagtcaactaaaaagtctgaaaaaaactcagcttttacatatcaaaatactcttatcaatcggtatgctgcaagatctgagtttacttctgtaatgactcttgaagaatctgctggtctacgtaatcgtatgattgctggagtaaaagttcctacagggttatttttagtttggcatcaacaaacaaagacagaatatgatggtgacggatcgggttctgcattttggtgtggttttgctgatatagatagtaattttaatattactattcgagataaaaaattatttatttatcctgatacagatgcaggaattattaagcatccccatctcggacgtactacagataatcgactaatcttagtctacgaaaaatcagtgggttatgccgaagcaacaccagaaaatccagtaaattatattaaataccaacgttattcatctgatgaagggctgacttggtctgagcctgtagcattaacatataccaacgctcctccaaccgcagctttaaaagcattgggcactacatgtgaggtgctgaaattggattcaggtcgtttaatagtggcattgtattcaatagaaggatactgcggttgtatttattctgataataacggagctagttggtcgtactccgatagatttattttagcttctaactggggccatgaaccatctatcgctctcgactcaaataatgacttaattatgagtatgcgtccgagaaccactaatccgatgtttgcagcatttggaaaaagtacagatggtgggcggacttgggaacttatacataaagatcaagttgtgagtgtcgtgaatcagactcatttgtcttatgacaaaagtatcgaagcacattttataagtcacgatattaatcctcaaaataaacgcaccaattttcggatatcaatttcatacgatgatggttatacattccctttaagttatgcgccttttcttgactcacgctatgttggttatacgcagattattaaatgggttgatggcgtatatcttctattaatggaatttaatgacgtgtggaatggtgtgaatacaaatgaacaattaggaattcaattatttacagccaaagaggtttttaacaatgtcagtcgaaattaa

SEQ ID NO: 65225 - DNA, 900 bp, Acinetobacter baumannii
atgtcagtcgaaattaaatcaaatattgtttcgaaaaataactttggtacttatctttctttagttactaaaccttcggatgcatttgcagcatataaagcccgtgtgttggccgatggcggagtaattcaagatgaagctgcaacgttaaaagcttttgagtacctcatcactaatggcttgtatggcgcaacaaaaacatgggtatcaagtaaatttggcttaaaactaggttctgatggttcaatttacaaagcatattcaattgatggcgctgatctagttggtaaagtctttggcactggtagctatccaaaacttttagaaggtgaaattacttttagtaatttacgggcggatactactaatggtgggattttaactactgagttgccactcactttacaagggaaaggtactgctcttggtatcaaaatgtcgaaggtattagtgtccgcagcgcaacaaaatatgatggcaagcttaactctacatgaagatgttaataatgcgtcagctgttttgtatttacttcagcgaggtaatgagagccttttaagttttctgcgtcaagttggtgttgttaataacaactcaacaacacaagctaaatacgttactgctcaattaaacactattagtaactcgaagtacttattcagaacatctgaatatttgacaatttgtgagggttatcgaggtgggactttaacaactcaaccaattgcagatccagctaactttgatggttatacagcttatattgactttggtggaagctatagaaaagcagcaaatcttaaagctacaaattttggtgaattttccgcatcacatttcttcttattcgatgaaataaccgatgctcgtgccatcaaattggcaattatgaatatctaa

SEQ ID NO: 65226 - DNA, 2019 bp, Acinetobacter baumannii
ttgctgtttggttttattctcgttcaatcaagtggtggtgaccgtactgttgaaggtgcggatgttttagtcgcaatgtattcagagcgtgattcttttgctgtttatctgcttaaacgtcatcaaattaatcgattgactttaactcaatacttgtctcatgggacacgtaaagacgaagttcaggttgaagaagaagttgaagacattgagggtgaaagcaattcaggcaatgctggaccattagaactttatacgctcaatttaaatgttgaagcgcaaaaaggtaaaactgatccactcattggtcgtgagaaagaaattgagcgtacagcacaaattctttgccgtcgtcgtaaaaacaatccattgttagtaggcgacccgggtgtaggtaaaacttcaattgcagaaggccttgcttggctcattgtaaatggtaaagcaccaaaaccgctaagccatgcagaaatttacagccttgatattggtgcattagttgcgggtacaaaatatcgtggtgactttgaaaaacgtttaaaacaattgttaaatgctttgaagaaaaatccgaatgcgattttattcattgatgaaattcatatgatcattggtgcaggctcaagtatgggcagtacgatggatgcttcgaatctcatcaaaccagctttagcaaatggtactttacgctgcattgggtcaaccacgttccaagaatatcgtcaggtatttgaaaaggatcatgcgttatctcgtcgtttccaaaaaattgacgtaaatgaaccgagcatttctgaaactattgatattttacgtggcttgaaaacgaagtttgaagatttccaccatgtacagtatgacgacaaagctttagtttctgcggttgagctttctgcgaaatttattaatgatcgtttcttgccggataaagcaattgatgtcattgatgaagcaggtgcacagcgccgtctaaaagcagaaagtgaagacagtttaattactgtagagaacatcgaagatatcgtttctaagattgcgcgtattccgcctaaaactgtatctaaagatgataaatctgtacttgaaaatcttgagcgtgacctaaaacgtgttgtatttggtcaagatgaggcaattactgcattagcttctgcaatcaagttgtcacgtgctggtttgaaatcaccagacaagcctgttggtagctttgtgtttgctggtcctaccggtgtaggtaaaactgaggttacgaagcaattagcaaaacttttaggtgtagagcttgttcgtttcgatatgtctgagtatatggagcgtcatgctgtttctcgcttaattggtgctcctccaggctatgtaggttatgaccaaggtggcttactcacagatgcgattcataaaaatccacactgtgtgttattactggatgaaattgagaaagcacatcctgatgtgtttaacctgttattacaaatcatggatcatggtgcattaacagacaataatggtcgtaagtcagactttagaaatgtcattattgtgttgacgacgaacattggtgcagaaagtatttctcgtgcaagcattggatttacagagcaagaccatagttcggacaaccaagaagccatgaaacgtgcattctcacctgaattccgtaaccgtctagatggtgttattcaattcaaagctttaccaaccacagtgattgaatctgtagttgataagttcttgacagaattgcaagcgcagctagatgaaaaacgcgtagttttagatgtcgatcaaagtgcacgcgactggttggcgacaaatggttatgatcgcttaatgggcgctcgaccaatgcaacgactcattcaagaacacttgaagaaaccattagctgaaatgatactgtttggtgaacttgcagatcatggcggtaatgtggcggtatcagtgaagaaagaagatggtaaagcagtgggtctaaaacttgaagtgtttgaagatcaccatacggcagaaccagcttaa

SEQ ID NO: 65227 - DNA, 264 bp, Acinetobacter baumannii; identical to SEQ ID NO: 49318

SEQ ID NO: 65228 - DNA, 402 bp, Acinetobacter baumannii
  misc_feature (365)..(374): n is a, c, g, or t
atgactattcctgattttattcctcaagtgggtctacgtttttcttttaaagatacaaattttgaagtgacctatgtacacaacaatgtagttcgtttttccgcagtggatggtggaaaaacaagcaacatcccgattaatagcttctctgaaagatataaaactggagagattcaatgtacctcttccccccataagctattactcaatggtcaattacttgataaaactagacgagctgaaaattatataaaagttattattaccacgttagatgactacttttctcataaaaaaattggagctgtaattcctgaaattgctaaaaagatagatgatccgttccctcctagcacctcaacagnnnnnnnnnncctcaacagtgatccgttggattcgtag

SEQ ID NO: 65229 - DNA, 840 bp, Acinetobacter baumannii; identical to SEQ ID NO: 6027

SEQ ID NO: 65230 - DNA, 558 bp, Acinetobacter baumannii
ttggttttgtttagacaaatatccttagataacgtagggctatcgcgttttttaagagaaaaaaagcttcctgagaagatatcttcttggaccacagattataaatttgctgaaaaattcaaaggcggtgtaccttctgaactcggggattttaaagctaccatttttaaaaccacgccactaaataatcaagtaatagtaagtttaagtgaactgtataagtgttctgatttctgtaatgcaatgaaacttaataaaaataagattgataggtatcatgatggtgctggtaaatactgggatacccagtctgaggtcataatggcaacagagtatttggatcactcaaatatatattcaatgggtgggtattcagggacacctgagcaaattgcagaacaagcttcgagagaaaagaatattcctatatctttaactattgatgatattaaagaattgagtagggattacattggaccttggtggttaagtccagaagggacgagacgcgctgttgctcgtactttggaaattgctcgtaatagggggatgctctaa

SEQ ID NO: 65231 - DNA, 351 bp, Acinetobacter baumannii
gtgcgattgactggatatttaactaatgatgagttagaaggggtttcaattgcaacaagtgtaatttcctttatatgctatttaactttaatactttgtccaagattaaatgatgagaaattaaattctttacgtatctatggtgctttaggctttttgccatattttattactcctgagctagaaattcttgttcgacttggtattccatttcaatacttactgctgatatatttatttttaacatttaggataaaaaaagtagctattctatcaactatccctttacttgcattttatagttataaaatattttcttctgttggcgcatttataggttatttgaagtga

SEQ ID NO: 65232 - DNA, 1017 bp, Acinetobacter baumannii
atgtctaatcctaaagcttggttatctttaaatgagcaattagacttattagcttcaagaaatgttgtaatctctaaccgagatatggctaaggagtgtctagaacgtataggctactatcgtttaagcggatatctatatccttttaaaaaagatagtggtcagtgctgtgcatatcctgctaagaaattaaaagctaattctgaatatcctgggggaatagtaaaattagataattatcaaaatgttaattttaaaactattattgatttatatgtttttgataaaaagctaagactattattattggatgctatagaaagaatagaaattgcattacgatcacaaattgcttatttattaggagaatatggtccctattcttatttagagcctcagtttttctataaagatttcataagtaactcaaatagtggagagtttctttctaatcatcatcaatggctaagcaaaaatgcatcgcttattaaaagatctaaagaggatttcattaaacatcataaagacaacgggttagtacctgtacctgtttgggtaatttgtgaagtatgggactttggtgccttagctaaactatatggaggtatgttagaagatgatcaagataaaatttctttgaaatatggtattcagaatggccgtattttttataaatggttaaaagtattaggtgaaatacggaatatttgtgctcaccactctagactttggaatagaagtataatgaatgttcctacttatcctccagaatctgcttatagttggcttagaaaattggatcatggaataaatagaactaaactattttcaatcttgtgtatttgttcttttctggtaaaagctattaatcctaatactcaatggattgaaaggcttattgaacttttaaaagctttacctgacatgtctactcatgggtttggcctaaataatatgggacttgatcatgagctgagtgatgaatgggaggcaattttaaggaatattagaaattaa

SEQ ID NO: 65233 - DNA, 444 bp, Acinetobacter baumannii
ttggaaatctggaatgctgcttactattttttttatattgcagcaatttgggatgtttgttactcaatttttataaaaaaacaaaataatttcaaagaggtagatggggtctttaataccctaattaatcaggatacgtttttaatttggatattttttattttatttatattttatttttttcaaaatattttttcaaagtataggttgctgaagggtgatgaattaattattaaaaataaaaaaataataaattttttaaattatactggcttttttatgattgaaaatttttatttgttagctatattttgttttcatactattattttaactttattttattttgatttttattcaactttagtgttttttattttttttatatattttataaccttatctatttattttcattggtggtacttgagtgttaaactataa

SEQ ID NO: 65234 - DNA, 756 bp, Acinetobacter baumannii
atgaagcaagaatttaatcaaaaaattatcttatgtattcctggtatttgggaaaatcatcaagctctattacatgccctacttgttaatgaaactggatatatttatgcgggctcaattattaaatctttaacaaacgaatattatgctgaagttgaagaatataaaaatgatccgaatgtcagtgaggtttttagatcatttagtctaggccgtttttctgaaagcgaattaaaaaaaattgaacaacataatatggttatttatgttgtttgtgatggcggatcaatagagttagcacaacaagctcttttattaggtcaagccctaatgaaagcaggcggtttagcaattaaagttgaaacttctggacttactcattgccaaggtgactacttagaattcaaggctgataatttagtagatttatataaagcatttgtccctaatattactggaaatgatttgctttattcttgtggaatgcaccaatttggcaaaccagatggaggcataaattcaaaaataaaatatgcttcgtatattttaaatagctttttactatatcaattgacagagaatccttcattttcggaaaaagatacttttactgcggaggaaggaatggaaactcttgttttggaactaaaagaatcaagtgatttttttgaccatgattctttatattttaaccctttaggaacttggatgctaaattcctcatttagttggaaaagattatttaaatttagttaa

SEQ ID NO: 65235 - DNA, 849 bp, Acinetobacter baumannii
ttggcacagaaaaactctattttttatggaatcaattttcatagatttattactgattatcttcatttaaaattagtgactcaggacaaatcagcagaagttatttttgaagagttttatacagttatgaagcagggagtagatactcctactgaatctttatttcatcttgtcagtaatcaaccagatcctgttttaagtcaaattcaaaaatttgctcactacaataaagactcttttttatatgaaatggagggttatttaggagaaggagcaggaaaatggattctagatatcacaactacttgtttattcagtagtttgggtaaatggggacaggaaattgatattttagatgtatattgtgactcatcaaaacccctaaatgctaatcaagaaatatttaataatatggttggaagaactgagaagaaatctcaaattcatgaaaaaatgaatctggaacaacctcttacatttaatttaaaacagcctgtacaaatggttgattcgaaaagtttctacggcattcaattagcagatgcgattgcaggcagctttaactatgcatataaaaattttaaagatgagaacaatcagtttgcacaaaaatggatgaacaaaattttccaagaggaaaatattttagtaacatttttaggcggtgattatgaatatgcaaatatcgaaaaagctagtgctatgttgaactggctgattctaaaccacatagtccaaaagtgtgatgatggattacctattctagataatattagtgatgagattctctccttaagacagctgatattattaagtccccctccaaatgtaaaagtgtggaatatataa

SEQ ID NO: 65236 - DNA, 1077 bp, Acinetobacter baumannii
atgaatattttacatatagcgccagaatataagtggtctaaaatttttattttacctattgctaattatcaaatacagcaaggaaatgaagtttggatatctactcctaatgcactagaaaatacttccgagcttgacgaagctaaatttgtttcttggaacagtaaatataaaaatatttttaagcatattggtaggctttttcttattttgaaaatggtgcataagtacaaaataaataaaatatattttcatactacagtagattcaactttaaatatttttattcttagattgtttagttcggctcatttggtatatgtaaatcatggcgtgccctatttgggttatagctcaataatgcaatatatattaaaattatgtgagattataaatattaatttttctcaccggtctattacaattacccaatctatgaagcaattacttgggcctttaaattataaaaaaaaggaaattactgctttaattcctggtacattggtaggtgtgaaaatcccttattcaagttataccgacttacaatctgcccgtgcgctattgaaaacaaactctgataactcaatattaaaaatattatatgttgggcgactagagcaccgaaaaggtatttatgatttaattgaagcaataaatcatacaaatctgaactgtgaattaactgttttgggtggcacagctaatgagttggaaacagaattagatttatcaaaagtaaaatttgaaggctttcaatctgacttgcgttcttattatttaaatgctgatttactttgtgtaccctctcaccatgaaggttttggacaagtttatttagaagcagccgctcatggtgtgattccagtgtgttgtaatattccagggccaaccgattttataaaacacaactcaaatggttttattgttgaagcaaaatctcccgattcaattctagaattatttgaagagataaatttaaaaaaatttgatttagatgcaattcaaaagcgagcttttgaatcggttcaagcatatgaatcatctcaagtaattagtaacaatatggatcatttctaa

SEQ ID NO: 65237 - DNA, 2025 bp, Acinetobacter baumannii
atggcaattaacacatcacttgaagggagactaagaaatactactctgccatacaatcaatgtttaatgccattatttgaagccgtagttaactcaatccactctatagatgaatgtacaaataatcccgacccttctataaaaatctatattgatcgtaatattcaaagcacgctagaacaagacatcacagctgaaaacaattcacctatttatgggtttacaatcattgataacggtattggattcaatgaggctaatatgaactcatttgaaacgttagacagtgaatataaagcaaagaaaggatgtcgaggtgtaggtcgtttaatgtggctaaaagcctttacgaatgtatcagtcgaaagtaattttatagattcaaaaaatgaagtacaaaagaggaaatttaactttaataaaaaaaatggtatttatctttcatcaataaatgcaatagagaaaacagaacctctgtcaacaactattaaacttgaagattttattgataaatatgaaaaaagatcacctaagtcttgcagtgcaatagctaacaatatcttagaacattgtttgtggtattttgtcagagaaggtggtgctccaaaaataaccatatatgatcgaaatgaaatcattaatttaaatgaattatttgatgctcaaatgtttgaatctgccctgccagaaagctttgaagtttcgggcattaaatttgaacttctacacattaaattgaaatcaaaaactcgccctccttgtattgcctggtgtgctgcagggcgagttgttaaagaagaaaatctgataggtaaaattgcaggtttgcatggaaaaatccaacacaccaaaggtgactttacatactgttgctatctaacatctacatatcttgatgaaattgtcagacctgaacgcatagacttcaatattgatcaagacgaaaccgatttatacacgaatgctataaatgaagttcaaattcgtgaaattgtttactctaaaatcacgactcatctcaatgagtttttaattcagtataaagaattagggcgtcaaagagtgcatgagtatgttgcaactaaagcccctcgttataaatcaattttaaaatacattccgaacgaagtattttttgttaatccagaaatttctgataaagaattagatctacttttacataaatatttgactgatattgaaagtcaaattctttctcaaggacatgatcttataaaagatgtagacaaagaagaagatattcagtctcgaattgttgattatatgcaaaaggtcgatgatgttaagaaatctgacttagctggctatgtttgtaaccgcaaagttgtgttagacattcttgaaaaagcaatacaacgaggaagtgatgggaaatattcaagagaggatttaatccaccaacttataatgcctatgcgtcaaacctctgaagatattggtttagataagtgtaacttatggcttatagatgaaagattagctttccatgattatttagcttcggataaaacattatcctcaatgcctattacagactcgacagataataaagaacccgatctttgtgcattgaatgtatatgatgaaccccttcttatatcagaaggtaaaaagctacctttagcatcattaacaatcgtcgaaattaaacgccctatgcgtaatgatattaaaagtggtgaagataaagatcctgtagagcaagtatttggttatttacgtcgtataagaaatggaaaagctactactgctactggaagacctattcctgactctaaagatgtgccaggtttttgttatgtaatctgtgatttgacatcaagtatgaatgacagatgtaaagaaatccatgaccttaccgaaacctctgacaagatgggattttttggttataagaaaaacttgaactgttatattgaagttatttcttttgataggttagttaattctgcaaaagaacgaaatagagctttttttgataagttaggtttaccatgcaactaa

SEQ ID NO: 65238 - DNA, 378 bp, Acinetobacter baumannii
atgaaagacaatgagttaagaaaactatatactattgaagctttccttaactatggagatctacccaatacttttagagaaggttggtcgccaagttatggtcttcactttgaagaaaagaatattagttttaatgaaaaagcccaagtctatatcagcttaaatggcagattaaaaaagacaaaatgtgaatttattcaagataggattttggctgaaaagcttttaaattatgttgaggcaaaacttaaaaagctttatccaagtattatattaaatattagaactgttgaatcaagggaattagactacaggagaaaaaaagcactagaagaagcaaaattgaatagtgttaagcttagagaattattagaatag

SEQ ID NO: 65239 - DNA, 396 bp, Acinetobacter baumannii
atgaaattcttagttttaatatttagtatttttggtacatcgattagcttcgctgcggagaattttaattttgaagatgaatatgtgcgtctgcaaggtgaattgaataaagcagtgttcaataactatgcttcttcacgagattatgatgataaaaagatacctctttcagaaaaattacagtctaaaaaagcttggtgtgaactgaacaaagctcatctaaatttaatgaatttagtttctgatcacttcactgaatataaggagttaatgaaaattaataatatagatgatgactcaactattgaaaaagtaaaggagtcacagtcaatttttaaaggtcattatgaacgatcaaaagctgcgttaaatgatacagattacaaatgtgaataa

SEQ ID NO: 65240 - DNA, 939 bp, Acinetobacter baumannii
atggatcgctcatggatttttgattctaatgaaagttttggttttattcagtattcagaaaaaactctcttaatctattttaatgattggctaataccgaaatatggtatttgggactttaaaaaatctttggattacgctttaagtttagaaacagatccagatttaagtgataaagctttaaaaaatcaagttagagaacaaatccgtattgaagttaataatattatggaggtaagtaatgctggttatttttttcctagaatatcaaagaacatggtgaactttaattttatatccaatgaaagcctgcaagatcttcgttcattccaaaatatcctaaaagcttttgatgagatagcgaattttgtcgaattagatgaaataaacatgaatacatacagtcataagataagagaattattaatactttcatgtacggaagtcgaatatttaatgaaaaagttattaattgataataactattcaactacaagaagatatttaaacaccatagattattacaattgtaaagaaatcttaaaattagatagatattctgttgaactaaagaaatacaaagatttaaaggtttttaagcctttttcaaactggtctgagggtgccacaacagaaactttaccatggtatgcagcttacaatgctgttaaacatgataggggtggaaactttactcaagcaaatttaaaaaatctcatggactcaattgcagcaattcatatccttcttgaagcccaatatgggaaaaacatttttaatggctttcatagtattatagaagataaaagtttatttcttaccacaacacatcctgagtgggaactaaaagatatatgtgtacctaagcttaaaattggaccacaaagggaagttcttactgaatggttgggcacaaaattttattttaatgaagcataa

SEQ ID NO: 65241 - DNA, 924 bp, Acinetobacter baumannii
atgactaaatttttgggtgatacgcaatctcaagaagtttcagaaaactcagtagcaattcaagctggtcgtgatctgcatattactacatctggtctttcttatagagacgttagagaaatatgtatagatttattagaagcaaattttccaaaaataagggaagaatcactcgcaatttctatgcaatatgtagaagagtttggaacaaaattctttgaaagactggtaaaggaagatcctgactcaacccaagaaaaattaaaagatcctgacgttcaagcagccataaatacttcaattatccatgtagctcgaatgacagaaaaatcccatcaggatattctttgtgagttaattactgaaaaattgaatacaagtgaagaagaagagaatttaattttaaatgatgcaattgaagtaatgaccaaaataaccaagaatcaaatgttatttttggtttttatcgccactttacgttttgttagcaggggaaaacaagatcatcatcgaaattcactgcaccctgacaataaggctcaatatgatttctatgaaaaggatataatagaaattataggagataatatttatgaaattgacacatatgttcttgaatataaaggtttaatacatacaaaaaccttatacagttataatgtatctttagctcaaattatacaggaatctacaggtagacaattattagagcctaattccactaaattattaaataatggtttagtttttaaaataaacttccctaatttatcaagacttttaactaagtttggatttaaagaaataagtgaattagattcacttataatgactccgattgctagagcaatcgctttagcttacttaaaaaattactacaactctgatatttcacaagttgaaaatgaactgaataataagtaa

SEQ ID NO: 65242 - DNA, 258 bp, Acinetobacter baumannii
atgagattattgttagtaaccactacgtttatttggttctgttgtggtgtgggatatgctttttatgattttaaaatggcatcagtagcaattgctgtcacaggttttattgcgtttttaacagcatttattaactatagacaaaattctaaaaaagaaaaaccaacgcaaaaccaaaaagtaaagggaaaaagttttggtttacaagcaggccaagacttaaatataacctttaataatggggataaagatgactaa

SEQ ID NO: 65243 - DNA, 531 bp, Acinetobacter baumannii
gtgttaggcatatcagatttaaaggaagattcattaaaaaatttgaaagcttatgagtttactaaataccatcaaaagattttaaaaaacactcaatatgatttcctaaatttagatattaaaaaaaataaagctcatctacgtgaccttgaagaagcaaaattgatgtatagagcaagtttaaattcttatccattatcaagtaatcttggtaataaagtttcgactctagaatctgcaattcaaaatataaatttaaaaataactatatggggacattcacttgatatatcagacgaagtatatataaatgaaatattttctttcaatgaagaaattgacaataatgtacgcgtaacaatttattattttaatagtcaagctaaatcagacttattaactaatttatttcacatattaggaaaagataaagttgaaagatggatgaaaaataagtggctagaatttaaagaaaatccatctaataaaaagacgattaaacccatcctctctgaacattccctcttctaa

SEQ ID NO: 65244 - DNA, 2079 bp, Acinetobacter baumannii
gtgttattgacaggatttcaagttgaaaattttagatcaattgataaaagtgaatggataagcgttgaagatgtcactgcattaattggtactaatgaatctggaaaaactaatttgttatgtgctttatggaaattaaaacctgcaagtgacgatggtaaaattaaccttttaactgatgccccacgtaaattatatagtcaattacgggccagtaataagcatacggtatttattaaaacggagttcacattagatgcggaggaatctctacatgtttctcagttgcgaaaaagaccattggcagaattaaaaagagttttcgtttcaagaagatatgatggaatgtatataattgactttccagatgagaagtcccccaccttgaattccagtatttttcataaatttatagatgaaaaaattagaaatataaaagaaataaatttactaaaaagtgagaatgaagaaaagcgtgataatttttcagatatttttacacaacttagagatatatttgataatactgttatagataaattacgcattgaaaaagctattgaattattattagaattgaatgatgaaaaagcacctaaaacaagtgagcttacaagaattttaaatgatacagagggctttttaaatactcactctacggaaattgatagaccaagtgaagatgaactgaaagagtctcgtcagtatattcttagtatcctgccaacattcgtatattactctaactatgggaatttagactcagaaatatatttgcctcatgtcattgaaaatatgactcgcactgatttaggtgcaaaagagtcagcaaaagtgaaaacattaaaagtcttatttgattatgtaaagttaaagccacaagatattttagatttaggacgctcagattcagatgaagagttatcagatgaggaaatcgaacttaaatcaaaagaaaaaaaagaaaggagtattcttctacaatctgcatctacagagttaactgcaaagtttagagactggtggaaacaaggagaatatagatttagatttgaggctgacggaaatcattttagaatttgggtgtctgatgataagagaccagaagatattgaattagagggacgaagcactggactacaatggttcttaagtttttatttgacgtttttagtggaaagtaaagattcgcataaagactctattttactattggatgaacctggtttgtctttgcatccattggcacaaaaggatctttcattattttttagaaatttatcaaaaacaaatttgattctttatacaacacattcaccgtttttagtagattcaaatcatctagatcgggtgaaagctgtatttattcaagatgatggaacaacaaacatttcttcaaatttgagagcaaatgaggcaaattcatcacagacaaaatcaatctatcctgtccatgcggcattaggtctcagtgtatctgagatgctttttaataattgtacacctgttctagttgagggaccatctgaccaaatatatttatcagctataaaaacactattaatcgcatttggtgagttaaagccaaagaaagacattatctttataccggctggtggtactaggggagtcaaaccaattgttagtttactaactggtaaaaatgaagaattaccaaaaattttacttgactccgatagtcaaggagaccaaatggctcaagcattgagaaaagatctttataaggataatacagaatatgtcataggtgtttcggaaattgttggtatagaacaagctgaaattgaagatttaattccgataaaaataatgattaaaatggcgagatatcagcttcgtcctactaaccctgatattgaatttgaagatatatatgaggatggaaaaccgctcttaaaacaattggagaagtttgctcttgataatgatattaccttggaaaaaggttggaaagttgattttgcaagattagtcaaaaatagtctattaaagttagctaaaattgatgaggacgatttaataaaatggaaaactttatttgaaagaatttctgtctaa

SEQ ID NO: 65245 - DNA, 807 bp, Acinetobacter baumannii
atgtcaaaaatatattcaagatcagatttaatgaaattagccgtagaggaacacttaaaatctaatcagtatcctaaagttggggtagttgtagctaaagatggtttcttattagctacgggttatcgaggggaaaatagtaccgttcatgctgagagagttgctttaagaaaattacagccagatcaaataaagggctcaactgtttatacgactctagagccttgtgttgcactagagaaaggacaagaaatagaatcatgtgcagatttactaataaactctggtgtaaaagaagttgttattggagtcttggatccaaatgctactatttattcacaaggttttagaaagctattagaaaacaatattaatgttacttttttcaatagaagactcagacaagctgtagaagaagaaacttttgaatatggggacattcggaaaattattgggagtggcaaaagaagggtacctgttgtacatagcggaattgaacttaaagttcaatttagtaagcaagatacgcgaacgattaatattcgatggaatactttgcagccacagagtggatgtgtagatcttttaagtgaaaatggtgctgtaagagttgcgtcgggtgctagcaagtttagtgacattactgatcctatggtctttcggtttgaaagtcattatgcaagaatgaaaaaaggtatgatcgcgattataaaaccatcaggttcaacattttacgtccttatagaactgctagacctttttgaaaatgatattttatttaaatacgaagttcgtaatgatagataa

SEQ ID NO: 65246 - DNA, 786 bp, Acinetobacter baumannii
atggatagacacttatttaaaaaatcttttactaagaatggtggaattacttttccatgtccaacatgtggaaatttcagtttacagctagacaaaggtacatttcatacttccgattctgccgcttcacgtaaaatgatgagagaacagagttactgggaggaagagtggatatcatctatttatacagcaatttttgtttgtcaaaacttaaattgtgaagaacatgttgtaagttctggaacaggatttgttagccaagaaccaatttttacccaagatgatcgttatacatatactacgtttgaatatgtgtgtttttataaacctaaattttttcagcctgctttacacttttttaaaattccagataattgtccagaagatattaagtctccattacttgaagcattttctatcactttactttcccctagttctgcggctaataaagttcgtgtatctattgaaaatttacttactaattttaatattcctaaaaccacgactaataagcaaaaaaagagagttcggttaaatttagatgcaagaattgaaaaagcaaaaggtaaacatacaattttaggacaacttgaagatattcttcatgctattaaatggttaggaaatgcaggaagtcatagttcttctgaaattattttagatgatgtatttgatgcttatgaactaatggaacatattttactggaattatttcagcctaaacatgaattgaataagttagccaaagccattagaaagagaaaaggtcctattaaaaaatag

SEQ ID NO: 65247 - DNA, 489 bp, Acinetobacter baumannii
atgcaaagattgagaaaaaataatataagcgttttgataatttttgaaaagtcagttcatccttattttgtttttaagtttttagattcatttgaggggcaagttcaaaaggatttgagtaaaaaatataaatatgcgaattcatttgattttgaaattatttattcaggtaaaagaattgatgaaaaagttaattcagaagaacagatagtgacagttgaagaagaaaatataatttcttcaagaattcaaagtgaaaattattatttatatgaaactgtagatgtggaaacacaacatggtactaaaagtaaaaaagatatagataataaaattaaaaatggaaattttgaatcaattaatgctagatctagtcttgatatatctaatataaatttgcataacaactcatttatattaaaactggatgcaatgaaaaaagaaattgctgagtataaattacctagagctattaatgatttattttaa

SEQ ID NO: 65248 - DNA, 1044 bp, Acinetobacter baumannii
atggcgggtaaattattgactgctttagatttattctgtggagcaggtgggctaacagaaggtttgaagcaagctggatttagtgtacttggtggggtagaaattaacccagtagccgctcgcacatatagaatgaatcacaatgaaagtcattgctttgaagttgatataagaaatttagaagtttgcgagatacttgataaattaaatattaaagagggtgaattagatctacttgctggatgtccaccatgtcaaggattctcaacattgagaacaagaaaaaaaatgttggcacaaaatgatgagcggaatgaattaattttcgaatttttaagattaattaaaggcttaaaacctaaagcaattatgatggaaaacgtacctgctttagctaaagatttccgaatggaaatttttataagcgaattaaagaaactcggttacttgataaatgaatcaactgttaaagtagaaaatgctgctgattatggtgtgccacaacggcgcaaacgtatgattgttaaaacttcaagagtgggcgagataccaacaacaaaaatagttggaaaaagaattacagttagagaatgctttaataaagcaaatttaggtaaatcgggtacatccggcgattggttacatgattatagtcaaacccgttctactaaagttatggaaataattaaagctatcccgaaggatggaggtagtagaaaagatttacctgatcatttaattctagattgtcataaaaaaagaccagctcaatttaatgatgtatatggaagaatgaagtgggatgatgtgtcgccaacaattacaggaggttgttcatctccttcaaaaggtagatttttacaccctgaagaagataggtgtattacattaagggaagcttctttacttcagacttttcccaaagattatatatttccaactgtggctaaaactgatattgcattattgattggaaatgcacttcctccagaatttattaggcaacatgctcttaatattaaagaagctttagaaataaaataa

SEQ ID NO: 65249 - DNA, 1461 bp, Acinetobacter baumannii
atgcaggcggtagtttaccatagccaagatatccaggcatgggagcaacgttggtttgctgcgcaaaactcctcattaggcttaatgcaacaagcagcttggtcaatcactcaacaacttattgtactttttcaaaaacaaaattttaagaatattgctgtttggtgcggacagggcaataacgctggtgatggctattttatagcaagctatctcaaaaaagctgggtttcaggttgaaatatttgcagctgatttgggtgaatcaactgatttacaccatgctgtcgattttgcgaaaaaaaatgatgttcaggttcaccaaggttttgaggtgagtaaaacctttgattgccatattgatgcgttgtttgggattggtttaaaccgtgaattaaacggttattggcaacacgctattcaacaatttaatgggcaagctgggctaaaaatttcgattgatataccaagtggtttacatgcaaatactggctctaccttatcttgtgcaatacgggctgatcatacatttactgttttagggcttaaagcaggattatttacaggccaaggcaaagaatatgcaggacaaattcatttaattaatttaataccaatagaccaagagctgcaacctcttgcttacttgacgccaacacatatcaaacttcctaaacgtttggcttttggacataaaggaagttatgggcatgttttggtgataggtggacatgagcaaatgggtggggctgttattatggctgctgaagctgcttttcatgcgggtgcaggcaaagtgacagtggtttgtcatagcaaccaccatcaggctattttgtcgcgagctcctaatattatgcttcgtgatattaatgatttcgatgaaaacggtattaaagaaattttatctcaggttgatgcagtatgtttcggaatgggattaggccgtgatgagtgggcacaccaaatctatcaacagtggtttaattatttaaatcagacttcacatttagaagttgtattagatgcagatgccctatggtttctcgcaaagcagcctgaaaaattgagtttacatatttatgcaacacctcatccgggggaggccgctacattacttggttgttctacttggcaaattgaaaatgacagaattgctgcgatttatgcgttgcagcaaaaatatgcaggccagtgggtgcttaaaggagcaggcagcttaattttagaagataacttgtatatttgtacgcaaggtaatgcaggtatgggaactggtggaatgggagatgtgttggcgggcatgattgcaagcttaaaagcccagttccacaaagcagttaccctacatgagatcgtaactctccatgctcaggcaggtgaccaacttgccaaacaaggcatgcgcggtttacaagcttatgagatgaatcaagcaattactcaagtagtaaatcaataa

SEQ ID NO: 65250 - DNA, 672 bp, Acinetobacter baumannii
atgaaaactgaaactattggtcagcgcatacgtgcgcttagacgcgcaaaaaaattgacacaaatgcaattagcaaaaattgcaggcgtaagctcgcccgcagttactgaatgggagaaagatagttatcttccaaaagctgcctcgatagaggccatggcaaatgcatttggtgtgagtactgaatatttattaacaggtaagggagaagtacctaatcctgaattaactaatattaccccagtacaggctcgtatggcccctgttctttcatgggttcaggctggtaattttacaaatgttgaatcagttgatatgtcgcaagtaacagaatggtttcctttacctgatgattgcgataaatgtttctatttaaaagtacgtggcgtaagtaatgaacctgatttcattgaaggtgattatattgttgtagatccaacagtttattattccgatatgcaatcaggcgatattatagttgttcgaaaagataaagatgctacatttaaaaagttagtaatagaatctgatggatcacgctatttacaagctttaaaccctaattttcagccaaatattataccaattgatgaagattgctattttattggacaagttattgattcaatgagatatacttatcgaggtaaaaggagggttaggaaaagttaa

SEQ ID NO: 65251 - DNA, 207 bp, Acinetobacter baumannii
atgactaaacaagaagcttataagttattaggagttaatggtgctgaattagctggattgcttggaattgaaccttctgcagtgtaccaatggagtgatgaaaagattccattagtaagggaatatcaaatccgtgatttggccgaaggcaaagaacccttaaacaataaaattgcagatttgaaagggcataaatatgagtcttga

SEQ ID NO: 65252 - DNA, 270 bp, Acinetobacter baumannii
atgagcaatttatcagaacggccagccgaactcaactcactagattttttaataggtgacgttgtagtacttactaaagagtgtcgaagttttaaatcaaatgatttgtttgaagtcaaaaataaaaccctgactagtttatggactatcaaatcacaaaatcatttgtttctggtttcatcaaaagaaatacgaacagcaacagttgctgaacttaacgccaaacgccggctaacaagcgctgagcaagcattagcggaggtgtcatga

SEQ ID NO: 65253 - DNA, 960 bp, Acinetobacter baumannii
atgagtctggacgcaaccatttgggcttggaaaacccgtcaaaaacaaaaggtgggtggagcattaaaaccacttaaaaaattagtccttctttctctagccgatcgagctggtgaaacacatgagtgctatccaagtattgctcgtttagttgatgacacggaaatggaccgcaagaccgttttaaaaatcattgatgagctaattgaagacggatttattgtcgatactggtaagcgtgaaggtaaaactaagcagattaaagtgtatcttttgatcggagttaagggccgagaaacagtcccaacaacggtacactttgatacagaaaatgatgatttaaacagtaccaacaatggaacagttccaacaacggaacagttccaacaattacatgaaagagtaccaacaattccgttaaacagtcccaacgttgggacacggaatctaacaaagaatctatcagatgaatctaaaaataaaaaaacatggttgagtttgaaaaaacttcgtgaagaaattcttttggcaactggtcaggaaacttacgagcagattaaaaacgcgacttggttcgatcgtgaattacgagcatttgaactttacaacgctgagaagaatctttgtgatgaactcatgcattaccactttgtagattggttaatcaacgcatgtggtaaataccaagcacgtgagcaagctagaaatcaaaacaatgcaacactggttcgagtctctcagggggagtcatatcaacttagcgacaaacaggttcatatcttcgctcaaaaactctcacaacatcctgagttcgcaagccagtttgcagctgcaggggaaagttacgatcaacttgcagcacgtatcgctgtaaaacttagtgatccagttcaggccaaacaatgggaaccgtatctcaagcaagtgggattcaaaggcacattacagggggctgcatga

SEQ ID NO: 65254 - DNA, 1047 bp, Acinetobacter baumannii
atggataaaagatatcaaatatttgttagctctacttttagagatttagaagaggaacgcaaacacattattcaaacgttaatggaaatggattgcataccagcaggtatggagttattccctgccgtagatgaagaacaatgggactttataaaaaaagttattgatgattgtgactattatcttctattaattggagggagatatggttctctgagtcctgatggtattggctatactgaaatggaatatgattatgcagtagctaaaggaatgaaagtcatagcattagtgcatggggaaccagataatttacctcaaataaaatgtgaaaaagattctactctacaagctaaactagagaaatttagagcaaaagtatgtacaggaaggttagtaaaattttggaaaaatttagatcaaatatcaggtattgtttcattaagtttaaccaaaacaataagaacttatccagctgttggatgggtacgtgcagatttagtagcagatgagagttccgccaaggaaattcttaaattaagagataaaataaaagagctagaaaatgtaatagagaatttaaaagtaagaccagaaggacttgataatttatcacaaggagaagatatagttgcactagatatcaactataaagctaataaaaaggatgacccttcttcagcaaccaaaaagtcttatcaaattagtgtagaactaacttggaataatatttttgaatatttatcgacgagtctcatagtagaaaatagtgaagagaatctattggaccttcttgctgaatgcattgagagatattgctatgaacaaattacaacttatattcaagaaaatcacttaaaaaatattataaatcgtagagcttataaagaggatttgagacttgtcatagttcaatttagagctttgaaattaatagaattaagtacaaagaaacacccaccatcggataataacgtatattggaccttgacaccttatggtgatcaattaatgactgaacttactgctctaaaaagaactttttaa

SEQ ID NO: 65255 - DNA, 651 bp, Acinetobacter baumannii
atggatttcaaaaaacttatttcctctgtaataggggcaacacttacattgacagttattttcttttttattgtatttttcttactgaatactgataattccgttactaatcctttgaaagaagcgttaacactaacaatttattttttctctggcatatctactttgggatctgttttagcagtgatatacacattgtatattcaagctttacgtaatcgcccaaattttcttttgactcctactaagctagaaataagctatgataaattcgttcgaaaaaactcttcattatatggaatagagattatgaacataggggaacctgcttatgttatgaagatgaaattggaacatagaggtataagaaaaaaagaaacaacatttggttttagtaacagtcaacatagatttgatatttttaagaatattagtgaggcagggaaaggacattattttaatataaatatatacacctcccccgcagatgaaaggtttaatgaaataaaaaatctaaaactacatctcataatagagtatcgagataaaaatcaggatgctataaaagatacatacttaatagaaccagtagttaaacacaatacttttgattttattaaattaataaaaatcaactcaagcgtagaatga

SEQ ID NO: 65256 - DNA, 735 bp, Acinetobacter baumannii
atgttagatcaatcattttttttaaatttaaatttttggagcttaattgttgccttcttcgctctattagtatctctttttcctcatattaaacatcttttgaaaggaaaaaaaatagatttagatattcatagaaaaattatagtttatcactgggttggttttccgagcctcaatattcatctaggtctatttaataagggtgggacaaaggtaaatataaaaagtataaatttaaaaataactaaggatggaaatcttattacaactttaaaatgtcaaggtttttttgaaactagtgtttcacaaactgctaatacgttctttccttttgatttacctgctgatgattcttggactcatctatgttggttcgcaatggatattgatcgaaatcgcgagcaaaaagctaaaaatgctattgttgccgtcgatatgaatattgcagagaaaattcgagctaatgcagtcaacactcaaccaattgaagctgagagtgagttagttgatcatttagtatcattgcataatcaaaattttatttgggaaactggtgaatactttgcggaaattcaagttgagataaacccagttgtaaatatttcaaaaaaattccgttttactctttatgaaacagaggtaaatgaattaaataattatacattagaatataaatatggttttgcatatggtcatcaaaaaaataaatttgttttttcacaaatttctgattga

SEQ ID NO: 65257 - DNA, 123 bp, Acinetobacter baumannii
atgctttctacaccacctgcaattaccaagctcgcttcgccggctttaatggcacgggcagcaatggcaatggcatcaagtgatgaaccacatagacgattaatggtggttgccggcacctga

SEQ ID NO: 65258 - DNA, 123 bp, Acinetobacter baumannii; identical to SEQ ID NO: 65257

SEQ ID NO: 65259 - DNA, 123 bp, Acinetobacter baumannii; identical to SEQ ID NO: 65257

SEQ ID NO: 65260 - DNA, 618 bp, Acinetobacter baumannii
atggaaactaaatcacgaggaagaccacgttcttacgatcctgaacgagtgctagagcgtgctttacatgcattttggaaaggtggattttctggaacttctctagacactttggccttggtcacaggattaaatcgaccgagtctttatgcagggctaggagataaacgtacaatttatataaaagctatgcgttattttcagaaatatgccaagacagagtttggcaaagcattggaacataaagttactgatagatcctttgctgatgttattttgagatatttgcaaacagctcttaaagtagatggatatcatgaagatattggtttaagcggatgtgcagttatatccactgccatggctgacgcgttagctgacaatgaaatccaagccgtattgaaagaagttttaacagaaatggatgaacagctttatcaacgattgaggttggcgcaacagaatctagaattacctcatagtactgatattgatgcattagctttcttaatgacttctgctgtgcatagtattggaattcgtgctagggctggtttgaatttacaacaaattgaaggattattgctttctgcatctgaaatgctttgtcctgcttaa

SEQ ID NO: 65261 - DNA, 1128 bp, Acinetobacter baumannii
atgcctccaatagagtttaaaaatcaattgaaatcattagaattgaatatctacttgatttttataattttaatttttacaagttatctccctctaactggttgtagtcataaaaccgatgagccagaaaaggttattgcagttcaactcaccacagcatctcctgctggcgaactttccaatttatctttttccggaaatattgtccctagagttgaaagccaactctcctttcgggtagcaggtcgtgtcataaaacgtttagttgatacaggcgcaaccattaaacaaaatcaaccgttagctcagttagatgacaccccttttagactgagcattcaggaagcatctgctgaattgcatcaagctaaaagtaccctcgcgagagtacaaagagatctacatcgcaatcgtagcctagtcgaaataggtgctatatcacgagccgatctcgatagtcttgaaaacctatatcaaaatactcaagcacaggtaaatgcagctcaaagtcgacttgaccgagcaaaaaacgatctaagttatacgaccttgcgttcaccagcagcgggaacaattgcggaagttcaggcagaaagtgggcaggttatctcagctggaacgcctatatttaaactggctcaaaacggtgaaaatgaagtacagatagatgttccagaaagtcagattaatcaacttaaaatagatcaacaagctagcatcaaattactgagcttatccgagcatacatttacagggcatgtgcgtgagatagcgactgttgcagacccgaacagccgaacttatcgtgttcgaatttctatatcgaatttacctgctgcagctaaattaggtatgacagcaaccgtccattttttaaataacaatgtaaatcagaaaattattttacctattggagctctgtttcaaaaaggacagcaaaccgcggtttgggtgctccctcatggtgctaaaaatctacaactccgtcccgtcttattgagcaaaatcaatactgaaactattacagttgccaaaggaattcaggctggtgaacgaattgtcacggctggggtacatcgcctagacagtaagatggctgtaaaagcatgggatgggaggttgccgtga

SEQ ID NO: 65262 - DNA, 3045 bp, Acinetobacter baumannii
gtgaaaggatttaacttatccagctggggactccagcatcgaatattagttatttttgcgatgctactttccctacttttaggtaccgtggcttattttaaattagggcgcgccgaagaccctaatttgacgatcaaggtcatgacaatagacgtcaattggcccggtgctaccacacgtgatctagaacaacaggttgtcgaaaagattcagcgtacactgcaagaagtgcctaattatgattatgtacaaagttatgtacgcccaggtcaagcaacgatctttttagttctgaaggattggacccgtaaaagccaaattgaagaaagctggtatcaagcacgtaagcgtgtaaacgacataagacagaatttacccaaagatattcaaggtcctttttttaatgatgactttggggatacctttggctctatttatgcatttcatgctgatggatttgacgatgtcaaaatgaagcaggtgcttctttctacaagagaccatcttcttcaggttcctgatgtatcaaaagtcatgttgttaggtattcaagaacctcgcttttatattgaattcaattatgcaaagttagcccagctgggtatttcacccttagacctagtcaatgatttacaaaaacagaatgcggttgcgtcagcaggaacttttgaaggtcctcatgcacgtatatatgctcgtgttgatggagatgtaaaaaccgtacaagacttaaaaaatattgtagttcaggttggatcacacaatattcatttaggagatgttgcccatattagtaaagggttcattgaccctccccaaatctcaatgagacgaaatggtgaacgagtcactggacttgcagtttcaatgacagaaaaaggcgatattcttgctttaggaaaacagcttgatcaacgtattaaagaggtacaagaagccttacctgctggaattattattgaaaaaatagtagaccaacctagtcttgttgaacattcggtgaatgagtttctcggacactttgtgctagcactagccattgttttagctgtgagtttatttgctttaggtatgcgaacagggattgtggttgctttatctgtacctctagttttaggtattacctttttcttgatgtggcgcctagatatcaatttacaacgaatctcgttaggtgctcttattattgccttgggcttgttagttgatgacgcgattattgcagtcgaaatgatgcaagttaaaatggaagaaggtctggaccgttttaaagctgccagttttgcctggagcagtacagcttttccaatgctaacaggcacattaattacagccgcgggctttgtcccagttggctttgcattatcttcaacaagtgaatttaccggatcaattttttgggtcgttgggatttctttaattgtttcgtggttggtggcagtattatttacaccctttttaggtacaattttacttcctaaaatacaagcccatggttcccattcctcacaacactcttatagggataaactctcacaatggtttagtcataaaattgcatggtgcgtcaaaaacaggaaatgggttttactggcaaccgttctcagctttattttatctttaattgcatttcaattcgttcctcaacaattcttcccagattctccacgtgaagaaattttaattgatgtacaactggaagaaggcgctagctatacagcaactttaaatgcaacgaaacaggttgaaaaattactttctagtgatcaacgggtccgcgatttcacagcttatgtgggaactggttctccccgtttttatttatcgcttgatccggaaacacctaaaaataattatgctcagttaattgtttatcctaaagacattaaacaagcgagtcagctaacttctgatttgcataatcgtcttactcaacaattttcgcatatccgcacacgggtttaccgactagagttaggaccaacagtcggctaccctgtacagtttagggttcgtggtaaagacccagaaaaagttcgtgaaattgctggcgaagtccgtgacattatgcgtcagcatccaaatgtacgcgatatcaattttcaatggaatgaacgcagtaaagccatcagatttatcattgatcaggaacgcgcccgtagtttaggaatcagttcgcaagatatttcacgtaccctacaaatgttattaagtggttatacagtcacccaaattagagaaggtaccgaactaattgatgtagtagcaagagcaaaagcagataatcggcttgatacaactcaaatgggtcaaattatgattcatgcatctaacggtaggaatattcctctcgaccaagtcgctgaacttagacccgtattagaagaaggtggaatctggatacgtaatcgcttgccaactctcagtgttcgtgctgatgtaaatggtgctcaagccccagatgtttcgaagcaaattgtacccttgttaaatgaccttcgtaaaatgctgcctattgggtacagtatcgagactggtgggacgattgaagaaagtgctaaagcggatgcagcaattcaatctgttatgcctgttatgttattattgtgggcgatattcttaatggtgcagctgcaaagctttagtcgaatgtttatggtggtattaaccgccccacttggcatgataggagtaagcctagctctattaattactcgcgcgcctttcggctttgttgcaacattaggggtcattgctctagcaggcatgattatgcgcaattcagttattttggtggatcagatagatagaaatatttcgactggccaaacaccggaacaagcaatcattcaagccactgtcggacgtactcgtcccgttctattaacagcattggctgcaattttagcgatgattccccttacactttccaccttatgggggccaatggcaattgcaattatgggcggtttggccgtagcgactgtactcaccttattctttgtaccagcgctttatgcagcttggtttagggtaaaaagctaa

SEQ ID NO: 65263 - DNA, 954 bp, Acinetobacter baumannii
atgattgatcatcgccaagttgaaatattccacgccattatgaaaacaggcagcattactggtgcagccaatctattattttcatcacagccaaccattagtcgagagttggcaagattagaacaaatctgtggttttaagctatttgagcggaaaagtgcccgtatttatccaaccgaagcagcattggttttatatgaagaagtcatcaaatcacatatcggtttagaaaagattttccatacagttcaacaattaaaacagcatcaaattggtcatctgaatctatgctgtttgccgttcttagccacaactctacttccaacggttatcgcaaaatttaaacaacatgttccccaagcacatattgccattacaccaattgacacaccatttttagaagctaacctatcatctcaacaattccatttaggtttgatagaaaacccatcaccgcctctaggaaccagtattcgattacaactacaatcaaatgaaatctgtattttaccggctcaacatcctttacttgaaaaagaacagcttaatccagaagatttttcacatcaaaatttcattagtatggcgttacatgatccgtaccgccaactcatagaccaattgtttaatcaaatgcagattcacagagtgatgaaaatcgaaacacacagtgttcattctatttgtgccatggtaaaaaaaggattaggcatttcaattattaaccccttagcaatgttggatcatctagatacagggattcaatggcgccctatttctttttctatcccatttaccttgagtttagtccagcctaattatcgaccatcttcaacaattgttgatttatttattgatgatttaaacgatattttacaggatttacaccaatggctcacagataataaagttccttctggcttcatctccaatactataaaaccaaaccaatga

SEQ ID NO: 65264 - DNA, 465 bp, Acinetobacter baumannii
atgaccaatctatttcaaattcgggaagctaccgtacaagatttggaggaattatcagaattatttaatcaatatcttgagttttatggcaaaaatagaaaacctgaaaaagctaacaatttcttattgtccaatattgagaatcatcactccaagatctttgttgcccaaaaaaatcagcaattgcttgggtttatccagttatatccttcatggtcatctttgcaaatgggacgagtctggattattaatgatttatttgttcaggcagcatcacgccaattaggggtagggcaggcccttatgcgaaaggggattgaatttgctaaacgacatgatgctgtatatgtcgaattagaaactagcaaagagaattttatagcacaacaactttatcggaagttaggttttatgattgagcatgagacttactatctttctctgaattttggagaggaggaataa

SEQ ID NO: 65265 - DNA, 1071 bp, Acinetobacter baumannii
gtgttaatagaattattaaaaagtttagggcttgataaaaaacttgaaaaatatgattttaaagaagaagtttcagatacagggaattcttctgctattaaagcaattgataaagaaagctcagaatttgtatttataaagttcttattgtttcccagacatataacggaaataaataagtttaaaaatgaaatttatattacagaaaagcagggtttataccctatgttgtcatgctttccacgttatattgaaggtggggagttaatagaaaactacgtttattattttataaccgaatggattgatgggaaaactttaaaagagaaaatttatgatttaaaagactcaaatataagagaaaaattatgtttgttttatcaggtggtccgagctttaacagcattgttgggtgttgaacatagagatctacatccaaataatatttttattattgaagaaaagttcagtgaatttaatagagttggattttataatgatagaatttcaccaggtattaaaataattgattttggtgaagcagtttatccaatgtctactcaatttgatgattcaccagattttttgtatgattcttattttcaaactggccgtaaaataattactgcatttaattatattgctcctgagttttatctcccaattttggatggtaaatatgttaggcgcttaaatgaaaatagtgatatttggtcattagggataattctttatcttatattgtttaatgaaaatttatttaattatgctgatataggtacatatttgcaaagtatgtataatggtgaaatgaaacaaaatatattggaaaaatcaaaaaaaattttagagttagatcatccttctaattatattatttataagctttttaatggaattatgagtgtgaattataaggagaggcctgatttaggtgatattcaaataatattttggcatgtaattaatagtgaaatagtttatagtaaaagtgaaactatacaattaatcaaaagaccaagagaatttttaacaaaaaaaggaaaaataagtgaacctgactatgattaa

SEQ ID NO: 65266 - DNA, 477 bp, Acinetobacter baumannii
gtgaacctgactatgattaatgtgaacttatttagaggatttactaatttagtcccaaatggtgtattgcatactaatattcattttaatggtacaagaaaacctagagatacagatccaattatacataaaatatgtaatgagtggttttttgaaaaatttggaatttatgcacgttcaagttgtatattcgttacacaaaatcgtgaacaagcagcaaattatgtttctgatagcggttgcttgaaaaaagttttacctcaatctccatgtaaatatatttttagtacaaaagttaatgatttatatgatttggaatttagaatggatttgaaaaaagaatattcagaattaaaaagtgatgtatataattggttagaagaaaaaaattataagattgttgataatatttttgaaattccaaggtttgatggagagattatgcttttttgtgaatacttctatgtggaggattag

SEQ ID NO: 65267 - DNA, 783 bp, Acinetobacter baumannii
atgaataaatacttatcaatacttaaagactatcagaccttaattttagtaattccagcaatatttggtggaatatatcaaatcgttatgattttaaataacttaggagtctcatatttaaaatacttttcagtatcccaggtaatacctgacagcttagtcattataatgatttctatctatttttttggaatctataaaattttacatatgttatttatatatttaaccccaactattacaagcaacaaaaaatttaaattatacttttatattttcccaattactattttaacaatatcaataattttatacatatataaatttagatactatcctaacaaaagcatgggtttactagatttttttggacaactgaccataatggcagcaattgcctatatagtttattgtactatttttgcaatatatgatctattatatgattattatgaagaaataagagttatttctagatcaaattattttaatttttttaaaaatactttactaacaatagtacttttagttatttttaaacctttaccagccaatatagtagctctaaataatgaaataaaaagtactcaagatctttataattatcacaagttatcgttaaaaattagcaaacaatacaaacttagtagtatgccaacactaatatattcaaataaggactatgttttctataaattaatgtataacaatgatactaactatacaattcttgcaattgatacaagtgaacttacttcttcagataaggataaagaaaaataa

SEQ ID NO: 65268 - DNA, 645 bp, Acinetobacter baumannii
atggttacagatttatttaaaaaagccaatcttgctgattgggtgggtgcaattacagcaagtctttttgttacaggtttatgctatcaatatggttattacggtactttaggattaaataatgcgtggatagtaaatttactacaggctaaagaaatcttaatagtaaatgtaacacttataattacatatttaatggctgccttatatctagaatctcttttttctaaaagtacttcaaataaaaagaaagtagcaattctttctaatgtagtgctaactatattaatgattataaatataattagaacaacatggtctggagcagcattttatttaattgtaataatagctttaaattcaatactcttagcattaagtaaatataaaactataaaatatactggattagtttccttaattcttgttgttccgtacttaaatggagcatatgaatatcatcagaaaacaaacacaaattcattatctgtagcaatattaaaagataaccctaaagaaaaatggtatttactaaatactttttcagacaaagctatcctaattagtaatatcacctcgcaaaaagaaattaaagttattgaaattaaagagattaaaaccataaaatcagaagctagattttaa

SEQ ID NO: 65269 - DNA, 603 bp, Acinetobacter baumannii
atgttgtcatacaaattttttaatgtgaatattatggataaagataaaattgacttctactttagagtattggaaagatatgataactatataaatttagcaaatattaaagcatctaatagtattaccttgattggttctttcactattgcagcgactactatagttggttggggtctatttggtgaaaataaaggtaccctatcattaaatagcactaatactataattataatatcttttattgccttcttattttttgcttttatgggatatttagaagcaatgaaagtagtccaacccaatacaaaagatttaaaagactcaaaaaacaaaacgttttcaaatattgatgaaaaagatttatcaacaatattttatggtcatgtaaataattttaaaacattgcaaagttttcaaaatgaggttaaatcaaaagatgctgaaaatcttttaaaagatctactttctcaagttaggactctttcagaaatcacaacacaaaaaatggaagattgtaaatcaataaataaatggattctttcttcatttattactattttaattatattattatttagctttataaataatatggggtaa

SEQ ID NO: 65270 - DNA, 975 bp, Acinetobacter baumannii
atggcaaaacctagaatttttattagctctacatattatgacttaagaaatattcgctctgatcttgaaagatatattaaagaacgtaactatgatcctattttgaatgaaaaagggcacataccctattcaagtcaagcaagattagaagaatattgttataaagaaatagaaaattgtgatattttaatttcaattatcggtggacgatttggatcaatagcatttgatagtggtggttattcaatatctcaaaaagagttaagaactgctttagaaaaaggaaagcaagtttatatttttattgaaaaagcagtactacatgaatataggacttatgaacataataaagataatgctgaagtaatttctgcaatgaagttttctgcagtcgatgatttaaaaatttatcaatttttagatgaagtttttgcactacccatcaataatcaatatacaggctttgaaacatcgaatgatattgttcaatatttacaagagcaatggtctagcttattccatagcttactaagtgatgctgctaaacaaaaagacgttaaaattattgaagaattaaaagacaccgcaaaaaccttaaagcagttggtgagttatttgacaaatgaaaaagaaaaagggaatgaggctattagagagattctattttcgaatcatcccgtattcaatataattcaaaatgcaattggtaccaatattagagtgtattttactaatttagaagaattaaaagatcttatggagacatttggttatcaatatatagagaccatatttgattttgatgacttttttgaatggcgttataataataaagttataaaagtctataaaaaactttttcttgatgatatgaagttaaagccaatgaatgtaaatgattgggataataatctagtcctgattaaaaacttacagaatgtacatcatgatcttgatgatgatttacccttttag

SEQ ID NO: 65271 - DNA, 696 bp, Acinetobacter baumannii
ttgctagattctgtatgtatattgcaaagagatggtttaggttttaattttactcataggtcttttcaggagtatttttctgcacaatttttagtaaatataatcagtgctaataaatatgatttgtttgaaaaagtatttaatattagttcacaagataatgttattagtatggtttatgatataaatccatctttattggagaaagaatggattattaagaaaatcaataaaattaacatggatatttctagtctttatagttatgaaaattatgagttattgatttttcaaaaagtatactcatctatttctgtatattataattatgatattgataaggaaatgattatctttgatgctggtggggttgaaaaatataactacttttttagttttatacgtgatctctataatgaaagttatctagagtattctttgaataaaaaagttactactaataaagatgcagagtattttgaaaaagaacttattgattatattagatgtaatggtgatatagacttggagaatttaaatagaattgatccttatgcatatcaattaataaagaagtctcagttattcgaaggtgttgttgaacaaattgattttttaaaatatcagtctggtcttttgaaaaataatcattctaaacaagatgtagatattatgtctttaattctaggtaaataa

SEQ ID NO: 65272 - DNA, 369 bp, Acinetobacter baumannii
atgaacaaaattgagataaataatgaagataattttatgagcgaaggagattcatttgtctcccttccaaacaatttccaaggtacaattaacaatagacgaaatcatttagatagagtaaaaaacggcgtctatgttagagatgaagaattaactatcgaaaaaattttacttgaatacttaaaaacagatactccatctgaaaaaattaaagatgttgtatctgcattaaaatctctaaaaaataaggatgaagattctatttatgatgtattaaagagtagtggtattaaatcatatcttgaaattggtacttctttaataaaccttactacagctcttattccttttgtaggaaatttattttaa

SEQ ID NO: 65273 - DNA, 510 bp, Acinetobacter baumannii
gtgaatcagcctggactagagataattgattgtgatgatgttactataagttctaatactataataggttatgatacttctattcacttttctggatgctcaaatattaatgcttctaaaaatacttttaaatatggaagaacaggtatagaattgattgattgtatgggaagagcaaatataaaaagaaactttggtcatcaaattgatgaaatgattagcgttgagcaaactgaaaatattactagaatagttcccagccaaaagataagtgatagagataaaataatagagaaaaacaaagctattgttgataagtactttcttgaattggagcattctaaagttaaattaaaagaagtcatagaatatgaaagaaagtttaataatgaaatacgagagcttctaaacttagaagctcaagaaaaatttttaaaaaattatgcagaagtgaaaaggattcaatataaaaaagcaaattggagagcacctatattagctttaaaataa

SEQ ID NO: 65274 - DNA, 783 bp, Acinetobacter baumannii
atgaatgcaatcaagtatcttaaaaaatttcacattaacgaagaggtcccatttagttgccccatttgtaaaagatcttgcctggtaattgacatagaatctcttaataaagtagaaaaagaaagtagtaaaaaatcacgcaaatatgatgaatttgagcctgaatggattgaatattcttactctgtggtttatcgatgtaccaatcctcattgtttggagattgttcaatcagttggaataggcggtgaagagcttatatattctcatgatgaatatggtcagccagaagatgcttatcatgaaagtttctttgttcctaagttttttttgccagctataaattattttaatattcctcaaactacaccagatgaagttaaacgccttgttttatttgcatttgatttgacgcctgtatctcctagtagtgcagtaaataagattagagctgcaatagaagtcattttaacattgaacaatatccctggaagagatgctcaagataaattcatttcacttaatcaaagaataaaatcaataatagaatcccatccattgcatccaattaagagccaaatgttagcaataaaatggctggggaatgctggaagtcacgaagatgatgatattgaaatagaggacttatttgattcatttgaaatattagaaacgatgttgaatgttctctataataacaatccaagaattaatagacttgtcgatcatgtaattatgcatgaaggaccaataccgcgtggagcacgaagatctattaattaa

SEQ ID NO: 65275 - DNA, 687 bp, Acinetobacter baumannii
atgaataaaaatgttgttgcctttagcatctcagtatccgtcattcttttagctttcttgatttggtgtgtcttcggcctactcttcaaatattggggtgacgtagcagcaataaaagatagtctatcaactatttcaggaatattcggcggcttgactacgttaggggccgctgtagtggcagctcatttatttaatgattggcgagaccaacacaacaagtcagttttcaatgaatacgcaagaaaggtgcttgatagttatgatcgcttatcaatatccattcttgattttcaattgaaacatagtgaccttgaagccgaccttttcccatttcttgtttctatacaacttcaagataagacttatgaagaggaataccaatcaaaaatagagatcataaaaggaaacgccaatacaataaaaacgaattttaaattttttattaggaatttaaagcattaccatttactcatagaagaatcgaaatcttcagaaatcaaaattaaagtattagaagattcttttgaaaaaattacagatataactaattattctatgattccaactaacgagttggcagagtttaataatttatgtggtaaagcctatgaagagtactttcgtcttcaaaatttaatagatgataatgaaatctataaaattttaaaatcacttaaagtatag

SEQ ID NO: 65276 - DNA, 2628 bp, Acinetobacter baumannii
atggcaagatcaaattcaatggtggctagagaattgctttttaatcaatttcatcaagttgatagattagggttatttcaaggtaattatcaaacacccgaatatctaaaggcaaatctcaaagatgatttgcgttcttatcaggaagaagcattacggtatttgcattatgcacaaagtagtcatgaggcagatattcgttttaaacatttgctattcaatatggcaactggttcgggtaaaacgatggtcatggctggggctattctttatatgtttaaagagtatggctaccaaaactttattttctttgtgcatactgatgcaattatccaaaaaaccaaagaaaacttgttaaatgctttgtcatctaaatatctattcactcagcctttagagatagaaggtgagcgtattgttattgaagctgtagatacattcccaagacaaccgagtaaaaatacgatttatttgaagttatctacgattcataaaatccatgatgaattaaatagctataaagaaaattgtattacttatgatgatcttgctgagattcctcttgtgctcttgggcgatgaagcacatcattttaatgctgaaacaaagggaaaaggtaagtctaaaacttctactgagtatgaagaattaacgtgggaacggacgattgaaaatattctttccctgcaagataagaatcgtttattagagtttacagcaacgattaatttagataatcgagaaatttaccaaaagtataaagataaaattgcttatcagtatgacttgaaaaagtttatgacggatggcttctctaaaaaagtcatgcttttagaggctaatcagcatgatgatgaaaagatgctggatgctgttttattaagtcaatatcgcaaattagtggcagtaaagcataatattcaggactttaagccgattattctgtttaaatcgaataagattgcaatatctaaagccaaacaagagcaattcactcaaattattagcgacttaactccacaaaaacttaaaacacatttagcgaataagcaaaaccaaattacctcatccagtagtatttggaatcgggtgatttctcattattctactgaaaatctggttggaattgttgagggtattcaagaagattttaatgagttgaatattcttaatgtaaataaatcagatattttggaagagtatccagtccttttaaatacactggaggaacctgataatccaatacgtttaatttttgccgttgcaaaggttaatgaaggttgggacgtattaaacctttacgatattgtcagaattagtgaaagtgcatcatctacaaaatcaggaacagatagtgaagcccagttaattggacgtggagcgagatactatccattcgtgttaaatggtgaaaaaagttttactcgacgttttgatttaagtaataatgaacttagtatactagagcaacttcattatcatacaatcaatgatcctgcgtatattaaaaccttgcatacttctttagaacaagcagatattattgcggatactgatggtaacggtgtagttgaacacgctaagcttaaatccgcatttacaaactcggacttttataaatttggaaaattattctttaatgaagttgaagaaatttgtgcacatgagcgttcatggacatcatactcactagaaaagcagtatgagatttcatataaaacggctaatgaagttggtttagataacttagcagcaagctcaaatacaagtctacacacaaaaactttagagcttgaccttcgttattggtttaaggctatacagaagattagattttttgagtttgcgaatctaaaacattatttcccagagcttcttagtatcaatgagtttttaactgattcaagatacttaggtggattgacagtcaatgtgaatttaccaaatacgctcaacctaagcaatctttcaccacatgaaaaattacagcttattgaaattgttttaacgcgtattgccgaaaatattcgtcgtaattatcagaaatatagaggaacgcatcgttttattagtaagccattaaaagacgtcattacagattatagtgttcatgtcgacccgaatatgatggccaatcagcgcattacatcagaagcaacaattggtaaaacttggtatgtctatgataaagcaattctgaatcagttggagcatcgattaattaagcttttagatatgtttatggagaagcttcgtggtaagtatgatgatatttatgtcattcgtaatgatgaaaaaaccacacgttttaaattaacagagtttaatggggtaagggggtttatgcctgatttcattatgttgatgagggataaagctgaaacagatgtttactatcaagtttttttagagccaaaaggtgatgatcgtctaatccaagatgcttggaaagaaggtatattagctgcaatcaatgatcctaatttgattatcattgatactgatgacaatgttcgtttggttggaattaaattctttgccgatactagacgacaagaatttattcaggattttgcagataagttattcgatggtgaacaattagaagcacagtctctgttaatttaa

SEQ ID NO: 65277 - DNA, 1908 bp, Acinetobacter baumannii
gtggatacagctttgattaaaacgcttaaagacatttttaagcaatttccgaacttttggaatggtgagaatttacaacgctcacttgttatcgatgcaattcaaaaaaaagaaacggatgtgatcaaagcgctgatcaataatgaaaagataaaaacaatatacggtacagatattgatggcgttttaatttttgactttgataaattgatcagccttcttaagtataaagaatattgggctgatagctttacaaaatatcgtaataaagtgggattaacgagcaaaggtaaatatttagattataattctgatgttgttttggactttcctttcaaagactgtgtacttgaaggtggtatgaccaaagaagatcaagggaaagatgaggtatattataatgaagtgattgcacgtgatgaaatagatcgtctattttcacctaaagtatttactaactctaagcgttatacaaaagatggagttgaggaaaatattaaagaatttaataatgataatttgattattaaaggaaataatttaatcgcattacattcgttgaaagaaatttatgaaggcaaagtaaagctgatttatattgatcctccatataatacagaaaaagatggtttccaatataatgataatttcaatcaggcaacttggcttacatttattaaaaacagagctgaaatttctaaaaaattattaagtgataatggtctatttgcaattcagattactgataaagaacaagcatatcttaaggtattgttagatgaggtttttggaagagaaaattttttagaaacaattatttggaaaaaaagaagtggtgcgcctaatgataaaaaaataggagcgattcatgaatatattattctttatgctaaaaaaattgaattattagaattaaatttgaagccaaggactaaagagcaattaggtagatacaaaaaccccgataatcatcctaagggggaatgggctccagataacttaatggcaaatgttaagggggggcgatttgttgaaagtctatattatccgatcataaatccaaatacgaatgaagaacattatccttcttctaatggtaattggcgctataaccgaactgatatggaaaagcttttagaaaataatgaaatatattttggagcagaagggttaggcagaccacaacttaagcgttttttggttgatttaaaacatgatggtgtgccacatgacacattgtggacggatgtaccactaggtagaagtggttctcaagaaatattaaatttatttgggaatattaatgtatttgatactgcaaaacctgaaggttttatgcaaaaaattattcaaatgggatctaaagaagatgatttagtattagattttcatgttggtagtggtactactgctgctgtagcgcataaaatggggcgtagatatattggtatcgaacaaatggactatattaatgaaattacagtccctcgtcttcaaaaagtgattgaaggtgaacaaggtggtatttctaacgatgtagattggcaaggtggtggtagttttgtttatacagaactcatggagctaaattatgtttttatccataaaattgaacaagctgaaacaatagaagatttacttcaattatttgatttaatgaaggctgaagcgcatctaaattatcaaatagaattagaaaatgtgttgaatgctgaatatgaaattgatggtgttgatcattttatatcatttagtgatcttgagttatctcagcagaaacagcttttgattgaactgttagataagaatcagttgtatgtaaatgctactgaaattgaggacgaaaatcttaaaatttcagagtgtgataaggcttttacaactagcttttatcaaggtggtgaataa

SEQ ID NO: 65278 - DNA, 1551 bp, Acinetobacter baumannii
atgattaatacaaaagtctttttatttttaaaaaattattcgggtttgggtgtagatagatattttctattagagcaggacgaacttatagaagtcgatacacaaacgatagctgatcaaacttgttaccttatttgtcacgattattggttaattgcaaattctatttttaaagaagttggttatttaccttgtaaaattattgacttagatgaatttcaagtaataatttctggtgaaaagtcggagagaaaagctagagatctcaaagatttcactagaaggttaaatttagagaatattgatatagagcttaataaggcttacatgtctatatttaatcgatgtagtaatttcgacaaggagatttatcaaaagtttgcagtatttttaaaatattattgggaagttttaagagttagcgcaatagaaaaagatgagttgcatagatttatcaatattgaagttcctgtctctaatattatgtatgaaacaatggcaaaaggattattaattgataaaaaacgtcttttagagtttaaaaaagaaatagatcataatttttttatgtctcttaaatctttttcatctaaatataatgtgccattagaagttcctcatgataatgatgtaattgaatatttagaaccacagggagttgattgcgaaaactttgatatctcatatattctacgctttgtaccgcttaataataattatgcaccagacttattagaattgtataagcttaatcatactagagcaattttaaatggtataacacaaagccaagaacggatttatcctatagttgatatttttggatcaataacatcgcgaatatatcttaaagacccttctattcaaaatatttcaaaaaaatatagatctttactaaaaccaagccagggtaaaaaatttatttacattgattatgatcaatatgaagttgggatcatggcagccttatctaaggatcaagagctaataaatttatatgcagaatctgatatgtacgaagtaattgcagaagagcttttttctgaggaaggaaaacggaaggatgctaagaaattgttcctatcttattcatacgggatgaaaacaaaatctttaattgatgcggcctgtggattaggtgcagatagaactaaagctaaatcattatttagaaaatttactcagtttgaagcatggaaaaaaaatattcaggaaacattttttactgataaaaaaattggtactgttttaggtaattatttaagaataactcacgaaaatcaaactttaactgaacaagaaaagagagttgcggttagccaagttgttcaaggtactgcatcactaatttttaaaaagacattaattgaagtaagtaaaataccatttgcacaaataattttgccaatgcatgatgctatacttttagaagtcccaattgattttgatgaaaatcaagttattaatgtttttcagaatacatttagcgaacattttaataatgagatcgtaggaaaagcatctctggataatttctttattagtatgtaa

SEQ ID NO: 65279 - DNA, 1764 bp, Acinetobacter baumannii
atgggggttcagttacatgaagaggatgcaatatccttggaaagcactaaagtctttaattcttctaaagatgcacaatatacaaaacctaagaagattaattcagtcgctaatttttggaaagatactccattatttgtatttcctattgatattaaggcagtaattgctcatttgactcaggatatgagagatgactggtttcctgaccccttaaaattcttagatttaatcgaaaaaactaacgatatccattctatagttaatacacttttagaagaaaacaatggaatataccatgcatcaatttgtaatatttgtgatgtacctaaaaagggattaggtatcagatatgctttggaaactgatttttatgatagattggtttatcaagctatttgttcttatttgatgccctacttcgatcaacttttatctcatcgtattttaggacatcggtataataaaaatagaaaagaagaaaaatatatttttaagcctaggattgaactttggaaagtttatgaaggggttacttttactgctttcaaaaataaccaagcattgttgtgtacagatatatttaattattttgagaatatatctattgaaaatataagaatttcttttgaatctaagatatcaactttaaaagttgaaggacatgaaaaatataaaattagaagcgcgatagatatgctttgtaagcttctaactaagtggacatataatggttcaaatggattacctcaaaatagagatccttcatcttttatcgctaatgtaatattagattctgttgataaagcgatgattgaaaaagggtatgattattatcgatatgtagatgatataagaatcatttgttcagatgagcatggtgcacaaaaagctctaatggatttgattgaagaacttcgcaaagtcggtatgaatattaattcagctaagacaaaaatattaactaacgaatctactgatcaagaaattagtgatttttttcctggaactgatgatcgttctaatactattgataatatgtggaaatctcgtagccgcagagttattagtcgttcagcaaaatatatagcagaaataatttcagactgtatagaaaaagaagagactcaatcgagacagtttaggtttgcagtaaatcgtttaaaaatattagttgatgcaaatctttttgatattcattcagagttatcaaataatttggttctaatgatgcttaatgctttacataagcatccagcttcgacagatcagttttgtcgacttatattagcactgcaacctaacaatgagtctttaatacaaatcagtgattttttgtgtaatagaaataaagcattacatagatggcaaaactatcatttatggaacgttttagcttctaaaaagtttaagagtgaaattttactgaacagtgctttagagattattgtctctgatccaacttcatctgaagcttcagctatttttttatacctctatcaagtgggagaatgtcatcgtttaaaatcggttgttagtctttttgagaaaaattggcctttacggaatcaaagatattttttactcgctacaagaaaattcgatagacctgagttatctccaattattagtgaattgggcataagagtacaaggtactgcacatagagcagcaaaatattttgatactgatggaaatattgtgcttccaccaactaatacaaatattgaaaatttatatgatgaaatcagcccttatgattaa

SEQ ID NO: 65280 - DNA, 549 bp, Acinetobacter baumannii
atgacacagcataacgggtatgattttggtaaagcttttgaacctgatatagctatactcctggccactacttctgatgaattaggaagtgtacttagagctcatttttgtttagaagaatttttggatgtttggtgtaatactattaccaatgtaaaagactttcttgatattgggttcattggattcgataaaaaattattaattgctaaaaaactaggacttccagatgaattgacagtagtattaaaaaagtttaataaattaagaaataattatgctcatgatagtagttcagtattaaatatagatatactgaatgatataaaaaatgctattaatattgttgatgctcatagttcacaaccaataccgaattgtgaagatatgccattagaaataggtggaaagaagatttcatgggatggagaagatacaaataaccgtgaaagatttgtgcttttatatctcacttttagtatgaagttattcaatagattcaactacgagtttttatcacgtaaaatcgcatttaaccatacaacataa

SEQ ID NO: 65281 - DNA, 1125 bp, Acinetobacter baumannii
atgtcttttcactttgaaagtaatgaatttaaaaagacttttgatgaagttatacgtttagcttcatctattctggccgattctgataagtatccaaaagatatattaaatattgcaaatggtttaataacagctaaccaagtatttaatacaaacatagatttatcacaatatgatcaatatattccttatagttcaaaacagtgtgctggatttgattttgttgatattgtgggttcagaattaagaaaatataaagttgaatattcagatgatagtctttatcaagttatattaatcagcgcttcattgatctatatctactttaaagagcttatctttcagttgggaggattgtcaccttctatatcatttgaggttggaagctatgaaagattgataagtgaggcattaaaagataatcagcagtattctcgttatattgattatggcgatagagaactgccttaccaaatactcaaagagatttttcattcggaagaaattaaaacattaaacaatttaagaaagaaaattgtaaaagctgaaagtgttataaatgtttgggatgaaagtatagaagcgaaaactaaacaggttgaattactagaggaaaaacttaacaaaacgaagtctcaatatgattttgttcttttaaacgaaggttttaaaaatttatataatcaaaaaaaagaagagcttagtgagcgtcgtggtagcttttcgaaatttggtgctacattaacaattaccccattaatactaataatcttttcatttcttttgtttatcatcaaaggagatttagctcttaagtatcttttatatctagcatttccagtaagtacatttttaataattattttttattttgttcgggttagcttgcaacatgttcgttcaattcagtctcaaatgatgcaattagaactacgaatggctctatgtcagtttatttataattatgctgaagattcagaaactctgcataggaaaaataaagaaggttttgaaaaatttgaaaatattattttctcatcaatagtttcttctgatgacaaaattccttctacatttgatggtgtagaacagattgcaaaaataattgaagctattaaaaagtga

SEQ ID NO: 65282 - DNA, 558 bp, Acinetobacter baumannii
atgaaaaaaaatttattgtatatcttttttatcattatcctttttttaatttgcttgagtatttcaatttttctacataaatacttaaacattgaaggtgattatctttcagcttttgcaactttactcgctgctggtgttgcaatgaagctttatactgactggcgtgaacaattacagattgatctttttgtttcttctaaagaaaacttaaataaactctttaatgagctattgataactcatgatgaaatgttaagattcttatatgatgttagagatgctgatgaagaagataattggccaacctatcatgtaatctataaaaaattccttattactttcgaagatatatacgctgaattagataataatatccatattttaaaaaagtttatgaaaagtaaaagattaaaagatgattttacacccataattgtcgatgctaatcattgtttacaaagtattttagatagatttaatgagttaattggtataaaacctccttctcgttattacgcaaagttttataaattattagagaaagatggattttaa

SEQ ID NO: 65283 - DNA, 426 bp, Acinetobacter baumannii
atgtataaatctacgagaactaatgcttttttagtatcaataaaaaatatcattaacaacttgtatagcgaaggaaatcctttagatgtgcatgtaaccctagtagtttcaggtcaaattattactggaaacattgtctcagaagaggaatattttaatcatgagttaacctctacttggaagcaagtatatgatgaagttattaagaaaccaagagatgaatttaataacttaccagatgaagaatatgattcgaaagaggttccagagtacctcttacaaaactatttgttcttaaaaaatgcttattatgtaaatggggacaagttcataccttcatctaacaatgacggaataccaattcaagttagaattgcagatattacagcttttaattttggtagcttaaatatttctaaaacataa

SEQ ID NO: 65284 - DNA, 339 bp, Acinetobacter baumannii
atgtttaaaaaaataaaaaagacgattttaaattggtatacgggtgatcctgggaatatgagatgggaccctctaaccaatacttacttaggcacacgaaagccaagtaaacattggactgctagcatttgtgtttacttgataagtatctttaaaaaatttttgtctttttttgcacaaaattggaatggggtaattaccaaccttttatctgctattgccatttctattgctggctacactctttatcttcaagttgatgaaaataaaaaagaggacaagagctgcaccataacaagctccgaccagaattttgttcatttgaagtgtaaaaaatga

SEQ ID NO: 65285 - DNA, 672 bp, Acinetobacter baumannii
atgaatacagatactgttggccaacgcatacgtgcgcttagacgagctaaaaaattaactcaagtgcaattagcgaaaattgcaggtgttagttcgcccgctgtaacagagtgggaaaaagatagctatttacctaaagctggttcgctagaagcaatggcgaatgcatttggagttacgtcagaatatattttgactggtaaaggtgaagtcccttcaaaagagtctacaaatatagccccagtgcaagctcgaatggcgccagtattatcgtgggttcaagctggtaactttaccaatgttgaatctgttgatatgtctcaggtggttgaatggtttcccttacctgatgactgtgaaaaatgtttttatctcaaagtaagaggcgtaagtaatgagccagattttattgaaggtgattacattgttgtagacccgactgttcattattcagatatgcaatctggagatatcattgttgttagaaatgataaagatgcaacttttaagaagttagttattgaaagtgatggttctcgttttcttcaagcaataaatccaaacttccaccctaatattattccaattgatgaaaactgccattttattggtcaggttattgattcaatgagatatacctatcgagcaaaaagaagaattcgtaaaagttaa

SEQ ID NO: 65286 - DNA, 186 bp, Acinetobacter baumannii
atgtcaaaagatgaagcatttaagttgcttggggtaaatggtgttgggctggctggattgttaggcattgagccatcagcagtttatcaatggcctgaccagaaaatcccattagtccgagagtatcaaattcgcgatttagccgaaggaaaagtacccctaaaacataaagctgctggtgaataa

SEQ ID NO: 65287 - DNA, 276 bp, Acinetobacter baumannii
atgagccttgaaaagaaatctacacatgtgcgtttgtctcctgaaaatcatgaacgagcaaaagtgctttcaaatattaaaggtaaagatctagcccaatatctcgcttggctacttgaaaaagaaatagcgggtgagtggcatgttctgagtatagaggctcgaaatatggagcgcttgggaataggggctttaatgagggacttaagtacagaggtatttatcgcagagggatcagaagggattcatgggaatccagacaaagaaaaagcctga

SEQ ID NO: 65288 - DNA, 1536 bp, Acinetobacter baumannii
atgaatctttatgaatattttaaagctaatgatcttatatcaaaagtgggtagatttgagttaattcaagacggcgttaaaaacggtggtaactcaaatgttcttttctttaagcaaaaaaatggtcagaaggagtttgcagttaagtttttaactgaacagtcaagaagtgagaaaaagcttaaaagatttatagatgagtattttgctttaattcaattacctcctcataaaaatattgtaaagcaatatcatttagatagttttgaatatccagaagagaacgggaagagtattcaagtctcatatatcattatgaaaagatatagttcgagtcttaaagataggaaaaaagaagattatgatggttttaagatattggaacaaattggtagaggtttgaaacatttacatgattatggagttattcatcgagatataaagcctgaaaatattttttatgatgatgaaataggtgaatatgttataggggatttcgggattgctcattttgatgaggagtttgttgcaagagtatctaaaactgataaaggtgaaaggttagcaaacttttcatttagtcctgaagagttaatgcgaagtggaggtgaaattacaccagcttcagatatttattcactaggacaggttatacaatggtggtatacaggatcagcatcaaaaggtactggtaggcctacctttggagataatgatgatagaaaaatttatgcgttaaatcaaattgtagaaaaaagtattcaaagtgacatctcaaaaagatttgaaaatctcaatatattatttgaggattttgaaaaacttatcagacctgttgttagaaatatttatgcaaaatgttatgacttggatcacctatttagagcatcattcccaacaatccgtagtatttatgaagcccggaaaaaaaaggagattgatcgctttgtagaaaatataaataaatttttacataaagatgagttctggtggatggatttaaagggaggtgataatccatttaaaggtttaataaaaattgatgaagatacttatttgttaaatcaagtaaatgaaataaaaattgataaaatcatagctttttcacatgactcaagattttataaaaatttttttttaatattaaccaaaagttataaaagatttacttttacagatggtttgaataatcctaaaagaaggctatattctcacgatataaataaagatagagcttgtttgtataaaaaccaatatatggatccagctttgtttgagcaaggatatattgaaattggagataatgttgaaaaattagaaataggggattattggtatagagaaagaaatttatctccttacattcatatagtttgtcctcagggtgccggtccaagttctgtaattaatagagctattgtcactcgtatgctaaatacagtgcttactacaggaactttagatgaatataatttgaaaacatatttaagtgatattgaaccttatcattcaacagagtttagaaaatgggattaa

SEQ ID NO: 65289 - DNA, 663 bp, Acinetobacter baumannii
atggaacagtttttaaaacgtatatctttttttctagtgtacttacccgcattagtatatgcatgtcaatttgcttactattcgggcttatgtgagccattaaatatcagtatctcatctttaggtatgaactatactgaagttatgtttttaggttatttaaacatatctgtagatttacttgagaattttggaaagttagcaatgtatgcttatggattaattgcctaccttgtaatagctttcttattgcattggattgccgtacacccttcggagcgaaataatgaaaaacagcgtttacgaagccttttttatagtattctttatgaaattcctaaaataaaatttagcttaattaagtctcttaatggtttctctggattattatttttatatttcttcatttttataattactattttactaattttttcattctataaaaaaggagaaaaacaaataatcgaatctctttcagaaatgtctgaaattaatactggttatatactgcaaaaggataaaaaagttaaagttcaaccaatactgtgcggaaattataaatgttatggaattgccttaaaaaacagggaggcaattacttacctccccgaacaatacatacaaccgattgatgatttaaaaaagaataaaacattataa

SEQ ID NO: 65290 - DNA, 267 bp, Acinetobacter baumannii
atgaaaatatctttattagatgtacaagaagtattcaatgatcttttaaatcatgaaatcagtcgagacgatgctgaagaatgggcaagaaaaagaatgaatgcactggataaccaagatttactttttgatcctcccagtgaagaggaacttctttggaaagcggtaatatatttaagtggtgttggattaaaaatatctcctgataaatacatggaggatgaaaaaggcattaaagaagtgtttaatatttattggaataaataa

SEQ ID NO: 65291 - DNA, 462 bp, Acinetobacter baumannii
atgaatgatgcagaaaaatttcagctcaaactggaattaacattaaatttaaaatctgctaaagacattcaaaactgggctatagataaattagataaaaacccagcagacttattagctttggaaatttgttttttctctaaagatgaagaagtcttagattattttaataagattagtattgcccagtgcaacatagagtctactcttaagaaaaaaattctttgtgaagtattaaagaaacatgtagagacactatcatctagcaaatattcaatagaattaatctctaatttgtttgcaatattactagaaatatccagatatgctgacgatgaagatttatacgatttcataaattattatgatgatgaattatatttggctttagaaggtatttctaaattagaaccagaagatatatggcctatctttttaaatgatcttaaaaattggctttga

SEQ ID NO: 65292 - DNA, 969 bp, Acinetobacter baumannii
  misc_feature (924)..(933): n is a, c, g, or t
ttggcttcagcagaacaaaatcctgtcattcgtagtggtcatttactggttgcattattaactgcacctgacctctatcaaattgcaacgagagcttcgagtttatttgatcttttcccgatagactcaatgaaacataagtttctcgaaatttgtgaaaaaagtgtagaacaacaagaagaatcaaaaacatcttcacaagcagatgaattagaacaagccgtgactccaactgcaaaaactcaaaaaacacctgctttagatcaatatacaattaatttaactgaaaaagcgaagaatggcgggattgaccctgttattgggcgtgaatatgaaattcgtttgatgctcgatattttaatgcgtagacgtcagaacaacccaattttaactggtgagccaggtgtaggtaaaacagctgtagttgaagggttggctttaaaaattgctcaaggtttagttcctgaagcattaaaaaatgttcatttgcacgttttagatatggggcttttgcaagctggggcaagtgttaaaggtgaatttgaaaaccgtttaaagcaagttattcaagaagtccaatcatcggctcatcctattattttatttattgatgaagcgcatacgcttattggagcaggtggccaagcggggcaaaacgatgctgccaatcttttaaaacctgcacttgctcgtggcgagttacgtactattgctgcaacaacatgggcagaatataaacagtattttgagaaagatgctgcattaagccgccgttttcaggtggtaaaggttgaagaaccgaccgaagaagttgctgtagacatgttacgtgcaatgattcccgtaatgcaaaagcactttaatttacaaattgatgatgaagcaattgtaacggctgtacatgcctctcaccgctatattagnnnnnnnnnnatattagtggtcgtcaactcccagacaaagcagtaa

SEQ ID NO: 65293 - DNA, 183 bp, Acinetobacter baumannii
atgaatgaacttacagctaaagcagcagatgagatcatcaaaatttgcaatgagttgattgtagacaacattgaaggtgaaaaagctgtagctgaatggcgttgccaaagaatagaaaaacttgagtcttgggctaaagcaatcagagatgctaatcgtaaagtggaaagtaaggagaaataa

SEQ ID NO: 65294 - DNA, 696 bp, Acinetobacter baumannii
atgagtgataaagagctacacccaactatgcagcgcatttatgatgaaacaggtttaaacgccaattcattagcttcgctattagatgtggattctcagaaagtttataactgggataagcgcggtatttctaaacaaggtggattgcaagtcgctcagaaattgaaacttgactatgcttggatccttactggcgaaggcaaaccttctattgaaaaactttataatgagaaaaatctaaatgtatctccaagagttgggggatgggttcctgtgaagtcctattcaaaaatgggttatgacggttattacaccgaaatgggatatagtggaaatggcggtgatggttatgttccctcacttacagctggacttcatgcgtatgcggttagaggtacaggcgactcaatgtatcctgcaatacgtaatggttggtatattgtatgcgatccggatgctactcctactccaaccgaattcgttgaagtacagctaaaagatggccgtagaacagttaaagaatttattggtatcgttaatgatgttttacatcttcttgctgtaaatggtgagaaaagaactacatttgatatggatgaagttgaggcaattgttgctgtaacagatatcgttcctcctagtcgccatgttcaagaatatccaactattcctctacaagatatacactacgattaa

SEQ ID NO: 65295 - DNA, 195 bp, Acinetobacter baumannii
atgacatcacttcaagaagataaaaaaatcattgctgaaaatggcggagctacagaattagctcgaaagttaaattaccgctcacaccgtgttcaaaactggactgttcgcggtattccagcaaaagaaaagttgaagtttccagaaatatttttaaccccaaaaactgaacagaagaaaacttcagttgcttag

SEQ ID NO: 65296 - DNA, 348 bp, Acinetobacter baumannii
atgaaagcatccaaattaattagagataaagggctgaaatacgcgaaagaaatcgtagattcagcaccttctaacgcaactgagtggaatgaaggtttcgagttccaatgtggtcaaagtatagagattagcaaggctgaccgagaaaaatattttgtagacctttctgaacttaagcgtctagtggaatcggttgaaattattcagttctggcaaggtattgataggtgcaaagagcttgttgaggattacaaagaggagtcaattcataaggactcgtatggacacagaattattcaagccatccgcgaccacgaatcaatatacggaggcgttgaaaatgcataa

SEQ ID NO: 65297 - DNA, 210 bp, Acinetobacter baumannii
atgcataaatacaatcactgtgaagcccaagagttaataaattcttatggcggttttgcagaagttaagactcgcagtgaaaaattacgaggccgatataaccgtagtggtttatccaatactgattacaacgagctacttcaattagaaaaggcactcgagcaagcaaagaaagttaatgaaggagcgccgattgatgagcggaactaa

SEQ ID NO: 65298 - DNA, 192 bp, Acinetobacter baumannii
atgcaaaatcaaaatgatccaattaaagatatagagcaattagataccgaggatgcacaaaagcaagaaaattctgttcttaattctgtgaatcctgatccagtcgatgtgacagacttaattgtagaaattggaaaagatgtagtcgattttgcatcatcgatttttgataatctcgatatcaatttttaa

SEQ ID NO: 65299 - DNA, 300 bp, Acinetobacter baumannii
gtggaacttacgcaaattaaggtagcaattgatcgagaatatgatctctttaagaattcacaggaattcaatacgtgtaagcacgacaaagagaagcaagctagatttttaggccgagctttaacaacattgaaatatccttatacaaacatcattactttaggcggtggtcgatataaaattttaggtcatcatgatttaaatgttgatattgatctatttcaggcaccgtcttttacatcaaagcaagcctttaatacttggttgactaaaatcctattccaagaaatattttcttaa

SEQ ID NO: 65300 - DNA, 765 bp, Acinetobacter baumannii
atgaataaatttatagcttgtatacttgtaggtagtagtattttaatatcctcttgttcaaaatctgcagaaaaattagaaaatgtcacagctgtatctactagtaatccaagccctgagggattgccacctttagcagttatacaagagcaagcaaaaaatggtgattctcaagcacaatacaatttgggcttaatgtataaaaaaggggtaaatggcgtaaatattgatttagaaaaagcaatttattggtataagaaagcaattgaacaaggtgatgatgatgcaaaatataacttagctattatctatgctactgaaggtacagaatttagtaatccaacactagcattcaaattattgtctgacttgagccaaagtggacataaagaagctattaattatttgggaattctataccgtaatggtataggtgtgaaaaaggattataataaagcatttaacttatttgaaaaagcagtaagtttaaatgtttctggatctaagtttaatttaggcaatatgtactttaatggatacggtacagaggttgactataaaaaagcagcatattggtttgatcaagccgttagatatgaacaagatgcatatgcggcagagatgcttggaggaatgttttacgagggccgaggggttgaaaaaaatatcaataaatctcttgaattttatcagatagcagctgatcaaggagataaagatgctgctaaaaatatagaaataataaaaaaagaatgtgggtgttga

SEQ ID NO: 65301 - DNA, 243 bp, Acinetobacter baumannii
atgagcatttttgcgaaatttttagatatagaacaaaagtatcaagttaaactgcatgagggcgaaaactttaaacaagccctttataacgataagatgacggattctgatgactgtattattgataaaatcgagctagttataaaacactatccagatagtaaaaatattcttttatctacttattcatcagatgaaacatcggaaattccattttgctatgccgtagtagttccccattga

SEQ ID NO: 65302 - DNA, 153 bp, Acinetobacter baumannii
atgaacatgaatgatttttttgcaatggtagtaactttagctaaacactttaaggatcgtcctgatatcctatttgggcttattattgttggtggtgctattacgttgatatgggcaggaaaactgaaaggtgcaatttcctttggaggataa

SEQ ID NO: 65303 - DNA, 810 bp, Acinetobacter baumannii
atgttgaatatcgaagatgaaagtactgagaaaaactggaatatatataatgcaaaatctagtgaagaagatgcaaagtactttttatcttataaaaatgatgttcttattcctgcctcacaagagttttttgagtttttagatgaaaataaattaaaacttcatcatgtattttcattcaatgccatacttgcacatgccattgattacatggttttcattgcacaaaagcattcaaatatttctagaaaaaatttcattagaagttttgatgaaaaatatgctgtagatggatgtattcatatcaataataaattttctttattggatgctgtgaataattcattcaaacatgtagaactgaataaaactaggtatcaacacttaattgatatatatggtgatttatcatttcactgcttaaatcaaaaacaagggaaaattttttttgaaatgccgtcccataaatttgattattcaagagtggtactaagaccagttgcagctatcttcaattgtgatttacataacacaaatgatgtcgatgactttattaatggaagaatctgtggcagtacaggatatggtcgctttccatatagttatgagcctcatgaagcgattgatagaatgatagatgcttgtaatgctgagtgtatggattgtggtgaggatggaaataattgtgattgtcagcaatttgtttatgcaaatcatagaggagaatattctcctaatttagatcctaactttcaatttgagaacgtaatgtcagaaattagtggaactcgtgaatggagtagaaagtaa

SEQ ID NO: 65304 - DNA, 819 bp, Acinetobacter baumannii
atgatttatgaagtaactaaggctggatatcgtttagagagcattgctgaaattgaacaagaagactttagggatttagaatcattaatagagcacctaatttcttcattctttgaagccaatcatattcttattttgtataaaacatgcccgcctataaaatatgaaatggatgaactgagtgatgaaattaagacatctttgaaggatcgattaagaagtttaatcgagagagatcatcctgaatatgattctattactgtagatcatcttattgatcttaatcttcctttatttgagaaaagacatagatggaagcaaggtcaattgcctcgaagctttgaaagaaatctcccatatttttatgctaaaagttttgtctttgctctagataattttcagaaaagtttaaatgttatttctctaattcctaacttaccaaatgttttagaaattaagaggatattggaagaatttgataaccactttattcatctacgtggggtgcgtaatagtgctcatcatatggaagatagaattagaggtttagggccatataatagaaaaacaggtaaaaaagaaaaaatccagccaaagcctgttgatgagcatggtgttaagaccgatgggggagcaatgtttataaattgcttatttaatgataattattcatttacaaatgatgatggaagtctcggtaaggtagaggtatcagatatatctatgtctgtattccaaaatagcctacaacaattattagatgcttttaaatggagtaatcattttggcaaagataggatatttctacctgatgattaa

SEQ ID NO: 65305 - DNA, 897 bp, Acinetobacter baumannii
atgcaaccattagaaatagaccatatcttttctaaactatcgacagttcgactagatacgtataaaaatcaatttcatctagagaatccgaaggatatttatgctgcttattgttggggggaagcggtttcaggttctatctttaaaattatttcagtgattgaaattctgcttagaaatagtatttacaacgctctaaaaccagctttgggtaaaaagtggatgattgatgagcaaaaggtaaaactcactgatcatcaaaaagataaggttgataatatcttgtatgaaaaaaaagacggtagacgtactgaaaaaaggattgatcctactcctaacgaaaataccataattgcaaaactatcctttggtttctggtcgcattttttagatattaagttattagatgggaaatcatgggatatgtatttgtctgacatctttaataactatacctatgttggacgatacagaggacgtcaattttggaaagatagagataaaaaaaatatctatgctctcaaagataggcttcgggatataaacgaaataagaaatagaattgcacatcatgagccagtttggaaaaaaagttatgagggatatcagcccaagaatatttcggataatttaaaaaatacagtttcattgatattagatgttttaaattggctatctcaaggtttctatcaacattatacagaaagttatcattatgaatatcttaaatatttaattgaaactactcctaaagaaggctttaattatcacaatgattttattgaattagaaatagatacttttatcgttaatgtagcgaaagataaatcactgcttaataagaatcatgttttaactaccgaaaatactcgtataggttgctttgtaaagctctaa

SEQ ID NO: 65306 - DNA, 1104 bp, Acinetobacter baumannii
atgacagaaaacaaaactctttttattaaacccaatcatctaggtgcctcaattcctgttttaaatgcagaaatcgttaggatgaacaaatctaagaatattgagactacgttagtattagataacaatgtcttagttaaaatggaacggattgtaaaacatggaaatgaatggtctttagttttggaaaacgggctagataatttagtagaacttttaagggattgccctccttatagtatatgtttatctcctgcatttgctttaaatgagatgccacctcaaaaagctcaatcagcaaaagatgcatatgaacttttctgtgcaaagcacttacctaattttgtagatacacctaacagtactaacagttcttatagtggtaaaaatgaaaattatggtttcaatgacctatctctaagagcaaaaaaggtgctatctctgccttacttaaattttttgtatcttaattatgtatataaatttgttaatggaactccgattgaaaaatttaaagcttatgttgatcttttagataaaaaagtcgatttacttagtgcaactgaattagaaatagcaaaatactgtttttgtgacttaactaaaataacagatgaatcagctaaatctcttgttaaaagcatacgtaataactcagtaaaaataacaaaacctaagaagaacccgaagccacctcaagatttagctgagtttgaaaaaattgcttttaatgctgcttgtgatattcacttattacatgtagcaaatggtatggatggtaaacatctagatgggatcaaacaagattgttgggtagttactctagataaaaaattagccctctttagtaatttttttcatcaagtcagtataaatggcaaattacagccttactcaatttcatctgcaccgacaatgatacaagatcaagagtattggaacttagcacatgaatacttttcgttaaaaagtattaaccgcagacaacatcatttatctaagtctttggattttgataagttacttgacactgtaaatgatgcaattcttcaaataactcaagcatttgaaatagaaaatctccacaatcgatctttcatttaa

SEQ ID NO: 65307 - DNA, 1167 bp, Acinetobacter baumannii
atgaattttttattgactgaagagcaatcgcaaatcaaagaatctattaaagaaatctgtaaacaatttgatgaagaatattggctaaaaaaagattctactggtgacttcccacatgaattacatagggctatggctgatggtggatggctaggtatagcaatggagcccaactatggtggagcagggcttggcattactgaagctgcattaatgatgcaggaaattagtgcctcaggggctggcatgtctggtgcatctgctattcatatgaatatttttggattaaatccagttcaagttttcgctagtgaagaacaaaaacaacgttttttacccccacttatagctggaaatgaaaaagcttgttttgccgtaaccgagcctaatgcgggactagatactactagtttgaaaacttttgctaaaaaagtagaaggtggttatatcctaaatggtcaaaagatttggatttcaactgctcaacaagcagatcgtatgttgattattgcacgcactacacctaaggaagatgtaaaaaaatctactgatggcttgagtttattttatacaagactagaccgtgattatgtagaagtacaacggatcgaaaaaatgggacgtaaatgtgtcgactcaaatatgttgtttattgataacttatttgtcccagatcaagatttgattggagaagaaggtaaaggatttagttatttacttcatggcttaaatccagaacgtattttaattgctgctgaagctattggtatgggacaagcagctttaaatcgggcaataacttatgcgaatgaacgtgtagttttcggaagaccaattggccagaatcaaagtatacaacatccgttagctcaagcttggatggctttagaagcagctaatttaatggtttttaaagcagctactttatatgacgcaggaaaaccatgtggtgcagaagctaatactgccaaatacttagctgctgaggcatgtttccaagcttgccaagcagctgtagcaactcatggtggtatgggatttgccaaagaatatcatgtagagcgttatatgcgtgaatgttggattcctcgactagctccaattagtccacaaatgatcatgaattttatttcagaaaaagttttaggtttacctaaatcttattaa

SEQ ID NO: 65308 - DNA, 1182 bp, Acinetobacter baumannii
atggatgctttacatcaaccttcaggccctttattaggggtaaaagtaattgatttatcatcagtagttatggggccttatacctctcaaatacttggtgacatgggtgcagatgttttaaaagtggaatctgttgatggcgatgtttttaggtatactgcgccatccaagcacccgacaatgagtgcttcatttatccagcttaatcgcaataagcaaagtatttctttaaatctaaagaaattggaagaaaaagctagtcttctaaaattaatttcttctgctgatgtattactatacaacatacgtcctaggtctatgtccaaattagggttagattacactagcctacagaagattaatccaagattgatttattgtggagtttatggtttttctgagaatggaccatattcgggtaagccagcatatgacgatttaattcaggctttgtctggtctagctgatctacaaggacgaaataaaattgaatataagccagaatatttaaataccgttattgcagataaagtcactggtattacagcagcttatgctattgctatggctctatttgaacgtgaaaaatcgggtttagggcaagctatagatgtaccaatgtttgaaacaatggtgtcatttaatcttatggagcacatggctgaagcaacatttactgataatccaaaaccaaatatgggttatggacgtgtcctatcaaaatcaagaaaaccacaccaaacaaaagatggttatttaagtattcttccttatacctccgcacaatgggaacgtttttttattctttctggtttagaacattacgcaaaagaagaacggtttataaatcctgctcttcgcggccagaatattgatgaaatgtatagtattttgtctaaaaaaataaaggaaaagactacggaagagtggatgacattattgaaagatgcagatatcccaatggctaaagttaatacagtggagtcattgcttgatgatgaacatctaaaacatattggttttttcaaagtctaccaacatccaacggaaggaaatatccgcttaacagatatacctactaaattttcacgaaccccaggttctatttatcgattaccacctaatttaaataaagatgctgagcttataaagcataagaaaaaatgtgaaaaaatgtcttag

SEQ ID NO: 65309 - DNA, 906 bp, Acinetobacter baumannii
atgaatagtaatcgttgggtaaatattgttgaagtgggtccacgtgatggtttgcagaatgaaaaacaaagtattagtttcgacgataaaatagaactcattcaacgattaagtagagcagggataaattatcttgaagccggaagttttgtctcttctaaatgggttccacaaatggcagctacgcaagagatattcagctatctaaaagatcagagtaactcaaaaagaacctatgcggctttggtacctaatctaaaaggtttagaaagcgctttaaaaactgaagttaaagaaattgcagtttttatagctgcgtcagaatctttttctaaaaagaatattaataaaagcatagaggaagccgttgcaacgacacgcgatgttattaatgaagccttaaagcacaatatcaaagtacggggatatctttcatgtgtattgggttgtccttatgagggacaaatcgatattaaaactgttgttcaattaactaagcaactgattgattttggcacgtatgaagtctcgctgggagacacaattggtgtgggtacaccgtttaaaactcgagaattaataagagctttaaaagaagaagttcctgtttcaaaaattgctggacattttcatgatacttatggccaagcattagccaatgtatgggtaagtttagaggaaggtataaggacttttgatagctccatagcaggcttaggaggctgtccatatgcaaaaggtgcttctggtaatttagcgacagaggatttgatctacatgctacacaactcaggctatgaaacaggtgtcgatctgcaaaaattaatagatgctggagattttattaattctgtattaggtagggaaacaaattctaaagtagctaaagctttagctaagaattaa

SEQ ID NO: 65310 - DNA, 753 bp, Acinetobacter baumannii
atgacagtaaaacttgtggcaagggccttagatttaattgaagtgtttgctcattatcagcgacctttggttttaagtgagctagcagcatatttagatattccgccctctagctgtttgtctatggtacgtacaatgatagataaagggtatttgtacgaagtaaaaagacgtggtggatactacccaacacgtaaattggaaacacaagccgccaaaatacatgaaggtaatcaaattttagaagttattcatgaacatttagttcgtttacagaaagaggttggtgaaagcattgttttaggcaaaatacaggatgatcaagttatttatcttgatgtgcttgaatctaatcaagtaattcgttacgcagctcagattggtgatctacgaccattacatgctaattcgattagtaaatctatattggctcaacatgatgatgagtacattttagataaattacttaatttaaaaatgactaaatacagtgaacaaactatttcttctcctcgtgagtttttaaatgacttggaagaggtaagaaaaaatggattttcttcaaatttaggtgaaagtgcggaagatttggccgcaattgcaatgcctttaaattgctctggagagtggtatggcatttcaattgtcggtcctttaaacagaatgaaaaagctttggacctcacatcctaaagcgttatcaaaatgtatagaactaatcaatgaagagctcaaagagatgggggctcaatga

SEQ ID NO: 65311 - DNA, 792 bp, Acinetobacter baumannii
atgagtataaccatatatacagatctagaagtcgattcattaggtgttgctactttatggctgaatagacctgaaaaatttaacgcattaaatgcagaatttattgctgaattatcagcaaaatttaaagctattaatgacgaagcaggaatcagactttttgttttaaaagcgcgcggtaagaatttttgtgcaggagctgacattgaatggatgaaagcatcagctaatttaaattatgacgaaaacttggctgatgctaaagatcttgctgatatgctctggaaccttaatcaaattaaagtgcccacattagcagtagtgcatggagctgcatatggtgggggagtaggcttaattgcttgttgcgatctggcaattgctattgataattcaagaatatgtttatcagaagcaaatattggccttattccagcaacaattggcccatacgttcagcaaacaattggctacaaaaattctctctactattcaatgactgctgaagtaatagacgcacaaaccgctgaaaaaattggcttggtacaaaaagtattttctgctgatgaggctgatatagctgtaaaacagtttattcaaaacttccttaaaaaaggaccaaaagcacagcaagcttgtaaagaactttttaataaagtttatagctcagattttaatgctgatcttaaacgatatacagaagaaatgatcgcgatacgtcgtacctctgatgaaggccagaatggccttcaagcctttttagaaaaaaagaagcctaattgggttaattaa

SEQ ID NO: 65312 - DNA, 1971 bp, Acinetobacter baumannii
atgattaagaatgataagacaatattatgggtacctacttttgaattaattgaacaaaccaatatggctagttttattaagcaaatagaggctaaatatgaattaaactttaattatgattatgaaaaaattcatgaatggagttgcaataatctcgctgaattttgggaaacttgttttgtagcttctgggatacaaacgacacaggcttatgagacagtcattgaaggttatatgccgaatgtagaatggttcaaaggagcaaaaatcaattatgcttatgaaattcttaaacaaactccggaaaatatagcactttattcatatagtgaagctcgtgagccatcttctttaacttatggcgaacttaaacgtaaagttatatcccttgctcagtatttaaaaaagatcggaattaagaaaggagatcgggtagcaagttacttgcctaatattgaggaaactactgttgcaatgttagctactgtttcaataggagctatatggtcaaccgctgctccagaatttggtagccaaactgttcttgatcgtttcacacaaatttcacctaaagttatctttatgtgtgatggctataaatttaatggtcgaaaatttagtaaaattgatgataattataaaatcatcaatcaattagatagtgttgagaaggttgtttttgttaattacattgatgaaattgcagaattggattatccaaatatagtcaaatttaatgatgtaattcaatttgaatgtaaggaaaaatttgaatttgaatgggtagaacataatcaccccttatggattttatattcctctggtacgacaggattacctaaagcgattgtgcactcacatttgggaatgcttttagaatcttggttactttgttccttgcatttagatattaaagagaaaacaaaaatatttttctatacaaccactggctggatgatgtggaattttcttcaaggcgcgttaactattggtgcttccattgtcctctatgatggttgtcctatttatccatctaaaacatatttgtgggatatagctgagcagttgaatctagaagtatttggagctagcccaacttatattcaattactgcaaaaagaagagatcatccttaaagaactattcaaattagatagcctgaaaacaatcataatgagtggatctcctctaatagatgaatctttctattggatatatgaaacaattaaatcagatttgcttcttgcaccattgagtggtggaacagatatttgtggtgcatttatcggtcctaccttcctaaaaccattaatagctggtgctatgcaatgccgaatgttgggtaatgatatacaagcttgggacgatcaggggcaccctttgattgataaagttggtgaacttgtatgtagacaaccacttccttgtatgccactagggttctggaatgatcaagatgggcaaaaatattattctgcatactttgaggactatccaaatatatggaaacatggcgatttcttagaaattacctctacgggtcattgtgtaattaaaggtagatcagatgctactttaaatcgatatggtgtgcggattggtacagcagaaatttatcgtgtggttgagcaagtatcaggtgtgattgatagtttagtagtctgttgtgagcttaaagatggtggtttttatatgcctcttttcgtacaactagcagataacatgacacttaatgagaatttaattcatgaaataaaaactgaattaagaactaaatgctcacctcgacatattccagatgaaattttaataatttcagaaattccgtatacattaacaggcaaaaaaatggaaatccctgtacgtaaagtattaatgggaaaccctctaaatactgcttttaatattgattctatgaaaaatccaaagtcaattgattacttcttaaaactttctcaaaaattaatgtaa

SEQ ID NO: 65313 - DNA, 432 bp, Acinetobacter baumannii
atgaaacaaattaatggtttagaatatttaaaaagtgttatgaagagagatttacctcatgctccaatccatgagattatgaacatgaaaattgtggaggtcgaatatggatatattgtttatcaattctcacctcaaccttgccacgtaaatttacaaggtggtatacatggaggctattatgcttccattttagacagtgttacaggaggcgcgggacattcaactattgatactaatcagagaattgtcacgattgacctgaatactaaaatgttaaggccactacaagttggtaagcaatatagaagtattggaaagttggttaacagaggtaaagaaattattattacagaaggttacatatgtgatgaagaaggtaagttatatgcacatggatcagctgtattaaagaagttaaatattgattaa

SEQ ID NO: 65314 - DNA, 348 bp, Acinetobacter baumannii
atgttgggtaaacttctatattcatttggtttaggtcttttgactgtttctttaataagttgctctaaaaaagcagataagaaacagcaagattcaagttataagttaaaaattgagaaagcagaactagagattgaggggctattaaataaattagatgatccaaagattcccttctttcgtaaacaacaaattttatgtagtcgcttaccggaagtttataagaatcaatatatgccagtcttactcaagcattaccccaattattatacaaaagaaatattattaaaaaactttgtaagtatatctaatttctacaaaaagaattatgctgttcaatgtaaatag

SEQ ID NO: 65315 - DNA, 234 bp, Acinetobacter baumannii
atggatccagctaatacctgtgctgcaccactacctttacctgcctcgccgacaaatttagtaatttcattgtttaggagtgtgagagactgcccgattgtgatatctgttttagcaaaaagagcatcaacatcagattctacagttctaagtgctttcacgattgcttgtgaagtaatttttccttcagctgcaattgaacgcaactctcctacggtgatccctataccttga

SEQ ID NO: 65316 - DNA, 138 bp, Acinetobacter baumannii
atgagtaaacatgcttcatggacactaggtattgcatttctaattattgtgtatttgtttttcgttaaaggaatgacggcacaggatatagcagatttcatagttgaccaagttggagtaactaatacgaataaataa

SEQ ID NO: 65317 - DNA, 357 bp, Acinetobacter baumannii
atgtcagttttagcaaaaagagcatcaacttcatcttggacatttttaagtgctttaacgatttcctgtgaagtgatttttccttcagcagctactgaacgtaattcacctactgtaatacccatacctttagcaattgcctttgctaaagctggggtttgctccattaccgagttaagttcttcaccacgtaatgtaccgctggcaagtgcctgcccaaattggactaaagctgcatcagcagcttctgcgcttgcaccactgatcgcaactgcttttgatactgtttcagttagtcgagcagtgtcatccatagtgagatttaaggttttggcattatcactaaagcgttggtaa

SEQ ID NO: 65318 - DNA, 399 bp, Acinetobacter baumannii
atgtacaagttaaagctaaatcctcaaacaaatggctatggcgtaataccgggtgatgatgtaaagcgtcaacaaatggatggtgggcgtggacgctattacatcgatgtgaaacgtaatagccacattgttgatgtgaactggaacttaagtaaaaccgatttcaataaaatgatggcgttctggcgggtctaccagaataagccggcttcattttatgcggatctggtgattgatcagggagcacggcagcaatacctgtgtaacttcattccgaactcgctcaagaccaatgaagttaatggcaatctttaccgggtaaatgctcagctcgaagttgttcaaaaccaacctaacctgactgccgatgtagctttgattaaggattgggaggtctaa

SEQ ID NO: 65319 - DNA, 1326 bp, Acinetobacter baumannii
ttgtattcttattcgtttgctccaagtgcaaaatggagccatttatttgcacgtcagccagaaattttaagttatttagaagatgttagtcgtgagtttgatattgagtccttaattgaattcaataccgaactattaaaagcggaatgggacaatgtaaaaaatgtctggaaactagagacaagctctggtttatatattgctaaaacagttctatttgctacaggcccaattactgaggcgcagattccacgccttgaaggtctagatacctttacaggtgaaatgttccattcagcgaaatggaatcatgattatgacttaactggaaaacgtattgcggtgattggtactggtgcatctgccatccagtttgtgccccaaattcaacctaaagccaaagaactgtttgtattccaacgcacagccccttgggtgctgccaaaaccagatacggatttgggtgagttgagtaaatcaattattgccaaatatccagcgattcaggcaagttggcgtaaaagtgtagcgctaaccctcaatgcgattaattttggtttacgtaacccaaaagctttaaagcctgtcaattttgctgcgaaacaactattaaagttacaaattaaagatccggttttacgtaaaaacgtcacacctaattttgatattggctgtaaacgtattttatttgccaataactattatccagcattacaagcaccgaataccacacttattccacatggcttagttaaagtggaaggcaacaccgtggttgcagctaacggtgaacgtcacgaagtagatgtgattatttggggtacaggttttgaagtgtcccatccacccattggtaaacgggtacataacgaaaaaggggaatgtctggcagaactctggaaagactcctcaccagaagcttacttaggaaccaacattgaaaatgtgccgaacgcatttcttatgctagggccaaatgtcttggtttatgactcattcattggtcttgctgaagcccaactgcaatatattgtagatggtttattgcaaatgaaagcaaaaggtattgctaaactttctgtaaaatcagaaataattaaaaagcataatgagcttgtacaaaagcatttacaaaccacagtattcaatagtggtggttgtaagagttattaccttgatgcaaatggtcgtaactttgcagcatggccatggtcattgaaaaagcttagacagcgtttacatcatttaaatttagaagaatacgatgtcatctatgaagctgatcttgtaaaagtaaaacctaaagttgaagaagttgcaggttaa

SEQ ID NO: 65320 - DNA, 1041 bp, Acinetobacter baumannii
atgttccattcagcgaaatggaatcatgattatgacttaactggaaaacgtattgcggtgattggtactggtgcatctgccatccagtttgtgccccaaattcaacctaaagccaaagaactgtttgtattccaacgcacagccccttgggtgctgccaaaaccagatacggatttgggtgagttgagtaaatcaattattgccaaatatccagcgattcaggcaagttggcgtaaaagtgtagcgctaaccctcaatgcgattaattttggtttacgcaacccaaaagctttaaagcctgtcaattttgctgcgaaacaactattaaagttacaaattaaagatccggttttacgtaaaaacgtcacacctaattttgatattggctgtaaacgtattttatttgccaataactattatccagcattacaagcaccgaataccacacttattccacatggcttagttaaagtggaaggcaacaccgtggttgcagctaacggtgaacgtcacgaagtagatgtgattatttggggtacaggttttgaagtgtcccatccacccattggtaaacgggtacataacgaaaaaggggaatgtctggcagaactctggaaagactcctcaccagaagcttacttaggaaccaacattgaaaatgtgccgaacgcatttcttatgctagggccaaatgtcttggtttatgactcattcattggtcttgctgaagcccaactgcaatatattgtagatggtttattgcaaatgaaagcaaaaggtattgctaaactttctgtaaaatcagaaataattaaaaagcataatgagcttgtacaaaagcatttacaaaccacagtattcaatagtggtggttgtaagagttattaccttgatgcaaatggtcgtaactttgcagcatggccatggtcattgaaaaagcttagacagcgtttacatcatttaaatttagaagaatacgatgtcatctatgaagctgatcttgtaaaagtaaaacctaaagttgaagaagttgcaggttaa

SEQ ID NO: 65321 - DNA, 1272 bp, Acinetobacter baumannii
atggatattattaacaaggagatggagtctccttcaaaaaaaactcagatatttgtttttttatttgccttaatagcactcatcgttgatggtgctgatgtaatgatgctttcatacagtatggtgagccttaaagctgaattcggattaacaagttttcaggcaggaacatttgcaagctttaccttaatgggcatgctggttggaggaattattggtggatggacttgtgataaatatggacgtgtgagaactatcgctgtaagtgtaggactgttctcaatcggaactttcttattagggcatacccataactattggcaatttggactaacacggttttttgcttctatgcccttaggtgcggtttatttagctagcaatatcttggtttctgaatatttttctagtaaataccgctctaccatcatgagtacaatgttatcgggttatataatgggctttattcttgcagcttacttatccggtataattattcctgaatatggatggagatggttattttatattgcaattattcccattgtattagttctatttattcaaaaatttattcctgagccacttgcgtggagaaaattgcaggaacttaaagttaaaggaataagcgcgaatcctgttactaatttaaagaatccggctcatcaaactggtttaaaacaaattttgcagaaccctgagtctcgcttaatgtttatatgctggactttaatctccttttttcttctatatggatattatggtgtaaacgtttggatgccatcttatttagagaaagacctaggcatgaatttcaaatctatgactaattatatgattgggtcatatttggctacaattctaggaaaaatttcagcaggtataatggcagataaactagggcgtagaattgtattttcactgggttgtgtttgtacagctggctttttacttatccttgtaaactacaataatccctcaaatattttaatgcttctaatcatttttggttttgtgtacggtttctctactggtatccatactacatatttaactgaaagttttagtacagcaaatcgtggattagctgcgggtatatcttacaatattggtcgaattggaggtgcaatcgctcctcctactattggcttaatagcaactcatacatctttcacaatcggattctttgtaatatgcatagcttatgtaatcactgctttgattcctgcaatctttgttaaagatcgtatgtatgacccacaaagtacataa

SEQ ID NO: 65322 - DNA, 390 bp, Acinetobacter baumannii
atgaaaaacattttaattttatctttattattcatttttggttctgcacatgcagaatctaatttgttcctaacagatcgacctgcatcttattgctcaatttatgcaaatacagcaacaaagatactttctgaaaggctgcaaggaatcagtaaacaaaactcaattgagagtaatcagtcacttgggatgggtaagaaatacaatgataatgttgtatttctagcaaacaatattttttctgattcttacgatgtttctaatttcaatacaaaagacgaatttacatctcaacctgagaaatatgcggaatttgctatatcaatttatgaaaagtgcttatttgacaaatatggcatagatccttggaaagaatatttcaaaagataa

SEQ ID NO: 65323 - DNA, 153 bp, Acinetobacter baumannii
atgagcatcgaaatcaagcaagagaagtatttcaaattagaagttggagttgaagaaagtacaataactatttgccagaaagattctggcattgtgattagcaaagatgcagccaaaaagttgcttgatatattgcaagacttcgttaaatga

SEQ ID NO: 65324 - DNA, 477 bp, Acinetobacter baumannii
gtggattcgaaagaatacttttggcttacaagaaaaaaagaacataaaactaagtccaaatccagaccgctacctaaagctactcaaaagtacttagagactgaagaagaatttacacaagctttagataatctggaaattaaatacgaaaagaaattccagtttaaatctaccaagcattggcgttttgattttcatttaattgaacatcgtattttagttgaaattgctggcggtccttggtctggaggacgaaaaggcaagctgtctacaaaggcgtggagtatggaccgttacgatgttgctgaatcaatgggatataccgtcgttcggttagaggcagcaccaagatttaagattaatgaatctggtccattgcagatccaagctcatttcgcaagccaatggcttaaaaacttgaagaggcaaatattcaatggatcagatcagaccatttcctccacaggaattaattga

SEQ ID NO: 65325 - DNA, 273 bp, Acinetobacter baumannii
atgaaccaaattgaacttaaaaaaagaattgcagaagagcgtaagttgttagcaatgcatcaagaaaatttggacaactttatagaccaaggctttaaaggctttattgatgaagatactttaaaagaaatgcttattgctaaccagaacccttttcaaaaatatgaacaagaatattcaagattgataaaagaagttgaagaaactggacgcaaaattattcagatgaactatgatttaagaaatgaagtactcagagatagccaaaagtaa

SEQ ID NO: 65326 - DNA, 663 bp, Acinetobacter baumannii
ttgaacttttttaaaaaagctagaactgatatggcattgattcttgatcagtctaagaaacctgatgattttcatatagtagaatctcataaaaaatataaaaatattattgttataattggagaaagtgtatctcgggagtatatgtcagtaaatggttatcctttaaatacaacaccttggcttaaggagaaagctacaggatatttttttaatcaatatatttcaactgcacccaatacagctatttctttatcaagaaccttggctataagcaacggtaaaaagatacagatgaataataatatagttgccttagttaaaaaaagcggatatgagaccttttggttatcaaatcaaggctatattggaaagtatgatacgcctgtaagtatgattggtgctcaagcacagaataaaatctttctaaaaaaaggggaatataattctgaaaatattgatgattttgaattattaaaatatttaaaaagagcaactaagaggaaaaatgataaagtgatttttatgcatatgatgggatctcatccaaatacctgtatgcgattacaagggtatccaataagaattcatacgaaaatgagtaaatcagtgacaatcttatgctatcttctacttctcagatcatggtcttactgtagataa

SEQ ID NO: 65327 - DNA, 132 bp, Acinetobacter baumannii
atggccatggctgctgatgtcaccattgcccaggtttctgaagtggttgaactgggtggattagatccggaacatatcattaccccaggtatctttgtacagcatgttgtacaagtacagcccgcacagtaa

SEQ ID NO: 65328 - DNA, 219 bp, Acinetobacter baumannii
atgaaattaaaagaactgaataacctgattgatgattttaagagtaatggtaaaaatcctaaaaaggtcatcattggttataaagactatgcggctttaatggaaaatgaaaaatttcaagaccgattaaccaaagatagtaaggatccaatgattagatactacaaaggaatcaaaatcaaaatggtaactgaaaagtatcatttagaaattttgtaa

SEQ ID NO: 65329 - DNA, 240 bp, Acinetobacter baumannii
atgaacgaatacattaaaatgcttcaagaaattgaagtaaagaaaaagaaattagaaactagaattgctcaggtagtaggtgaggaagttgataaatggcaatcagaaaacaacttagctgtacaaactatttatattgatttggttgatgagcaatcaattgaaggtcctaaaaaaaatattgttattggagttttagtagatatagattacaaacctaaaaatattttaattaaatga

SEQ ID NO: 65330 - DNA, 132 bp, Acinetobacter baumannii
atggccatggctgctgatgtcaccattgcccaggtttctgaagtggttgaactgggtggattagatccggaacacatcattaccccaggtatctttgtacagcacgttgtacaagtacagcccgcacagtaa

SEQ ID NO: 65331 - DNA, 264 bp, Acinetobacter baumannii
gtgccatccacattgacaactacagtggctgttgggtcacttactgtacctgttaatgtcggtgtgctgtcgctagtgagtacatcatcaagtgctactgtcggcgcaactgcatcaaccactgctgttgctgggcctgatgtattgcctgctggatcttctgttactgctgttaccgtatcaccatcatttaaaccagggtttggcacagtccaagtaccatccggtcctgctacaacacttgccgtactaccatctggataa

SEQ ID NO: 65332 - DNA, 285 bp, Acinetobacter baumannii
ttgttaaaaattaaaaacaaaggaattagcaagttaaatgttaaggctgatgtaattaaaaagcacaacgacttggtgcaaaagcacttacaaaccactgtattcaatagtggtggctgtaagagttattaccttgatgcaaatggtcgtaactttgcagcatggccatggtcattgaaaaagcttagacagcgtttacatcatttaaatttagaagaatacgatgtcatctatgaagctgatcttgtaaaagtaaaacctaaagttgaagaagttgcaggttaa

SEQ ID NO: 65333 - DNA, 264 bp, Acinetobacter baumannii; identical to SEQ ID NO: 65331

SEQ ID NO: 65334 - DNA, 1233 bp, Acinetobacter baumannii
atgtctttagtttatttcagtgacaaaataattaaaaatatttttcacaaccttggcatcgacctgaatcgcagcggttttctgaaacacagggatgagttgaagctaggagttttattggaattgatactgtttataagatcactagataagatgaaaggacattattttttaatcacatggaataagttctattttccggtttctgcttataagttttatccttttaaatttcttagtaatgatcttggtctgaagaatacccgtaggatgcatattgataatgtggaatataaagtcaatttatttgagtcgacatcacgggtggagctgtattacgaggttctcgatttacatattaaaaatgagaagttagtgaggttgaatgaacaattacgtcccactctgaatgaaagaagcaagcctacacaatttaacgttttgcctgcgaatttcttccctgatgtgtttagtgatatgagtgtcgaaaatattgcttatatggatgaatttcttgaaaagttcagaaaccatgaggaatttataaagcgaaaaaatgacgaaaataaagctatcaaaaaatttcacgaatattgtcattattttaatgatgtaatgagtctaaatgccaaaagttttatttttacccttgaatttcttatacatggtctacagaaattatacgatcataccctcatcaatctaaaaaaagactttatgaacgcaatcaggggctacaggcaacttgctcagatttcagggtatatggggttctgggatctggcagaaaacaataaattgtgcttcaggatgatgttcattgtgcctgatattggcattgaagcagaagaatggattgaagatatcagttactattgggaaaacatctattttaataaaattagagaggaggaaatatatcaatttacaggcacagatgcgataagatttgaagcggttgagctgcctgttgcatggtcacataaaaaacttatctcccattttttagcagtcggcaagaataatcagaatatgaaaaggttgatttgtgaacatgctgttgcttacatcgtactatctgaatttttttactgcccattcgagcttcagctatacctgaaatccattaagatgatttctgaggaacagtctgaagtggatcaagtgttacgtcttgaggggaaaagaatgtacagggtgttcagaggaagcctgccaaaaaataaaaattag

SEQ ID NO: 65335 - DNA, 138 bp, Acinetobacter baumannii
atgatcgttcccccactaccgaataaacctgcatttattgccttatcctgttctggaccattagatcctactcctactgacatattaacggttcaaattactttaccccactcaaaagcagaaattggcttgaaatag

SEQ ID NO: 65336 - DNA, 195 bp, Acinetobacter baumannii
atgactacaaataaccagacatccatcgcatctcttacgaaaaaacgaagaacatacagtgctcaatttaaacagcagatcgttcaggcttgtaaagcgccggacgtttcaattgcttcagtcgctttgcaacatggattgaatacaaatcttgtatccaaatggattcgcttaattgatgctgccaggggatga

SEQ ID NO: 65337 - DNA, 261 bp, Acinetobacter baumannii
atggaaaaccaaaaaactttctataattttaagaaacttccaagtcgttatacagctattgttttaccttttcttctatccatcattatgacttttgtagtgtccatggtcagcactttacgaagtttaggactagaagacttttctataaatgtctggatgtccgcatgggtcatttcgtggctgattgcttttccaacgctgcttttagtcttacctgtcgttcgtaaaatcacagcacgattggttgagcctgcttaa

SEQ ID NO: 65338 - DNA, 417 bp, Acinetobacter baumannii
atgacaaaagatgaactagagactttagctgatttaagattaagagaagctaaagttttattcgaaaatggactattccaaggatctttttacttatgtggatattctattgaatgtgccttaaaagcatgtattgctaaatcatttaaggaaaatgaatttccaaataaaaaattagttaatgactcttatgtacatgatttaaaccaactattaaagctttcaaatttaagcctgaagtttaaagttgatgcagaacaagatgcaaaacttgaggttcattgggcattagtaaaagattggtctgaacaatttagatacaagcccacaatcgaaaagattagggctgaagaattaattaatgcagttagtgatgatcaatcaggaatacttcaatggatcaaaaaacactggtaa

SEQ ID NO: 65339 - DNA, 879 bp, Acinetobacter baumannii
atggggcaaataatccaatttaagaaaaaaagaatttctaaaggcctaataatttcaggattaggtggcgttagtaatgaaaatggacctgtagctaaagatttaacacatagcgatttaatgttttatggtctttattgggataaaatcgttattactcaaataccgatgtttcattttactaataatgtaattgaggaatttagaactaatggagttattgaattttatacaaatgctcctccaccccagattcattcttcagaaatgcaaaggttagctttggagtctttattagcatgtcagagtataagaaaacagactaaagactctgactggattatttataataacgttgcagatggatttaattctatagagtctgatgatttgatagagcaacatactattagaattgaaatttcaaaatgtcttccctatccaagtacttatgttccaatagatactttaagaaaatttagagaagattatattgatgaacttgatagacttcatttagcaaaatacagactatttgataaagctaaatcatatgaattagaagaatttcaacgtgcaataaaagattatgaattcgctttttcctctaaattctcctattattctatgaaatcattgattagtgatatcaaaagtaataagtctcagctattagaggctagtttagctacaggagatctcctgataagtggctttagcttatctggtacttacaaccttggcaaaaccttctttaatatttttggctcaaagcaaaagattcatgaggtaaaaaagaattcaccagaatttcaattcatcggctctgcaatcaataaaggaattatcttacagaaatttgatcatagtttggaataa

SEQ ID NO: 65340 - DNA, 1050 bp, Acinetobacter baumannii
atgaatagatattttaaaaatatatccatttctacagcttttattttggttggttcttcatatgcaaatgcagaatatgacccaaacttaaagtcgatagatacaccgccagccgtttcacagcaaatgtttaataaagtgaaatctaatgggttagggcaatattcctatgcaaaaggtttatctagtaagtttatagagtctgaaggcgtaaaactccattacgttgaaggaggatctaaaggcacaccaattgtatttattcatggttttggttcgacatggaaaatgtgggaaccagtcatgctttcttatatgaaagaccataaagtgattgcaatagatttaccgggtttgggtcaatcatctcccatacttaacgatgattactccgcagagaatgtatcgaaaattctattaagtgccataaaacaaattaccaagaatgagcctatttattatgtgagtcatgacattggaaatacggcctcttaccctctagttgcaaataatcaagattacgttaaaaaagttgtctttatggattctccaattccagatatggagacattcaatcacccgggttattcaccaaaaggaccgggtttaggctggcattttggctattttagttttggtgatattgctgaaaagcaaattgcgaatgacccaaatttatttctctcgtactttattaaaacttatgcaggtaaaaaagacatttttacgcctgaactccttgctgagttgattgagccatattcgactcgagataaattaaaagcagcctttggctattaccgttcaaagaaagactcagccctacaaaatgaagcacttttagcaaataacaaaaagttatttattcctgcaatggcgcttagtggtgaaaagggagtgaatgatgttttggttaaagaaatgagagcgaagtttgtggaagatccagctaagttagaagcggtaattttacctaacacaggtcattggctaattgaagaaaacccagaaggcgtcgagaaaagtttatccaaatttctatttaaataa

SEQ ID NO: 65341 - DNA, 591 bp, Acinetobacter baumannii
atgacaatgtgtgtattaataagaaatgctggtgcattagcaatggcagcagataataggtcggtctacatgcaaaatggtaaagtagcccgggtagtttctaatgatataaaaaaaattattgaatggaatggcggatatatttctggtagcggaagtgctgatctattagaagatgtgaaagcatttgctgctaacactccaattactgatatgtatcaaatcgttgaatatcttgagcgctataaagctcggaatacaatagatgattattggttggatactacccacctaactgcaatttatttgacagatgctggtgatagggcagtctatataaatgctaatactgaagagcctagagtcttagctgattcaagcgttttgattttcgttaaaggtgtagacacagaaaaattcaaagaacttataaaagctgaattccatgagacaggtttcaatattgaaaatgttattgagatattaagaagtctttttaaatttgtatcagaaagaaatgagacagtatctagtacatttgactttgcatttcaaaattatgaaatgcgtggcatgattgaattaaaataa

SEQ ID NO: 65342 - DNA, 906 bp, Acinetobacter baumannii
ttgagcgatccaataattatccagcttcaaaagttagctattgattcttctagtaatgttgaagaagtggttagacttgctcttattgcagcaacaaagcttaaactaaaggatttcaaaaagtggtgtaaaaatgaattagaggggtataacgataaaaaaataccagcgtatagaaagactagagcaaccttgaaagcatttaacccattacgtggaaatattccgttttttataacggatccagatatgcaggatgctgtcacgtattatgaaatccgacagccactatcaaatttaataagcctattaaacggtaaaagtaatagttttgaaattcaaatgcctaatgagtggatttctatattgatgaaaatgcaggaagaaacaggtactttctcgccattaatgccaaaattattattaacttcttcacattttcaaaatgtagtagattccgttaggcaagaagttttgaactggtccctagagttagagtcacaaggaattttgggggaagactttaattttacaaaaacagaaaagcaaacggcagaaaaaatgacaagtaatacttttaatatacaaaatatgcaaggagtggttggtagtgtaaatggtgggactattaatcagaataatcagatgaatattaaggaaaatgactttaattcattagcgaaatatttgatggaaaacaaagtagaattttctgatattcaaagtttacaaagtgcaattgatcaggatccaataccaacaacaccaagtaaatttggtgctaatgtaagcagttggttagctaatatgatggggaaagctgcgagtggttcctgggaaatcgggatagcaactgcgggaacactacttgcagaatcactagcaaaattctatggtcttagttaa

SEQ ID NO: 65343 - DNA, 141 bp, Acinetobacter baumannii
atgatttacgcccctcttttattgtatggtcttgtactagttttttattttttaaacatcaaaaaattaattcacgcagagtacgacaattgcgaaaccaatacagtacagaccgaacaaatgccaacggccatgttctaa

SEQ ID NO: 65344 - DNA, 507 bp, Acinetobacter baumannii
atgaacccagctatttttaacttcaatgaccacggcgttcgtgttgcccttgatgtaaacggacagcctttgttttgtcttgctgatgtttgtaatgctatgggaatgcaaagagctaatcctagtagatttaatttaaatccaaagggtgttgcaagcttgtgtacccttacaaatggcggtagtcagatgctcacttttattagtgaagaaaatctatatcgcatagtttttcgatctattaaacccgaagcaatcaatttccaaaactgggtatttgctgaggtactgccaagcatccgcaagactgggagctattcagcacggcagacagcctatgaagaactgaaccgcctatgtatgcaagcaaagacccaaaaggctaaaggttcatttcatggcactggcttggcaaaccaccgctattcaatgcgagatttaaacctaagaattacaacatgcaaagcaaatttacagctaacttttgagggtatacacaatgattga

SEQ ID NO: 65345 - DNA, 243 bp, Acinetobacter baumannii
atgaaagatattgtactggcttcatatcgcactaacaccgaggcggatattgaggcggatttaatcgtaaacaatgaggcttgtagttttatcgaactaatcaccgtaggcggtggagttcaggccattgatgacggtatgaagcaacttatgcaaaaccttcaagctactggcgttgtggtgctgcatggggagagcttacagcagcttattgatgcttacttgagaggggcggaagcatga

SEQ ID NO: 65346 - DNA, 333 bp, Acinetobacter baumannii
atgaaaaacaagttattcaatattgctaacatgccaaagtatggttatgctgtagacctctcaaaatcgaatagcgtcaccccacagcgtcattgtggttttattgtgcctaagttttgcaaagcctctcaagctgagcagaaaataagcgcaagcatctcagccatgcaaacaaggctgtactccctctatgaggggatgacacgacaaaataagtcagcaatggcgaatatgtcgggcggttctattcgaccgagagtgaatcccctcaccagttttaaacatggtgaaatctctcaaaactcaaaacgaataggaggcaatcatgcctaa

SEQ ID NO: 65347 - DNA, 447 bp, Acinetobacter baumannii
atgactcatcccgactcggttttaaaattttcacttggtctaaatagtctctcgtttgatgtagacagccaacacattcaccttgagcagggcttaggttttgttaattcaaaaagtatcaaccatggtgttattgatgaacttgctatcgaaaagatgatttattttattgaagaaatcatcgagtcaaagccactcagaaatttaaatataagtggtgtagctgttacatctgatgcagccatggcacaactcagtgagttattttttagtgctaaaaagcaaatcagccgtatcgagcttgaacatagattcaatgattttattgagcgtttaagctactacacaaaccaagtgtctccagatcagctttatatttttacctactttgtatttgttcgagagatgatgcatcacttaagaattgaggaaattcaggtaagataa

SEQ ID NO: 65348 - DNA, 183 bp, Acinetobacter baumannii
atgcaagtgcatgagaaaagaaaactacttgaagccattgatgtgcttattcgtcgtcctgcttcagcaacagagacaacacttgctgaagccatggcctatttcaagatgctgattgaggaatctacacaaggacaaattgaagtccagtattcagacactactcagcagttgccattttaa

SEQ ID NO: 65349 - DNA, 609 bp, Acinetobacter baumannii
atgaataactacaaaatcaaagttaaagatgaagctgagagcaaagaggctcaggagttgttagatcaacttggatttaaaggtgaattatcagatgttgagctgccttgctacttggcaacatgggagggcggatattctgactaccttcttgattttttgaactgtactagagaaagacaagaactcacccttccccagcttcgagaccttgttgcacaaagcaagtcaaaagaccaaggcttgattagcggtgcggatgttcctgccctaatcaaaaagggtgaatcagttcaatttcgctcagtctttaatgttcaaggtggtggtgaatggcaagaccttaatcttgagcgagatgaagaagagttctctttaggcgatttgattaacactcgttttgaatggcgcctcaaaccccaaaccatcaagcttgaacttgaaattccagctccatacaaagcaaagattggtggccgtgatgatacatcattcgtcttgaacattggtagacaccagtattgctacaaaaacgaagatgactacacaaaagctcgtgacgctttagaagcagtatttgactcagcattgagaggtactaactcatga

SEQ ID NO: 65350 - DNA, 489 bp, Acinetobacter baumannii
atgaaacaaattaaaagaaacctgcatgctgaatgggaagttatctctagtgctgagtggttagaaggtttaggccgtgatccaacaaatgaagaaatgcttcaaatctttgaaggtagcttttaccccttattcaacacaaaacgtgtagagcctaaacaggtttggacactaaaaattaccacataccttgagtgtgatgacggccgtacttctgaatgcgaaatggaatggaagttcgataaaaccatgtcaatgcatgaagttctcaatggcgctaagcacatcaaaatgaatgttggtggtatcaaaacccgttggactggagtaactaagaactggatcaaagaactagatgctgactatgacgattcatggaaggcagttaaagcaattgcacgtgctgaatgtgtggcaatggttaagcaggtcaatggtgcagctaagttgctagatagcttaatcggacatttggagaaagtggcatga

SEQ ID NO: 65351 - DNA, 237 bp, Acinetobacter baumannii
atgactgacaacgttaatcaccctaagcattacaccagtgatccaagtggtgttgagtgtattcagatcacaagacacagaaactttaatattggtaatgcaatcaaatatttatggcgcaatggtttaaaagattcagatagccaaatccaagatttacaaaaggctgtttggtacatcaatgatgagattaaacgcttagagatcatgactagacatgacaaggaggcggtgtga

SEQ ID NO: 65352 - DNA, 354 bp, Acinetobacter baumannii
atgaaaccagaacagtttattcgtgagtttggggtggagaaggcgagagaggttgttgaaggcatcccaagtaaatatatggagtgctactactcaacattgtgttactgcaccaaggcaaaaaagtattcagatcgttttaatccgagaattgagcttgtgaacatggctgacctcaagcgtctggtggagtctttggatgaaattgaatcgtatggtggtattgaattgttcaaagagcatgttaatggggtggctttaatgctttgtgggattcgaatacatccagaagttaagcgactagatcggattttaaaagaccacgaatcaatatacggaggcggggatgagtaa

SEQ ID NO: 65353 - DNA, 261 bp, Acinetobacter baumannii
atgagtaaacgtgaagtaactgaaatggatctccgtaagccagagtttcaagatccaaaattaaccctagacatgcttgagtttgataaggatggcaatgttgttcgcaaggatcgatttgagaaaggaatgctccgaatccttggagtactgattgagcatggtctagctagttctcgtgagccttggacggtggacgaagttgtagaaaaagtaaaagcacagttcgcaaagcatgcggaaggagccagccatgagtga

SEQ ID NO: 65354 - DNA, 213 bp, Acinetobacter baumannii
atgagtgagtttaaaggtgtttgcatcgattgtggctcttcagagctttattcaaatagcgaaataagacagccaagaatgtgtgttgattgctatgcagcaatgattggctttacgagagttgatgattcttttgtggactcagacacattaggcgacgactcccatatagaaaaccacatttcgcctaactgccaatcgagggatgtttga

SEQ ID NO: 65355 - DNA, 372 bp, Acinetobacter baumannii
atggataagtgtagagaagagtttgagcaatacattcgtgatcaaagtggttttacggcagattttcaaattggatgcaatggtcagtacaaatctgacctgatgcatttcatgtttgctacttaccagcaccagcaagcgaaagtggaggagctgaaaaagcaattaatagaccaaggccaacgatttaatgaacaagctcagagagtcaaggatttagagttcaagaatgaagagctgcaaaagcgggtggatcaacaagggctaatcattgcaaaagctatgtctattgcatcagaccttcaaaagagctggtcaatgtttgagattggcaagaagttagagcaagcgctcaagggggagggacagtga

SEQ ID NO: 65356 - DNA, 162 bp, Acinetobacter baumannii
atgagaaaaagaactgattatggattgctatggattttatttggtgtgcttctgtttgggttaggaatcgggggcactttaattaacgcaaaaatggtttgtcaaaaacaagaagtgttctggattagaggcactcaatacagttgttcaatatttaaatag

SEQ ID NO: 65357 - DNA, 960 bp, Acinetobacter baumannii
atgttaagccaattaagagatttgctagatgaattgtcagaagctgaaaagtcggcattaatggcagggcagtacacaacgccagctcttaaagagattcgagcaagtattcaagcgtggcaatcatctttacttacaacgattccagaggcatttaccgtttcggcatcagcgttagcagtgaatgaggcaatatatcaagctaggattcttggagagaaaatcaaggaaccaaatgctaagaccttatacagcaagatcaagaagcagcctatgtcaggcggggtattgctagactatctcttcaataagattgctgatgatgccaaaacaagggttgagcaagttatccgtgatgggctctctcaaagtcaaacgaaccagcaaatcattcagcgaattaaaggcaagaaggctctaaattatcaagatgggatattggagcaatcaaggtccagtatttccaccatggtgagaacggctagaagccatgtttctaatcaggcaatgcttgatacttataaggtattggacgtttcttatgtgaagtttgtggctactctagatagtcgaacaagcaagcaatgtgcaagtttggatggtgcggtttataaagcagatgaaccacatccaacaccaccacttcacccaaattgcagaagtattattcttccagtgacgaataaagaaggcacaaccataggtaaaaggccttttaattctaaagttggggattcaggtgaaataagtacagttgattccaatacatcatttaaaaactggtttgataaacaagatgcagcttttcaaaagtcttggcttgggccatcccgatacaagctattcaaagagggcaaatattctctggataagtttattgatccgcttacaggtcagccattcacacttgctgaactcaaaaagcttgatgaagaaatgtttaagaggttgggattatga

SEQ ID NO: 65358 - DNA, 165 bp, Acinetobacter baumannii
atgtcaaaagaacagaaagtaatttacgagcctcatccagttagtccagagcgaaaagccgagcttcgagggcagggttataagatcattgatgcggtatttaaacctgaagaagagcaaaccgaaaaacgcaatactcgatcttctgctcaaccaaaggaataa

SEQ ID NO: 65359 - DNA, 387 bp, Acinetobacter baumannii
atgggtttacgtgacgaacttcaggcagatattgctgaagcattaaactctgatttagcagacgcagtagctaccttcacatgtacccggaaaaaattagttagctccaatcctgctactggtgaggatacttacaccgaatatgtatatagcggcagaggcgtcctatttggaagctgggcaaaagatttggtcaagcctatagattaccgagcaacagactctaaagccgtgctactgcaaaatgaagtgaaggattcagcaggaactttagttaagccagatgttaatgatatttgggtgattgaaggtggcaattatcgagttgtgagttatggtcaggatccatcgtcaagtgtgtggacctgtcagttaaggaaagtctaa

SEQ ID NO: 65360 - DNA, 600 bp, Acinetobacter baumannii
atgaaaaagattattttattgggttttgtttcaattcttggagggtgttcagttgcaccaattcaattgccaaataatgtatcaactataagtgctagctcagcgggggatacatacattgataaaattgattattcttttaattcaacgagtaaatcattctccaaattgaaactatgtgctgcagaaactttccaaaatgatgacattgttctacatgaccaagctggtagtttcataggggcatatacgggtagatattatgaaaataataatacacaagttcatcaagggaagtctgtttttaaatttctagatgaaactgaaaaaacatttattgcaaatggcaatgtaaaaacaaaggggcagcaagtaggccttattacagattttgttaaatatgatgcaaaaattgctcttaaagaaaataaagttcaatttgtaatgagcaatattttgagagctcaacaaaatacaggtacatcaagtaacaatggttttaggcaggttgggacatgggctggagcacgtgcacctggtgttattgaagcattagatggaatagctcataaatatcaaaattgcgttcaaactaattaa

SEQ ID NO: 65361 - DNA, 174 bp, Acinetobacter baumannii
atgaattttaacctaaatgtacaggttgataaagtaatgaataaactttcagacagtaaagcattaagagtatggacttacattatggtccttgcattcttaattggaattttgatctggcaagcagcgccaatattgacagcaatttctaagttgattgaggtattgaaatga

SEQ ID NO: 65362 - DNA, 5511 bp, Acinetobacter baumannii
atgaatgcagtagtaggcgcaaaaaaaggcagtaaaaaacaacgacaacctgtcatttcaccagattctgcacaatctaaaacctttatcaaggttctatatggcttggctgaaggcgagattgaaggattagctaatgggcttcagtcaatttatttagaagaaactccacttcagaatgcagatggaagccttaactttgaaaatgtaaaagttgattttagaaatggtactaatgatcaggaatacattgaaggttttcctgcagtagaaaatgaaactgctatcgatgtggagctgaagtctgaaacaccgtgggtccgcgcttttagtaatcttgatcttgacgcagttcgtctgcgcttaaaatggggacctttacgtactcagaatgctacaaatggtgacgtatctggcgtaacaatcgaatacgcaattgatttacagattgatggtggtgtctggactgaagtactaaaaaccaaaatttcagataaaacatctgcaaattatgaacgtgctcatcggattgatttacctcgagctgactcaggttggctaattcgagttcgcagacttactccgaactcaacttcagagtatgtcagcgacaagatgtatattgcagctgtaacagaagtgatcgatgcgaaattacgctatccaaatacagcattattgggtcttcagtatgatgctgagacttttggaaacgttgctaaagttgcaatggatgcgaaggggagaatcctaaaagtccctacaaattataatccggttacacgtcagtatgttggaatgtgggacggtactttcaaagaggcatattctaataacccggcttggatatattacgatatatgcacagtagaccgttatgctttgggtgaccgcttaaccccgctaatggttgataagtggtctttatatcgtttagcacaatactgtgaccaaatggtgccggatgggttgggcggtcaagaaccacgctttacttgtaacgtttatcttcagagtgccgaaggtgcctttgaaattttaactaagttagcaggtgtattccgtgccatcacattttgggatggcaatagcattatttgtgatgcggatattcctcaagatacttacttcacgtatacccgggctaatgttattgatggcaattttgaatatgcaggtactcgtgctcgagacaggcacaatgttgtaaaaattgcatgggataacccggctaatcactacaaaaccgaatatgagtttgttcgcgatgagaaagcaattgctgaagcgggccaagttcgtattcttgagcttgacgcatggggatgcacttcgcgaggacaagcgcagcgagcaggctggtgggcattaaagtctgagcaacttgaaacacgtactgtgtctttcaaggttggtctggacggttatataccattgccggggaaagtgattgaagttgctgatcctttatttgcaggtcgtgcaaatggtggtcgtgtatcagctatttcagcagatcgtaaaagcattacccttgaccgtgatgatgttgtggcagttgccggcgataggctgattattaacggtgaggatggcaaagctcaaactcgaattattcaatcgatctcgggtcgagttgttactgttactcatgagtttgatgcgattgcagcacaaaacgtctgggtgattgatgctcaagacttggcaacaatgaagtttcgagtgatctcgattactcaagacgaaagtcatcaattttcagttactgcacttcaatataatccagccaagttcgatgccattgacaagggtgcttattttgatgaggttccgatttcgattgtgaacccaacaattcaagaaccagtttcaaatattgttattacaagcgaagatcgggtggatcaaggtattaatgttgccaccatggttgtgtcttggacgcaagcaaaaggtgcggttaagtatctggttgaatggcgtaaagatgacggcagttggattaagcttccagtaaccggcaataactcagtcgaagtaccaggtatttatgcgggtcaatatcaagcacgagtaacagcgatttcagcttttgagatagcttctttaccagtttattcaactttgactgaactctctggaaagcaaggtttaccgccaaaattggcatttatccaagcgacaggaatcttatttggtataaaacttgattggggcttccctgcaactggtgctctagatacagcttatacagagattcaggtttcaccggatggtactagcaacattgctcaattgggcttattcgcttatccaacaacgactcatactctgcaaggtttacagccaaatctgactcaattttatcgggggcgtttgattgataggattggaaatattgggccatggtcggattggactcatgcgacaacttctgccgatgcaacagatgttcttgagcttttaaatgatcaaatcagtgagtctcagctcaaccaggatcttaaaaccaagattgatcatattgagactattgatgctgaaataggtccacttaagcaagatattcaaaatacgaaagatcaaatagcgcaggaagttagagaccgtaaagactctgttcagcaggctgtagatcaagcaaacaataaccttacgttagaacgcgatgcacgaatcaaagatattgataccacaaataagttgattgctcaggaagttcaaaacaggattaatgctgatttttcagaacaaaaagctcgtgaaactgcaattcttgctgaagcaaagttgcgtgatacggctataacatctgaaaaagaagaacgtattagtggtgatgagcatctctctcaaagaattgatacagttagttctagttcttcagataatgcagcggcaattcaacgtgaggaaaaggcaagaactgatgctgatagtgcattgggcaaaagaattgatactgtggttgcgcaagctggagataatgcagcagcaattcagcaggaagcgaaagctcgcgttgatggagattcagcaaatgcatcattaattgaaacagtgagagctgagtcaattgaaaatgatgttcaaactcgtgctttggttactgatgaaagtaaggcgcgaattgatgcagatagagcattagctgaacgcgtaacaggggttgaggtcgttactaaacctgctttaattggctcagaatctgatttaatcggaaatgatgctggctatgcaggtgtctggtcgattttatctgctgttcaagaaggagatttattacaggcaaaacgtacagatcaagttattgtttctgtaaatgataatgcagcaagtatcaattcagagcaaattgcgcgcattgaaggcgacaagattgttacaaaagcgttgactgattatcgggcgagtaatgatctagctcttgcgaatgttcggcaaactgctgaatctgctgtgtctaattcagaaagcaatgctaaggcattaactgaattagatagcagagtgaaaattgttgatgcaaatgctaatgaagctaaacaaaatgcagcttctgcaattagtaaggcagaaacggctgtttctgaggcaggatcagcagcatcaattgctcagcaagcccacgcggaagcatcgacagcgacaactactgcaaataatgcagcagataattcgaatgaagctaaacaaacatcggcaacagctttatcaaaagctaatgttgcggcaggtcaatctgctgcaaatgcagagcaaattcaatctattcaggttgatttaaaagataaagcaagtacaggtgatattgttcaagttaagtctgacattaaagatgttgataacaagattacagctcaaacaacgcgaattgatggagtttatgcacagattaacccaccgctaattggttctgatactgacttaatcggaaatgaaggaggttatgcgggtgtctggtctgaacaatcagcaagaattgaaggtgatcttgttgtaagtaagcgtattgatacaacggcagttgagttaaataacttacaggcttatgcacaacgagaagtacaagcacgaattgaaggcgataaagtaacagttcaaaagattgatacttatattgctagcaatgacagtgccttagcgacggtacgccaatctgcacaagttgcagttgataagtcagctgcaaatgctgaagcaattgattcaattaatcttgagcttgacgataaagcttcaactggtgcacttgatcaagttaagtcagacattaagaatgtagatgacaaagttgccgcccaaacagtacgtattgacggtgttttcgcgcaactcaatccaccattgatcgggtcagaatctgacttaatcggaaatgaaggaggttatgcgggtgtctggtcagagcaatctgctcgtatcgaaggagatttggctcaatccaaacgcacagatcaagtgtctgcacaattgaatgacagcaatgctttgtttcagcaacaaatcaatgcgaatgctgatgctgtttctgcaaacgtgcaagcaacaacaaccttgcaaacaaccgtaggtcaaaacaccgcatcaattcaggaggtgagcgaatcagtaaacggcttgtatgcgcaaaagtacatcaagcttgacgtaaacggcaaagttgcaggatggggcggtgctaacgatggcaaagaatctgattttattctgaactttgattcatttgcgattggttcaggtgatagcactggttattacccattcattttccgcaatacgccttacaccgacccaaacacaggcacggtatttccggtaggggcttatctcaaaaccgcatttatggattatgcatctattgatacgtcccatattaaagacttggctgtgaaatctgcgcagattgataatttggcggtgactagtgggaagattgatgatttggcggtgactacgctaaaaattcaaaatgaagcagttacagtgccaattggagtctcaaacccaaatattgtacggaccactgggaattttttcccgcaatactttgatttcactgctcaattgaccgagtgggaagcaaagtttagcccgcttgcgacgataacgctaaatagacaaggagggcaatgcagatttgatgcttcttgtaatgtagcagcatctgcatatttgactgcttatgctcaagacaacggcaatcttagtgaaaatgacagattgatgctcagattagtgctttctgtatacaaagggtctgttctggtggggcgagcggaagtgccgccgacacaagtgcttggtcaatctggattctattttgaaggagctataaacgctcttgcgataatagacactgataacacaattggtactacgacttacactcttaagcttggatttgcaaatagagggagtagagcaataagagttgtattgaatcacccatcaggtgtattcggtgtgaataacattcgttttgttgcgctggagctgaaaaaatga

SEQ ID NO: 65363 - DNA, 540 bp, Acinetobacter baumannii
atgacagcaattatttcaaaaaatggcgaaattcttcagatgatttatgcaaatgaagaaacagttgttttaaacaccccgaaagatggagttgcggttgatgacccgccaagctcaaatatgttttatcagggtgggtgggtagagatgcctgctcagccatccccgtaccacatatttaactatgacataaagcaatggattgaccctcgcaccctggatgaaatcaaagcccagaagtgggccgagattaaagtcatgcgagatcaacttgagtttggtggttttgagtttgagggcaatatttatgactcagatcaagtgtcacaaggtcgtatcatgggtgcggctgctgcggaggtagatcaaacatggacacttgcagataactcaacagttgaattgacagcgcagcagcttaaagagctttacgctgctttgcaggcacatattgcaggcgttcacgaaagagggcgtattgcacgacagaaaattgaaactgctttgacatatgaagaaattgaagcagtaaatttttaa

SEQ ID NO: 65364 - DNA, 675 bp, Acinetobacter baumannii
atgacctttattcttgctattcaacttgaggatagtattgtgattgcagcagatactcgcagtactataccgcagcagaataatagctcatatttatatcaagatggtattcaaaagcttttcccatgggaaaacggtattattacaggaactggtgaattaaaccttatccaaaatgttatatattctttcaataaagttaataaacatagtattgatgaactgccaaacttattaaaagcatccaaactaaaacgtgaacaagaaatcacacactcacagttagaaatcacaaaattactatattcaacttatagtaaaaatggggcacaactttactcgattcaacctaataaactagaagaatatgaagtgattagatgcgagaaaaatgaaattttactatggacatttaatcctaatattcaccctatcattaatgcattaacagaactatattccagcctaaaaccattaaatgtatttaataatatcactgactgtatctcctactatttaggccaaatatctcctatttttcttaaacaagctcaacatgactctatgatgagcaaagaatttaacttcttttttcaaaccaaagatgaatatttttttggagaatatttaaataatgactctggtatactaaacaataaaataaataatctttaa

SEQ ID NO: 65365 - DNA, 591 bp, Acinetobacter baumannii
atgagtttggcagcagagagtgaattaaatacacggcagcggcttatttttgcggtactggatttattgcggacccaagggttagcagcaaccagtgtgcgagaagcggctaaacatgcacaaacgccattgggttcgacttatcattattttcctgatggcaagccacaaatggtcaaagaggcgttgttattgtctggaaatatcgcgttggaacaactggataaagcattgaatcagcatgggacacgtaagggtattaccgcatttattgcgtggtgggggaggattgtacaggattccagttttcaggcagggtgtcctttaatgtcggtattgatggaaataggaaaagacgatgaaaaagtacaatatgttgaaacagtcaaacaagtgctaaatttatggaaacaacgattgacacaagcacttgaacaagacggcatctcatttgagcaggccacacaagtcagcttaagcattattgcgtcgtttgagggggcgattttgttatgccgagcatggggaaatttaaccccgttccaagcggtaactgcacaattagatgtaatgattaaaaatttgatttaa

SEQ ID NO: 65366 - DNA, 840 bp, Acinetobacter baumannii
atgaacacaaatttcaccattaccacccaagatggctacccacttgcagcacgccattacagtgccgacaagccgaaagcgaacattattctggctggtgcaacaggcgtaccgcaagcgttctatcgacgttttgccgagtatgcagcgacatacggttacaatgtcatcacctttgattatcggggaattggtcgttctaaacctgcggattttaaaaattttgatagtaattttattgaatgggcaacacttgatcttgctgccgtagtcgatacgatggcagatgatttaccactttttatagtgggtcattcatttggtggacatgcctttgggttattacccaatcatcaaaaaatcaagtgtctttatacttttgccacaggtgcaggctggtatggctatatgccaaaagccgaagcaatgaaagtaaaattactgtgggatttggttttacccgcattggcacaatggaaaggctatattccgatgtcattattaggtatgggtgaggacttaccctatggggtatatcaacaatggaaacgctggtgtaaattccctcattatttctttgatgaccctaaagtccctgaaattgcagaacaatttagaaaaattcatacgccaattattgctgcaaatgctttagatgatttatgggcattacctaaatcacgtaacgcatttatgcaaggttatcaaaatgcagatgtccaattgattgatattccattaacccagtcattaccgaaaatcggtcatatgggttattttcgtagtgaggcaaaatcgctgtgggataatgttttaactgcctttgatcaaacactttaa

SEQ ID NO: 65367 - DNA, 540 bp, Acinetobacter baumannii
atgcaatccgtgtttgtcttgcctaatttacttaaagtttataaagccctgatttgggttacactctacgctgctgctttgcatttttttgataatgtttattttttcttccagtatccagaacctgcctggctaacacgagaaattgttgcattattatggattccgattgcattgatggcacatcgtgcagtggatttaatttatataggtaaaattaatcatagttttacagtgattcatagttttgtattagcgaactggatttctctcggtcattatttatttgcttgtccacaagaagtctcaactcggataaacattgcaatctttatccaaaccagtatggcctgtattttatttatcatgaccctatggttacaattcactcgttacccaaagtccttagcttttgccaaaaaggcttggtttaaaaatattgttatgtatgtggtgttaatcattattttagagtcaattttcccgtccaactttcatgactggtggtatacgtggttaataccatcaaatccacattag

SEQ ID NO: 65368 - DNA, 414 bp, Acinetobacter baumannii
atgagatatcagaaattaaatcgtttttcagattctgaattcaaacgcttggttggcgtacctcgacatgtttttactgaaatggtagaggttttagaaaaagcagaatcactcaaaaagaaatcaggtcgtcctcatactttaaatatagagaatcaattgttattaactctcaattacttacggagctacagcactcaactggaattagcggcaaattaccatatcgctgaaagtaatgtgaatcgaaccattaaaaaggttgaagatgcattgatgaaatcaagacgttttactctgccaaaacgaagcattaccacggcagacgaacactttaactgggtaattattgatgcgacagaatgttcaatagaacgcccgaaaaaaaaatcagagtcagttctacagtggtaa

SEQ ID NO: 65369 - DNA, 1596 bp, Acinetobacter baumannii
atgacctctgtagatacaagaatttttaatcaggcaatggatatgccatttgaggaattagagaaattcctatcttatatttcagatattaaaaagtttattacatggaataaactcggattacttagtgatgagagcagaaaaaatctcattattttcttattcaagaataatcttctttgtgggacccttcggctaaatctaagtattgatgagtcgatagaatgcataaatgcgataaaggaaagtaatcaaccacttgagttacggttttggcaaggccatgttttaaccagagaacatattgaaaatatagaaagtttaaaagcaatttgggatgcttgtaatgatatctcaacacatctcaacgataggaaacaaatatttgattttttgacagcctattttagtgatagtagtaggataggccgaggaaaagattttaccaaagctacaaaagataaagtatggattgaaagtcatggacgatgtatgttcctcggttgtggagaatcattaaagtatgatttcttaacgggaactggggggaatttctcttatttagctcataatgttgcatctgccgaggggggggagcgaggtataccatatttatctgaagcactatctaatgaaccaaagaatattttattgctctgtgataaacaccatcgactaatcgacaaggttgcagcagtagattatccagctccaactctggcattaatgagaaaagaattttgtgatttagcagaaagccttttaaatggcctttcttttgaagcaattcctgtatacaccatattatggcctgtaaatgggcagtttgtttctaatccacaattaaaagatattgcgtcgagcttatctttacttaaagcaagaattaagggtcaagagcgttgtttgactgacagtaatacgccctataggaagaaacctcaaaaatttaatgaagacttaattgaacttattcaagatgaagctgatcagattcttcaaggaactaaacgagaaggctataaggctgcactatttgcattcggaccaatgcccgctctaatcggtctaggaagtctattaggcaataagaatgagtttatccctatgcttcgctatcgagatagcagtagctggttatggccacatgaaaacgtaatcgatgcattttatgaaattaaaggtcttgattcactcacaaacaatgatgatgtagtaatctgtattaatttcacagcaatagctaaaccacttcaacaaagagctgaaaatcttaataggacattaggggcaggaataatagaaataaccgcattaccagagtatttagggaatggggctatccctaatccagagagtggaaaaaaattctgtgcacgattacagcaattattacatgacttgaaaaataaatatgatgttaaaagagtccatttattagtatgtgcatcaaacgcagcctgtgtttttattggtcaggctatagatttacatcatccagaaattattgcctatgattttgttaaggatgatatgttgcctcatttaattattaagaacaatggaaaaactaacgtgcttgctcttccatcctag

SEQ ID NO: 65370 - DNA, 384 bp, Acinetobacter baumannii
atgcatgatgaatattttcaattttctttcaatgatttaaatgtatctatctcgaaatcagtctatgatttatggctgaaatttcgccaaataaatcataatgatacggaagcttgtggagtactaattggtactaaagattttgctagtaatcattactgtattgagagtgtaactgtaccaatgtctaaggacattagaacaaaatatagcttcacaatgaaagatcctagacatcaacaaatagttgataaagcatatttggattccaatggaacctcaatttatttaggaacttggcatagccatcctcaagctattccaattccatcacatatagattatcaggattggcaaagatgtttaaaacgtaatcatatatga

SEQ ID NO: 65371 - DNA, 1734 bp, Acinetobacter baumannii
atgaactatcaacctattattcaacacttaactacttgcggatacgctgtatccgcaatagagttttgtttattgccagccattaaagttgaatgtgaaatttcaggttatgaagtctccctcattcacattaaagttgatgaacttaaagaaatgccatcttttgttctccaaaagcccgaagcatttccacgattggcacataccctgtcactcgataaatggggggttgcttctatttgtgtaaatgttcctgattctgtttctatcaattacgaggtacctgaactcgcatttgaggagtcattaaagcgacatataacactattaaatcaatgcctatctgatcaagagtggaataaaaaagaactattacgtgagtttttagcaggatggtatcaaattcgagagcaggaatacgccgattttctttgcctatccgatgctggtcattttgaactgatagatgtctttccacctaaaaagaaaaaaaataaatatggtctagactcttatcattttggagttccaaaagattataaccagaatgcaaattactctttaattaataatcaaatcaaagggcgaggtattccagtaggtacaggttgtatagttcctcttcaaagtttgattcctgccccatggagaaagagggatttaagtgattggtatataaaaatattagatttcattgacccatcaatacgtgacaaactcactcatacttttggccaatctagagatcattctttctggattatttttaatgctgcaaccgattcaggaaaaacatggtttggtctgcactttgtactcaaaaaagacattaaaggaaaaaagaattttccactaaataccaaaaatttagagttttgggatattaaagcgatggatattcgcctgtttaataaagaacgaattattccacgtagcggtgcagatatatcactacaaaataagaaagttttacttgtaggatgtggtagcgttgggagccagattgcaaatcaactcgcttcaacgggtattggccatttaacgcttgttgatcctgattcactctcacttgataatttatatcgacatagtttgccaacaagttatgtaaattggccgaaaacctttggcttaataatagaattacaaaataaatatccatggcttgatacagatcaaaaattctgtggattattagatttaagagatgagagtctcctcaatagttttgatcttgtcattattgcgattggatcacctagccaagaacgtatttttcatgatttctgcatcaaaaatgaaattgaaacagcagtaattaatacatgggttgaaggatatggtatcggtggacatgcaaccctagatattcctgactgtttagggtgtttaagatgtgcatatgtaaattctttagacttttcaagaggtcttgcatctaaccttaacttcttaaaatcagatcaaagcttaacaaaaaatatggctggctgtggcaatgcttttctaccatatagtaatctaacagcaattcaaacagctctaattgcatctggcttagcctctaagttcttattaggcgaaatcacccaatcatctaaagtgagttggaaaggaagccctacagatgttatcaacaacggttttgaattaactgatcgttatcaagcattcacaaaaccacttgaagtattacctcttttaaattcaggatgtgatatttgtaatgcatga

SEQ ID NO: 65372 - DNA, 1035 bp, Acinetobacter baumannii
atgagtattcaaagtaaatttaatactttcaatcaacgaattcaacttacacgccaggatgatgcatataaagatgcgcgagagaaagatgacagcattactggtgcaatcaaaacaaaatttaaggaaaagggttatcctgttattgatgattttgttcaaggttcattaattactttcaccgctatcaaggaaaaatataaagattttgatattgatcgtgcaattgtcattgatcatgatcaggcacccacagatcctgtcgaagcaaaaaaagtagttcttgatattttagagaaccgaggcttccgcaatgcaaaaatcaaaaaaccttgtgttactgcggattatcaatctcaagatttacatatcgacatccctatctacagaaaaacttcttggggaagttatcaattggcggtggggaaaaaagattcaaatgctgaaaataaggtatggtctgattcagctccaaaagagttaattagttgggtaaatgattcttcagcttttggagaatatgcaaccgaaaagctttatcaattccgtagattagttagatatctaaaacgatggagaaattttaaatttagtcacgatgtaagccgaaagatttactccataggcctaacagttatgattaaacagcactttagacctagtattgattcagaaggttgtccaaatgacttaattgccttgaaagatactgtgaattccattcttaatttgtctggatattttatttcttatcctgatgatcaatggaaagtgaaagttagtcttccagtttcgccatatcgagatatctttcatggaagtagtttcaatacgggtacaagatttagaaacagactttccaatctaaattcatcacttcaaacagtcattgatgaaactgatgaatctaaacaatgttcgctccttattggcctatttggtgatgatttcccagaggggacaaataatgcttctgctacacggaaggcagtatttgcaacttctggagctgtagggacatctcaaggcgcatga

SEQ ID NO: 65373 - DNA, 129 bp, Acinetobacter baumannii
atgtctacaactactaatggtattgaatacgtttatacacgattcattactaaaaatggaaaacgtatttatcaccctaaaggtggtttttataaatttccaaaacgtccaaaaaagacagcttcctaa

SEQ ID NO: 65374 - DNA, 1071 bp, Acinetobacter baumannii
atgagtacttttaaccctgatatgttaaaaatcgctcgtgacctacgaggcatgagtcagactgaactcgtccaaaaaatgaaaaatatcactcaggctgccttatcaaaaattgaaaagggtgacttaaaaccatcagaagaaactaaaaagcaacttgctaaagcacttaattttcctgaacgttttttttcccagcttgatcattttaaagtttctcctattagccttcatgcatatagaaaaaaagcttccactacagcaaaagttctaagtcaaattaatgctgaaatgacaataaaggcttctaatttagaaacactgaatcttttttctcaattagatgaaaaacgacctttacctagctatcaaatttatatgaatgttagtactgctagtgaggctgcacggaacttacgtaaggtatgggggttgggattagacccaatagaaaatttaacagaagtaatcgaacaatctggtatttatatcttttattgtgactttgaagaagatcatattgatggcgtatctctacaaacacaaaattgtccaccatgtattttcctaaacaaaaatcagccgaacgatagaatccgttttacattagcacatgaattaggtcatttagtactccataaatttgctccatctattgatatggaagatgaagcaaatgaatttgcagctgagtttttagtaccgactgaagcaattaaaggtcaattacaaacaacgaatttaaagacttatgctgctcacaaattaatgtggaaagtctctatggctgcattaattgttaaagcaaaaaatattggcgatattagtgatcgccaatcaacaacattatggcgtcaaatgagtatgtatggttatagaaaagtagaaccatatcctctggaaaaggaatatcctcaacgatttgctgaattgatggtcaatttttgtcaaaaagacagaaataaaattatgaatgaattaccatcattttttaacttatacccagaagatttttatcagctttataagtctgatatagaagccgtggagcaaataatgaaggtttcttaa

SEQ ID NO: 65375 - DNA, 585 bp, Acinetobacter baumannii
ttgactaatattgttaagagattcttggcagatttagcaactgagcaaccttcaattttgcctttagttcaagggtcttgtacagggcaaaactttagaccaactatagccttaattgaacgattaagtggaactagtctacttatgattcaaaaattattaaatcattctcattctacaactacaactatttatactgagcgtgtccatactcattcaattttactaaacaaatcaaaagaatttcagcattacttggtcgataatgctttaaatggagatattgaaaataggaacaaagcattaaaaaataaagaatttaatgagcctgttgatcagtggctgaattgtgaagcgaaaagaatatggtttaaagatcatgaggtaattgcagaatggattgcatgggaaaaagcaattcgagaatctgaagaggagttgaaatttgacaatattgtaagatgggaaaattattggctaccaagattagtaaagtttcaaagcttaatatccatggtgctagaggtagataaaagaaatgctttagaattagctaagcatattaaacttccaccactctcttaa

SEQ ID NO: 65376 - DNA, 570 bp, Acinetobacter baumannii
atgaaaaagacttttatatcaatttttttattaagcggaattgtatttagttttaatatatatgcaaatgatgatacttttgtagtttctgcaaagtgtaaggatgaatataattctagttgtgacattgtgagaactgtaaatgctcagaatgaaatagttataaaaggtgtcaaacttttaaatatttcaaaaataaaccaaaacttatataaagtaaaaacatcttgtgggtctccgtgtttagttacgcttttctatagtcaaaataaagaggatgccactgacgaatttattgctattgataataaaaataattgtttaattgaaagtgatagtcagaaaaaagttatttatgctagaaaattgtttacaaataagcctagaaaaattgtcgatttaaaaaacaaagaatttaatgagttattacaaaggtttgattattatagttattttaagggtgagagttttttctcacctgatggtagtttaaatttaattgcaaatgattatggggaaatattggttaaaaagaaaataaaaaatccttgtggtggtgataagaaatag

SEQ ID NO: 65377 - DNA, 996 bp, Acinetobacter baumannii
atgacaacatccgataagttaataggcttagtaaaagccggagcattaggtgataaacgacaatttcaaaaagttgttgaaactattattgctgatgaaaaattaaaaaaacattttgtagttgcagaacgcttagagcaagaattagaaaaattttctaatcagaacaatcaaaaaattatcaaaaagtttatcgaatcaaaacctaacactgtagatagtaagttagaaactttagtaaatgaaaaaaatccaaaaattagctttgatgatttggtattctctcatcatattcaagattctctattagaattgattgaagagcagaatagagcagatattttaaaatcttatggcatagcccctagaaacagagttttactaattgggcctccgggcaatggtaaaacctctatcgctgaagctttagcagagtctcttatggtgcctttattagttgttcgttatgagagtgtaattgggtcatatttaggagaaacagctagtagattgcgtcaaattattgattatgcctctatgcaaaaatgcgtcttattctttgatgagtttgaaaccttaggcaaagagagaggagactcacatgattctggcgaaattaaaaggattgttagttcattattaatgcttattgattcaatacctagtcatgtagttattgtgggtgctacaaaccacgatgagctattagacagagcagtttggagaagatttcaaattagagttaatattcctaaaccaactcgagctcaaattgaaactttattaatgaagtttgaagatcgatataacattaagtttgattatgcttatgaaacattatctaaaaagttatacggagtaagcttttcagaagttgaagagttttgtagaactgtaatgagaaaatacattctaaatctgcctaacaaagatatgagaaatattgtttcgctaactttaaaaaattggtctgctttaaatacgataaatgaataa

SEQ ID NO: 65378 - DNA, 2568 bp, Acinetobacter baumannii
atgagtgagtatccttttattaggcttcctcaatcagatactacagaatatgtggggaatcagaggctaatttcgaagattactaagcctgtaataagtgagcaagctcaattagtgattcctaagcttacacgcttgaaagatacacttgatgcaagaagaatagaggtagtagtagatgctccaagtgtcgagcctgaatatgcattagttattgaaacttatgagccgataccggatttttttaaagctgtaaaaaagattgatggtcttgaatggttagctgaatatgagctccctgatatcgaaccaacagaacattttcaatatcaagatgatgaaagattattatctggtcagttactgatggttctttctaacagaagagctactgatgaatttcttggactttgggaaaggtacatagaaaataataatatgacattccctcgaggtttaactaaattcagggatctatttctactattaaaagatataaggtattggggggttgaagatcgattaaaagatacaggtgtattagaagactgggaggataaattaaatcataatccggatgagccagtaaaattcgaaatagaattatggtttcgagaaaatgaagaaaaaaggatagaagcagttgatcaattaagagagattatacgaggatcagaaggcgatattattacacagacttgtattcctgaaattcaataccatgctcttttggctgaattaccaacctctgaaattaataaaattattgctcatgattatattaaactggtgaaatgtgatcatgttatgttatttaggccacatgggcagatgattgtcgagcctctgtgggatgagggtgaaactgaaagcctaactgatgagaatagctttagcaccgaagataatagtgaagaactattgccaccagtagttgcattattagatggcttgcctatggcaaatcattctttactgcaaaaacacattatagttgatgatccagatgattattcttctacatatgaagtagataagatgactcatgggacaagtatgtcctctttgatcattcatggggatttaaataattcatctggtacgattaattcaaaattatatgttaggcctattatgaagccgactagccaagctagaggtgaaggcatagatgaaaatactcttccattggacttaatacatagggctgtttcagaaatttttgcaaatgatttactgtcagcttcaattaaagttattaacttatctattggtgacccattattgcaatttgctgggaaaatgagtcctttagctaaattaatagactggttgagttataaatataatgttctttttatagtaagtgctggaaatcatctcactaatattgatttaccaatcccttcgcaggatttcagagctcttagtaaacaagagcaagctaaaacaatttttcaaattcaccttagccagtcaagtcaaaaaaggattttatccccgtcagatagcttgaatgcaatttgtgttggcgcactacatagtgatgagtctaactataatgcttcaaatggcattatggatgtatatgaagaagagttaccagcagtatattcggcacaaggcaatggttatttaagatctatcaaaccggatgttgtaattggtggtgggagattagtttttagagaaccatatgcagcaccttctttaaggccattctattcggcagctctaattggacaaaaagtagcaacagcaagtactcgtgagttgaatagaacaactcatacaatagggacaagtaattcaacagcactagtaagtcgcttatgtgctcagttgtctgaaatcttaaaaagatatttggaagaaaatgatatttcggatgaggtagatgcatatatgcctttgttattaaagggcttggttgttcattccgctacctcgcaagaaatagctaacaggatttctaatctttcaggtggtgtagataatgcaacattaaagaaaatgattgctcaaaatattggctatgggaaagttaatcctgatcggattaaaggtagcttagaaaaacgagtaacactttttaattttgattctataagtaatagacaatctcatatttatgagattcctttacctgagcagtttggtggtgcaaatcattggaggagaattacagtaacattagtttggtttactaaaccatgttgctcaaaattaaaatatagaagagaaaacttatggtttgaattagatggagataataaagaatttgtaaaaagagctagtcattcagctgattggaaccaagtaaaaagaggaacggtacaacatgaagtatttgagtccgaccgcttggcagttatcggagaagataaaaatatcagacttaaagtaaactgtagggaagttagcgaaagatttagcgaatcagttaaatacgcattatgtattacatttgagacagcagatgaagttgatgttagcttatatcaagaaatcaaaactaaaataattgaacgtacaagggtcgaaacaatagggttaaaagtttcataa

SEQ ID NO: 65379 - DNA, 276 bp, Acinetobacter baumannii
atgcaagaagctaatcttaagttaactatgacttcttttgactatttctcaagttacattgattgcaacttaacagtagccattactcgctcagagcacccatctatagctaaacgctatttctgtggtccaatggctcgttggacagtaccttatacagatctcaatcaatggacttccgatggcaaaatccctcttgtccagatgttagatgtgggcgactctaatacggttttaaataaaattgactacgagtatcagcgccgttgctcttga

SEQ ID NO: 65380 - DNA, 1080 bp, Acinetobacter baumannii
atgcacttagaatctgtaaaggacaatagtccaaactatgtcaccatgacatctagcatcgatcatctacataatcttctaaaccattatcaatctaaattgaatgatgctgtaaaagaagcagaaaatcagagtgttatcgaaaagggtaacattcataactatgaatttgatcgcaagaaattgaaaccaaaaatcctcagcttcaaaaatggtgcatccattcaggtgcaacaaagcctgatcaagattaaatcccaaattgattttattaatgtgagtttcagcaccactagggcgactcaaagaagctatatcaaaaaatttcttacggaaaaaattggtaagaagcattttattactgaagaacataaccatagtgctacggttaatactgatagtgtagcttcatataaatttaacattcgtattcatgacgtgaacaataaaaagtgcattcataaaattgttcatgcgcttaagaaaaattatggtgcatttaatttcagaattacgtgcattgagcttgcgcatgacttttacaatgctccacctgagtttttaaccgctctattcaaatctattcagtttgatgcagatgtacaaaacatccgtatctttaggttaaagggggaaaatcagagtatcccttatgagccgattaggcttaagaatctactacttcaaggctttaatattggagtcaatgactatcgtaaggatgatgtttactatcatttttactttaagaaaacggatcacaataaacgtccccttccccatgaaaaatggcgtttgagagcggaagtaagattaagcaaccttgatcaagctttagaggatttaagcaatgtggtgaaacttggcttcaagaagcttacttttactcaattaaccgacacggcgacactagaacaaagaaaaccttactcgctttatgtccgcccatacggacaaaagccctcctcaccgattctcaaaaatgggcattatcgagatttcaaaaagtttatttgtacaaatcaaaatctaaatgagcgattaagggaatctgtaaagaacttgtcaaataagttctag

SEQ ID NO: 65381 - DNA, 168 bp, Acinetobacter baumannii
atgaatttaacaattatcagcactgaactttttgcagatattttaagacacagtgaaattctagaggtagaggaaaaaagctcctctacaacagaatacacgatcatttataagggcttgaagaccttattaattgatactgctgtcgaaaaatatttagtcgagtaa

SEQ ID NO: 65382 - DNA, 243 bp, Acinetobacter baumannii
atgactgaagtaatgaaccgcaaatgctctgaagagctagctaagctaaaacaagagatcatcgatgatacgattcataatctattagaagagaatgatgggacatttgatcttagtacagaacaagggatcaatgtggctgtcaactatatggttgattacctcattctcaataaagtcgataccaatgcactcgacctaaaagaaaatttaattcgtcgcttaccgcagagtaaagtctga

SEQ ID NO: 65383 - DNA, 291 bp, Acinetobacter baumannii
atgtccccccaagatcctaacatctacaaacgcttactagcacgtgattattggcgaatgtgtcaactcgccacaaccgcggaacacaaagagcgcatctataaaaccaaggacggtttagagcgaagaatcaaagcccgccctccatcttcaggcatcttaccattaggcaggtcaaccatctatgacttagtccgtaaaggagatatgcctgcgcctgtacgcttgagcgaacgtgtgagcgcgtggcgtaccactgacctaatcgaatggcttgagtcaaaacagtaa

SEQ ID NO: 65384 - DNA, 837 bp, Acinetobacter baumannii
atgcaatacataccaattgatgaagtaaaaaataaactcggtagttatagcaaaatttccaatttagtctcttcgggcgaattggaaatttgctaccgtgtgaataattattttgcttcagttgatgatatttcaggactggttcattcaattgaatacggtaatcaaatatttattgctgaaaatacagaagaattagaaaaagtaattttagatcccaaaaatactcttagtgtttcccaaacacagaatgctttaaagttaaaacatctagaaaatcagattgccaacgataaagaaaaatatagaaattttccttcccctgaagagctgattcatagaccagtcttcaaatgggtatttctagaaaaccatccacgtattgaatttttaaaaggaaaactagaatctggaaccaaagtcaatgaacttgaattatttcccgaattctataccgattactctgatatagagaaagcccacaaaaaactagatttaacatggggaagaaaaaaaatttcaagagatgagttatttattactactcgtagttggaataaatttatacgtaaaccaaagacaaaagatgctattgatagatctgaagaaaatttaaagcaagatctacatcaattaatcctgatacttaaacatattattatgcaagagtctggagctacccaaaaacaacttactgatcaaatcatcaaactactgaaacctaaaggctcaaaattgcatgaaagtaaaattaataaaattttgcatgaagcaaacacacacgccaatgaagttttaagaaaaaatataattgaaatatttaataaaaacaaatga

SEQ ID NO: 65385 - DNA, 1281 bp, Acinetobacter baumannii
ttggctaagcaatccaacaaactgacagctaaaaccgttaagaatctagcttacgatcctgaaagcagtaataagcatgctgatggtggtgggctgtatcttttcattcataaaaacggatcaaaatattggcgtttagattaccgccgtccaatcagtcaaaaacgaaataccttagctttgggtgtctatgatgaagtcaccctagagaaagcacgtctaaaacgtgatgaagtaaagcgtatgcttgctgatggcattgatcccgcagaggaacggaatcactatcgggatgaactcagagcgaagcttgagaatacctttgaaaaatttgctactgaatggctaaagattcgtgagcttgaaggtaaagtagaccgagagacaatccgcaaactcaatcgtgatatcttgccttttattggcaaattacctgtgactgatttaagtgtcgaacagcttgagcgtgatgtaacgaatagccttgtagagcgtggtgctcttgagtcggctcgccgtgttaaatctattatgggtatggttttaaaacttccgtttaaacgccgtctaatcacgtataacccagcttatgacattaccttacccaaacctattaaaggtaatcataacgccgtagtaagcgaatcagagcttaaaacaatgctccaaaagatttggcgatatcatgcggagagtcctcgtgcacgtttaagaacagagcttgcgttgaagctttcagcatacatctatcaacgtccaaatgagatccgtgaattgctatgggagcacgtcgattttgagaatcagcgtctttgctttcgtgcatccaaaacataccaagaacatattgttcccctctctcgccaagcttttgacattttgaaacagctcgaagatatgcggactacttctgtatttgttttcccaagtgttaagtcatcaagtgaaagcatgagcgaggacacgattcgtcaagcactcaatagacttggctataaaggcaagcacacggcgcatggcttccgagcaacggcgcgcacaatcttaggtgaagagcttgaatatcgagtagatattattgagcatcaattagctcatacagtacgtgatcccaatggtactgcttacaaccgtactaagtttttacgccgtagacgtgagctgatgcagttgtgggctgactatttggatactttacgtcaaggtggagacgtatctgtatttaaacctcagagtgaagacaatatcattgcatttcatttaggagcaaaggcatcgtag

SEQ ID NO: 65386 - DNA, 474 bp, Acinetobacter baumannii
atgaatgcacaaaaaggttttacattaatcgaactcatgatcgttgtagcgattattggtattttggctgcgattgctttaccagcttatcaaacttatatggtcaaatctaagttggtagaggcaacaactgatttagatgctgcaaaagtagctgttgcagaagcttactctacaaatgataatcaatttccattaacagcaaatagtcctatcccacctttaggtgctaatgctaaatatgttacggcattaacttatactggaacagctaatggtccaatcacaattgttgcgactcttggtggtacaaacaatacaaaggttgatggtaaatttattggtttgactggtactggtcaggctgatggaacagtttcatggtcatgtagtacatttacaagtacaacgaaagcaggtgcagacacagaactatatccattcttaccaactaattgtcaaaaggcaagttaa

SEQ ID NO: 65387 - DNA, 225 bp, Acinetobacter baumannii
atgtcaattgtattggttacggtatatcttgatgaagatattccagaatatatgaatggagttttccgtataggttctgttatattggaagatgatcaaggaaaagaaactgatcatgatgggttggtggataatacagattttcatagtttagacaatttaaaaagaactgttgctgattgtctggaagttaataatgaaattgttgtaattggcaataattaa

SEQ ID NO: 65388 - DNA, 735 bp, Acinetobacter baumannii
atgtcaaaacgtcttaaatttttctttgggcatttagttgtttcattcggaatagcctcatttattgtcacttggatatttctagtttggtatccacaaccattagcaaaagcagtaggtgttacccatattttcttaatgatggtcgctattgatgttattttgggacccattttaggcttattggtctataaagagggtaagaaaacacttaagttcgacctgaccattattatcctgattcaactttctgcattagtctatggtttatatagcattgctcaaggtcgccctgcttggttagtttataatgtagatcgttttgaacttgtgcgtaataatgaaattactgacaccaatattcaaataattcagccacaattccgatatccttcttggtttaatccgcaatttgccgctgttaaaataccagaaaataaggaacaacgtagtaaaagtatatttgaagaaatatttagtggtatttcttctgctcaacgaccagaactttatgttgatttggtacaagttaagccacttatacgaaataaagttcaaaatttgaatgaactggaaaaatttaactctaaacagcaagtagaaaatattttaagaaaatatccagaaacgaatgcatgggttcctttaaaagcaaatgctgtagatatggttgttttaatggataaaaactcagctcaagtggttaaaattgtagacctacgaccatggaaataa

SEQ ID NO: 65389 - DNA, 1014 bp, Acinetobacter baumannii
atgcgataccaaccgccttataccatcacatctaaaatcattcatctgattgcgcagattagtgagaatgtagggcgtttgactgttttagaggaaattcaagacagtttaaaactcagaaaagccaatcgtatccgtaccattcaaggctcacttgcgattgaagggaacactctaagtaccgaacagatcacggcgatcatcaatggaaagaccgtaattgcaccgccaaaagaagtacaggaagtgcgtaatgcgattaaagcctatgaagcctttcagcagtggctaccaagtcaagagtcggacttactacaagcacatcaaattttaatgacaggcttgattgatgaggttggtcaatatcgtcatggtggtgtcggtgtaatgtcaggtgatcgagtgatgcatatggctccacctgcgaatcagattaaccttttgatggctgatttacttgattggttgaatgacagcgatatacatccactgattcaaagctcagtcttccactatgagtttgaatttattcatccatttgcagatggtaatgggcgaatgggacggctctggcaaactttaatattaagcagatggaatgcaatctttgctaatattccagttgagagtttgatctatcaaaatcaaaaagcctattacgaagcattgcagatgagtaccgatcggacagattcagcaccatttatagaattcatcttacagatgattttagatgcaatccttagttcaactgataccgctcaagatagcgatcatgttaccgctcaagctggcgtacaagtgagcgatcaagtacaacgtttggtttcggcaatgaagcaagaagactatactttggctgagttgatgcaattggttggattaactcatcgagcaacgttccaaaagaattatttgaatcctgcaatagaagttggtctgattaaacgtaccaatcctgataagccgaaaagtccgaagcaaaagtatcgtaaagttcaaatacaattgtag

SEQ ID NO: 65390 - DNA, 3102 bp, Acinetobacter baumannii
atgaatgaaacacaactcgaaaacctgtgcctagactggttctccgaaaatggctgggatgtcgttcatggtgtcgatatcgctcctgacagtagcaatcctttacgcaaagactataagcaagtgcttattgaagcagacttacaggcagcttttgaacgcttaaatccgcatttgccagtgagttgctttgaacagattttacagaaactcagtaaacctgaaagtttggatctcgtcaccaataaccgtgcctttcatcgcatgttattagagggtgtacctgttagctataagaaagatgatgaatggattaatgatcatgctttcttggtcgacttcaaccaaatttttaataatcgctttgtagcgattaaccaatttacgattttaggcactaaacagcctcgacgccctgacatcatctgttttatcaatggtattccgtttgcggtattagagttaaaaagccccaccgatgaaaatgccgatatttgggatgcgtttaatcaactacaaacctataaagaagaaatctccgatctatttgtttttaatgaagctcttgtggtcagtgatggcgttacagctcgtctgggttcattaacagcaaaccaagaacgtttcttgccgtggcgtaccattaaaaatgaagatgataaacctcaattagcatgggaacttgaaacaattgtacgaggtttctttgatcgagaattgttccttgattacattcgtttctttgtcttgtttgaaacggatggtgaaaaaaccattaaaaaaattgcaggctatcaccaatttcatgctgtgcgtgaagcagtccaagcaacgattaccgcagccaacccatcaggtaataaaaaggcaggtgttgtttggcatacccaaggttcaggtaaaagtatctcgatgtgttgctatgcaggtaagttactgcaacaacctgccatgcataacccaacattgttgatcgtcacggatcgtaacgacttagatgggcaactgtttgaaacttttagcaatgctcaagagctattaaagcaaacacctgtacaagccaataaccgtgatgagttaagacaactccttgctgagcgtgagtctggcgggatcatttttaccacagtacagaagtttgcactattggaaggtgagagtgagcatccattactgaatggacgccacaatattgtggtcatgtccgatgaagcacaccgtagccaatatggactcaaagccaagttatctgccgatggtacttataaatttggctatgccaagcatatgcgtgatgctctaaaaagcgccacattcattggttttacaggtacaccaatttccagtgaagacaaagacacccgagcagtctttggagattatgtttcgatctatgatattcaagatgctgtcgatgatggcgcaactgtaccgatctattacgaatctcgtttggcaaaacttgatattaatcgagctgaaattgaagaattgtctgatcaggtcgatgaagttgttgaagatgaagaagatacgagtagccgtgaaaagaccaaaggtgaatggagtcgcctagaaaagttagtcggtgcaacgccacgactaaaacagatcgcagcagatcttgtgacacactttgaagctcggactgaggttacagcagggaaagggatgattgtcacgatgagccgtgaaatctgtgtgcatctctataatgaaattgtggctttacgcccagactggcatgactccgatccagaaaaaggtaaaatcaaaatcgtgatgacaggttccgcatcagacaaacctttactacaaccgcatatctacaacaagcaaaccaaaaaacgccttgagaaacgctttaaagatgtcaatgatcccttacagttagtcattgtacgggatatgtggctgacaggttttgatgctccttgtacacataccatgtatatcgacaagccaatgaaaggacacaatttgatgcaggcgattgcccgagtcaaccgtgtctttaaagacaagcaaggtggattggttgttgattatattggtattgccaatgaactcaagcaggctttaaaaacctataccgatgccaaaggtaaaggtgagccaactttacgcgcggaagaagcttatgcggtgctggcagaaaagatggacgccattcgagggatatttgctaagactactgatcaagagggtatggatttaagccgctatgagactcaggctcatcgactgatgattccagcagcgaactatgtgctcagtttaaaagatgggaaaaaacgctttttagatttggtcttggcgttaaataaagctttttcactgtgtggaactttagatgaagcgaagactttacataaagaaattgctttttattcagcaattaaagccgtgattagtaaacatacttcggtcgatcggaaattatcacaggctgaaaaagatagcactttaaaacaaattcttgataatgcggttgtggctgatggcgtagacgacgtatttgcactttgtggcttggataagccaaatattggtttactgtcggatgagtttttagaagatgttcgacaaatgccataccgtaacttggcggtcgaattattagaaaaattattgaatgatggtatcaaggcaaaaacacggaataatctcgtacaggaaaaacgtttctcggatcgtttgcaggaaaccctaagaaaatataataaccgtgcgattgagacctctcaagtcattgaagaactgatacaaatggcgaaagactttcaagctgaaatggcacgtgaagcgtcgctaggtttgaaccctgatgaaatcgctttctatgatgctttagcaaataatgaaagtgcagtgcgtgaattgggtgatgatacgctcaagcaaattgcccgagagattaccgagaagttgcgcaaatcaacgactgtggattggcaagtacgggacagtgtacgtgcccagcttaaaatcttggtacgtcgtactttacagcgttggaagtatccacctgacaaagcagcagaggcgattgagttagtcatgaagcaggctgaaatgttatctaatgcttggacaaaataa

SEQ ID NO: 65391 - DNA, 906 bp, Acinetobacter baumannii
gtggttatagactttgattttgacagagttacaaatattgagtttggggttggaagagagaatgaggatcaaagtcagcaattttttgaagctgtacctgtagatgaaggagtccaaaaagcattagttgaaatggttcagacaactattgttatcatgagaaaaaataatgataaacctgaattatatcaaccatcagaaaagcatgctggaattgaatatttatatctggctacttcagaccaactagctcaaacaatgaaaggattacatgaagctgctaatttgacaattaattccaatgttttgaatgatccttctgaaatattctgttatttcgcaaggtttacagatcagtcaggaaaaaaactgaccgctttgcgtagggcaattcagtttaagggtgttttgaaaaatcaacttattagatttttggatgatacgcttaaaattgttgaagaaaaagtttttaaattagatgctgactttgatttactgattgataattctaatattcacataatccgaccaagtgcatttgagtttgctggcaagttgcaggaagcaattttgcaggctgttccgatgaatattgcatcaatagcagcagatcttacctatgtagattttactagcttacaaagctacgccgaacatcgacctcgtgcagctagatacattgcatctattaagtctcaggctgaaactaaaaatattaacaaagatcgtttaaaactattatgtcagcatactggggtttcattagaagatcaaaatggaaaaatcatagtgaaagaagggtatgaattagcttttttagaggtattagatagacgtcgttatcgtttagagttaatcgaagggcaagctgaaaattttaaagcatcaagtagaagtaagttataa

SEQ ID NO: 65392 - DNA, 558 bp, Acinetobacter baumannii
atgagtactcaacagaatgaatctctaggttttatacgtgtaatgatggtgttaagtagcttttcaccattatttatattgtgggctttaagaggaaataaagaggtatcagatctataccttatccctatctgtgctttatttgtcattattccaaatttatttttatggcaaagaattaccgttgctaagaaaaaaaatgacaaacgtacaattaaagttggtacagcagacgatcataaggatcatattttagtttatttgttcgccacacttctaccattttattctgtcagtattgatagtattcgagatgtgtggactacattagttgcattggcttttgttatttttctatttttacatttgaatcttcattacatgaatattgtctttgctcttaaagggtatcggatttttactatttgtccaccagaagataataatcctcttagtggtaaaactcctcaagttttaattacaaagagatcaattgtactaaaagatgatgaaattatggcatatcgattaagtaatacagtttttttggagatttag

SEQ ID NO: 65393 - DNA, 1365 bp, Acinetobacter baumannii
atgaaattaaatgaagctggtataactttaattgactgtgaccataaaacacctgctgcacaggctagtggttatccttatgttggtattcctcaattgaaggatggacatataaggttagatggggctaggttaatttcagaagaagattttgtcttgtggacaaaaaaagctaaaccacaactgaatgatgtaattctatctagaagatgtaatccaggtgagagcgcgtatgtaccagaaagtttagaaatcgcgttaggtcagaaccttgtactattacgttcggatggtagtgtaatttatcctccttttttacggtggttggttcaaggaaatgaatggtgggagcaggtaaataaatttttaaatgttggggcagtttttaatagcttgaaatgcaaggatattccaaattttaaattgactataccgagcttaaaggaacagagagaaattacagatattctttctagtttagataagaaaatcgagttaaatagtaaactcaaccaaactttagaatccatcgcccaagctatttttaaaagttggtttatcgactttgaacctgtacgtgccaaaattgcagctaagcaagagggtaaagaccctgaacgtgctgcgatgtgtgcgattagcggaaaaagtgaaactgaactgaagcaaatggctgaagatgattttgctgagttacaggcgacggctgcactatttcccgatgagttggtcgaaagtgagttaggggaagtgcctaaggggtggaaggtaaaacctttagatgaaattgctaattatttaaatggtttagctttacagaagtttagacctgaaaatgaacatgagtttttgccgattgtaaaaattgcacaattaaaatcaggtatagccacaatagaagaaaaggcatcacctaatattgatcctaaatttatcatcaataatggcgatgttattttttcatggtcaggttctttgatggtcgatatatggtgtggtggtaaagcagctctaaatcagcatttatttaaagtgacatccattgactatccgaaatggttctattgtagttatacaaagcatcatttggcagaatttcagcgtattgctcaagcaaaggctgtaacaatggggcatattaaaagagaacatttgtctcaagcactgtgtattgttccttccaatcaagttttggatatcggtaataatgtgataggtgctcaaatgcagaagcagattgtattgcgattagaaaataataatttaatacaggttagagacactctattgccgaaattattatcgggtgaattggatgtatctcgtctagctagtgagacagaatatgagtactcaacagaatga

SEQ ID NO: 65394 - DNA, 1446 bp, Acinetobacter baumannii
atgagttttgatcaaccgttgctgcttgagattcaaaaaggcgaaagcaaaacgctagagtttaaacagcagttaccgaaaggacagcagatcgccaagacattaattgcctttgctaatagtagtggcggtaagttgattgttggagtcactgatgatcggcagttggttgggattcaagatgatattttcgagttgcaagataaaatcacctccatgatttatgagttgtgtgccccacaacttgccgcacaaatttatattgagaacatagatggtgttgagctattggttgtggaagtcgcacgaggtagtttatttccgtattaccttaaaccagtaggacgtgagcaaggcacatatatccgtctaggtgcaagtaaccgtgtggcatcgcctgagcatattcaacaactggaattgcaaaggctaaatatcagttttgatgccttagccaattatcaataccctttggaaaagctcaatttaacggtcttggaagaagcgttcaaagctgctgataaaacactgactttagaaaagatgttgaatctgaaactggtgattgaagagcaaggacagcgttatgccagtcatggtttattgatcttgctcggtcaatatgagcatgtgatgacccaatgcgcccgatttaaaggcacaaatatgagtgtgtttttagaccgtaaagaatacacaggtgacttgttttctcaaattgaacaagccgaaatttttattaaaaatcatttgtctttacgtgctgaaattcgtggcttaaagcgttatgactatttagaaattccagaaaatgctatccgtgaagccttagtcaatgcctatgtacatcgggattacagtaactttgggcgtaatatcaaggtcgctgtgtatgatgacttggtcaatatcgtctcccctggtggcttgcccaatggtttaaccgaagcggatttgttgcagggacgttcggaaattcggaatcgggttttggctcgtgtgtttcgagagctaggttatattgagcattggggcagtggtctgcaacggatcaagcagatgtgtgaagcagagaatttgccaacacctgaatttttagaaactaatgatttttttgatgtgaagctatatcgtcctgtgattgagtctgaaagtggtgcaatcggtggtgcaatcggtggtgcaattgatgattcaagtggtgtaatcgaagacttaggtggtgcaatcgaagcaagccaactcaccgaacgccaacaggaaattttagttttaattcgggctaatccgaaagtttcttatcgttctttggctgaacaacttggtattaatcagtctgccttacaaaagcatctgaatcatttaaaagatgctggctggcttgagcgtgtgggtggaactcgtggctattggacgattaagaaagaatttgggggtgaggtgtga

SEQ ID NO: 65395 - DNA, 1731 bp, Acinetobacter baumannii
atgaactcattggaacaaaagtttctaaatgacttagatgataagctttggaaagccgctgataaattacgtagtagcttagatgctgccaactacaaacatattgtacttggactgattttcttaaaatatgtatctgatgcctttgatgaacgccagtctgaactcaaggacttatttgctcaagcggatgatcacaacatttattacatgcctcgtgatcaatacgacacagaagaggaataccagcgagcaatcgctgatgaattagaaattattgattactatcaagaaaaaaatgtattttgggtgcctaaagcagcacgttggacgacattacaacatacagccgctttagcgattggttcgattatttggcaagatgaacatgggcaagatgtcaaattacgttctatctcttggttagttgataatgcttttgatgaaattgagaaagccaatcctaaattaaaaggcattctgaatcgtattgggcaatatcagcttgataatgacaaactattggatttgatcaatactttttcggacactagctttaccaagcctgaatacaatggcgaaaatctgagtctgcacagcaaagatattctcgggcatgtctatgaatattttcttgggcagtttgctttggcagaaggtaagcaaggtgggcaatattacacgcctaaaagtatcgtcactttaattgtagaaatgctgcaaccttataaaggtcgagtttatgaccctgctatgggttcaggtggtttctttgtctctagtgaaaaattcattgaacaacatgctcaagaaaagcactacaaagcctctgagcagaaaaagcatatttccatctacgggcaggaaagtaaccctacgacatggaaacttgctgccatgaatatggcaattcgtggcattgattttaactttggtaaaaagaatgcagacacttttttagacgatcaacatcctgacttacgtgctgattttgtcatggcaaacccgccatttaacattaaagattggtggcacgcttcactggaaaatgacgtacgttggaaatatggtacaccgccacaaggtaatgccaattttgcatggatgcaacacatgctccatcatctatcgccaacagggagcatggcacttttgcttgccaatggttcgatgagttccaataccaataatgagggcgaaatccgtaaaaatttgattgaagcagatcttgtagaatgtattgtggcattgcccggacaactctttaccaatacacaaattccagcctgtatttggtttttgaccaaagacaaaaagaatggcttctcactcgataaaaagaaagccaaccgtgaaggcaagacactgttcatcgatgctcgtaatttgggctatatgaaagatcgtgtgctacgtgactttaccgatgccgacattgccaaaatcacccatgctttacatgcttggcaacaaggcgaaaattttgaaggtgaagcgtatcaggatgaaaaaggtttctgtttctcggctgagttaaaagatattcagaagcacgactatgtacttactccgggacgttatgttggcgcagtcgagcaggaagatgatggtgaaccttttgctgaaaaaatgacgcgtctaacggctcaactgaaacagcaatttgccgaaagtgcagttttggaagcagaaatcaaaaagaatttaaaaggtttgggttatgagttttga

SEQ ID NO: 65396 - DNA, 945 bp, Acinetobacter baumannii
atgattaaaggtttagctattacgccgccaattttagggcgaatcagtatcggcaagattgtcgaaaagaacggtaaacgtctgcctgaaaaagatgaccaatttaccattaccagtcaaatccaaggtaaggagggatggatcaaacaccccttagatgaacagcttagagccaaagcacaaaaccaaaaactccgctctattccagtacggatgatcttcaacgatcctgacctcaacctacgtgcagaatacactttatttgatcggcaaacgggtcgaccgatttgtgttggaaatggtgaaacttgtcaacgactgaccaaccaaggcgtagaacaacaaccatgcccatcacctgatttatgcccattggcacaaggaggtaactgtaaaccgtatgggcgtttgcatgtcaatttagatgagtcggatgaactcggtacttttattttcagaaccactggttttaatagcatccgcactttggcagcacggctatcttactaccaagcttcatccaatggtttactttcatgcctaccattacagctgacattgcgggggaaaagcaccacacaaagctatcgtcagcccgtgtactacgtggatctgaccttaagggatggtgtgagtttacaagatgccattcaaatggcgaaggagattgatcagcaaagtaagcagagtggatttaatcaatcagcattagatcagacggcaaggcagggttttgccaatacacagtttgaagtgaatagtgaggagggattggatttggtggaagagttttatatggaggaaaatattgaagctgagcaggaatcatctgatcaggtacagcatgcatcaaaaccgaaagcccgattcaacccgaatcaagggcaaagttttgtgcaggatattcagaaggggttgcagaacaatgtacgagctgtgaattag

SEQ ID NO: 65397 - DNA, 813 bp, Acinetobacter baumannii
atgaatgatgctgctatagctttagagagctttgcaaaacaaacgtgtgggcgtgcatgtgtcatgcctcctatacaacctgttgtattagatgtatataagcaaagttttactgcatttgttggcggcgctgctgataaatatcaatttctgggacgccctttagatatagatttcccagatgatattggagctggccctacgggcatcatgaaatcatgtatgagaaaatttaaagaggcatctagctcacaaataactaaagctaaatttgaatattatggttatgaagaggcttatagtactgatagtgttgttaagcgatatagaggaaaacttttattaaatttacttacagatataaagaatattttaaaagaagaaccaaatacacaaatcaatttagttggtcatagtttaggggggtggaatgttgcaggattatcagaagaattatctaaagcaaaaatatgcacagttcatactcttataacaatagatcctgtagggattagacttagcaaaagtggcgttggaaatgatcgtgctcgtatttattatttagagccagacccagttgcgaaaaaatggattaatatcttttctcaacctttaaagaactatagggatgattatatagcaatcttaggtggccgatggaacgatgatgatacggcaaaagctaattttaatagtgtttctacctatcatcatggagaagcatctgaaatgttttttgaaaaaaagtttttagaaaataaaatgtcagcttcagatcttttagtttctgagttaaaaaaggttataaaatga

SEQ ID NO: 65398 - DNA, 282 bp, Acinetobacter baumannii
atgaaaaaaattttagtattagtcatggtcatcttaagttcacaagtttcttgtgctcaaaaaagtgagaataaaaccgaaatgagtattaaaaattctaattctattgtcattcaacaattagaagagtttaaaacacaagatcattttgctggagatggacagctatatacgggtgttcaagagcctgcattagccataagtttaaatcgcaaagttgctgatactgcgcaagcttttattgctctctatcaacaaaagaatgaaccaactaaagcataa

SEQ ID NO: 65399 - DNA, 1560 bp, Acinetobacter baumannii
atgagagatttaggacagttgggtgaaagtactttttcagtttggtgcaatcaagtaggtttaattgcgaatccatcaacaattgatcgaacaggctgggacttttatgttcaatttcctataactaatgatttatctgttttaaagttacataagcctgcttttgattgcaaagtccaagtaaaagcgactgataatagggatagaaagtggcaaattactttgtcaaatttaagacaaatggcaacagcttcaatgccaacattttactgttttttagaatttgataataaaaatgaagtacaaaatgcatttcttctacatgtagataataagctagtttatagaattcttaaaaagattcatcaaatagaacaaagtgaaaaaaataaggatttaaataaaaagacaattactcttacttatagtgaacagcacaggcttgaaaaattagatggggaaaatctaaaacaaaatttgttgaaatatatcggtgaaaactattctgattacatatccagtaaaaataaatatttacaagaatgtggttttgaagatgggcgtggaatagttaaattctcgattgaaggtgaggatggtattcggaaaattatcgacgcttctttaggattagagaaggaagtagatgtccaaaacttcgttaatattgaaaagcgatttggtattccatctaaaaagtcgaatcttgaaatacctaaagcaaaattaagtgtggggatgcaagcaccaaaaaaagggaaaattagatttaaaaaagatagtctctctagtggcttagtttttgatatagatttttataactcaccttttagttttaatgagtttaggaaatttgcaaaatttcggattgttggagatttcttcgacatgacttttgagccatataaaaaacaatctaattataagtttaactttggtgaagatagaagatttgagttaaagaaactaaaagatgctattagcttaattgaattgatgagtagagacagtcaaaatactcttatggaattagaaataaaaaattttgagcctttaacatttgatttaaaaactaaattcattaaaagagagttaagtatatttgatgctttattgaataaaatattagaaatatgttttcaagcaaaaatttatgatgaaatatgtatttctctacaggaattatataattataaaaatgaaattgaacaatttcatactataattactaaaactaataagtgtgattttcgggtcgatttagaggtagaaagaaaacacatatttgaatttgagaaaaccacatcgacttcagctatattttgcagattaggtagtcatgttataggggcaatactaactcttattggagaacctaaggagttatcagaaaataaatttagaattgataatggcgaacttgtgatagaaagaactcttatatttactcgaagtaatgaaaatattaataaagaaattagtagagtaatacaaaacacgataagtaaatatacagatgaatacgacgttttctataactgggatacaggtgctgtataa

SEQ ID NO: 65400 - DNA, 819 bp, Acinetobacter baumannii
atgacagataatttttctacttttccccgtaaaaacattgaaacagaatctatattacaaaatagatttcaaagtaaagaactctccgaacaagaacgtcgtctaaagcgtatctacgaagttgcaattgaaactagaaattttgaaatagttcaattagtacaccgtaataattttttcatgatatttcagggggtcttaatagcttgtgttattaattccaataatactgttccgttgatacatactataatttgttttgttggaataggtatttccttttatcaaatgcaagcagcatctggggcaaaattttggcaagaatactgggaaattgaagtaaataaatcagagaaaaaattaaaattattctatgaaaagcaaggaaaagaatttcaccaactttttgataaaaaaacagaaatagtccagaaagaagtgtatgaaaaattacacaataaatataataataaatttagcttattttggtcaaaatactattctacaaatccttttaagtttttacgaacttataatccctttacttttacgagaaatcgtatactcacaaaaccatcagtgagtaaaattccaattcaagtgggaaggtttttactatgtatttggcttataactttatttgcaacaactaaatggggagccaatagttacgaacacttgaaaaatatgggtattatcaatggattaccaggaaaatctattactaatattgatatcagaaatcaaactatccccaacaggaaagatggtttcgatgactctgatgaaataaaaaaaataaatactcaggacaagtaa

SEQ ID NO: 65401 - DNA, 993 bp, Acinetobacter baumannii
atgagtggatataatttagaccaaaaattagtgattggcctagcttcaagtgctttatttaatttagaaaaatcagataaagttttccgaaagaaaggcgaattagcttatcgtaaatatcaaagtaaaaatgaaactattcctttagagatgggcgtcgcatttccttttattcaacgcctattaagtattaatgatattttcccaccagataaaccatttgtagaagtaattttattatcacgtaatgaccctaacacaggtttgcgggtcatgaattctattgaatattatggtttagatatcaaaagagctatctttttacaaggaagaacaccttacaaatatattgatgcacttaatattagtttgtttttgtctgcaaatgaaatagatgtcaaccaagcaattaccgcaggttatcctgcaggcttgatattaaaagggcagatattcgatatagatcatgatgaagaattacgtatcgctttcgactttgatggagtaattgctgatgattcatcagagcaagtctataaaaaaggtggcttaaatgcatttatagaaaatgaaaataaacttgctagtcaacctgctaatataggtccattatataaactactcaaagagctttccactctacaaaatgcagagcttaaatatcaattagaaaatccaacatataatagccgtttacgaatttctatcgttacagcaagaaatgctcctgcccataaacgggtcataaattcattgcgctcatggggtattgatacagtaaatgaagcatttttcttaggcggaattgagaagagaaaagttttagaaattttaaaaccacatattttctttgacgatcaagttactcatgtcgaaaaaactgcgaatagtattgcttcggtacatattccattcgggattgctaataaaaaattagattctgatgaacaatctaatgagatgggcaataattcaactacagaagtaaattaa

SEQ ID NO: 65402 - DNA, 150 bp, Acinetobacter baumannii
atgttattaattgattctgcttttttttacgccaataaagaaaatgtcttaaacctagatcctgttgattcagcctataaagtggcaacaggtaaagttcgtagccgtggcattgagttaaatattgctggtcaacttagacctgcttga

SEQ ID NO: 65403 - DNA, 369 bp, Acinetobacter baumannii
atggaagaaggcttctataacacttatggccgtgctggtgcgcgtacagaaatgcctggttgttcattatgtatgggtaaccaagcacgtgttgcgccgaacacaactgttgtttcgacttctacacgtaacttccctaaccgtttaggtcaaggttctaacgtttacttagcatctgctgagcttgcatctgttgctgctgtacttggtaaattaccaactccagaagaataccaacaatatgcagctcaaattgacagtatgtctgctgacatctacaaatatttgaatttcgaccaaatgggcgaatatacgaatgctgctgataaagtagatactaagaaaattgctgctgctcaattgacttaa

SEQ ID NO: 65404 - DNA, 840 bp, Acinetobacter baumannii
atgagtgattcacttaacaaagctgagctaaatcatttcctagctcagcaggctttaaaatctcagaaaaaccatctaaacaacaaatttacacggtggtttaaagcgctactcattccactcatttttttagtgggttgtgagtttttagtcagaaatggctatatcaatgcttatctgctccctgcaccttcgagtttatggcaatcttttttagatttagctcatagcgacctatttgcccatatttatattagtacatggcgtgttctattcggctttatcataggaagtggtttaggtttaatttttgcgatttgggttggattaagtaaagaggcagaagcatatttagaaccgaccttttcagcaattaagtcgatcccaagtcttgcttggattccactgttattgctttggttaggaattgacgaagggtcaaaaattacgcttattgcaatcggagcattttttccaatctataccaataccgttgcagcaattcataatgtagataaaaagctcattgaagttggaaaagtttatcggctcaatgcttttcaacgtgttttatctattgttttaccggcagcatctccgggcattttgacgggtttacgtaacagcttaagcttatcgtggatgtttatgattgcagctgaactgattgcagccactcaagggattggttatttactcagtgatggccgagaaacgtctcggcctgatatcgttatcattgcaattattttattggcgttgctaggtaaagtaaccgataccttaatgaaacttatcgaaaactggttattacgttggcgtgatacgctacaaaagtaa

SEQ ID NO: 65405 - DNA, 480 bp, Acinetobacter baumannii
atgggggaaatttttatgagtaatggtaacgaccattggactcactggccatggtcagtgaaaagtatgccaattttgataaatgatctcatagcaaaaaaagttcgtattatttatccagaagataagattactgaggaatatgagtctgggcgagtcactatccatatcgctgaagatcatcgaatatatgatattaagattgaaccttatataaatcaaaatttaatgagcttaggtgaaaaagttattggagatggtcctggggatggccctatattgccttggcccaccttaaagctttcaaatgaaagtgggctgattttgataaagcaattattaggaagaaaagttcgtattgtttatcccgaagacaagattacagaagagtatcagtctggtcgagttactatctttatcaataaagaacatcttattgataatattcacattgaatccacagatggactcactggatag

SEQ ID NO: 65406 - DNA, 618 bp, Acinetobacter baumannii
ttgaagcttaagaaaaataattttaaaattagaaaactagtagataaaattaatatttttaatcatttaagttatatttcaaataatgatttaggtttgcttgatgctattaattattgttataataataatttgctaactaaatctcaacgtagaattgaatttgaaaatcaatctaaaaatcatcttgaattatgtaactcaaatcctatttttgtagagctaaaaaacctcttagaaacggctagcttgaatacttatacgaaagtaaaagatatttgtaaatgcgatattgatcaatatgattataatgattttatgacttcttataagaaaattaatttcaataattctttgacttctaacgacttaaagctaagtgaagtattgaattatttttactatattgatgaaatttcattttcagatgaaaaatatataacaatgcataaaacaaaaggaacaggtattgaaaacgtttttgttgtgttggaggaatttttctggagtcattattcatttagaagtatatatgactctagttactctaatgttaaagttaaagaaaaatctgaaaaattattttatgtcgcatgttctcgtgcgatagaaatttag

SEQ ID NO: 65407 - DNA, 1905 bp, Acinetobacter baumannii
atgaaattagatacattaagaattagcaactttcaatcatttgggaaagaaccaacagaaatttcattagatgatattagttatttaattgggccgaacggttcgggtaaaacttctactctacaagctatttctagactcttctgctttgatccaagcttaagaagaattcagaagactgattttcatattgatgcaaatgaagaaatcccccctccacaaagagagctttggattgaagcaaatttttctttccctgaattattagaagatggagagcactcaactattccagaattttttaatcaaatgcgattagatcaagaagaagaaattcctagagtacgttatagattgatagcatccatgggcattgatggggatatagaagaaaatctttattacattttagatgtagatgaaaacaatgaacctattaataaaactttagtaccccgttctgaccgcaatcaaatacaagctcattatcttccagccagacgagatccttcaaatcatattagttttggaacaaatgctttactaggtagattattacgtgcaataaattggaccagtgaaagagctgatataaactcactgtcagagcaaataaactcctgtattacaggaaactcatcaatttcctccctttgcgctaagttagatgaaagttggaaatatttacatacaggaaatttttttacaaaccctaaaatttcatttggaaactccgaggttgaagctttactaaaacacatgtctatttcattttcacctggacatggtgaaacaaatgttgactattccagattaagtgatgggcaaaaatccatgctttatctttcattagtcttatcttctataacactaaatcgggctgtaatttcaggcgaagaaacagcatttgatatagataagctaaatccacctgcattcagtctaattctaatagaagagcctgaaaatagtttatctcctcattatttaggaagaataagtaatgtgctaaaaaaattattaggtaaagatacacaggctttaattgctactcatgcaccatccatattaagacgtgtcgctccagagaaaattagatatttacgtttaaattcagaatctcgttcaactaatattaagactataacgcttcctgaaaaaacaggtgatgcgcacaaatttgttcgagaagctgttcaggcttttcctgaaatatactttgcacgtctagtcgtactaggtgaaggagatagtgaagaaatcgtattgcctaaactatttgaagcacttgacttacctgttgatgaatctgctatatgtattacgccattaggaggaaggcatgtaaatcacttttggcgcttattatcaacattagaaataccatatgtaacattactagatctagatatagcccgatatcaaggtggttggggaagaattaaatacgctaatgatcaacttaaacagcacaaaccttcatctatacttcccaaagatcacactatcccaaagtggaataacaaagaatatttagtaagagattttcagaattatcttgatgaattagaagagagaaatatttttttctcagctcctctagatttagatttttcgatgcttttagctttcccaaatgcttataaagtaaaaaaagagactccaaatgaagaaactattaaatctgttctaggaaaaagtcattttggttcaaatcaatattctaaggaagaaaaggaattatttgatacttatcactctcattttaaagttggtagtaagccagctgcacatattgacggattatcaaatatcaatgatgaagacctgaaatctaatatgcctcaagtttataaaaatttggcaactaaagtaaaagagatgttggagaacattccagaatga

SEQ ID NO: 65408 - DNA, 1644 bp, Acinetobacter baumannii
atgattaaaccagatttatggattccagcagataatcttactttggaaccgaatgctttacttgcagctaaagaacaaacttgctcacttgcattaacagctgggccgggagctgggaaaacagaaatgctagcacaaaaggctgattttctattgcgtactggcgtctgcccttaccctaaacgaatattggcaatatcctttaaaaaagatgctagtaaaaatttaaaacaaagggttcaacttagatgcggctcaaatttagctcgccgatttgatagttttactttccacgcttttgctaaaagaataatagataagtacagagttttactaactggcttagatgaactagaacccaattactcaatcggaacacaacgaataggtaagactcaaattgattttgagtctcttgtacctctagcaatacaaattgtaaatagttcaagtattgtacgtaactccatattacaaacttattcagatgtatttttagatgagtttcaagattgtacggataagcaatacgaacttattaaaactatttttcacaattcaaatattaaactaaccgctgtgggtgatactaaacaaaaaattatgggttgggctggagcactagaaggtatatttttaagttttgcagctgattttaatgcacaggcctttaacatgtatcgaaactttcgatctaagccaaaattattacacttacaaaacgaaattatcaggaatttagattcgaatgctgtaatggccactgagttaactactggagatgaaggctatatatcacatataacatttaataatagtttggaagaagcagagtatttatcagatttaattaaaacatggattatagaagaaaatattcctccctctgaaattgctatattagtagcaaaacagattgaacattatgcatttgacttaatggctgcactaaaaaataaagaaattccctttagaaatgaacaaaggatgcaagatatctcggaagagcctgtggtaagattaattatcgattatttactatgtttatatgggccaagaaatccaaaagcatgggcaaaaataaataatttattattacctttcgatattgatgaccaaaaaactaattctattctgagaaattttaataatttttttaaactgcaaaagaaaaaatttttagcaccagattatcaaccacctattgattcttggcgagatgctattcaagctttgtttaaaaatttaggtatatctactctaattgctctttcaccagaatatgaatctctaacatacttaaacgaggttattgaggagtttaaaaaaagaataaatgattttttaagtcaagaagcagatcttttaaaagcacttaactcttttggacatgatgatacagttaaaattttgactattcataaaagtaaagggctagaatttcattccgtcatactattaggtgttgaaaatgaagctttttggggaaatgatgcgagaagtgttttctttgttggagtttctcgagcaaaagatagactagtacttactgaaagcaaaacacgtccattagactccccaccatatagatggaaagaaaatacgactactcacgaagaattttttaattatagagttgattaa

SEQ ID NO: 65409 - DNA, 717 bp, Acinetobacter baumannii
atgagacacctccatcaccagatatcccagactaaactatgggcagttattcctgctgctggttcaggaagtcgtttttccaaaactgaattaaagcaatatcaatacattcaagatgtgacagtgttagagcatactgttaagcgtttagctgagcttccattagctggctatgtcttagcaattggtgcgcaggatactcttgcttctactttagcttttagcgaaaagcataaggtacatttttgtaatggtggtgctgagcgagtccattcggttttaaatgcgctaaattatctgtcacaaattacagatgaggatgattgggtgttggtacacgatgctgcacgaccttgtgtaacccttgattgcttaaatgctcttgttttgcatgcgataagttcaaatcaaagtgctattttggcaattcctgtgcgcgatacgttgaagcttgtagataaagaacagcagattaataaaacggtaagtcgagagttattgtggcaggctcaaacgcctcaaattgcaaaaattgggacacttaaaaaggcgattgaacaagcgctaattaataatttgactattactgatgaggcaagcgcgcttgagtttatgggggagagcgtacatgtagttatgggacggtctgataatataaaaattacttatcccgatgatttagaacttgcgcgtttgattctgcaatcacaatcttaa

SEQ ID NO: 65410 - DNA, 873 bp, Acinetobacter baumannii
atgtccaatcttataaatctttccgacacatacaaacttggaaataaaattgtaaatagaatgggctatggtgcaatgcaactggcaggtcaccatgcatttggaccaccaaaagataaaaatgctgcaataaatgtcctaaaaaccgctatcgagttaggtattaatcatatcgataccagcgatttttatggccctcacataaccaatcaaatcattcgagaggctctatatccttatccagatgatcttaccattgtcacaaaaattggagcaaagcgaggagaagatgcttcttggctaccagctttttctgcagaacaaattgaaaaagatgtacatgataatttgcgcaatttgggtctacaaactttagatgttgtaaactttcgagcaatgtttaacctcatgatgccttccgaaggttccattgaggaagtagttgttgtactggctaaattaaaagaagaaggtttaattcaacatattggattaagcaatgttacagaagctcaaattattgaagctgaaaaaatcacagatattgcttgtgtacaaaaccaatataatctgttcaatcgccaagatgatgtattaattgatcaactggctaagaaaggaatttgttatgtacccttttttccgctaggtggttttacaccttttcaatcagatacattatctgctatagcaaatgatcttggtgcaactccaaaacaagtcgcattggcatggctattaaaacgatcgcctaatatcttattaattcctggcacatcatcggtagctcatttagaagaaaatattggtgcttccaaattgatattgtcagatgaagtctacaatttactaagctctttaaataatagctaa

SEQ ID NO: 65411 - DNA, 636 bp, Acinetobacter baumannii
atgtccataaataaaactgctctgaagccaagaaaatcaccagttcaggcgcgttcaactgcaacaatagaagttcttcatgaagcaaccattcaggttttactcaaagaaggaattgtaaaatgtaataccacacgtattgctgaaagagcgggtgtatcagtcggtagtatttaccaatactatccaaaccgagattctttattagctgcagttttgcaacgtcatcttgatagcgttgctgaaaaaattgaagagctttgcctgaaatatgaaaaaacttcaattaggacgctaatctcagctttagtcgatgaaataatcttggcaaagttaagtaatcctgaggaatcaaaggcgttatatgctatttcaggagaaagagggggattggatctttcaaagcgaatgaatgaccgtatgttagctgctatttcaaatttattggagagtgcttcggatattgagtttgatgatagtcagatcgtcgctgagtttgttttaggtgcaattatgggattaataagaagagtgcttgaaaatcaggtaacagataaagtggagcaggtattagagtctcatttaaaattaatggtcgtcgcttatttacaacaagttggacatataaagaattaa

SEQ ID NO: 65412 - DNA, 615 bp, Acinetobacter baumannii
gtgagtttatcttcatctcagcaaagaatccataaaacagctttgaaactttttgctgaaagtggatcaactaacattagtgtttctgaattagccgcagcctcaggtgtggctcgtggcacaatctataataataagttatctcctgaaactttatttgaagatattgcctcacaactttcagttgaaatgaatgccagaattattaaaagttttggtaacgaagaagacccagctattcgtctagctcaaggtgttcgtatgtatattcgtcgggcacatgaagaacctgattggggcagattcatatgtcgttttgcatttagttcaacttctttaatggcattatggactggtagtgattcaccgttaccagatgtcatagctggattggaaggtaagcgttatacctttcgagaagaccagttgatttctattatttctttgattgctggctcagttttaacctcaatctttcttgtgttggaaggtcataagacttggagagatgctggtacagagatcgctgaattattactttgcgcacttggaattagccgtgaagaagcttttcaaattgctcgaatggaattgccacctttattagagctataa

SEQ ID NO: 65413 - DNA, 828 bp, Acinetobacter baumannii
atggataactttgtgccccctgaagaaaattatggcaaatggggacgtaatttagaacgttcgtattttgatccagttttttttaattctgatcaacttgatatgtcaaaaccggcattatttgtaggaaatcatacgttgtatggtctattagatgttcctcttattctagaacatctaagattagaacatggtgttcacttacggtctttaggtgaccgtatgcattttaatatcccaatctggagagatattttaaccaaaggaggaatggtattaggtacaccagaaaactgccatgcattaatgtcgagtgggcaatctattttagtttttcctggtggtgcacgtgaggtaatgcgacgcaaaggagaaagctatcaattaatttggaaaaagcgtacaggttttgcgcgtttagcgatagaacatggctatgacattatcccatttgcttctttaggagctgatgattgttttgatattgttcttgatgcgaatgatatacagaataatactacggcaaagaaactactttcaaaattaaagctaaatgaaaaattaagaggtggggatattttgccacctatacccactggtgtaggttacttacctattcctaagccccaaagattttattttagctttggagaaagaatttctacagctgaggttgtccttaatgaaaaagatatatggaaaataagggaacaggttgctcactcaatcgaaaaacagattcttgatttaaagaattatagagagtctgataaaaatcaaaattggggatggctgagaaagaagcttacaaaaagttttaatgggtaa

SEQ ID NO: 65414 - DNA, 741 bp, Acinetobacter baumannii
ttggcatgccgatctattaacaaggcgcaatctgtaattcaagaaattcaaagtttgacccatggtcaggcaaaagttgaattcatagagttagatttagctgatctagattctgtacgtcgctgtgcccaaagttttcttactcgtgatcttcctttgcatttattaatagcaaatgctggattagcaggccagaaaggtctaacgcaatcaggcttcgaattaacatttggtgtttgtcacgttggtcactttcttttaactaaattattgactgaaaaattaattgaatctaaacccgcacgtattgttgtggtcgctagtaaagcccatcgacatgctcggggtattgatttcaatgcggtattaaaacctactcacagttttggtggtttaaaagaatatgctgtagccaaacttgcaaatattctttttgcaaaagaactgggacgccgtttatatggtacaggcgttacggtttatgcagtacatccgggtgttgtttcaacaaatgtatggatagcaatgccaaaaccgtttgttaagctaattagccactttatgattagtcctgaagaaggcgcgaaaactacactttactgtgcaactcaaccgcaagttgctggagatacaggtttctattatgaagactgtaaagtcaaagtttcttcacatgctgctcaaaatataaacttagcaaacgagctgtgggaacaaagtctaaattgggtaaaacaataa

SEQ ID NO: 65415 - DNA, 591 bp, Acinetobacter baumannii
atgcttgaattgatttttaagccattaaactatcttagcataagatgggataatgggattattaataaaacgagatttgattttgttatacctattataatttctgttttagttagcatactttttactgcggtatggtttttggttggaacatcaaaagccaatatctttacaaatgatatttcatactatttaatttgttttttgcaaaccatgcccggtttttttattgctgcattagctgcaatttctactttaaatagctcgactatggatcagccaatggctggagatccacctaaagaaaaatatgtggagcataatccatataaggtattttggcttgacatgaaccgtagacggttcttagctagactattttcttatcttacttttataagtattgtaatatttgtattgctaatattaataagattttcttatagtttagagctacatagtacaaataattatttgattttttctacatatttttttgcttgtttcatagttgcatttgggcttgttcaactcataatgatgacttttttaagtctctattatctaggtgaaagagttcataaaaactag

SEQ ID NO: 65416 - DNA, 1011 bp, Acinetobacter baumannii
atgtcaatatgtgctacttatcatgaattgacggcatcagttgagtctttggtgcaaggtaatcctaaagctatagctacaatcaatttatatgaatactttgaaaagttagttgaatggggatatatagattttaaaagaaactttgccaatgataggttttgtggattgatatcagatattcattttgatagtaccactttagcaattaaatttacctttatcattgcagacgtaaaggcagataatcaaattgctcggaatttagaaaccaataaaactcgaacactaagaagaactagcattgaaggtgcagataaacgtgtaaatgtggtattaaaagtagatagtacaaataaagcaattgcaaaaatagccttagaatatgaaagaggtatttcagtaactaagcttattgatactttaaattacttatttgggcatgctagaaaacatggaggctttaaagactattttattggaaatgatcccgttgaaagatatcaaaaaggttccaaaatcggccaacctaaaccattgccttataagccaaagttagaaatcaaatcggaagtagatcctagcatcatcaaggcttttgaggaagggcgcattcagcacgtagacttctataaacaagcacaaaataatacagcttttgatgcgacaggacactttactcaggataagatcaaagtatcaatgaaagtagatacacgggtcattgatcctaactctacttcaaaaatagatgatcttaaagatgtattcagacgatttaaaagaggacaaccagaaatgcaaggctctgtctttactattaattttaaagatgataatggaagtccacgtacagcagaatatgatgcagaagatgaggtctttcggttagtcaagaaagaatattttcctgaagagctgcgacaacctatgtcggaagatgatgagaatggtgaaaacccagctcgtaccaatattaggctgtgtgatagaatgttagctaaaatatag

SEQ ID NO: 65417 - DNA, 2079 bp, Acinetobacter baumannii
atggtagatatggtgcctactacgctaaataatgtagacaacaccacgctaggcgaaagaaaagtttataaatttttacaggatttgtttgccgatcaagatgctatcgtttggtacgaaacagaggcattgggtcgttattctgattttatcctctggctccctacacatggtttacttgcgatagaggtaaaagattggtcaaaaagtaattttagagaagttaatccaacgcactttacaggaactttttatcgtaaagataaagctcataccgttccaaaccctagagctcaggttcgtacagttgctatgaatcttcgtaataaatgtaaaatgaatgattctttaatagcaaagagtggcttctatgaaggtaaccccctttttcctattactcatagtgttttttatactaatatttatcgtagtgatgcagctgcattaggtctattggaagaaggtataaatgagcaaaacaagattttatttaaagatgaacttgaatatgaccttgaaaataaagatagccgaaaagaattgattcgaaaaattcatcttcattttaaagaatttttctattttgaaccgcttacttacactcaagtaaagacattacgatatttactttttcctgagattcgtattaatacttttgagaatgatgaactttttgatgctcaacctcaggagttaatgactttagatattcaacaagaaatgattgccaaaaatattggtgcaggtcatcgtattttaaaaggtgtagctggaagcggaaaatctcttgtaatagcatgccgagctaaatatctaaactctgtttatccggactggaaagttctagttgtctgttttaacaatacgttatgcaatcatatccaaaatatgatgagtgaaaatgacattgagaatctggaaatatcaacttttcatggtttagttaagaagatcacgaatgccaatttaaaaaagctagatgacgaatctcaagatcaatataatttaagagttgcagaaatattaagctcatatatcgaaagcacaaatttcttagaaaaatatgatgctatccttattgatgaaggacaagatttcgcgcaggagtggatacaaagtttagtaaaaattttaaacccagaaactaatagtattttattctgctacgatccagcacagaatatttttaatagaaaaagacctagttggagatctttcggtctcgaagttcaagggaaaaaaccaacagagttgatgcgttgttaccgcaatactaaagaaattctggtaactgccagaagtttcttgaacagtaaaaaactggacagtttagtcgctgaggatgactttgatcgagtattagatccagatactggtgagtgcaaagtaggtatctttcctgtgacctatcaaagccagaattatcaagagacgattaatctaatagttaaaaaaataaaatatcttgttaacaatggccatcctgaaaactctatagctattttgatcgctagacatgaatctcaagaaaaattagatgtacttcttaaaaaggcttttgaagagcatgcctctaatatttcttataagtttattattactagcaatgataaaaagacactaaatttaaaagaattaaatattaaaattctaaatttcgaatcttcaaaaggcttggaatttgatcacgtgtttttgattggcttagaaaatatgccaagaattacagcaaagcttgttagagatgaagatactgaacgtaaattaacttatgtagcaatgactagggctaaagaaaatttatatatgatttctcataagaatacaggctattttagtgaaatagcagagatcattaatagtcttaaacctgcaactgaaattattatcaaaaaaaataaagaagctgaaattcctatcggtacaaatgcataccaagcttggacggaagatgaagaagtaagattgattgattcttttatggaagaaggaaaaagtgttcaagaaatctctaagatactagaaagaagctctggagctatcagagcaaggcttaaaaagttgaaactgctagagtaa

SEQ ID NO: 65418 - DNA, 300 bp, Acinetobacter baumannii
gtggaacttacgcaaattaaggcaacaatagatagagaatatgatttctttgtaaattcacacgactttaagctgtgtcagcatgataaagaaaaacaagctagatttttgggccatgcattaacaatactgaaatatcctcatacaaacatcattattttaggtggtggccgatataaagttgtaggtcatcatgatttaaatgttgatatagatctattccaagctccatctttcgtgtcaaagcaagcatttaatacttggttgactaatatcctattccaacatttatattcttaa

SEQ ID NO: 65419 - DNA, 432 bp, Acinetobacter baumannii
atgagtgacttgattaataataacccagtatgggtaaaaaagatcttatcaattcatggattgcttccgctacttcgacttgcactcgtttcagcctatttagtggggggaattaataaattcatcggatttcatgcggctattgaagagcaggcgagttttggtctacagcctgcttggctctgggcagctaccgctatttttattgaaattgttggttcactgctggtgatttttaatcgttttgtctggttaggagcaggggctttaggctgtttaaccgcagtcgcaatgctcgttgcaaacgacttttggaatcatacaggcccagcattttttagtacgtttaatagtttcttcgaacatcttgggctcatcgctgcgttggtgatggtcaccattctttctaatcaatcttcaaaatcacaataa

SEQ ID NO: 65420 - DNA, 915 bp, Acinetobacter baumannii
atgcgtaaatcattatcagccttgcttttaagcaccatgctagtgggcacaaatgttgccctagtgcctcaggtttttgccaaaacaacaacaagtataaaaagtgaggcgcccggtgtagccccccaatacgatacaacgcatgtttatgtaaaccctgaagactttgataaatttaccgatagtttggtcgcaacattcgggggtaccaagtcgaaacaaggtgttttccaagtcacaccaacaccgagccagacgatgtctcagcttgtattgaccccagtaggtacattgtctgtatttggttttaaaactccaattccatatccgtttggtttggaaagaacaggctatttagtcaaagatatggatgcagcagtgcaggctgccaaagcaaatggggcagatgtcattgtagatactttcccagacccaattgggcgtgatgcgattgtccaatggccgggcggtgtaaatatgcagctctattggcacacgactaagcctaactataaccagttagagactgttccagaaaaccgtatttatgtttcaaaacaaagtgccgactcgtttgttaagaagttcgtgagtttttcacacggtaaagttgtttccgataaccctaaagccgcaggtatagaaattggtcgcccaaatgaaacgtatagacgtattcgcgttgagtctgacttcggtaaaatgacagtgttcgtgaccaatggtcatcttccttatccgtatgggcacgatatgacgggttatgaagttaaaaacttatctgaaaccttagataaagccacaaaaacaggtgcatctgttttggtgaatgcttataagtcggatggtcgtgagtcagcaatggtgcagttcccgggcggttatatcgctgaaattcatgcgtctatcaaataa

SEQ ID NO: 65421 - DNA, 1461 bp, Acinetobacter baumannii
atggcctcgcatatttttaaagacagaacatatcgaactaagcactcagagacttaccttaaaataataaaaatgagtctgttattaaccagcagtttatttttctacgaatctgcttatgcagaaaatgaagtctcaaacacaaatgcatgtccaactcgtccaaaaatctcaacgaatcgttggcaagaaaattgggatgttttaaaaaatccgtgtgtgccaaagaaaataggagacgacttcaaatatataccttttggcgatcataattatttatcactgggggcaaatattcgtgaacgttttgaagtcaataataatgccaagtttggtactggaaataatcaggccgatagttatttaattcaaagattacaagcgcatgcagatgtacgaataggtgatcatttacaattatttacgcagctcagtgatgcccgcgcgtttgataaaaaaaatattaccagtaccgatcaaaatagactcgatatagagcaagcctttatcgcgtgggtgagtcctttaaataatggaacttttaaattcagagtcggccgtcaagaaatggcttttgacttacagcgctttatttcaaatagagaaggccccaatgttcggcaagcctttgatggcatttggtcgggttatgaatatggcgattggagagttttaggctatctcaccagacctgttcagatagaaaaagattccacgtttaacgaccactcgaaacgtaatttaagttttagtggctttcgcgtagataaacaaaatgtgtggggaggtgagttatctggttattactcacgttatgaacgggataatgcatcttttacaagcgttaagggtaatgaaattcgcgacttatatgatgctcgtcatatgggtaaaaagaataatatcgattgggatgttgaaggcatgctgcaacatggaaggattggcggacaatctattcaagcatggggacttagtagcattacgggatacacttttgctgaccaagcgtggtcaccgcgtttagggcttcagtttgatattgccacaggtgacaaaagtaccaacgataatcaacttaatacctttaaccagctttttgcaaatggctcatattttactttggcaggttatagtggttatagcaatattattcacataaaaccgtctctgacgctcaagccttccgagaaactcactctgttaagtgctctaggttttcagtggcgtgaaaccacccaggatgcgatttatttccaaggaaataacagcatggcgaataccgcagggcaaggttcgagctggactggagcatacattcaactcagagcagatcgaaaaattaattctaatctgtctgtggcggccgaaggcgttcactttgaggctggagataccattaagaaagcgggtggtaaagacgcaaactatttaggccttgagcttaaatatggttggtaa

SEQ ID NO: 65422 - DNA, 621 bp, Acinetobacter baumannii
atgagcacagatataaagcaaactaaaattgggcgttaccaaaatttaaacattgaactcgtgacttgggactgtacctcggctgaggttgagctttcctgtgcttgtatttttgaacatgaaatggataaccgttctttttctggtggtttggcacatttagatgaagctctaaacggaagactatatgaaatacggaaaaataactggtttaatgcaaaactgaatgatgttcttttaataaatcaaacgccttcaaccatacaggcaactaaagttttgcttataggcatgggggcaccagaagatttcacgatagagcgaatcgagactgcgataaaaactgctataaaaacagcgcatcaattggaactcaaaagtgtggcatttgcgccgagtcttttagatacaggtctgaatcctcctactggtttaaatgaactcatgctaagaagtttaaaagaagaattagaccgccatcatcagctttatttgcaaaaattagttaaaaaatctgaaattgaaagatgggtatttgatgcgggttttcaaaattatgaggctaaggctgagcaatatatcgcgtcttttgccaaagtttttactcaagattcattctga

SEQ ID NO: 65423 - DNA, 912 bp, Acinetobacter baumannii
atgagatttatttctgagtctgaatcttctgctctcatcaatcatgaactggcttatgacgccatttaccaagctttaattgctgcaactcaacctgacactaaaagttttgctgtagttcatggacaagggtccgatagcaaaaatacctttagtgttaagtcatcggcgaccgagcatttggctggccttaaagttggttctttttgggaagataaccctaaaaacggtttgcctcgccataacgcgctcattttattatttaatcaagccaatggaaaaatggcagctgccatcgaagcaggcaaagtcaacgcatttcgtacagcggcgtctaatgctgttgcaacccatgtacttgcaagaaaagattcaaaagtattagcgatatttggtacaggaaatcaggccaaatatgaatgcgaggctttagcgagaattagaaatttcgagcagattttgatagtaggacgtgaccaaagtaaagctgaaaaaatggcagatgccctcaaacacttaggtattcagcttcaaattacgagtgcaaaagaagcctgtgaacaagccgatattattgtgactgcaacttcttcgcacactcctctttttaaagctgaatgggtcaaagctggcactcatatttcatcgatgggttcagataaacatggcaaacaagagcttccgccagagctattttcacatagtggtttattttgcgaccttaatgtccagtctaaactcattggtgaatttcaacatacgcctgagactgcaaccttaatcaatataggtgatgtgcttttagcaaatgcgcaaggtagacaatctcaggaacaaatcacaatttatgacagttcaggcttatcgatccaagatttatatatcgctcagaaaattttagaaatttcttaa

SEQ ID NO: 65424 - DNA, 2235 bp, Acinetobacter baumannii
atggcagtaccagaacagacgccatttatagagtatacagcgaatggaactactacagttttcccgctgacatttgactgtgataaagcagaatatttaattgtgacgttagatggtaatgacgctgctgttggttcatggtcttttataaatgggtcagtaagttttaattccgcaccatcacaaggatcggttgttggaatcaagcgcaatactccgcttgaacgtacgacaaactatcagctgtataataattctcttcaccccaagcctattaataaagactttgatttaatttggtggaagctacaggaaatttgggtacaaataactttgttatgggcatcaatgaagcatcaaattgatgctatttggaacgctttgaatagcaaagtaaatgcattgtggtatgcattaaataaagaaattaaggatcgaattcaaggcgaccttgatattagagcttgggttcaggttttactaaataatattgcagcggatggaatattaaatactctttcagtaacttccatagactcaatcgatgatcttcaaaatcttattggatgggaaggaagaacagtatatgtcaaaagtgttgttaagaggccctatatatttttaagtccccactctggtgccggagaatttgtattttttgcaaattcttcattacaagaagatggcttcattgttgttaaaggtaagaatagagggaaatggattaagaaaataaaagatatcactgtaggtgattttggagcgattgcaaatggtatggatgatgatagttttgcctttcaagcttatattgacagtccatatacatctaatattgtgcatctagaaaatagagcaggtaaatatataattaaaaaggaagttgattttaaaaacaaaggcttagacggttcaggatttggggttcaaactgaacaatcttacaatgcttcaatatatattccggaagattttgaaggtgtcaatgtattcaaaaatctaatggggacattaagaaatcttaatgtaaaacagcatactgcaaatgatttagtaaactttgcacatatctttccatataatttcacagttaataatgtcaatatcgatggttttggctatcaaatctggtcaactaaagaaacttgttcaacaagaatcagtgattttacttcaattaatgctagaaaatcagccttctattttcctgaaacggaatcagaccacacaactacttacttggagcgttgtcatttccaatggggtaattatgcatatatatgtgatggaaactgttacggatttagctttaaagacatcattattgaatggatgtatggaggcttaaagtcaaaactttttacaaactgtacttttgatacgttttggtgcgaaggtcgtcaaggcaatacaaataatacaaataaacctgtaattgaacagattacaggacagcagttactaagttgtcatgctgctaattttagatttattggagggtggacgtctccccatctggagaacaaggaattaactgcattaatgggtggtattacaattcatgatagtgagttgtttgcttcaaactcgactggtgcacgaatcgtattttcaaatactggattaaggactagtttttctgattggtatggcggtgtaaatcgtcgtttgaaaattcaaacacaacctacctcgactgaaagtggttatgtaacaccgattgaaatatcaacaccgaataccggtttgtattttacaaatattgatgacaatgattatcgcgccagtgtatttcgtcgcgttgttgggaaaaacatcaattcaagcgctcaatatcttgcaaaagaaactctatctgtaaatgaatttagtgccgaggcatataatgaaattactggtgatatcggtaaatttcaggccccgctaatgttaacctgggatactaatatcggagtactgaaagctgcgggatgggtattaactaaagtagctatgggacaatacagattatctcgagatacggggaatactaaagaaattattaacggacatctaatagtttcaggtgttcattctggcacatttaatatacacagagtttcgccaatagattcttatactggttcttggaactcttatcgtgttgcagcaggttttgatatatttttcgctaatctagctggcaatccaacggatcctagccgttttactgttgctttaacattagtatcttaa

SEQ ID NO: 65425 - DNA, 2037 bp, Acinetobacter baumannii
ttggcttatgatgtttttaactcattagttggtttatatcctaaatattatgtgagaaaacatttttggcaattgttagaaggtgactttaaagaacgtgctcttttacaaaccactcaagagcaagcgagtcttatcaatagggaaaccattcaagaatttcagaactatttattctcctcagagaaatttgcttctcaagcatttaaaaagctgaaaacgactcggtcagcatatgctcatccatttgatgcaaatttcttagataaatctttaagaaatatgagcaatgcatatcgtgatttaacatggtctgaatggataaggaaaaattctagagaacttaaaaatgacttggaggtccttgaaaaaagatggtctgaaatacaaattggtactaatgaaaaaggtcgagctatatgggtccaatggttattaacaactaaccatagagatctaagagatcaagcaacaaaagtactttctatatatgccaaaaaagatccaagagcattctttgagatggcaattaactcattaaatattacagatccatatgtgccagaaagaacttttgctgcagcgtatggagctattttgagtgctgattttattgatgcagaaaaaatcaatagtagtgtttgtgattttgctcaaaaaattatagaaaattgttttctgcctaatgctcaacactctactacgcatacaattctgagggaatatttcttaggtattattaattatgctttaaaagtgaatcagtattttgttagccaagaatatttagattactgtcaaaagccttatacacatttaccaaatctatttgctagtcttcctgaggtaagtgaagagagaataagcgaagtaaagaaagcagctctacgtatggactttaataactacactattgggcgactaattactaatagagctaattatgatgattcacatcctgattatattcagacacaaaagactattttaaagagaatgatccagcttggatatgatcctgaaaagtttcaagatattgatcgagatataagttcgggttcttactataaccgtgatgaaaacatagatagatatgggaaaaaatacagttggattgcattctatgagatgtatgggtggaagtcagatagaggacttttagctgattggcggggcaatgaaagatgtagtgatgtaagtgttgatccaacgttccctcaaactagtaaattttggaatttaaaacttacagatatatttactaattctccaaatgatataggtcaatggattttaaatgggccaattccaaattatgtggaatacttagatactcaagagttgtctgaaagcgatagttggattttacttaatggttttgtgcaagaaaattcaaaaaatgattaccgtgaagtttttacatttatgaggggtttttttgttgcaaatgaacatgtatctaaaataaatgagtttgttagtaataaggattatcttggtaataatgctttaccacaaattcctgagaactattacaaatatgctggtgaaatggttttgggcaatacatttttaaatctgaatcaagatgtaagtagtcgagtaagatttgatgaatgggatgaatcaagttttataatagaagtccctgtgcaatcttattcgtgggagtcttatcatagttcattgaaccaagcagggggaattgactttccaaatccagaattatgccaaaaactagatttaaaatatcataataatgttccagacttgtatgatactcatggagtagcctcaatttttagaacattgaaatcagatgatgatagtttgaaaggtcatttatcatatttaagaaaagacctctttcaaaaatatcttttagaaactggacaaacatttatatggatattatggggagaaagaggacaaaactataaaggtgatgtagaggtatataaatacgttaaaaataaccaacacttacataaacagatttatatctggcaagaaaatcaaatagttaaaatgaattga

SEQ ID NO: 65426 - DNA, 378 bp, Acinetobacter baumannii
atggtgaagttaattgatgaaaaatatccaaacaaatgccatgaattttttattttacatacactaccgaatgacacttatttaactgactttgtcacacaactcaatattcaaagagaaatatctctagccaaaataacattgttcggttggggtgacatcaatgatcgaattaatatttctcctagaacacaaaaattattacaaatagaacaaagctctgaaggtatcaataataaatattttatatttgctctattcttaatgcttataagtataggaacctattacttatatgatatttatcaaacagaaaaaataaagaaaattcaacgcactcaaatcacgcaagtttacttaaaaagcaatttcagataa

SEQ ID NO: 65427 - DNA, 690 bp, Acinetobacter baumannii
atgaaacctatatcaacgcaaacagaaaacctagcaaaattgcagaataaatacgctgctagtgtagataatcaagcctatgatcaaattaaggtattcatcgacactctagataagctggcaatcgatacttatacagctgcgcaaatgacgaggtatttagaaaaggacctagcacaaaatttacaattggcttgctacaataaagagacagaaaataacaacgacttcatagctaaaaaaattaaagaagcttttaatttccaaatgtatgcctattttaaaaaccgtgattttaatattccaatcacaaatagcattagagcacaaattgcaatcatcagtagaaatatgaactctaatgctcttccagtagatttaattcaaacagccaatcaattacaatctttgattaacaaacgcaaccattatgaatatcgggattatccaagcaacatttctcaagtaaaaaatgtgactttcaatgacgcaaaatttctagatggatttccaacaagcaataacgaaatgagtgtgatacgtcaaatgtcgctcttggtgggtataaaaaacaatccaaaaatcttagatcacctaatacaatgtggtcacatgcgacctgaagctaaagtacatttcactaatgaaaaaaacattttcatcctcccattaggaaatgataagatttaa

SEQ ID NO: 65428 - DNA, 255 bp, Acinetobacter baumannii
atgggtaacaagtcgatttttttggattatcttataaacttaatttcaggtgaacataagtttaatcggaaaaaaattcgattctttctgttctttccaaatctagatgtggtgcacacattaccaatttatcaggtagttattagtcataatggatctgatagagtgttaaagatgcttaataaacttgaaagttttgatatacctgttcgtattataaaaaattttgaaagtgtggaaaataaattatgttga

SEQ ID NO: 65429 - DNA, 489 bp, Acinetobacter baumannii
atgttgatacaagcaaatgctgaagatctagacttcattcatagcatggttttagatggctctaagaaagggtatttcaatcaagagttttatttgaatcctgctgcaaataatggtctaaagaagaacttagaatctattttgaataaccgaaaacggttagatgaggatttaatagcatatgcgtttatttttgaaaataatggaatacctgtttcttttatgattctttcagctatagaaaaccaaactaaaggaattgagatatggatgatggccaccaaaaaagaatatcaaaaaaaaggagtggctacgtctttccttgataatattttggggcagttaaaaaataatcgaagtaaggccgttgaggccaggtgtaaggctgcttctggagttatgtatcacctacttataaaaaaaggttttgaacttatagaaatagatgaaacaggtacaagacacttaattttccacttacagaattag

SEQ ID NO: 65430 - DNA, 444 bp, Acinetobacter baumannii
ttgagtaatattattggggcttatgtagatccagtttatctgcaacgtgattatttttttatatttaaacatgaattaactagtacacaaatattggtttttggaattttctatattctatcaatggtagctttaccttatgtcatacaaataattaaagatccaagtgagaagaagtttattagatacttattaattttttcatacccatttatctatatgtttctaacttttgttggtatgaagacaacaggtataaatttagaaaaggttctaaatgttagtctaatacactttggtataatgttttttgtttttttctctgtatgtattttaatctatatgttagaggcgcgatatcttttagagagaaaacttaaaactttgaaaaaaatagaagatcaatttaaaaaaaattgtccgtttagtaaaaaaggttcttaa

SEQ ID NO: 65431 - DNA, 531 bp, Acinetobacter baumannii
gtggcagccgccgccggtcatgttgatcgcggcacgggtgccggcggccgctgccacgtagacgaactgcggctggtcggtgcagtcgccggccgcgtagatgttcgggttgctcgtgcgcatgccttggtcgataacgatggccccttgcgcattgacagtgacccccgccgcgtccagcgcgaggctgcgcgtattcggtgcccgaccggtggcaaccagcaacttgtcagcgcgcaattcaccgtgtccggtggtcagcacgaattcgccgttcacatgggcgacctggctggcttgcgtgtgctccagcacctcgatgccctcggcacggaaagcggctgtcaccgcctcgccgatggccgggtcttcacggaagaacaaggtattgcgcgccaggaccgtgaccttgctgcccagccgggcaaaggcttgcgccagctccagcgccaccaccgacgagccgattacggcaaggcgttcgggaatggtgtcgctcgccagggcctcggtggaagtccagtagggtga

SEQ ID NO: 65432 - DNA, 411 bp, Acinetobacter baumannii
atgcccatgattcgctttacaaccagttatgcatatacagatcatgaaaaagctcagatatcaaaaattgtgcagacttgtatggaaagttattttgatactcccccaaatgattgctttcatttctttgagcacttggctcaaggcaatatatatgttgatcctgattactgggtggagtcttcccgcactgaaaaattcatgctgctatacatcacttccggtaaagccagaacagctcagcaaaaatcagatttaatgcagcatgtaacagcacagctccatcaaaaatttaagattccagagcaagatgtcatgtttgtgattgtgcaaaatagcccagaagattggtgctttggtcatgcgctacgagcagatatttacttaaaaatgttagcttcgaaacagtaa

SEQ ID NO: 65433 - DNA, 987 bp, Acinetobacter baumannii
atgacgttgacgaaagctatacgtttctatggaacaggaacgccagaagtaatgcgctatgaagatgtagaagtaggagatccaaaagctggagaagtacgcctacgtcatgtggcagtcggcctaaattatgccgatacatattttcgtaatggaacctatcaaattccaatgcctaatggcatgggcgttgaagcttcaggtgtcgttgaagctttaggcgaaggagtcaatcagcttaaagtaggtgatcgagttacttatacaggttttttaaataccttaggtgcatatagtacccaccgtctaattccagcaaatgctttaattaaattacccgaagaaatttcttgtgaaacagcggcagcgatgaccatgagagggttgaccgctgcttatctgatgcgccgcatttatgactttaaagcgggcgattcaattttattacatgcagctgctggtggtgttgggctgatcgtttctcaatgggctaaattactgggcttgactgttatcgggaccacatcttcagaagaaaaggctgccgtagcgcgagctcacggttgtgatcatgtcattaactacagtcatgaaaatgttgctgagcgcgtacgtgagttaacaggcggcgtgggtgtaaatgtcgttttcgatagcgttggccaagccacttttatgagttcattagactctctcaaacgccgtggtttgctggtctgcgtagggacagcgtctggtccaattcctgcttttgatccggtattactcgccgtgaaaggttcattgtttgtcacacgtccagctctggcagattacattgcagatcctgccgagaagaaagaactggcaaatgaattatttgatcatgttcggcatggacgaatcaaaattgaaattaatcagcgctatgagctaaaggatgccgtgcaagctcatcgtgatttggaagcacgtaaaacaataggttcatcaatctttgtaatttga

SEQ ID NO: 65434 - DNA, 849 bp, Acinetobacter baumannii
atgcaaattgaacagttaacttgcaatattggtgcagagctcagtggcgtcaaacttgctgatgcgatttatgatgatggattatttgctgaaattcgcacacaactacttaaacatcgcgtgttgtttttacgagatcagcacttaacccgtcaggatcatgtcgcatttgctgaaaaatttggacagctcgaagatcatcctgcggtaggcagccatcctgatcatccgggtttggtgcagatttataaacaccctgaaagtcctgtcgatcgttatgaaaatgcttggcacagtgatgcaagctggcgcaaggttccaccgatgggatgcgtgttgcattgtgttgaatgcccacctgtaggtggcgataccatgtggaccaatatggtgatggcctatgagtctttacccaacgatattaaggataagattgctgacttacgtgcttatcacagcatagaagcgagttttggtgcggctatgccacttgaaaaacgcttggagttaaaagcaaagttccctgatgctgagcatcctgtggtacgtactcatcctgaaacgggcgagaaaattttatacgtcaacgcgttcacaacccactttagtaactatcacaccaaggagcgcgtcagatttggacaagatgccaatccgggcgcagctgaactactacgttacttaatttctcaagcttatattccagagtttcaagtgcgttggcgttggaagcctaacagcattgccatctgggataaccgcagtacacaacattatgcagtcatggattacccaccttgccaccgaaaaatggagcgggccggcattattggtgacgcaacctattaa

SEQ ID NO: 65435 - DNA, 1053 bp, Acinetobacter baumannii
atgcaattctttgacgactcattgcacccagaaaatatggaaaaagtagtaatcacggttgcgccgtatggacccgaatggatgccagaagactttcccgaagatattccagtgaccatggatgagcaaatacaaaaagcggttgagtgctatgaagcgggcgcgacggtgctgcatttacatgtccgtgagcttgatggcaaaggctctaaacgcttgtcaaaatttaacgagcttatcgcaggtgttcgtgaagctgtgcctgacatgattattcaggtaggtggttcgatttcatttgcaccagaaagtgaaggtgaggcagctttatggctaagtgatgacacccgacatatgttggctgaactcactccaaagccagatcaggtcacggtggcaattaacaccacacaaatgaatattatggaattgctctatcctgaatatttagaagggacttcattggcacatccagcgactcaggcagcatatgcagagatgaccgtgccagctgggcctgcatgggtaactgaacacatcaaacgcttatgtaaaaacaatattcaaccgcactttcaattaaccggtatgcatgggcttgagacgctagaacgtatggtgcgtaaagggttgtacatggggccgttaaacttaacttggattggaatcggtggcggtttcgatggcccaaatccatttaatttctttaattttattcatcgcgtacctgatggatgtactttgacatcagaatctctgctcaaaaatgtgttgccttttaacactatgtcgatggcaatgggtttacatgctcgtgtgggtaacgaagacacgatcattgatcatcacggacgccgtttttcatctgtagagcaaattaagcaaaccgttcggattgcccatgaactaggccgtgaaattgcctcaggaaaagaagcccgtgaaatttatcgtattggggtgcaatacaacagtattgaagaaaccctaatcgcaaatggtatggcacctaatcgtaaaacagggcaaaagggtgtgccgcagcgtaactaa

SEQ ID NO: 65436 - DNA, 1350 bp, Acinetobacter baumannii
atgaatgcacatcagtattcagatcagatgagcgatgttgatacgtcaatcagtatacctcgtcgttatgcatggcttgtttttgctttgacatttggtttgctcatttcagattacatgtcacgacaagtcttaaacgcagtttttcctttacttaaaaatgagtggttgctcagcgatagtcagttaggtttgcttagtggcattgtcgcgttaatggtgggtttattgactctgccgttgtctttaatggcagaccgttttgggcgagtgaaaagcttggccattatggcgacgttatggagtttggcgactttaggatgtgcactcgctgaaaattatgagcaaatgtttattgctcgttttatggttggtgtgggggaagctgcttatggcagcgttggaatcgcggtagtggtagctgtttttccacgagaaatgcgtgcaacactcgccagtgcttttatggcgggcggcgtatttggctcgtttttgggtgtggctttaggtggtgtactcgcacagcatttcggttggcgttgggcttttggtggtattgctttatttggtctcattttggcctttctatatccaattttagtgaatgaaaacagaataaacgcagcatctcaaaataaaattcgtagtaaaacccaacacattaaaagccctttaaaaactttatattcaagtcgttcagtcattgccacttacattggtagtggtctgcaattatttgttggtggcacagtgattgtctggatgccgagttatcttaatcgctattacggcatgagtaccgacaaggcaggtgtgatggctgcggtcattttgctatgtagtgcagtaggcacaattctatgtggcatgttgtgtgattatttgggccgtaactgtccagatcgcaaagtcagtttagcgattacatactgcttgctcggttgtgttcttttattcattgcttttactgtgcctgcgggacgtaaccagttacttctcatctgccttggaatgtttattgccctaggaacaaatgggccatctagtgccatggtggccaatctcacacataactcagttcatggctctgcatttgcaacactcaccttagctaacaattttcttggtttagcgcttggtcctttagtcgttggcaaagtatctgatgtgattggtttacatagcgcatttcaacttatgccattggtcagtattgcagcagcagccgtatttttttatgccaaacgccattatcacaaagatattgcacgctttgagcagcaaggaataactgagcttaaaaatcattcaggtaaccaaatacaaaaatgtgggatgaataacaaatga

SEQ ID NO: 65437 - DNA, 657 bp, Acinetobacter baumannii
atgatgattcggcaattacatattgatgtattttttgactttatttgtccttggtgtttgatcggaaaacgtcagttactgatcgctataaatagattttatcagcttcaccccaaggtcaaagttgtcgtgcactggcgaggtgttcagcttataccggacttggcaattgaaggcgtaccttttcaaacgttttatttgaaacggttaggtagcttgaccgcagttcggatgagacaagaacaggtcaataaagctgcacataaagttgggcttaagatcgattttgagcaaattaaacgcatgccaaatacggccaaagctcaccgcttatttgataaagctttaaaaataggaactcctgagcagtgcaatgcgttgttagaacaactctttgctgcatatttttatgatgggttagacatcggaaacaccaccactttatacaaaatcgcgaaacgttgtggcttctcacctgagcttatcaaagatttacttattcaagatcatcaagattttatctctgcaagtacaggaggtaatggcgtgccttactttatttttaatcgggcttcagccttagtgggcgcgcagtcagcagatgcactttatcaagcgatgcaagagacaatgctggcacaaggagagttgatatga

SEQ ID NO: 65438 - DNA, 327 bp, Acinetobacter baumannii
atgactaaccgatttgaagtgccttttgagaaagttccaaattcaggtgagcgggctttttttaaagttggagataaaactctcgcactatttaacgttgcggctcaattttatgcaatcgatgacagctgtcctcatcagggcgcatcgctatttagtggacgtctagaaggacgagtgattcagtgctgtgcccatggtctacgctttgatttaacaaatggctgtttagttaattcttctcagctcaaagttgcaacctatcccgtagaagtgatcgaggacaaagtatttattatgatgggctgtggggaaaatcatgagtag

SEQ ID NO: 65439 - DNA, 1011 bp, Acinetobacter baumannii
atgagtagtttagttttgaaaaatttttcccagcgtacaagagaattagcaccaggctttgtggtcagttcggtcgttgctgcggctgcctgttttttatcagagcactatggtgcgccagtcatgctatttgcactactgctcggcatgagcgtgaattttttagcagctgaaagtaaatgcaaggtaggtatcgagtttaccgcacgtagtgtgctgcggatgggcatcgcgttactcggcatgcgtataactttggggcaaattaccgcactaggttggcagcctgttgcgttagtcgttactctggttattgtcacaatcgccgtttctgtcattgccgctaaaatcttaggcttccaaaaactatttggcatgctcactggtggttccacggcaatctgcggtgcttcagccgcattggcactatcggctgcttttccaaatcatccgcaaaaagaaaaagcgactttatttaccgtgattggcgtatcggcactttcaacctttgcaatgattgtctatccgatgattgcgaagtggctagagttatcaccacaagcggctggtgtgtttcttggtgctacgattcacgatgtggcgcaagtggtcggcgctggttatagcatgtctactcaaacaggtgatacggcgactgtagttaaacttatgcgtgtagcaatgctgcttccagtaattgtttgtgcggctatgattacccgtatgcaaggagcagattcaaccggagagcgaccaccattactgccttggtttgctgttggctttctactactcgcttgtattaacagtataggatgggtaccagcgatggttcaaaatggaattaatgacttatcacgctggtttttagtcatcgcaattagtgctttagggatgaaaactcagttaaaagaattagcatctgtcggcattaaaccaatccttttaatgatcggcgaaagcatctttttagtggtattggttcttggacttatgcgcttgtggttttaa

SEQ ID NO: 65440 - DNA, 1011 bp, Acinetobacter baumannii
atggtgcctcttgcgcataccgcctctttaaaaaattatttggcagttgctcagcaattagatctaaatccctaccatttattatcacgtgttgggcttagccaaactcaattgaatgatcttaaacaacgtattcctgtagataaagccattaccttgcttgaagactcagcccaaatgagtaattgtgatgttttcggtttacatatggcagagcaacgtgaaatcgcggattttggtgaactgagcttattattaagttaccaatatactttgagagaagcgctgcaaacgattgttcgttataggaatttactcaataactcacttgaaatatatatagaagaaattgacgatacagtagttattcgagaagaggttataaccacaacttgcgggtatagtcgccaagcgacggaacttgctttaggaattacccatcgtttttgtgcagcactcatgatgcaaaaatggcggccgttaagtgtccacttcactcataacccacccaatgatttaactctgcatcgacggatttttggctgtgcgctagagtttggtagtgactttaatggtattgtttgtacggcagccgaacttgatacaacaaaccctcaagcaaatttggctatggctaaccatgcacaacgttatttagatattttgcaaaatagcaatgaatcgaccatgatttttgatattcgtaaaagtatttatcttctcttgccaatgggacgcgctacgattgatcaagtcgctcaaacacatggtattcatgtacggactttacagcgtcgattagaagaagctcagacgagttttagtgatttaatgaatgaagtacgcaaagatctcgtatttcgttatttaaaaaatctaaattattcacttgctcaagtgtctgatattttaggttactcaatgccgagttcttttacgcgttggttcattagccagtttggtatgtcaccgaatacgtggcgtaatcacaataaagccctgcttaattaa

SEQ ID NO: 65441 - DNA, 582 bp, Acinetobacter baumannii
atggaaaaaatacaaaccaaagcaacaattttaattattccggggttacgcgatcatgttcccgagcattggcaaacgatcttagaaacaaagctagcaaaggttcgctctgtaccacctgtagaaactaataaactcaattgtgaaaatagagttactgctattcaggcacaactcgaacaaatacaagggcctgtcattttagttgcacacagcgcaggtgtgctgatgacaatacactgggctgcaaaatatcaaagaccaattcaaggtgctttgcttgtggcgccacctgacttaaacgaaagctggccagaaaattatccaagcccaaccgtacttcatcaagaaggatggagtcctttacctaatcaaatactacctttccccagcattttggtggcaagcaccaatgaccatttagctcgttatgaaactgtaagtgaaatggcaggaaagtggggtagtcaactcgtaaatctggggaaagtgggacatttaaaccctgcatctggctttggctattggcctttagctgaacaatttattcaacagttagatcaggtcgaacaaccagcctag

SEQ ID NO: 65442 - DNA, 1833 bp, Acinetobacter baumannii
atgatgggtcattacgtctatttaaatcaaagaaataatcacgttttatatattcaaaaaataggtgtttcattaagcctaattttatttatgtctaaagcaaatgcagccagttttgatattgataaagactggaaggtcgatacaaaaacgatattaagcttaggagccagttggagtacccaagatccatccgtttcattactttatcggcctgacgcaaacaaaataggcaaacaaggcgctagcattgatgtgaatggtgatgatgggcgtatgaattttagtaaatatgatgccatttcacagatcatcagaggtataactgaagttaagctaaatggaaaacagcagggtgcggtcattagcactaaatactggtatgaccatgcctatgagacagggcacggagactttaaaccctttaatgattcagcgtggccaaggcttgcaaaattcaaaggtatcgatttatggaatgcctatatatggaaagattttgaactgggcggtggaaaaagcatcaatttaaaattaggcaaacagactttaaattgggggaaatctcagttttttcaaaacggtttaaattcagtgagtgcattcgattttgctgcaattaaccgaccgggtggtgatgtaaaagaaagaattattccaaccgaaatgttttcattcgacacaagcattaataaaaatttgaaaatagaagggttctatcaatttaaatttagaccttcagttgttgatggtaacggaactttctttgagatttcagattttgtgcccgaaaatgcaggtccagttctgattgctggaggtggagataaattatcggataccgcaattcgtttacgtacctatattccacgtgcagaaagtagaaaagcaaaggataatggccaatatggcattgctttaaaacagacattacccagtttaaataatgctgagttaggtatttactatgcgaactaccatagccgtaatgcaaactttgatggaacggctgtaacggcagcaggacccgaacattttaataccgcaagttatttttctatctatcctgaaaatatcaaaatgtttggattaagtctgactggtaaagttggcacaacaaccgtttttagtgaattaacccacaaacctaatcaacctttacaactaaacggcacagacattgtctatgctcaagtactatcggaaggaacgccatttgcgccgccgggaaaaactgttgaattgggtcaatatattcaaggatatgtacgcttacccgtaacacaattttcggttggagcaactgatagcatattcaatatttggggcgcaaattcgatgacatggtctacagagtttgccttaaaccatattgcagatattggtaatcatcggtttggccggacaggcgcatttggccgtagtgaactttcaacaggggcttataatcctgaaacaggcgaatttaaatgtacgccgtatggtacagctcatcttaccaatgcagaaatagacagcttaaatgaacgcttttgtaataaaaacggtttttttaatgaatggtcatttggttaccgattacgtggcgcattaaattaccaagatattttaccctctacagtgattacgccaagtcttagttttagacatgatgtttatggatatagccaaaactttcaagaagggcaaatgagtgtaagtgcggcgttatctatgacttatcagcaaaaatatacaacagagattgcctataataacttttttggttctaatgaatttagcacggtagatgatcgagattttgtatcattaacatttaaagctaatttttag

SEQ ID NO: 65443 - DNA, 420 bp, Acinetobacter baumannii
ttgaaatttagatcaaaaattgattggtggcttttattaatatttgttgtgatcactgccaatattatttttaaaatttatcaagaagttcatcattcttctataggcaccaatttttcgcatctcatgatttatagtttagtcattttggttatttggcttccggtctttaacacgtattacgtagtagaaaacaacacattaatcattaagagcttggtatttcgatggaaaattaatatcaatgatattactcaaatagaacctacccataatccactttcttctccagcactatcattagatcggctcaaaattagttatatgaaaaatggaagaatagcgaaggtgatgatttctccaaaagataaagagggctttttaaatactttacgtaaaaatcctaatgctaagttttaa

SEQ ID NO: 65444 - DNA, 447 bp, Acinetobacter baumannii
atgagcgtatataaagataatacatcaactgatggtgatctatatgtaattcaagggggatctggttttaacgtacttatcaatgataaccctaatgttccttacgcagaaccaatttcatttgttgtaaattcgactcctgggaatacgaataatgcaacatatcaagtgaaactcaatggtaatcaagtattgagtttaccaagtattactggtattgaaggaagtcgcgttgagaatcaatctccaacaacgaatacacagaaatttaatggtagcatctatctggaaggacaaaatattttcacttttaaacagtcttcgggaactatattaaatttcaaacatgtaattaatagtataaatattgaaggacagtctattaatcaaaatggaactgtttcaactgctttaaaatcaccttttgagcaaaaatttacattttaa

SEQ ID NO: 65445 - DNA, 1254 bp, Acinetobacter baumannii
atggctacctataaaattactaaatcgtttgtcgataaagttgagtttgaacaatctggtcaaaaaatctatcgtgatgcttctttaataggttttgctctacgagttacacaaaaatctaaaacatatattgcagaacgccgaaaggaaggtaaaaactatcgtgttgcaattgggaagcattttgaaataacagtcactgaagctagaactaaagctgaatcgatactgacacaaattgggactggagaagatcctcgtaaaccacagaaaattaaaaagcaaattccaactttgatggtggcgtatggggaatacatcaatgagcgtagtcttaagggtaaaacactgatctcctataacaagcagatcaaaaattatcttgctgattttcagagtatacgactaagtgaaattactcgtcaggatattgtggtcaaatttaaggaaatcaccaaggttagcccagcgcaggcgaatgcatctatgcgcttattaagggctatttatacttgggcagaatttacttataccgacgaaaatgagcaaccattgcttaaagataatcccataaaaattcttactgcaaaaaagctttggaataatattaaagctaaaacgtcttatttagaggaagatgatgctggtaatttttttaatgcgttattgaattatcaggatgaaactcgctggcacaataagccatatgcaaataatgcacgagatttgtatttgctaattatgcttacaggtatcagattggatgaggggcaatgtctacaatgggatagagatgtagatatgaaaaaagggttgttaatttttcatgatccaaagaatggtgataatcatcagttaccgatgggtgattttttatttgaaatattcaaattaagatatgctcaaaaaggaagtgaatgggtattcccatctcgtcagaatgaagggcagcatataacgaatatgagagctggattagctaccctaaatcaaaaggctggaacaaatattacaacgcatgatttgagaaggacatatgcaagcattgctaaccatcttgattacagtgtggcaacgattaaaagattgctaaatcatcgagattcatcgcgtcaaaatgatgtgacattacgttatattcaaatgtctacaaaaaagcttaagcaagcaatgaatgatattgaacagcaactttttgaatactcaagtgttactttgaacgatgctgttaataagctcaaagcctcaaattaa

SEQ ID NO: 65446 - DNA, 276 bp, Acinetobacter baumannii
atggctaaagcaaaaatttcagaaatatcctttgaacaaaagcttgcattaaggaatgccttttcaaatgcaacggaacatacagaatttgagcaagaaaccattgccatatactatggaatttcactctcattgctacagcaatggcggtgcaatggtggtgggcctaaattcaaaaaaatcggcagaaccatcctttatcaaaaatctgacgtgttaattttttttaagcagaaatatgaaaatactagccaatatcaaaacaaagcctcttaa

SEQ ID NO: 65447 - DNA, 741 bp, Acinetobacter baumannii
atgcagcagaatgattttgcagtcagtgagctcatggctttccgtcaagaaatggtgggagaaactattccttttaagccatcacagcttgctgagcttttaacacaccttaatacattaaaggtcgagatgaataatttgcctgccaaaattttccaaagacaatattcagatgttttaattgcctatgtgcaaatgcttggcggattggagtttattaagaacaatacacttgccaaaagtgcaaaggcaatcattgcagtcaaagctcgctatgcaaaacatttatacccaagacgtgaaattatatatcgtattttacgggaacaagtggcacatcatggtaaatggaagaatctgaatcaggcagttaattttattcttaatgatttactcaaagccttcgaggtctatgacattcaatggcttaaggaggagcttgcagagaagcaaaaaatgctcgggtcgcttgagcaggagtggcagtcagctaaacaagcctctgttgattctaggagtgtccgaagaaagccggcatcaataattaaaaaaatagaaaaattaaaactggaactgaaaagcatcaatcaaatcctcaagtcaaaatatccttctagagagatggaaaaattcggctataaaatgccctatagtgatggctacattgctgagaccattatccatgagttgagaattcagcctgagatattgcaagaaattctgcttaaagaaaattgctga

SEQ ID NO: 65448 - DNA, 2448 bp, Acinetobacter baumannii
atgattaaagaatcaagatatgtaggcattttagacaattttagttggaataatttaaaaattaatgttgcagatatatttcgtattttgaaatttaaaaaattacaaatgatggcttcttatggagacgatgcgagtggttttgatcatactcaacagcaaatcgatgagttggaaaagttgcagtatttgtggtgtttggttgagcaaaacttttctttgactttggatcagtttaagcacaatttaatgaacagtacgacatcgtattggttgcttaaaagacaagaaattgaacgttttagttgtgatcagaatctaaggtttttcccatatcttaaaataggcgatggactttatttagtttggtgtatgctgaatcttcagaaacaatcatcatcaaatttaaataatcatcagcatcacctgtattcacatttaaatggaaatgcgactacagtgtttccaacaaatgtaagtaatggaaagcatattcaacctcattggtgtttcgagattttgtttaggttgaaacaatatttaagtacaactaactatcagccgaattatgtaattcctgcccagacacctcaagtcacgtgtgagcagtttttcgataccctgttggaaagataccaatcaattttttgcctgtctttaaatattcagattccgttcaagtctggtgtaatggatgactatcattcgttcgttcaagatcgattgatacgaatcccacagttacagcagatgatgcaggggattgcaggattattgtttatgatgaccaagttggaacacgatcttgtatcaggattaaatctcaacgttgtattgatattgaacaacaaaaaagaacaagtatcagccaagataattaaaagacttgaatctgagtttaaaaagattctgattgatcgagcttttcatattcatcattggggggagcaacttgctcaagagttgaaaaaaaatgccatcgatggggagatcaagttaacggatgaacggaaagtaaaagattttaaatattggattctgaatttttttcagcatgtggatgatgtcattcagtttttatatacatctaataatcaaatttacccgatcaatcaagtttggtattcctctgaatttttagatgatcgtaattttcctgtcgatctaacgatgatggcgcgaaaatcttttcaggatttagtgcaatatgaagatgataaaatatgggctgtccgccatctacctatcatcgcaaaaaatagattgaagatttcacaaattttcaatcgcgagctggtactcgagttaagcgattttccagattctatagaactcattcagaatattgaaatatttatggcgacagtaatggataccacagttggtgcgtttgatctgcctattcgaatggggaatgttgagttgagtgctgaagaaattgagcattcaatcacgcgtataggtcatcaactgttatggatactcagtcatttacctgacttgcaactgttgacaataagcccttacttgtatcggctaaatattaatgtgcagttctttttaatgaatatgaatcattggcaagttgagcaacaattagctgcgaaaaccagcaagcaaggtgctgaacgattcaatgcattggtcaagcaacttcgatctgactataactcgaatatcagacaatctaagctagatgtgaaaatctggaaacaggtgcagaattcggtatcagtggacttggacgaatctacaatggacaaccatcaaacaaccactgaaattattgaatatgtggactatgttcagactgaggttgttagtgatgagattattacaacgtatgattatattgaatcgagttataaaaagtgtggactgaggctgaatagtttgcagaaatacttaaaaagcttgtttaaaaaggaatgtattctttatcgagcccgctttggtctagaaccaaacgagacagaagttaatcagcagattttctcaaaaaatattacagagatgtttttacgtaaccgcagtagggaaccagtatccagtatgataggttactttggagcatggcgtgaatatgttggacagcatacttatcttgatctgattttaatttttgatgcaagaaagtacgaggagttaaaaagtaaggataatttatttggggaaatgtggaaaacccaaatgaatactgttcaacaggatggatttaaaacattattcgatacggttcctttgatgccatcagttcctgagttgaatcagcaatcattgttacttgaaattggtgaccaatctagacgaaagcaggtctttgaagtattggtaaattactacagcttccttgagctgtatgagcgacaagcgactgtccgagtccctaaagttttagtaaaaggcagtgtgattaaatctaaagttaaaaccaaatctaaggcgtaa

SEQ ID NO: 65449 - DNA, 537 bp, Acinetobacter baumannii
atgaaaaaatttatttttatagcagtagcttcactttttaatattacaacagtacaagcagctgatggtacgattactattaatggtctagtaactgataatacttgtacgattgatacaggtgataaaaaccttacagtgaatttaccaacagtatcatctcaatctttaaaaaatgtaggagatgttgctggtcgtacaccttttcaaattaatctaacaaattgcgcttctgctggaaaagttgcgacttattttgaaccaggagcaacggttgattttaatactggacgtttattaaaccaagccacttctggtgcagctgctaatgtcaatattcaactattaggaagtaataacgcagtaattcctgtacttgctaaaggagcttccggtgcacaagataactctcaatgggtaaatgtttctgctggtggtaatgccgatcttaattattatgctgaatattatgcgactggtgtatctactgcgggtactgtaacttcgcaagtaaaatacacgattatttatcaataa

SEQ ID NO: 65450 - DNA, 276 bp, Acinetobacter baumannii
atggaagatataaatatacgcattgcgcagcaagtacgtgaattgcgtctagcccgtggatataccttagatgttcttgcaactcgatgtcaggtaagtcgttctgcaatttcattaattgaaagaggtgaggcgagtcctacagctgttgtccttgaaaagctggcaaatggtttaggtgtgcctttgactcagctatttgatattccacaaaataatcaatcacctcaacctatggttcggcgtactcaacaatcagaatggaaagatccgtaa

SEQ ID NO: 65451 - DNA, 360 bp, Acinetobacter baumannii
atgaaaggatacgtttttgcagcagattgtccctctcgaaaaattttgttaacgctgacgagtcgttggagtattttgattttagttgcgcttcgagatcagcgtttgcgctttaatgagttaaagaaaataattgatggcattagcgaaaagatgttagcacaaactttaaaaacacttgaaaatgaaggttttatcattcgtcaagattatgcggaaataccacctcgtgtagattatcaactcacagactttggacgagaagcttccgaaagactttttgatttaacaacttggcttgaaaataatatatccaatttattggaaaatcagcctagtccagaaacagttcaaaattaa

SEQ ID NO: 65452 - DNA, 858 bp, Acinetobacter baumannii
atgcgtattgcagttactggggcatcaggtcaacttggccaatccgttatttctcaattactcgaacgtaatgaggcaaaaaatattgtcgcattagtccgcaatccagaaaaagcatcaggtttaagcttaaaaggaatcgaagttcgtgcttttgattatagtcatgatggcaataaactttcggctcaattgtcaggtattgataagcttttattaatctcatcgagtgaggttggtcaacgtacagtacaacaccaaaatgtgattaatgcagcaaaacttgcaaacgtaaaatttattgtttacacaagcttattaaaagcagatacatcaccgcttctattggcacaagagcatgttgagaccgagcaatatttaaaaacatcaaatattgcatatacattattacgtaatagttggtacaacgaaaactatgcaatgggacttgcacaaacagtagagcaaggcaaaattttcggggcaacacatcacggcaaaattacttctgcttcacgcttagattatgcaactgctgccgctgtagtattaactcaagaagggcatcaaaataaagtttatgaacttgcaggtgatacaagttatacccttgatgacgtagcaaaatgggcaagtgaaatcagtaaaaaagaagtaacttaccaagatttatcaaaagaggaatatcaagcgctcttgatacaagtgggtttaccagaaggctttgcaagtatcttggcagattcagatgaaggcgtatctaaaaatgctttatacagtgatagtaaagacctgcaccagttaattggtcgtgccactacaagtatgcaagaaacgattaaagaatttttatcttaa

SEQ ID NO: 65453 - DNA, 378 bp, Acinetobacter baumannii
gtgatagatgcaacaataaaagccgctcaaattcaggcagattacgctttaatctctgcatttataggtgcaattggtatcattttgggtatcttaatttcatggtacacagctttacatttgcaaaaggttgcgcgactagccgagacaaggagagatgtttatttagagttaattgaacattactcatttatggtaaatggcttttcaaaatttcttctagattctcatagctgggcttttttctttgaaaatataactaaattttgtattacgatagataaagcggcatttattagcactaccaaaacaaaaaaagaactttatgagtttctggaaagttttaaggaaaatttgaataagaattcaatctgttaa

SEQ ID NO: 65454 - DNA, 351 bp, Acinetobacter baumannii
atgactgaaagcctgagaaccctaaaggccaacaaactatttaaagatgatttaagtggtgtcgttatagcttttggcaaaggtagccaagaaataatggatgtgcaaagccaactcctttttattgggagttctgccaaaacattaaaattatggtggcagaacgaaagagggttgacgaactggtcacacgaggccagcacacccgaaggtgtccctctcccgtcctaccgctgcgagagggagacgaggagctgcacaaaactatccctcagaaggaataattctgatactcgtgtgattgcggttcgtcaaaaccgactggcaatgtggccagcaggcaaagaatag

SEQ ID NO: 65455 - DNA, 1044 bp, Acinetobacter baumannii; identical to SEQ ID NO: 51738

SEQ ID NO: 65456 - DNA, 255 bp, Acinetobacter baumannii; identical to SEQ ID NO: 51740

SEQ ID NO: 65457 - DNA, 141 bp, Acinetobacter baumannii; identical to SEQ ID NO: 51741

SEQ ID NO: 65458 - DNA, 279 bp, Acinetobacter baumannii
  misc_feature (133)..(142): n is a, c, g, or t
atgaattctaatcttaaagctggactgatcagcacttatctggtcattggattcttttttgccatctatcaacatttctgggggcagtataactataagccatttacctacaatttagggcaaggcttagtgnnnnnnnnnnactgtaagccatttacctacaatttagggcaaggcttagtgtggcctgcggtgatgtttcctgtaatcggtaaaattgttggtggaattttgattctactattcgtctggtttgttgttattcgtcctaaattataa

SEQ ID NO: 65459 - DNA, 639 bp, Acinetobacter baumannii
atggatgagcagattgctaaatctgtgactatggctaggattaagaaggtgatcaatggttaccagtacaaaggtaaatcgaaagatattctgttttctcagatgttaaattttaagtcattattgaaagcaaatgaaattttagagaatgttgagagcattaaagaattaaataaagaaaattacagttcaatcaaagtagagatgaatgaaaattatttggaagttattggcgaaacaaccatagtaaaccatacagagggtattgatggtaatttccaattttttaagctttcacaagaacctttgtttgatgcaagtggccatatacgtgccgatgtctcgttctctcaattagctgaatttgtatggttttctgaaacaggaactggttatacgggaaaagctgattctcctttactaggggtatttgaaggtcgtgccatttatctactttataatggaattttaaaagatattacagatgaaggtggaaatatccttactaagcaggtatttgatgttcttccaaaatttgatggggctaaagtgatttatgcagctgccaatcgtttaggtattaaagctaaacgcaaaaatattgtatttaaacaaacaccttatgctttagaggtttaa

SEQ ID NO: 65460 - DNA, 486 bp, Acinetobacter baumannii
atgaccaacattcgtattactgacttctgtgataaatatggttatacccaagcacaaattacatacgcaaagaaaacagggatgctaataccaataaaaagaggaattattgatgaagagctttctcttcaggcccttaaaaatactaaaccgatcaaagctccaatagagttaggtcaggatgcaattatttctaatttgcaaaatgaaattaaagcactcaaggaacaactacaaagcacactagaccttaaaaatcattatgaggctgaactaaataaaccggggatattcccagcaaaggtggctaaagttccattccaccctgaagcctctatgaaaaaattaagtaatcatcccgttatgtctcaagagtggatgaaagatcaaatgcaacaaatacctgaatctgaaagaatatttaaatcacgtaagataccgattcctcaagaggcatttacttctagccttccagataaaaaataa

SEQ ID NO: 65461 - DNA, 255 bp, Acinetobacter baumannii
atgaaaattcttatttcacttgcattcatcacacttgcacttatggcatcaggctgtgctagtaaaactgaacgtcaatttatcagtggttgtaaaacaggcgggattgatggcagtacctgctcatgtatttatgacaaactcgaaagtaaatatggagaggatggactcaaaaacaatctatacaccttacagcaatctgaatctttccaaatggatatggtcaattcttcctatcagtgcatgaaggaatag

SEQ ID NO: 65462 - DNA, 129 bp, Acinetobacter baumannii
atgagaacacttgcaggcattatctgcattattgcagtgatttgctttttaggattgccatttattggcttcatgatcctaatgggaatttttatagcattggcaaaatttgccgctgggggaaagtaa

SEQ ID NO: 65463 - DNA, 228 bp, Acinetobacter baumannii
atgagttcaaatattaaatcatgggtgatcagtggctacttagtgattggttttttctttgccgtctatcaacacttttggggacagtataactataagccatttacctacaatttaggacaaggcttagtttggcctgcggtaatgtttccaacagtagggaaaatcatcggtggtattttgattctattattcatttggttcgttgttattagacctaagttataa

SEQ ID NO: 65464 - DNA, 657 bp, Acinetobacter baumannii
atgaaaaaaatactttccattgtagcactttcaactttactgatcgcatgtagtcaaaacaatcagcaagctcaacaaagtgctacagatcaagctgaacgcagctcatctaatactgctacacagcaggagcaatctaaatatgcaccatatagcaaggaagaggttgaagccaaagtacaagctttaactcagattgtagaaaatgataccgaatatctccctgctgcggtcaaacaagctcaatcatttcttgagagttgggataaatatcctgaagcactcaaatccatgatggagtctgatcttgatcccaacaatcctgaatatagcaataatattccgatggagatggagcaaccagagatatctgttcgtgcccaaatttccagtcgggaatctcaatcagcgtttaatgtgcctggtgcaattgaatatattttggaaattcagtccacttctgaacaacccttcactttagagggattaaatattaaccgtggtcgctgtggtttttatacaggagatttctatagcaaaattcctgtgcaaatgaactatagttctacggtatcctatttactgaaatgccgtggtgatcaggtcattgaagctgaaatgattacagatcagggcaatgtaaatttatcattttaa

SEQ ID NO: 65465 - DNA, 663 bp, Acinetobacter baumannii
atgacagtctggcatattctgacttatatccaatcattatcaggctgtgtaaaacagcaactgattgattttcaacaacgtgaattagagaatcagcatagcctttttgattatacatccacactcattcatcattatgcgagaacactggtggttcgagtggatttatctatcaagaaagaatatcaagccttatacaacatccaagtgttcaataaagcgctagaaacattgctacggcgtatagccgatcaagatacttgttttagtgggttatatggttatgcatgggcattagagcatggggttagtaagggctaccattgccatcttttgcttatgtacgatggaaatatgcatcaatgtggttttgaaatggggcagtggataggtgagtgctggaagcagattacacacggatatggttatatttttaactgtaaccattccgactatatggcgatctatgaagcgatggggactttagggattggtatgattcatcgtaacaatgccagtgaagtctataactttcttaattatattgtcccttatttggtgaatggcgaaaaagaacagcagcatctccgagtgaaagattcagcctatatgcgtagctttggcagaggagtggttgattcaaaaaatcgaagaggtttataa

SEQ ID NO: 65466 - DNA, 303 bp, Acinetobacter baumannii
atgagcttgagctgtccattttgccattcaatgaatgtgatgttgattgaagtaagtacgcaacaatcaaatatacccttaaacaatttggtcacaccgaccacattgggtgcattgggaagcacagtcgcaaagtctttcaatctaccgccgatcgtcggtggaatcgcaggaacattattgggcagtgtgttgaattcatttaccgaacaaagcgtaccaacacagcagagtttgtgcttctgccacaactgttatcaaaagtttccaagttatctattgcaggaaatgcattcgagctaa

SEQ ID NO: 65467 - DNA, 663 bp, Acinetobacter baumannii
atgacggtatggcatatattaacttacatccagtcattatcaggctgtgtaaaacagcaactgatcgattttcaacaacgtgagttaaagaatcagcaaagtttattcgactatacattctcattgatcaatcattatgcaagagtgttggttgttcgggtggatttatccattcttcaggaatatcaagccttatacaacattcaggcatttaacaaagcattagacactttgcttcgtcgaatcgcggatcaggatacttgctttaatgctttgcagggttatgcatgggcattagagcatggaataagcaaaggctatcactgccatttattgcttatgtacgatggaaatatacatcaagaaggttttatgatggggcagtgggtcggtgagtgctggaagcagattactcatggctgtggttatatttttaattgtaaccatcctgactatatggcgatctatgaatcgatgggaactttaggcattggaatgattcatcgtcatgatgaaaagaagattaataattttctgaattacgtagtttcttatctagtgaatggagaaaaagaacaacaacatcctcgagtgaaggattcagcctacatgcgtagtttcggtaaaggtgtgatcgattcgaaaaaccgaagaggtttataa

SEQ ID NO: 65468 - DNA, 1008 bp, Acinetobacter baumannii
atgtctaaaaagtcttcggatgcaggcatctttttatggatgacatatcaaaccatgcaaaatatggagttagatgctgcttcaatttttgctagcgttaatttgcccaatcaacctcctgataaaaatatccgacgtgataattcaactcaaaatcgtttttggactgcagcagaaaaaattagcaacgatacagatattggtttacacgtaggacaccaaatgcctgcctttagaggattagtaattgaatatctattcttaagtagtcctacatttggagatggcttaaaaagagcattaaaatatcaagccttacttacagatgttttcaaactctcattaactgttgaggaagataaagcaattttatcgggcttcgaacatcctgtaagacattatttagaagctgcgattggaatttttattaatttctttaagtatataactcataataattttaaacccacagaaattcatctgacttacacaaaaggcgcctcaactgaaaattatgaaaagacttggaaatgcccagtaatcttaggaaaacccactggagctatcatttttcctactgctttattaaaacaatcttcacctgctgctgaaccagaattattgaaagttcatgaaaatatcgcagaacaacaattagctaatttagaaaaacatcaacttatttatacaattgaacgtttactaagtaatgggcttcttgagtcaggtaaatttgatcaaaaatatattgctgaacagttgaatcggaatccccgcacccttcgagctgatttacaggcattaaataccaaatatgaacaaattttaaatcactatagagaaaagttagctagaaaattacttgctcatactcaagaaagtattgatcagattgtttatcttactgggttttctgagccttcagcatttactagagcttttaaacgttggacaggcgaaacgcctagtgcttatcgtcaacgtaaacaaaataaattcgagaattga

SEQ ID NO: 65469 - DNA, 873 bp, Acinetobacter baumannii
atgttttccttttttaaaaaatcgctttctgccgtagagctgtctaaattaattattgatgaaagtggtcaagaagaatggtttattaatcattttcatagagatagctcaccattttttggagataatcttgaagaaatttgcggatcaataaaaacagcaataatcagacattatttaatatctaataattacatttctaaattactcttaaaaagaaaacaactaagatatattgattcttatggtgacttagtagaagaggattggaataaagaagtcaaaaaattcacaaaaaaaagatcaggtgaaatccttgaatttattataaatcatacacctgaagtaatttataaagaattaaaaaaacaaaaacagtattattatcttgattctgagaatttttattatgagattttatcaatagttgacttgaacgaagtttacgaatgtacagatttagaagataggataaccttattaaaaaacatcgataatgttgatacagataactatttagtagatgaacaaaaagactatcatgagtatgaatctatagttagtaacatgtttgagatactaggttgggatacattgattacccccaaaagtggtgatcaaggtgctgatattattatagaaaaatataatatgaaatttgtcgttcaatgtaaactatatagccaacctgttggaaacaaagctgttcaagaagttatagctgccaaaggattctatgaggctttcggggctattgtcgttacaaataatgactataccaaatctgcaagacagcttgcagagtctcattcagtaatattattacatgattcccaaatatttgaatggaataacatatttgatgaaagctaa

SEQ ID NO: 65470 - DNA, 1407 bp, Acinetobacter baumannii
atgagtagttttgatgaaatacaaaatagagaagctggactgcataaaaagttatctgcaaaacagatggggatgattgcgattggtggagcaattggaaccggtttatttatgggaagcaaatttgcaattagttttgcaggtcccgccgtgatagttagctatgccattggtggtttaattgcatttgcacttatggcttgtttggctgaaatgacagtgcagcatcctacttcgggctcatttggtgcatatgcagaacattatatgtctccactcgctggctttttagtccgctattgttactgggcttgtattgtgttggctgtaggtaccgaaattaccgccgttgctgattatatgaagctctggtttccgaatgtaggctcttgggtctggattggatttttttcactgaccttacttgttgtaaatgcctatagtgtaaaagccttcgggttagtcgagtactggttttccacaattaaagtttttgccattatcgtatttattcttttatctattggtatattgacgcaaagtaatcagggaatgaagcaagtagttactaatttgacaggtcatggaggcttttttccaaatggctttagtggagtatggatcggagtcattatttctatatttagttacttaagtatagaaatgattgctgtcgcagctggtgaagctaaagaccctgaaaaagcagtaaaaaaggcatttaaaagcacagcgctacgactcattttattttacttattatccttatttctaatcgttactttggtgccgtggactgttttgattggagcagatgcaactagtccttttgttatggtcatgaagattgttggtatcccatatgcagatagtattttaaattttattgtaattgtagctgccttatctgcgatgaatagcatgctttatatttcaacccgtatgttgtttagtttgtcacgggcaggtgatgctccaaaagtttttggccgaatcagtagtaatggtgtgccggtaaatgcgctgttgctatctgcggtagggattggtattgctagtattgtttatacgattaatccggcttctgcgtttccaattatgattgcgctatcgatgtttggtgcattgttcacttggggcagtatctttgtgacacatatgttttttagaaaacacatgacacagcaaaacatcgagctaaaatttaaaattcccgctagtcgatttatctcgttgtttgggtttattgcgattttaagtattacagtaactacctggtttaccaatgagtttaaatccactttacagtttggcgtgcctttaattcttgttctgatattttgcttctacttaaaacgttcaactgtaaagctaaatctcaattctggtgaagaaacgttgaagtga

SEQ ID NO: 65471 - DNA, 1158 bp, Acinetobacter baumannii
atgattgaagaagagttaaagaagttagagcaggataaagattatcagcaagcgatggcactaatagctaatcttcaacaaccagttcttgataatgttgcacagtcaattcaaatatccttacataaatttttacctaatatcaacaatgttgagttgagcatactaactaataatcgtagagctaacttaagaaaagactatttaatagaaattgatgatggtgatttaacagacataaaatttaaaggtgatggggtaaaaagtcttacagcaattggattgttgaaagacagaaataaaataattaatggtgcatcaattattgctatcgaagagcctgaatctcacttgcatccctcagccatgcatgagcttaggcaagctatccatgatcttacatcagatagtcaagttgttgtatcaacacacaaccccatatttgtagatagagagtccatatcaaataaccttttagtttctaataataaggttaaaactgtcaaaaaaattaaggaaataagagagtgtttaggaataagaacctccgacaatttaatacatgcaaataaaatgattttagttgaaggggaaagtgataaaaaaataattacaaagcttattcaagagaggagtgttaagctttctaagcgaattaaagatggtgatttaaatattttttcattagatagcgcatctaaattgtcttatcatttaaagtggtttcaagatcaattatgttcctgctttgttattttagataaagatcaagcagggagagaaagcgtaactaaacatctaacctctaaggaattagatcaaaaatcttattgtttaatttcagtaaaaggatttaatgagtgtgaaattgaaaatttaataaatatacatttttatcgtgaaataataatagagaaatttggagttgatattgtttcaacagattttactaagaagaaatcaaagtggagtgatgctttgatggaagttctatcacactcaggtaaaagtgtttctttgaaagacttagatgatttgaaaaagggtattgctgaaaaggtagagaaagacagtatatatgaatacattgatgtgcataataaatcttttattgatgggttgatttcgcaacttgaaagttattttgttaaagagtaa

SEQ ID NO: 65472 - DNA, 1458 bp, Acinetobacter baumannii
atgggatttaaagccctccctacacttatatctttatttattacattgttaatctggttcgtagttcctgtgcccactggtgttgatcctaatgcatggcatttgttagcgatgtttatcggtgtaattgctgcaatcattggtaaagctatgccaattggtgctattgcgattatcgcaataactttggtcgctattactggcgtgactaacaccagcccaagcggtgcaattcaagatgcccttagtagttttgctaacccactaatctggctgattggtatctccatcatgatctctaaaggtttgcaaaaaactggattgggtgcacgcttaggctatttatttatcgcagtttggggcaaaaaaaccatcgggattggctatagcatggtactttcagaactcattctcgcccctgtaacaccaagtaatacggctcgtggtggcggaattattcatccgattgtactggcaatttctactagttatgattctgatcctgctaaaggtacagaaggccggatgggaaaatacctgtcattggctaactaccaagctaaccctattacctctgcaatgttcattacggcaactgcccctaacccattagtagttgatttagtagcaaaggcaaccaatagtgaaatttcattaagttggagcacttgggcattggccatgttattgcctggtttgattgctttaattattatgcctttgattatgtatttgatgtatccaccagaagtcaaagaaacacctaacgcagctcagtttgctaaaactaaattaaaagagatgggtcctgtcagtaaaaatgaaatcatcatgcttggtgtattcggaattttattgatgctatgggcaggtattcccgccatgatttttggctccgcttgggctgttgatccaacgacaactgcttttattggtttaggattattgctgcttacaggtgttttaacttgggatgatattcttgcgcagaaaaatgcttgggatacgattacttggttcgctgctttagtcatgatggcgacttatttaaataagctcggtttaatcacttggttctcaagtgttttagaaactagtattggtcatttaggtctaagctggatgcctgcttgtctattattaatgctcgcctatttgtacgcacattatatgtttgctagcaccacggcgcatattaccgcaatgtttgcagccttttatacagcaggacttgcactcggcgcaccgccaatgttgtttgctttaatgatggcagcagcttcaagcattatgatgacattaacccattatgcgactggtacttcccctgtagtatttggctcgggttacactagacttggtgaatggtggaaagctggctttgtcatgagcgtggttaatatcattatttttgtagtgattggtggactttggtggaaagtgttgggttattggtga

SEQ ID NO: 65473 - DNA, 858 bp, Acinetobacter baumannii
atgagtttaggtattatagaacagcttacgcatagtactgtgagaatagagactactctacataatggtggaatagctacgggtagtggtttttatatgcactttcttaataaaggagaaaatgctgtcccagtaattattactaataaacatgttattgctaatgcaaaaactgggcaatttcatataactcttgcaaaaaatgatggattacctgatataggtaatcacttaaaatttcaaattcctaactttgaagaaagttttgtaaaacatcctaatccggatattgatctcgctgcatttccaataggtcctatttttaatcaattagcacaatcgggaaataatcctttttatgtgcctctccttacctcattgataccaaacgatgacgaacgtgcaagtctttcagcaatggaagatatagttatgattggttatccaaatggtatttgggattcaaaaaataatttcccagtaatccgtaaaggtattacagcaactcacgcaaatgttgctctaaatggtaaatctgaatttctaacagacattgcaagttttcctggttctagtggatctcccgtgtttttagcaaatattggaggatatatggataagcaaggtaatacatatatgggggcacatcgtattaaacttttgggtattcattatgctggggctatgcatactgcatcaggtgaaattaaaattatcacagcaccaacttccaatattccagtacctattactgcaatcccaaataatataggtgtagcaattaactctaaagaactttttgttcttgaagaagaggtcaaacgtgtactacagcaacaagggatatctataaactaa

SEQ ID NO: 65474 - DNA, 858 bp, Acinetobacter baumannii
atggataaaatagactgtattaatacttttataagtgtggtagagaatggaaattttagtcatgcttctagaaatctaggcattaccagagatcaggtttcaaaaagaattttttatttagaaagtctatttaatacatcattatttatacgcaacacccgaaagatggacttaactcgctctggagaaaagttctatgagcgatgcaaagtgattgtaaaagagttagatttagcagctcatgactttgtatacgaccagaaataccctgaaggcttactcaaaattagtgctccacatgcctttatccaaacgtgcttttcagatgtcatttctaattttctaatcaaatatcctcatattgaaattgatcttatgttttcagaccactccactcatatcaatccccataaatttgatgtgattttaaaagttgaggaaaatattgaagagaaaaatactttcattttaaacacatataaaagaagcttttatgcaacagatgcatatttaaataaatatggaaaaccgaaaaatatagaagagcttagagaacatagcattttactatattctaaagatgacttaaaaaataatattattaactcaataccaaaattaacatgcaataatatagaaattcttttagaactttgtaagagaaatcaaggcattttatttgcacctgactttttagcaaaaaaatatgaagatgaaggaatcattattaactattcaaaaacccttttaaactctgacctttatttttatgcaaccacaccttatggatcaagagttccaaagaaggttgaactttttttaaattctttaaagcaatatttttcaaattatcattaa

SEQ ID NO: 65475 - DNA, 306 bp, Acinetobacter baumannii
atgaataaacaaaccaatacattgattgcaactggtgtcgttgccttacttatcgtcttatgtgcaattgcttggtataaatcgggcaataaaacacaagcgagcgcacatggtgaggtcgccgaagaaaaagtagctgtggctggagatgagaaagggcctcacggtggtcgtttatatcgagatggagatttctctgctgaggtcaagatatttgaggaaggagtggaaccacacctccgtgtttatgggtatttgaaagataaactacttaaaagaggtggtcccacatgtttgaacaactaa

SEQ ID NO: 65476 - DNA, 1701 bp, Acinetobacter baumannii
atgaagcattatggtccaattagcggtattgccacttataataaatttgttgctacagcaggttatgataatcaactaattttatgggatgctgagaagaaaattcctatcgcacgtggtaatcatgatcatttagtaaatcaggttgtttttagtcctgatggtactgttattgcttctgccagtagtgattacagtgtgagattatgggatgtaccaagtttacgtttaaaagctattttacatggtcatgaggatgatgttgaaatggtcgcattctcaccagatggagattatttggctacttgttctagagatagaaaagtcagagtatatgatttagttgggcgattaatagcaacgctacaaggacatttagatgatgttatttcagttatatggtctttagatggacaaaatatactttcttctagtgatgatggaactatcagacgatgggattggcaaagcattgtacagctagattgtatcgagttagatggagtccaaacagatgctttggttataacttctgatggtaatattatagccggtgatgacaatggacaattaatattaatccaaggtggtgataagtttactattaaagcccattcggcaggtgttaaaagattaatattaagtgaagagtttaatagacttgtgagtttaagttatgacagatctttgattgtgtggactataacatcagaactaacccttgaagagacatgtcgaacagagtttcccgctcaggtttgggcaagagccgcagctttcatgagtggagaaaaaatagtgacgggtacctttggttcaagttatgcattgtttgatatatcaacgcaactatgggacacaaaaaatatagatccatatcttaattataatgctgtcgttaattataaggggaatatttatagtattggggatgcaggcttactatattacaataataatatagtaagtaatttaggaagtctttgtaattttttacttcctagcgagagaagattagttacgggagggcaactcggtattgtatttgatgctataagtggtgaacacctttaccaatttcattcaccaattaactgtggaacactttttaaacgtaatgggcaagaactagctgcttttggtacttatactggtgaaatattcatattagatttaaatacatatcctgttaagtatataggtacatatactgtccataataatgcaataaagggattggcttctaactctgattatattttttctgtttcagcatcagcacaagctgcttatatagatattaattcgttatcggtaattaatcttatcaataatgcacatgataaaatttctaatggctgcacgagggtcgataatgggtttgctagtattagccgagatttgagtcttcgattatgggagtctggtgaaacaaaagctaaagtatttcaatcacctcataattactcgataaaatgtatagctagtgacccaagtgggcgtttcatagctactggaagttatggtgggactatatatatttttgataaaaaaatagatgaaggtaaatggatatatggaagccgtcctacttcagtaggtatatcaaatataactttttccatagaggataatcaatttatagctagttcatacgatggtaagttacataaaatttctataagagagcaaactatataa

SEQ ID NO: 65477 - DNA, 210 bp, Acinetobacter baumannii
atgcttaaagctttaggtgtaaatgaaattcatcttattactaataatagtaataaggctgatgcacttattaatcttggttttaaaataatatcacaagttcctacaggaatatattgttcggtctctaatataaaatatctgaaagcaaaagttgaaaaacataatcatacaattgatttgaaaaaaataaattattttttggagtaa

SEQ ID NO: 65478 - DNA, 825 bp, Acinetobacter baumannii
atgttgaatatagtacagccaaatatttgcttcatcggtagtagtaatttgtctttagctttaattggaggtttggttttaaaaggatttcaaaaagaaaaaattaatcttatagaggaaggaaagtttgataatgaaatcattctaaagcaaaagcagcatgaggtaaaaaaggctgatatcgttgttctattagtagacccaaaaaatctaaaagttatcttagcaccattaaaaaaatggttagctgataaaactattgtatcgatgatggctggaattaatatcaaacaactcatgaatattacgggttcaaaaaaggttataagaatcatatctaacccaccggtattaacttatacaggtactcatgtgttgattggttcagagtatctagaacctttagataaagagttagttgagacaatttattcagccacagggcagacctattgggcaaattcagaatcagaaagtgatgccattattgcgttatcgggttcaggcccagcgtacttcttttatatcctcgacagtatggtaaaaactggtgtttctatggggctagataagcagtttgctttagatctggcacttcaagcagcatcaggtgctgtagacatggtccgtaaaagtaatgttcagccaagtgagttatgtggcaaggtcacattagctaatggtatcactgaatctgcattacgaatgtttgagctaggcaatctttccgatgatattcgacttgctttaaaagcagcttatcatcgcagtaaagaaataagtctagagattaatgctgaaattgccagacatagcgttaactga

SEQ ID NO: 65479 - DNA, 1554 bp, Acinetobacter baumannii
ttgggaacatatttgagaagaaatttatatatatatgaagatgaaagtgagttaaaaaataaagaaaaactaataagaaaagatgtatctgagataaataaattaattaattaccaagtaattcatgcaaaaagaaatttagctagctctgaatcaagtgataaaataagtcttcctttatcaaaacttagcacagaatattttaataaggaaaatatattcagtgagaaagattttaaagagattaataatgctatattaaaaatggatgaagatttaaataatttatatgataatcattttcaaggcttctttaaaaatattagagaatttttaggagattcatctttaaaagttttatctaatcttgagtcaagacaaattatgtcgaatagctctaaagttgtacagatggatgacaataaaaactttttgccagaatcacttaatggtttgggaaatttaaatatattatatttattgcttcagattgatctaaaaaagaatatatttattcaagaaaacaagaatattaatttattttttattgaagaacctgaggcacatactcatccacaaatgcaatatatattttctaaaaaatttaagaaaatggtacaagatataccaagtttgcaaaccctaattaccacacattcttctcatattgtttcacaatgtgattttaaagatataagatattttcaaaatagtaatggatgtataaaaattaaaaatttttataatgatttagagataatgtattcaaataatccagaattttttaagtttttaaagcaatatattacactttatgctgctgaacttttttttgcagaaaaagtaatatttatagaaggtatttcagaaaaaattcttcttccttatttcattaaactatttgatgagtcaaaaactgaaacagactacacaccaattagctctcaaaatattacatatattgaagctggagctaatgctaaagtatttcaacatttgttaaatttttttgaaattaaatcattaattattactgatatagatacaacagaaaatttaggtggatctgcttgtaaagtatctgatggtaaagcaataagtaatgaaactattaaacattatttagaattttataatattggttttaaagatggagcaaagcataaagaggaaaaagatagaaaaattttagagtggctcaaaaaggtaattaattctgaaattgaagtatctagtccttttattaaattatcctatcaaactttagaaaataattatcatgcaagaagttttgaagatgcttttttttctataaattatgaaaatatttataagaataaaaataaaattaatggattgcgcaatatttctgaaatgcaagaaaactatactgacttttacgatattactaatagagtaatagaaagtaagtcggactttgcagcatcaattttatatcatgcactaattagtaatgaaggtagtgaagaaaataaaattatttggaatactccaaaatatattagagaggcattagaatggatcagtcaataa

SEQ ID NO: 65480 - DNA, 1179 bp, Acinetobacter baumannii
ttgtaccgacaaattgaggtaagtaaaagggagcaaacgagcattgcgcgagggctcgcagtcgcaagcgcagatgctccccttgttaaatatacggataattcctccatccttgtacagcaaggctttcagagattaagagatcgtttcaaacttctcaataaagttcgaaaaatactcaagggagagcgtacacaacactgtttttttaatcgtgtagatagaaatgacggtgtaggggttatgttcaataaatcccgaaataaagccaattactcaaatattatgcgatgtgctaatgcttggggctgtcctgtatgtgctgcaattatttctgagcatcgtaaaaatgaagtaaaagaagctatggattggtggcagggacaaggcggatctgtattacttcttacattaaccgttccccattattcgcatactgatattaaacaactcaaaaaagaccttaaaaaagcatattcaaaattctttaagggtgttcgtgcatctcaaaatatgttctcaaaatggatgattgagcattacatttcatgctttgaaattacgcatggcgacaacggttttcaccctcattatcacgttctgttatttatcccttattcaattggtgtgggttctttatcccttatgcaggcagatatgtttaaggtttgggaacattgttgtttaaaggcaggtctaggcgcaccaagtcaaaaacatggattacatttgcaagctggcaatgaagcaggtaactacgtttcaaaatggggcttagaacatgaaatgactaagggacacgttaaaaaagggaaaaaagacggtagaactccatttgatattttaagaagttttgatgaaacaggtgatgaaaaagaagctaacttattccgcttgtattattttgctttcaaggggcaacgccaattaaattggtctagaggtcttaaaaaactttgtagcaaaggacaggaaaaaacagaccaagaaattgtagatgatactgacaacgtagcagaaatgcttttcaaattagatattgagctatggaatgctgttagatcgcaaggcaaacagggtgaattgcttattgctgttgttgaagatcagactctcaaaaaacctatggacttggtgcgccaatgtttgattgatcaaggggtcttagggtcgccctaa

SEQ ID NO: 65481 - DNA, 654 bp, Acinetobacter baumannii
atgaatacaatctctataaatgatattgcaaattggacaattattgttggttattcatcacttataatatttgctttctatatggcttttacaagtaaaggggaaagtaaaaggaaaaaggttctctttaaagaaagtattttaaataagcataaaaataaaattaatatagatgctgatgagtttatgagaatgattgaattctctaaaataggaaaatcaacagccgaagaaattttatcagaacttttattagaagcatctacctcagaagatcataattactactctcaattagtacgaaagcttgagaagattgaaccatttggaactctttcaaaagatatgcgtattattttagagagattgtctgtattaacagaaaattcgagttccgtatcagatacgcatttactaattcctgttcgcaatgcccttgaaaaagctgatcagatacagagtgaacagaagcggatgagaaagatcaatgttatattaactgtagttggattaataagttctgctgtgagcatagtaggattatatgtttctttaaagagcccatctaaagaagatatggcaatagtaatgaaaaatgaaattcctgttattgtaaaagaggtaattgaacagaatgtagaaaaggtaaaataa

SEQ ID NO: 65482 - DNA, 1017 bp, Acinetobacter baumannii
atgagcactgtagaagatatagaaacaatagaaccaatttttaatgaaggtatatcgcatacttggactccacgtaaattaatgggattaccagataattttacatatagtttacacgagaaaaaaatccaaaaagaaattaaagagttaataccagcaaaacctcaacaacttataacagttattgatgataaatcttcaacaatatttatgagattggctgcgggtagattattagctttaattggagacccacggattgtacctttaaatccaataatgattgaaataaatggaggagaggtcacactaggcttggactctgaaaatattttaaatgagtataaaaagcttaaaaaactaggcgtggttcctttatggattcagaaagaatgtcctaagtacttagtaaagctaaattcatttcgaatttcaaaatatctaattacaaatactgaatatgctactttcttatcagaaactggacacgacgatattccctcatcttggcaatttggtagattcccagtagaaaaaagtaattaccctgtttacacaatcaagccagaatcggctgatgcatatactgtttggctttctaataagacaggtagaaaattccgtttacctagtgaggcagaatgggaatatgctgctagtggtttaaattatagacaatacccttggggagagcattttaaagttggattatctaatacagcagaatttggcttattggatacttcaccggttggctgctttccaatgagtaattcatatttcggttgttcagatatggccggtaatgttgaagaatatgttagtgattcatatcgtccttatcctggcggaaaaattgttgaagatgatctttttaagaagaatccagaatataggattgcaagaggaggtagttttacacgctttcatgatttagctcgtactagacgtagacatggttggaatccagattctccaatatatgtgatgggattccgtattgcagaggatatttaa

SEQ ID NO: 65483 - DNA, 525 bp, Acinetobacter baumannii
atgatcaaaggtttagcgattacaccgccaatactcggcagaattagtatcggtaaagtggtcgaaaagaatggtaaacgtctgcctgaaaaagatgatcaatttacgattactagccaaattcagaataaggatggctgggtgaaacacccactggatgagcagctaagagccaaggcacaaaaccagaaactcagaaccattcctgtccggatgatttttaatgatcctgaactcaacttgcgagctgagtacactctattcgaccgacaaactggtcggcccatctgtactggtaatggtgaaacctgtcagcgacttggacaaaacggggttgaacagcatccatgtccatcacctgatttatgccccttggcccaaggtggacactgcaagccttatgggcggctttacgtcaatctagatgagtcggatgagttgggtacattcatttttaggactacaggtttcaatagcattcgtaccttagctgcacggcttgagcctgtaaattattttgtgtaa

SEQ ID NO: 65484 - DNA, 441 bp, Acinetobacter baumannii
gtgcacttggcgcagtggtatctacagttaccacagcattgcctgtacccacattacctgccgggtcggtggctgtcacagtcacggtatgcggaccgtcagtcaacactggaagtgtattgtctgcaagggtccaggtgccatcaccattgttcaccgctggataatccacaccatctacagtcaccaccactttcgcagttggatcgttcactgtaccgcttaatgcaggtgtgctgtcattggttaatgtggttgttacagttactgccggtgcaaccgcatctactgtaccagttgatggtgctgacgggttacccgctgggtcagtcgctgtcgctgttactgtttgaccatcagtcaggtcacctgggtttggtactgtccacttaccatccgggcctgcaactacagtcgctgttgtaccatccgggaaagtga

SEQ ID NO: 65485 - DNA, 207 bp, Acinetobacter baumannii
gtgaccaaacagggtgaaccaaagattgtggctgagttgacttatccggtaacgggtaagcactgtgttgaccgtatttacactgacctgtgtgtaattgatgtgaccaaagatggtttaaaggtgattgagaaagtagaaggtcttagctttgatgagttacaggctttaacaggtgcaactttgattgatgcgacccaagggtaa

SEQ ID NO: 65486 - DNA, 207 bp, Acinetobacter baumannii
gtgaccaaacagggtgaaccaaagattgtggctgagttgacttatccggtaacgggtaagcactgtgttgaccgtatttacaccgacctgtgtgtgattgatgtgaccaaagatggtttaaaggtgattgagaaagttgaaggtcttagctttgatgagttacaggcattaacgggtgcgactttgattgatgcgacccaagggtaa

SEQ ID NO: 65487 - DNA, 378 bp, Acinetobacter baumannii
atgacccagttccagtcttctagactgagttcgtcaaacttaccgcctaagcccacacccgcattattaatgacaagggtcacagggtgctcaagtaaaatttcagcagtttcagctaggtggttcacttgctctgcattacccacatcgcagcgcatggcaaaagcttttgcgccttcttgttcaagaagctttaccgtttcttctgcggcttctaaattaatatctgcacacactacgctaccaccacgttttgccagttcaagtgcaaagctacgaccaattccactacctgccccagttacgaccgcatatgcgtttcggctaggctggtctttcttaccaaataaaatcatagtaaatcctaaaaaactttag

SEQ ID NO: 65488 - DNA, 174 bp, Acinetobacter baumannii
atgtttaagttaattataattttattttatctactcgctattctaggtgttttatctatactaggaggtgtattaactttaagcttctttttgataattattggtttaggactaatctgtgctgcattactattgaataaagaatttaaaattgatgttttgttttggaaataa

SEQ ID NO: 65489 - DNA, 384 bp, Acinetobacter baumannii
atgactaccttaaacaaattagttgaaagcattcatagccaaaacgttgctgcgggttggtggactgaccttaaaactggtgggtcattgacctcacaaaaaggcgaacctgctaaacgcaatatacctgaaatgctttgcttgattcattcagaaattagtgaggctatggaaggacatcgtaaaaatttaatggatgacaaaataccccatcgctcaatgctcgaagttgaacttgccgatgctcttattcgtatttgcgatatggcaggtgggcttggtctagaccttgaaggggctgttttggaaaagctcgaatacaaccaaaaacgagcagatcacaaaatcgaaaatcgcttaaaagctgacggcaaaaagttttaa

SEQ ID NO: 65490 - DNA, 630 bp, Acinetobacter baumannii
atgaaaattacagaacaattgttaacgcaatggggtgcttgcagtgacggcaagcgaacattcactcagaagtttcctgaaggtgctgaatataaggaagtaattgccgcatgcgatgaggacggacatcgtgattatcgcacatggatttttaatcacgcgtttcaacacttagttgcttctgagattgtagaagctgaaacagaccttgtgcctaaagaaatcgagaaaggactagaaccacttcaacttcttgatagtactgaaaccaaaaatacagacactatctctaaggaagctagcagccgacttgcagcatcgggtttcaacagccaacttgcagcatcgggtcgctacagccaacttgcagcatcgggtgacgacagccgacttgcagcatcgggtttcaacagccgacttgcagcatcgggtgaaaattctgttatcgcctcttccgggttagattctactttccaaataggtaaaggcggatgtgcagcaattgcgtatcaggatgagcaagaaaaaatccgattcgcagtggcttatgaaggtgaaaacgtcaaagcgaatacttggtacaaagtaaatgccaaaggcgaatttgttgaagtcgagacacagtcatga

SEQ ID NO: 65491 - DNA, 474 bp, Acinetobacter baumannii
atgacaacagatattcatacgtggcgcagcctaatctgccaagaccttatcaaagcgggtttaacaaactcaaaagatatcgttgcacaagcttcaaacatcgaagtttatgtatttggcgaaaccaaaacagcagaagcaaagcctgaaattaaaaacgcagaagctaaaacttctaaatcaacaaaaagccaagcagctaaagacgctgatgtagctgcggttgaagctgaacaaaaaattgctgaagccatagcagaaacggttgaagaaccaaaagccgaagttgttgaagaaacaacaaaatcagaaatcactgaaaaagaagtgaaagatgcttgtttagcagtagctaaaaaagaccgtgccgcacttttaaaaatcttaaatgatgtaggcgcttcaaccgttgcaactatccctgcggacaaatacgcagatgtaatcgcagcttgcgaacaagctcttgcataa

SEQ ID NO: 65492 - DNA, 3606 bp, Acinetobacter baumannii
atggcgactaattcacttggcagattaacccttgatttggttgttcaaacagctagttttacggagccattaagtaaggcagagcgccaagcccgtacatcaagtcaaggaattgcaggatctttaaatattgctgcaattgcagttagtgcgttgggtggtgctattgctgggctttcaattgcaaaccttgttagttatagcgaaaaagtaatccaaacaggaagtgatattcagcgcttttcaaagcttgctaatgcttctgtaaaagattttcaatattttgcaaagggtgcggaatctgctggcatatcaatggaatcatttgcggacaaaatgaaagatatgcaagaccggattggtgactttcaacaaaccgggggcggtcctttagcagactttttcgaaaatattgcaccaaaagttggcgtaacaattcaacagtttcaaaagctatctggaccagatgcacttcagctattttacaactctttagaaaaagcgggtgcatctacaaatgatatgaaattctacatggaagcaatcatctccgattcctctttgttgattcctcttttagaaaatggtgggcaaggctttaaagaatatggtgaggcagctaagaaagctggcgcaatcatgactgatgaacttgcagcaaaccttgctgaagctaaaaagcaaatgatgctgatggacctccagtggcaaggtcttgaatatcgaatgattaacaatgttgtgccagctttgaaaatggttgttgataattggtcagagattaaagctgtgacaattgctgttgctgctgggatcgctgccagatttgtaccagctttggttgttgccacttatcaacttggtcaaactgccgtttttgctttacgcgcacaagttggattatttagttttgctagaactgctggggcaactacaggggtacttgctttgcttggcgggcctgcgggcttgggtatgttggctgctcagttagttgtggccggtggcgcatattatctaatgactcaacagactaaggacactacagaggcgctgagtgaccaaggtcttacaattgatgagttaaaggaaaaatataaaaagctaaatgcagaacagttaaaaattaaatctttggatgtagcagatgaaataagtaagcaaaacaagattatcgaaaatactttttcgcaacttgaccgtcgtgtatataacattctcactggtgctggaaccgagaaacaagctggagcattacagcagtatattgatgaccttaaagccggaggggatcgggccgcacaagctttaaatgttttatcggcaacaaatgtttttagtgattctcaattgagaagtattgctgactttggtttaacgattaagggtgctacagaagagattcaaagacaaaaagatattcaatctatagttaaaagcgtcactgatgaaacgactaaggcacagcagaaccaaacgaaggtactcacagaggctgaaaaagcgtggaacaatttaacaaaagctcaacgagattacattacccaagccaaacaagatgtgcttagagaaggatatatcaagacacttgtaagagagggggtaagtgtagataaagcgaatgtttatgcagatgcacaagtcgcaacaaatggagaaaatgcttttaaagcaccattgtcaaaggatgtgctacttgctgcccgcgagaacttcaatctaaaaaattatacttttagtaaagacgagttggcggcaattgctcgtgcgcaaggcattgcaaagacaaataattttgctcaaatcgaaagtttatatggtttgcctgctggaacacttgctgccttgattcttcaagagtctggggcgaatgccggggcaaaaagtcatactggggcaacaggtctttttcaaactactagcgtgtttagaaaacagtatggtcttaatgccaaaagttcgattgaagaaatcgcaactgcagcggctaaagacttgcaaaaacgctaccaagaatttggtgatcgtgcaaaagccttaatggcctacaatgcaggtgcaggtggcttaagaacctatttgaaaggtggtctatcagatagcaagcgcaaagaggttgctggttacgtacccggtttccaaaaatggttcgcgggagtatccgggaaatctactgtagacaattcaattttaatgcctactcaggcagatcaacttgaattaatcaacaaagctgccgagtctcaacaggctattaatgatgcaagaaaagaagttaacgcacggtattacactgaagctcaacgacttgcaaaggagcatcaagataatattaataagatcaaacttgcgtatgctggtacaccgcagttaaaggaaaagcttgctcaagagaatgcgttatatgctgctcagcttgcaaagttagagtcagataaaaaggaagagtataaccaatactttgcttttgaaactgatcgaatcaagcagattgaacaaaactatgatcgacaaaaagagttaattgattcaaatgccgagtatgagtatgggaaatcgaaaaaagctttagaaattaaagcgggtcttgaacgccaaaaacagaaggaaatagagtgggaaaaacttgagcaacaacaacgcctaaacgatgccagttcattcttaaatactgagcttcaaaatatgagaattcgtttcgcgtatgaacgcgagcagattttgcgtaattctgaaatttctaaagaagagcaaaaacaacgaattgaattaaaaaaagctgaggaacaattaagcttaattgataaggcatcacaagcaagcattgcttgggatagtacaaatgcaagtttgaatggttctagtgaggtttaccaacttggacaagaaagactagggcaaaatgcaaaatcccgtgctttggctaacgctcaagcagcccttgctcaatctgcagcagaacaagaggcaatttggcaagcacataaagatcgtatgtttatgatcgatcaaaattatgagcttaaaaagtcggcacttggagcaagggttgcttctgaaactttgggggggatggctgatttaatgggtggtttaatgggtgaacaatcggcagcctataaaaccatgtttgccatgtctaaagcatttgcagttgctcaagcaattatgaatgcaccacagacttactcaaacgtttatacatctgcttcattaataccaatgatcgggccatacattgcacctgttttggctggtgctgctgtagcagtacaagttgcacaagcagctcagatcaaatctgtaaaccttacgggtatggcgcacaatggtattgatagtgtgcccaaagaggggacttggttgcttgatggtggtgaacgtgtattgaaccctaaccagaacaaagatcttactaactatttgaacaatcaaaaagatagtgggcctcaagttgtggtttacaacaacagtaaagcaaatgttgaaacgaatgttggtgatgacgggaaggtgtatgtgactattgatgatgtatacaacccaaacagtaagtacagccaagcaatgcaggaaagtttcaatatctcaagaaacagggggtaa

SEQ ID NO: 65493 - DNA, 504 bp, Acinetobacter baumannii
atgaagaagttaatttttctaattttttgtttatttagcatctctacttttgcacaacaagttaagattagtgaatatgttgaggtagttgacctgccaaatatgtcaaaaaaccaaatttttaatacttctaaaatttggatagcaaagtcatttaaatcatcaaattcagttattcaatatgaagattcagcaacaggcaccattgttgggaaaggtaatatgcagttcccttgccaaggtacttggagttgtatggcgcataaggatgatattttagtttttacaattaaaattgatacaaaagacaataaagctcgcatttcttttaatgacatgactatgaaaattaatacaaaaggagcaactaaatttgtagctattggacaggaaattcagactgtaccagaaaaggacaatgatgttatccagttaggattaaaaaacatagttcaagattttaagaacggcattcacactgagtcatctgattcaaattggtaa

SEQ ID NO: 65494 - DNA, 516 bp, Acinetobacter baumannii
atgactaagatttcaactacagcactaaagaaaagcattacttctttaaatgctccaattttaaaaacagttaagtggctggttgaagtgactgaatgcaatatcaagtcactaaaagaactaactggaaatccaaatcttgaacttgggcaaattgaagagcttgaagctgatgtttttgtaaaaaaattgaacttcaaagaaagccgagaagtttcaaaagcgattgaatgggatgtcaactatcaagatttagaagcttcaaaagtcaagacgattgattccacacaaatgcaagccgctcagttgcttggctctatttgttctgaccaaaaaggcacaccatttttcgcaaatgtgaatgacatttacaaggctgagcctagtttagtaaatgctctatttgcggcatctgatgaaattaataattttttgggaaagtctcggaagaagagcttgcagacagagaactcctcattgaactcgtcctcaatggaatcggtggaagcactttag

SEQ ID NO: 65495 - DNA, 198 bp, Acinetobacter baumannii
atgactgtggatgaccttaagaagttttacggagtcgaaaacaactatcaattagccaaaaggcttagaaaaggcagaaccacaattaagcagtgggatgatggcggcataccaattggtgtacaggctatttttgagttgctgacaggtgggcgcgtaaaagctgaccgcaaattgttatttggattcacaaattaa

SEQ ID NO: 65496 - DNA, 666 bp, Acinetobacter baumannii
gtgagccaagtttctgagcgtatacgcaaacgaatggacgaattaaatttgagacatgctgatttaatgagaggaacaggcgctggtaaagcgaccatttcgagttggatcaagggagcggtaaaccctagtgctacttatattgattcactagcacaagtattaaaaaccactccaacatggttgcttacaggtcaattgaatgacactgccagcaatatggataataatgttgatattaattcgatggcttcagttatttacgcaccggttttatcttgggtgcaggctgggaattggacagatatggatgcagtaaatattcaagaatgcgagaaaatgccacttgtaccgggtgcaggtaagcgaagtttttatcttgaagttaaagggttaagtaatgcgccctactttgaggaaggggaaaagatttgtattgatccagactatgtacttgaagatatacagactggagaaatggttgttgttagatgtggcaatgaagcaactttcaaagcattggttgctgaaccaaatggctactacttaaaaccattaaatcccaattggagtgaacaaattatcccgctaaaagaggattgtattctagtggggaaatatgttggatcatttaaacctgctaagaaatttaatttcctaacataa

SEQ ID NO: 65497 - DNA, 669 bp, Acinetobacter baumannii
atgcttaaaaagtcattacatgatcaaattaaaataattggattttggaccgttggtggagttttttggtatttagttatagctttttttcttaaaagtaaatatccaatttttgattatagctttaatctagaaattgcatacgacgtcataaaagatgctttaactcttgcagcaagctttttagctccagttgcagcatttgttctgtttagcgattggagagttcaacataaagctctaaaaaatgaaaagttaagtgaagatatcttaagaatccttaacacggaattattatccttttataattttaatcctcgatcaaaatcagatgttgaagattttaataatcatcaaatgcaatttcataggaacgttgcaaatatttatgtgatgttagatgaaattgatgcaaatgaagtgcaggcaaaccacttcattgaaaatattaaaaaaatagaggttgatctagatggtttatacatgagtatttttaaacaaattgaaattgttattgaacatgatgcgatttctgattttctagatactcattcaatgcgtaaaaaagaaatattattaaaaaaattaaaaaaatttgaaaatataaatgaaacccattatgaaaatttaattaaagtaatttcacaattgaaacctttaaaagtttag

SEQ ID NO: 65498 - DNA, 723 bp, Acinetobacter baumannii; identical to SEQ ID NO: 50177

SEQ ID NO: 65499 - DNA, 621 bp, Acinetobacter baumannii; identical to SEQ ID NO: 51631

SEQ ID NO: 65500 - DNA, 336 bp, Acinetobacter baumannii
atgaacgtacgcacttgcactgaatctgacgtcgcctctatcgcagtcgtatttactgagtctattcatgtacttggagcgtctcactatgacgcttcgcaaaggaatgcgtgggcaccgcgtcccgcagatatagaggcttggtcagctcgcttatctggcctacagactcttctagcaattgagggagatgcggttatcgggttcatctcttacgagcttagcggccacatcgagtttctttacaccgcaccgggttccgagcgtcggggcgtcgcgtctgttctgtaccgtgaggttgagaaagccctcccaggggcactgttgcaaagttag

SEQ ID NO: 65501 - DNA, 426 bp, Acinetobacter baumannii; identical to SEQ ID NO: 61578

SEQ ID NO: 65502 - DNA, 171 bp, Acinetobacter baumannii; identical to SEQ ID NO: 51532

SEQ ID NO: 65503 - DNA, 336 bp, Acinetobacter baumannii; identical to SEQ ID NO: 65500

SEQ ID NO: 65504 - DNA, 288 bp, Acinetobacter baumannii
atgggttcatgtgcagctccatcagcaaaaggggatgataagtttatcaccaccgactatttgcaacagtgccgtgtacatcgaaatacggcttatcaggcgttaaaagatgcttgcgatgacttgtttgcaagacaattcagttatcagagtcttagtgaaaaaggtaacactattaatcacaaatcaagatgggtgagcgaggtggcttatattgataatgaagctgtcgttagggcactgttgcaaatagtcggtggtgataaacttatcatccccttttgctga

SEQ ID NO: 65505 - DNA, 228 bp, Acinetobacter baumannii
gtgattggtactggtgcatctgccatccagtttgtgccccaaattcaacctaaagccaaagaattgtttgtattccaacgtacagctccttgggtactgccaaaaccggatacagacttaggtgagtttagtaaatcaattattgcaaaatatccagcgattcaggcaagttggcgggcactgttgcaaatagtcggtggtgataaacttatcatccccttttgctga

SEQ ID NO: 65506 - DNA, 336 bp, Acinetobacter baumannii; identical to SEQ ID NO: 65500

SEQ ID NO: 65507 - DNA, 228 bp, Acinetobacter baumannii
gtgattggtactggtgcatctgccatccagtttgtgccccaaattcagcctaaagcaaaagaactgtttgtattccaacgtacagccccttgggtactgccaaaaccggatacagacttaggtgagtttagtaaatcaattattgcaaaatatccagcgattcaggcaagttggcgggcactgttgcaaatagtcggtggtgataaacttatcatccccttttgctga

SEQ ID NO: 65508 - DNA, 273 bp, Acinetobacter baumannii; identical to SEQ ID NO: 63221

SEQ ID NO: 65509 - DNA, 195 bp, Acinetobacter baumannii
atgtggtctgtaactaccgcgaacttaccaaatgagttagtggttgtggctgtttctaatgtaaattcagctgctgttaacgctatgcctgctgatcagttgcaacaattaaaacagctttaccgccaatctcgtggtcaacagatacttgaagattacagcgaatacttaaagtcacacgctaaaatcaaataa

SEQ ID NO: 65510 - DNA, 813 bp, Acinetobacter baumannii
ttgaaagctaatggcttacctttgccgaatgaagatagtaaccatttattaaagttctttaatgctactgattataatattaaccttgaagttgttggcacaggattgattgatgataaaactacaagcattaaaaaagacgatggattgttttgtgaatggaaccctgctctccaacaaataatcttctatcgttcagatgatattattacccaagctggtgattacaactattgtaaatatacaattagtagtaaggatggaattacgcaaacatctggtttattagaagctcgatttgataatattccaccagtagctggtgagggtactgtaacttttaaatatttagcaaatgagatcattcctttaaatctattacaatttgcgaatgatgaaggggatggacctactaatactcttaagacaaaatcgaataaatctcaattttgggtaaatgatcaaggtgtggagttaccaatttatataccaaataaaacttcaacggatggtatttttaaggtagttaaagcagatcgtgaaggcccatgtcctaaagaagatagtggtaatatctgttatggtggtaatatttatattcaagctagtaatgtatttaataccttcaacgataccttaacttattatgtatatgatgctgatggtaaaatctcaaatgagggtactattaagttggtaagtacagcaaccacaactgatgattcacggggtggtgggggtggtggaagtattggaattctttctatcgtatcgctactaagtttaattgcttatagacgttatcgtaagtga

SEQ ID NO: 65511 - DNA, 339 bp, Acinetobacter baumannii
atggaaaaaccaaatgaaaaatttattaaagtaataattaaaaaagtcaatttaacaggtttatcaaaaaaatcaaaacaagctttattcaaattaaaaatagaaaaattgattactaacaaaagaaataaaagaacacctataaataaatcaacagcattatttaatgctgccgatatcaacatcaacacaaaagaaaatataaataaaatacaaataataccacttttatctaagattaaattatttttatttccagttaatgcaaatacaaaaaaaatgaatatacatacaccaaacacccctaaagaaattacttttaaaaagtctatagagtaa

SEQ ID NO: 65512 - DNA, 861 bp, Acinetobacter baumannii; identical to SEQ ID NO: 53812

SEQ ID NO: 65513 - DNA, 444 bp, Acinetobacter baumannii; identical to SEQ ID NO: 53813

SEQ ID NO: 65514 - DNA, 777 bp, Acinetobacter baumannii; identical to SEQ ID NO: 53814

SEQ ID NO: 65515 - DNA, 906 bp, Acinetobacter baumannii; identical to SEQ ID NO: 53815

SEQ ID NO: 65516 - DNA, 975 bp, Acinetobacter baumannii; identical to SEQ ID NO: 53817

SEQ ID NO: 65517 - DNA, 369 bp, Acinetobacter baumannii; identical to SEQ ID NO: 43520

SEQ ID NO: 65518 - DNA, 741 bp, Acinetobacter baumannii; identical to SEQ ID NO: 53819

SEQ ID NO: 65519 - DNA, 549 bp, Acinetobacter baumannii; identical to SEQ ID NO: 53820

SEQ ID NO: 65520 - DNA, 252 bp, Acinetobacter baumannii; identical to SEQ ID NO: 43517

SEQ ID NO: 65521 - DNA, 426 bp, Acinetobacter baumannii; identical to SEQ ID NO: 53822

SEQ ID NO: 65522 - DNA, 483 bp, Acinetobacter baumannii; identical to SEQ ID NO: 53823

SEQ ID NO: 65523 - DNA, 3867 bp, Acinetobacter baumannii; identical to SEQ ID NO: 53824

SEQ ID NO: 65524 - DNA, 1002 bp, Acinetobacter baumannii; identical to SEQ ID NO: 61612

SEQ ID NO: 65525 - DNA, 555 bp, Acinetobacter baumannii; identical to SEQ ID NO: 61613

SEQ ID NO: 65526 - DNA, 951 bp, Acinetobacter baumannii; identical to SEQ ID NO: 61615

SEQ ID NO: 65527 - DNA, 630 bp, Acinetobacter baumannii; identical to SEQ ID NO: 46366

SEQ ID NO: 65528 - DNA, 279 bp, Acinetobacter baumannii; identical to SEQ ID NO: 43507

SEQ ID NO: 65529 - DNA, 2106 bp, Acinetobacter baumannii
atgccaggcgaagaggtcagccaagccaagcaacagctcaaattaattatcgacccttacttatcggcaagtgaagtcgaaaaagtgcttgctgcctgcgattttggagatctggcacacactggtattacccgtaaaagtggagaaccttatattctgcatcctatcgcggttagctgtattttagcgaatatgcgtctggatcctgaaacattaatggctgcacttttacatgatgtcattgaagacactcaatatacaaaagacgatattattgagcgatttggacaaacagttgcagagcttgttgatggcgtaaccaaactaagccagtcgagcgataaagaatataataaagctgcttcttttagaaaaattctacaagctactttgcaggatccacgtgtcattattattaaactagctgatcgctaccacaatatgaccacattgggcgccttacgtcccgataaacgtgctcgtattgctcaagaaacctttgatattttcgtaccgatggcaagattagtcggcatgaatgaaatggccgataaccttgaaaatttatgttatcaaaatctcgatttagatatgtttgataacgttcaaaatgcgttgcttcaaaccaaaccagagcgatgtaaataccaaagtatctgggaacaaaatcttgcggagcttctccacaattatcatattcaaggtcgaattaaaaagaaaaataataatattgagctcttacgccatttcgtaaaaaatgaaatggatttacaagaacttactcatagccatgcctttgaaatcgttttgcaatccattgcagactgcgatcgtttagtagcagcattaaaagaaaattttcaagtcatccaatatcaagatcatatccgccggccattaccaggtggtaatcagtcattaatgatcaagcttaagggtgaaaaaaccacgttatcgctcactattcaaactgagttgatgcgtaaagctgcacgtttcggtgtcgtactcggcgaaaatgctccacaaacttgccgctctgccattcaagcttccatgcagaacctaaatacactcattgatggtgaatgcgctaaaacgacttttaatgacttacttgattatttacatcaagaaaaaatttgggtttacacaccacacggccagttacatgaattaccacaaggtgccacagtagttgattttgcctattcagctagtcttttcttaggcaaccatgcggtaggtgcgaaagttgatggtgaaattaagccactttctacaccattagttagtgggcaggttattgagattattactgacgttttagcaacgccaaatccagattggttgagcttcattaacactcaaaaagctcgccgtgctttacagcacgtactcaaagaccaagatattgaagaacaacgtttagttggtgcccaagcactttcacgagctttgaaactctttaatcgttctattaacgacctttcagatgcagattggttagatctcttacaatggcgtcatattgataataaagatgcattatttgagcaaattgctgttggagatttacttcctcaacttgtagctaaccatttgtttgcaaatgacaagcatcctcgagcagaaaattcagatcgactaattcaaggtactgaaggcattgatgttaaatatgcccactgttgtaatcctattttaggcgatccaattcaaggccatttaacgcgacgtggtttaattgtgcaccgtattcgttgtcataatttgcttcatgaacaacatttacacccagaaaacattatgccgcttcaatggaaagcagatgacgtagatgatgtacgttttactgcttaccttgcgatttatatggcaatgaatgatgaacaggtatcagacctcatctatcaatgtcgtaaaaataatgctggggtagaaatggtacattccaacgaacagcgtactttcgtcaatatcgtagtaaacaaccgtaaacatattgccaaagtcattcgtgatttacgaatgcactatggcttcccacgtattgagcgtctagatgcccctgctccacaaatggaaatttccaaagtcagctaa

SEQ ID NO: 65530 - DNA, 384 bp, Acinetobacter baumannii; identical to SEQ ID NO: 61618

SEQ ID NO: 65531 - DNA, 195 bp, Acinetobacter baumannii; identical to SEQ ID NO: 61619

SEQ ID NO: 65532 - DNA, 465 bp, Acinetobacter baumannii; identical to SEQ ID NO: 61620

SEQ ID NO: 65533 - DNA, 1629 bp, Acinetobacter baumannii; identical to SEQ ID NO: 61621

SEQ ID NO: 65534 - DNA, 462 bp, Acinetobacter baumannii; identical to SEQ ID NO: 61622

SEQ ID NO: 65535 - DNA, 561 bp, Acinetobacter baumannii; identical to SEQ ID NO: 61623

SEQ ID NO: 65536 - DNA, 1083 bp, Acinetobacter baumannii; identical to SEQ ID NO: 61624

SEQ ID NO: 65537 - DNA, 591 bp, Acinetobacter baumannii; identical to SEQ ID NO: 61625

SEQ ID NO: 65538 - DNA, 1422 bp, Acinetobacter baumannii; identical to SEQ ID NO: 61627

SEQ ID NO: 65539 - DNA, 4482 bp, Acinetobacter baumannii; identical to SEQ ID NO: 61628

SEQ ID NO: 65540 - DNA, 876 bp, Acinetobacter baumannii; identical to SEQ ID NO: 61629

SEQ ID NO: 65541 - DNA, 1083 bp, Acinetobacter baumannii; identical to SEQ ID NO: 61630

SEQ ID NO: 65542 - DNA, 570 bp, Acinetobacter baumannii; identical to SEQ ID NO: 61631

SEQ ID NO: 65543 - DNA, 2166 bp, Acinetobacter baumannii
atgaatcacgtattccgtcagttttctatgggggctgtagctattgcgattatgcaggctgcatctgcacaggtcagcatgaccaacattgtaccaatgcaaattgcaggtcagggcacagaaattagagtcatgtttaatggcttgccaccacaaccacaagcttaccaacttgaaaatccttcacgtttaatccttgattttgataaggcacagcaaggtttaaaacagtctaaaattagtgttgcaactaatgaggcaagttctgtagatgttacttcagatgaccagcgctcacgtttaactgtaaacctaaaagatgctggagcatttacaacacgagtcgaaggcaatactttcattttaaaaattaattctgctcaaacaagtaataagccgctacctgtggtttcagcacaaccacagggagtttcaaatattggctttcagcgtggtagtcagggagaaggcctggttgttgtagatcttttaggaagtaatacgcctgtagatgttcagcagcagggtagtaaagtcgttataagaacaataggtacaaaaatcccgacacatttagcgcgtcgcttaaatgtaaatgattttgcaacaccggtttcaagtatcgatgcttataatgataaaggggttggtgtaataactatccagtcctctggtagctatgaatatatggcctatcaggcagagaataagctcacgatcagtttgaaacgtccccaagataaaaatgttacctctttatataaaacgccgaattattcaggaaataaactttcattagacttccaagatattgaagtacgtcgtgtgttgcaattacttgctgattttacaggcatcaatatggtagctgctgatagtgtacaaggtaatatcacactacgtttaaaagatgtaccttgggatcaggctcttgatattattttaaaaactaaaaatcttgataaacgccgtaacggcaatgtgatttggattgctccagttgcagaattgattaaggcggaagaagaagaagcgaaagctgttgcacaaagtgtcaaacttgcacccttacagactgagtatattcaactgaagtatgctaaagctggcgatattatgggtctcattacacaaggttcaaataatagtaatggcttacagcatacttctggtggagggacctcaacttcaaccaatttaaatactggagttgatagtctaggcaataatgtgggtagtttgcttagcccgcgtggcactattactcaagatgatcgaaccaatactcttattattaacgatactgctcagtcaattgatcaaattcgtaaaatgattgacttgcttgatgtgcaagttaaacaggttatggttgaagcacgtattgtgagagcctctacgtcatttaccaaagaacttggtgtgaagtggggcattctgtcgcaaggtattaccaataacaacaatttgctggttggcggtagtgaaacaactttatggaatttacgcgaaccgaagaaagatgaaactacaggtgggtataaatatacgattgagcgcccagataacttaaatgtggatttaggagtttctaatcctgcaggaagtattgcttttggcttgattagtatgtctgactttatgttagatcttgaattgtctgctttacaagcggatggttatggtgaggttatttctacccctaaagtcatgactgccgataaacaaacagcgaaagttgcaactggtcaacaagttccatatcaatctacaactaactctgcagcaggttcaactgctacaacatcttttaaagatgctttgctgagtttaaatgtgacaccaagtattacacctgatggcaagattcaaatgaagttggatatttctaaggattctgtagcgggtgcggctccaaatggagagttgattttaaataaaaataatatcaacaccaatgtattggtagataatggcgaaactgtcattttgggtggtgtttttgagcaaacaactatgaattcacaaaccaaagttcctttctttggtgatattcctgttgttgggcgtttatttagaaaagatgtaaagtctgatgataaacaagagttgctgattttcgttacaccacgaattgttaatgacactttagcgagaaatcattaa

SEQ ID NO: 65544 - DNA, 528 bp, Acinetobacter baumannii
atgaaaattaagcaaattactctttatgttttggcgtgtgctgtgcttgtcggttgtgattcaagaattgatgcagtaaatcaggaaatggccaatattcgtaatcagccgccactccctattgaaccagcaccgatttttactcctgtaccacaatttaattacgctgctcatcaattaaaaagcccatttatgccaagttctcttgctgccgagctcaagattatggcggggaaacgggtttatccgaatttctcacgtgcgccgcaaccactcgaaagttatgcacttgaagctttaaatatgaaagggagcatgcgtaataatcgagggcagatattggccctgatccagacaccagatcagcagattgaacgggtacaagtgggtaactatatgggtatgaatcagggccgtattacccatattagtccaacccagattgatctggttgaaatcgtacctgatggtcgagaaggctatgtcgaaaggccaagaaccttggtcttgattgggcctgcaccctaa

SEQ ID NO: 65545 - DNA, 741 bp, Acinetobacter baumannii; identical to SEQ ID NO: 61632

SEQ ID NO: 65546 - DNA, 642 bp, Acinetobacter baumannii; identical to SEQ ID NO: 61633

SEQ ID NO: 65547 - DNA, 1059 bp, Acinetobacter baumannii; identical to SEQ ID NO: 61634

SEQ ID NO: 65548 - DNA, 2556 bp, Acinetobacter baumannii; identical to SEQ ID NO: 61635

SEQ ID NO: 65549 - DNA, 825 bp, Acinetobacter baumannii; identical to SEQ ID NO: 61636

SEQ ID NO: 65550 - DNA, 333 bp, Acinetobacter baumannii; identical to SEQ ID NO: 61637

SEQ ID NO: 65551 - DNA, 1119 bp, Acinetobacter baumannii; identical to SEQ ID NO: 61638

SEQ ID NO: 65552 - DNA, 1401 bp, Acinetobacter baumannii; identical to SEQ ID NO: 61639

SEQ ID NO: 65553 - DNA, 1500 bp, Acinetobacter baumannii; identical to SEQ ID NO: 61640

SEQ ID NO: 65554 - DNA, 1833 bp, Acinetobacter baumannii; identical to SEQ ID NO: 63801

SEQ ID NO: 65555 - DNA, 333 bp, Acinetobacter baumannii; identical to SEQ ID NO: 61642

SEQ ID NO: 65556 - DNA, 372 bp, Acinetobacter baumannii; identical to SEQ ID NO: 63225

SEQ ID NO: 65557 - DNA, 273 bp, Acinetobacter baumannii; identical to SEQ ID NO: 63221

SEQ ID NO: 65558 - DNA, 411 bp, Acinetobacter baumannii; identical to SEQ ID NO: 49191

SEQ ID NO: 65559 - DNA, 1389 bp, Acinetobacter baumannii
atgctaaagaaatgtgttttttcattggtctatctcttgccaattcaattatacgctgctcaggttgatgtattgcgtgaacaagctattcaaaattatagagcaggacaaactcaacaagctgtatctcaactagatcaattgctaaataaatacccgcatgatcaaaagctgcttgctgattatctgtttattatgtcaagtgaaaaaagggatcttacaaatttttcacggtttttggtaaatattaattatgtagactttccagaatatgcaaagttacctttaattcaaaatttccgtgattttaagcattttaaaactgcaattgactggtcaaataagttcaatattcaaaagtcagttgatggccgtattttattatcggttttgtatgctgaagctcaagatgtggcgaatgctaaagatcagttgtcgaagatcgatattaaaggtttaactgctgatcagttggtacgggttgcatatgcttatcgtttaataaatttaccagtagatgctttagctacagttgagcatgcttatcaacaacaaccaaaatcttcatccgttttacaagaatatgtttacgatctaattgctattggctcatataaaaaggcacagcaattgctgcaagcgagcgaaaaaactgaacaaacagtgcaaatgttgcagactttacaagttagtgagttttctcaacatatcaacaatgcaattgctcgatataaatatttaaatcgtgaaggactagccgatgccgaaagctttgctgaattagataaagtgctggagcaaggacaaaaaatacatcagcaaatgaatccttccgatcctaattacttacggttttattacgattatttatatggattagattttagagggcgttcaaaagcagttatagagaatttcacccagttgaatattccactcgaaaaattaccggcatatgtacgtcatgcaattgctgatagttatttggcggggcaaaaaccgaaaaaggccgagtttgcttataaaacgcttttaaccgaaaagaattatccggatatgaccgtttatacgggactgtattattcttatattgaacaagaaaaatataaggaagctgaacaacttctcgctgaagttgatcggcttattccaacttataaatatagtcaggctaagggtgtagataaaatcagccatcctgatcgtgatgattatattgctttacaaggaatgcatttagcctacgctaatcatctggatcaagctgaaaagcattttcaaaaaaaagtagagcaggcgcctgcgaatgagagcctgattaataatcttgcgcgtgtagaacgttggagagaaaaaccgctagaggcaaaaaaacaatttcccggttaa

SEQ ID NO: 65560 - DNA, 1887 bp, Acinetobacter baumannii
atgagcgatatgcattcccctacttctcaagtagcggctctgattagccgaggcaaagaacaaggttacttaacttacgctgaggttaacgatcatctgccggactcgattactgaaagcgaacagattgaagacatcatccagatgcttcaagacgttggtattcctgtacacgagcgtgcacctgaatctgacgataccatgttcggcgaatcagctgatgcaactgatgaagttgctgaagaagaagctgctgccgtacttgcatctgttgaaaatgagcctggacgtacgacagaccctgtacgtatgtacatgcgtgaaatgggtacagtagaactgttaacccgtgaaggtgaaatcagcattgctaaacgtattgaagaaggcattcgtgatgtcttgaactcaatcgcttactggccaaatgctgttgaagttgtattaaaagaatataatgattttttaactggcgaacgccgtcttgccgatatcttatctggttatttagaccctgaaactgatgaagatattcctgaagttttagaagatgttgaagagcttgaggaagaagacgaatcatctacaaagtcaacgaaagaagttaagcttgatgatgacgatgaagaagaagagtctgaaggtgatgatgattctgaaggtgattcaggtccagaccctgaagttgcaaaagttcgttttgctgaattagaagctgcatgggctcaaactaaagctgtcatcgaaaaacatggccgtaatagccctgaagcaaatgaagctcttgagtctttagcaactgtatttatgatgtttaaatttactccacgtttatttgacatcatttcagaaatgattcgcggaactcatgaacaaattcgtgccaatgaacgtgaaattatgcgttatgcagtacgtcgtggtcgtatggatcgtaaccagttccgtacatctttcccgaaacaggaatctaatcctgcttggttagatgaacaaattgctaaagctccagctgaaatcaaggctcacttggaaaaagttcgtcctgatgttttagccttccagcaaaaaattgcagatatcgaaaaagagcttggcctaaacgttagtgaaattaaagatatttctaaacgtatggcaattggtgaagccaaagctcgtcgtgcgaaaaaagaaatggtagaggccaaccttcgtttggtaatttcgattgcgaaaaaatataccaaccgtggtttacagttccttgacttgattcaagaagggaacattggtttgatgaaagccgtagacaagtttgaatatcgtcgtggttataaattctcgacttatgcgacttggtggattcgtcaggcaattacccgttctattgccgatcaggcccgtacaattcgtattcctgtacacatgattgaaacgattaacaaaattaaccgtgtatcgcgtcaattattacaggaaatgggccgtgaacctactcctgaagagttaggcgaacgcttagaaatggatgaggttaaagttcgtaaagttcttaaaattgcgaaagagccaatttcaatggaaactccaatcggtgatgatgaagattcgcatcttggcgatttcattgaagaccagaacatcacttctccaattgatgctgcgacttcagaaggcttaaaagaagcaactcgtgaagttttagaaaacttaactgaacgtgaagcaaaagtattgaagatgcgttttggtattgatatgccaaccgatcatactttagaagaagtaggtaagcagtttgatgtaacacgtgagcgtattcgtcagattgaagcgaaagcattgcgtaaattacgtcacccttctcgttctgaacacttgcgttctttcctagagaatgactaa

SEQ ID NO: 65561 - DNA, 636 bp, Acinetobacter baumannii; identical to SEQ ID NO: 53829

SEQ ID NO: 65562 - DNA, 1122 bp, Acinetobacter baumannii
atggcgttaccgattattactgctgaccaaactttattggttcaagcaattattgtgtacctatacgctgatccgggtttaggtaaatcatcgatgggctttactgcggaaaaagcaatttcttttgactttgaccgtggtgctcaccgtactggtgaattacgtcgtggtgcggttgtacaggttcaacaatggagtgatgttgcaaaccttactccgcaggacttagcaccatataaaaccgtagtcattgataccgtgggtgcaatgcttgaatgcattaaaacccacctgttacttacggcaaataaccgtcaaaaagatggttctttaaagttaaaggctcaaggtttagcgaaccaaacgttcaagcaatacatcaatactttgatcagtttaggtaaagatgttgttttcattgcacacgcatcagaagatcaaaacggtgatcaaattatttaccgaccagatctaggtggtaaaaaccgcaacgagctttaccgtatcgcagatgtcatgggttatctaacaactgttactactggtgaaggtaaaaatgcccgcgttattaatttcaaaccttcgcctacacatcatgcgaaaaactctggtgctttaggcggtgaaaccggtgaagtatgggtacctgatcttaaagcacaccctactttcttggctgacctgattactcaagctaaagatcacattaacaccttaacgcctgcacaacttgcagcagctaaagcccaagaagagctagaaaactggaaacaaagctgtgaagaagctgagcatgcaggtgaccttaatcaattaactgagtcgcttgataaagaacacatgtattaccagaacatgcgacaagcaatgttaatgagagctaaagcattgaattgcacgtttgataagcaacgtggcacttggattagtccaccagaatttaacggtatctcagatcaacaaagagatgaacttcaaaactttattgctgaacgtggcctcgatgtaaaaacagtttgtgagcatttaggtatcgatgcccttattcaaattgaagctgcaaagctaccagcagtgaaacaagaaattgaaaccttagcgaaaacggggatgacagcatga

SEQ ID NO: 65563 - DNA, 345 bp, Acinetobacter baumannii; identical to SEQ ID NO: 51456

SEQ ID NO: 65564 - DNA, 153 bp, Acinetobacter baumannii
atgccaaatcaatttgaaacacatacttcagatgcgggaactactattcatttaaaaatgaacggtgagcttatagaaaatctaatagctttggactgtatagcgataactttgtttgacattgtatttgtactgtctcttatacacatctga

SEQ ID NO: 65565 - DNA, 783 bp, Acinetobacter baumannii
atgagcactcttcaagagcgaatgtctttagctataaagcactatgaatctgagacaggtaaaagattcaaaaatactgagttggctagatttgcgggcgtgagcagagctaatgttgggttgtgggtaaacggcccaacccaagagttagaggggtcaaatttagttaaagctgccgaattcttaggggtttctaaagattggctagctggtcaaagcaataaaatgattgccacacaattggatagtggtggtgcacaattaaatgttcttgatattgaagcctttaagcagaagtacaatattccagatagtgaagaagctgttaaatttgtccaaacaccaactaagccattccctattcaaaaaagatatgtccctgttaaagcctattcaaagatgggtatggatgggtatttcacagatatgggatatgatgggaacgcaggtgatggatatgttccaactcatacagcgggtccaagagcctatggtattaaaggcactggcgactcaatgtttccagcaattcggaacggttggtatgtagtttgcgatccagatgctgaaccagttccaactgaatttgtacaagtgtgcttaaaggatggacgctgcacaattaaggaatttgttggaataaatggtggggttttgagtttgttggctgttaatggtggcgaacgcctatcttttgacatggatgaagttgaaagtattaccgctattacagatatcgtgccgccaagtcagcacagacaagaacatccttattcgcattaa

SEQ ID NO: 65566 - DNA, 1866 bp, Acinetobacter baumannii
atggttaatttaaataacgcaaaaaaagataatttttcacggaagaccatattagtaacaggtgcagcaggttttattggcagcagattgatcgttgaacttctgcgtgaaggtcatcaggtgattgctgcgctgcgtaatgccgcaaccaagaaaaataagctattaggtttcattgcaacagaaggactggtcgatccgtctatttcgtttgtcgaatatgatttaagccgcgattttaagctggactctctattatcggacgcccagacaaaaatccatgtaatttatcatctcgcagcatcatttaattggggcattagcaaagctgaagctgagcgtaccaatattaagtcagggctggcgttgattgaatgggctgcaacattgaagcagcttgagcgatttatctggattggcgggtatcgtgtggctgcgccgccgcaagaatcggctgatgaattgtattgcaaacatggtggttatgaggcttcaaaaattctagggcatcaagctttcattgaggcctgtaagcgtttaaatgtgccatggactgcaataaatccggcgacagtcattgatggtttttataattatggcgatatgcaatatatcggtattgcggacatgattgataagctctatcagggacgtttactggcattacctggtggtcgtgacacattcctacctctatgcaatatgcagtatattgtgagctttctgatccgaacgatatcttatcctgagaccattgctcaggagtatatgctgcttgatcctgcgacacccaaatttcatcgcctagttcacctagctgctgagcatttgggagttagctcaccacatttacaaatacctaaagttttgctcgagaaattaccagaggtattacttgacggttctaaagagcaactttctttcatttctaccgagcactaccatgttgctggggcagaggcgatggcggcgaagatgggcatcgcagacctgatcagtatcatgccttatttttctcgctggattgatcgcttggtgttgacacgttttggtcgtatgcaagtaccaacacctaattcttttagctatcagaatcgatattggacagaaatctatactaagcagccagttggttcagaaaaagcttctgcattatttttacacggtattccatttgatagtgcatgttggtctccaatcatcaataaaattacttatgatcaggtcgctatgatggacttaccgggacttgggcgttcaggtagttatgaaatgatggaagataataaccatcaatttattgatactgcggcagagcttttggcaccaaatagtgtggtgattgcccactcattaggatgtctttttgcattaaatcttgcaaagaaatatccagataaagttgcacgccttatccttatatcgccttattttgttcaggcacaggctgcaaaaatgtttcagatacaagcgatatctaaactcattttccgttttgtgccgaaagatgtgattgctaaagatttacatccagaggggcaacaaaatctgtcagtgagatatgcgatggattcactacgccgcatgtcagtgtctaagcatattagtgagtacatgcaccacattaatttgccgcagcagcgcgcagcacagacagctttgctttctgagcttcgatctaaaatcgagattattgtgggagagaaagatccaattgttaccccaatcagtccagatatcccggtacatatcatcgctggcgcaggtcataatccacacgttacccatgtagaagcggtttatgattaccttacaccggttctgacaaagtacatcagcactacagcacagcttagtgatgtctga

SEQ ID NO: 65567 - DNA, 357 bp, Acinetobacter baumannii
atggatgctaaagattttaaagtcggggataaggttgtttttaaatatgcatcaatgtctaaagagcttatgactattgagtgtgtctcattagatggttcttgtgtggatgtaattgaaaacaaatatccgttgttggcagaaaccttatgttttgcaagtaaagaagaaatagcagcaggccaccgaattgatgaagtggtgcctgtttatgccaatccccaatttgcctacaccatgttatctggtgcacaagttggttcagtgcttcagatcgcgcgtcaagtggatgacatgggtgacgatagcaatttacagcatcacccttcacccttctgtgaggtgcgtgacgtatga

SEQ ID NO: 65568 - DNA, 153 bp, Acinetobacter baumannii
atggttcgcaagaacaaagatggttctgcgaaaaaatctggtacaaagcgtatttggcaaatggatgaaagtgaaaaaccgcgtcgtaagactaacggtacaacgcgtccaaataccaaagcaccacgtggtcgtagccgcaatagccgataa

SEQ ID NO: 65569 - DNA, 261 bp, Acinetobacter baumannii
atgaaagatataaatatcaaagaagcaatatttaatataaaacagttaatagtaaattctgttttgttaataatattaagtctaataggtatttttttattatgccttttagtaaaatttcaatatttttcacctacattaaatataatcctctatttgataatttttctagcaagcgctacaggttttactgtaggtatgaacaatttactaaaacttctacgactaatagttcgtcaagaaacaaaggctaaaaactaa

SEQ ID NO: 65570 - DNA, 405 bp, Acinetobacter baumannii
atgaataatactcaatcagcagcaatgccacttgttgaaaatgaagaagttaatcttttggattcgattgttgaacaaagccgtattgcacgaaatgaagaagaacattctcgtgctaaaagcttaattggtgagctcgctaaagaagtaatggcagggaccattactgtttctgaaaatatgactttatcaatcgataagcgtattgcagaaattgatgctctgatttcaaagcagttaagtcagatcatgcacaatgaacaattccaaaaaattgagtcaacttggcgtggtctttattacttttgtcaggaaacgccttcaaatccgctcattaaaattcgtatgctcaatacgactaagaaagagttggtaaaagatttcccaaggtgctacagactttga

SEQ ID NO: 65571 - DNA, 291 bp, Acinetobacter baumannii
atgctaatggcagcctataaaatggtaaatcgtttaaaagagcaaggccataatgcactttttgaacaagcgtatatgtctgagttaaaaaaactcattacgtttcgagccgaatttcaaaccacaggttttttctatccggaaatagccatgtatatggctcgaccagataaaatattgcatgctttttatgtacggcatgaccgctttagagtaagaattgatgatcaggaacacaacctttctggttatattgcctacgtaaaagatttcgaaggaggggagatatga

SEQ ID NO: 65572 - DNA, 390 bp, Acinetobacter baumannii
atggtattaatgatgaatagttatcaagatcttgatattaatttaataaaacctgatcctgaacagccaagaaaaatatttgaagatgattcattaactgatctaagcaatagtattaaggcaacaggtgttaaacagcctattacagtacgtaaagttaataatgagtatatgatcattgcaggggagagacgttatagagcttcaatccttgcaaataaaacgactattcctgccgttattattggtgatgaaagccaattaacagaagaagctttatatgctcatcaattaaatgaaaatcttcatcgtgaagatttaaacccaattgaaaaagcagagttcattaataaaagaattgaatacctcaaaaaaacaggggcagagtaa

SEQ ID NO: 65573 - DNA, 390 bp, Acinetobacter baumannii
atgaagttatctaagtacaaacaccaagtaaagctatctaagtacaaatgccaagtaaagctatctaagtacaaataccaagtaaagctatctaagtacaaatgccaagtaaagctatctaagtacaaataccaagtaaagctatctaagtacaaatgccaagtaaagctatctaagtacaaataccaagtaaagctatctaagtacaaatgccaagtaaagctatctaagtacaaataccaagtaaagctatctaagtacaaatgccaagtaaagctatctaagtacaaataccaagtaaagctatctaagtacaaataccaagtaaagctatctaagtacaaacaccaagtaaagctatctaggtacaatcgccaagttattttataa

SEQ ID NO: 65574 - DNA, 486 bp, Acinetobacter baumannii
atgaaaattaaattatctatctttgcattattatggcttatcttttatttgctattttattggtttgttctttcaccttttacaaatgaagttaaaagtgaaggtttatttcattatgctcttggaaattcatcattttcaagaattgaagttgtatgtgcaataacgccattcttaggttttttagttgtaggtttcctagctactagaaattacttcagactgcttgaaaaacttcaattttttaaagatcttgaagctttaactgtagcatggagacatacgttaacatttcatctagttgtatccttctgtttaattcttacagttggtacattttgttatgctgtttatgatgaaggcttaaattatatttataattcttttgtgattttaataatttacatcgttacattagttctaggtttatggaaaataaaaaaatcccttgatgctaccagagtagaaattattaattttttctaa

SEQ ID NO: 65575 - DNA, 444 bp, Acinetobacter baumannii
atgagttatcaccatattttagttccggtcgatggttctcctacttcacttattgctgttaatcatgctgcaagtcttgctaaagcctttagtagtaaagttactttggtatatgcgctcactattgatccatttatttcagttgaaattattgatagtacagaaattgcgcaagattattttaataaagcgagagcttcgattcagagcattttagatcaagctaaagaacaatttagccaacatggaatttctgttgaaaccaaaattgttgaaggtcaaacaattcatacagaaatcatcaaagcagcaactgagctaaaagctgatttattagtgattggttctcatgggcgaaaaggttttaaaaagttcttcttaggaagtgtaactcaagcactcttaggagaaattcatgtgccagtattggtcgtaactgaataa

SEQ ID NO: 65576 - DNA, 279 bp, Acinetobacter baumannii; identical to SEQ ID NO: 53640

SEQ ID NO: 65577 - DNA, 465 bp, Acinetobacter baumannii; identical to SEQ ID NO: 52871

SEQ ID NO: 65578 - DNA, 345 bp, Acinetobacter baumannii
ttggaaaaatttgctgaaattttgagaaagagagctaaagaaaaaagtcaacatcaatgtgcaaagtatgtaagaattgcattagaggcaggaggagccgacacttcaggacatcctgtcgcagcatcagattgggggccaactctcaaaaaaataggttataaagaaatacctgaagagtttaataaacctcaattaggtgatatttatatcatcaccaaaactgataagcatcaatatggccatattgcaggctatgatggtagccaatggatttctgattttaaacaaaaaggtcatagaatttatagcgatcatgttaactacagatattttagaatgtaa

SEQ ID NO: 65579 - DNA, 141 bp, Acinetobacter baumannii
atgaaagagaatgaggaatataaacgggatggtaaaaaagttattagacaaggatttaaaaatggttcaactaaagtttgggaggttgaacaagaaattaaaaaacatttaaccgaaggtataaaaagctcagaaaattaa

SEQ ID NO: 65580 - DNA, 345 bp, Acinetobacter baumannii; identical to SEQ ID NO: 65578

SEQ ID NO: 65581 - DNA, 552 bp, Acinetobacter baumannii
atgtttccgcgctgtcttttgagtcttaacatatttgatgagtttaggtttcggcctgggaccgacaaagacggttattatcaaggtaacccagaatatgcacattatcctttatttgaagatgtccttgatgattttggagtgacggaggaagagcgccggagttatcaaccaacagaaattgcacatcaggtgagagagtttctagaaaattcctataaagactataaagccgtttctgctttattagctgtagctgaagaagaagttattttgtacagtccacctttacgaaaagcaaccagtgctgtaggtatagcggtcgagggtggtggctattaccatgtgcatggagtatctgaagatgaaactgctgaggcagcagatgacgatcatgaagaagatctatggtttattttaatgcaagcttgtacagaagaagactacacttatttagaaaacctatgcctcgaatattgtgatttatgggaaaagttttgggatgttcaaatagaaagctcaaaatcaacccttaaacaaaatttagcttaa

SEQ ID NO: 65582 - DNA, 825 bp, Acinetobacter baumannii
atgaattatttggtggaatcgccaaaaccacgatatgtacctttcgaaccaaactctgcgattattgcccgttatgctcgtggtcgtgattaccataaggtgatgcgtggcagattaaaaacgttagccacacgtatccgtgaaaaagtgggagattttgaatctcgcccttttgcagactcggcacctatttttgagaaatcattagctgaaagtgctgggatgggctggacaggtaaacatactttactcattcataaaaagtcaggttcattctttgtcttaggtgaactatttacatcacttgacttaccttttgatgaacctgctacttctcactgcggttcttgtagtgcgtgtattgatatttgcccgacacaagcgattgtcgaaccttatatgttagatgctagacgctgtatcgcttatctcaccatcgaatataaaggaatcattgcagaagaattacgtgcaggcattggtaaccggatatttggttgtgatgactgccaattaatttgcccgtggaatagttttgctaaaacagcgtctattcccgatttcaatcctagacatggtttagataatattagtctgcttgatatttggcagtgggacggagctacttttttagccaatacagaaggcagcccaatacgacgtacaggttatcaatccttcaaacgtaatattgctatcggtttaggtaacgcaccgtactcaaaagaaattgtagatcagctaaacaaaggcaaaagtttacatgacgaaatcgtcaatgtgcatattgattgggcaattgaacagcaacttaatcaactttag

SEQ ID NO: 65583 - DNA, 207 bp, Acinetobacter baumannii
atgtggtcagatattgagtcaaaacaggattttttaaattactcagaagcttcagaaattgtagttaatgttttaagtaatcctgcaatgttaccgatttcaataggtgtatttggttcctggggtacaggaaagtcaacaatattaaatttgattgaacaaaagctacaagcagaaaaaaaagaagattatatcctggcagagtaa

SEQ ID NO: 65584 - DNA, 402 bp, Acinetobacter baumannii
atgaatactcaggtagataaaattaaagaagaatttgctaaaagacttaaacaagcaatggattcgaaaaattacccgttgcgtgggagagcaagaattctgagtaaagaatttgatatatctgataaagcagccagtaaatggctaaatggtgaagctattccggagacttcgaagatccctattctagctagatttttagatactacttcagaatggcttctttctggcgaaatgccagctaaagatgaaactacttatttgaatgaaagagttgaagatgatcttaataaagtgtgtgaaaaatttattaatgactttaattcagctttaaaaaataaaaagctaactttagaaattgtaaaaactttaaatcaaaatttaaatttaatgactaaatag

SEQ ID NO: 65585 - DNA, 882 bp, Acinetobacter baumannii
atgagtaattttgtaccaaattcctttcaagtacctaatgcatttgtcgatgaggttttaaataaaatctctgatgctgcatgcaaaatttacttggttatttgccgtaaaactcgcggttggaataaggagatggattccatctctttatctcaatttgaagagattacagggaagagtagaccgacagttgttaagtgccttaatgaattaattaaggtcggtttagtcgtggaacaaccgagcactattcacggaaatacattcaaattaggtaacgatactagtgtaggtttggttattaaatttcctagtaaaaaatttttactacctgagatttatggccaaactagtaaaaattctttaccactgctagttaaaaattttaactacactagtaaaaattttttaccgctactagtaaaaatttttaacacacaaagtatcactatcaaaaacaactctcaaagtaataaaaaaataaataaaaaaagagagtcagtttctgaaaaacctaaatcagaaaaaccaagtgaatttaatccacgttcagttgaactacctgcatgtgtagatccagagctgtggaacaattttgttgatatgcgaatcagcatcaaaaaaccactttctgaaaatgcagtgaagctaatccttaaaaaacttatctcatttggtcctttggctaaccaatcacttgagaactcaattatcggaaattatcagggtgtatttgaacctcgccaaaatcaaattcaggaaaacccacaatcacataacgttcctgaagaaccgggttatttcactcaaatgtacgctgaaagcaaccgttcaaacgtgattgacgttacaccagtgtcacaagattttggaggctattaa

SEQ ID NO: 65586 - DNA, 486 bp, Acinetobacter baumannii
atgagcgattatcgtgttgatactcaggtcaattttgatgagatgaataatcgcgttaggtttgaaataagacgcacgattaacgctcttactggtcggctgcaccgtactgtaaatagaaatctactttctggggatccatatcttaatgcagatactgggcgactccatcaatctacctttggcaaggttgaggaaggtaaggactttattgaaggtactgtaggggctggtggagcgaatgtcagatacttatttactcatgaatttggactacatggcaccttaggtgtaaaagcacatctaaggacaattaagcaagcttttggtaggtctatatctccaaagcaggtggctattaaagctcattctagagttgttaactttagagagcgccggatgttgcgtgatgcattggacgaggtcggtaaaattgtgccgaaaaatattgatgcagcaattcagcgaggtttagcaggtggatag

SEQ ID NO: 65587 - DNA, 306 bp, Acinetobacter baumannii
atgactcaaacaaaattttgttatgcctgtggccaacaaattgatgttcgtgcagagatttgccctaaatgtggtgtaagacagcaagatgttaaaactacggggcaaaaaagtaagatagttgcgggtatttttgctttgcttttaggtttttttggggcacataaattttacttgggtaaagttggccaaggtattctttaccttattttctgctggacttttattcctgcaattatttccttttttgaaggaataatttatctgtgcacatcggatgaagattttgccaaaaaatatggctaa

SEQ ID NO: 65588 - DNA, 654 bp, Acinetobacter baumannii
ttgtcagatattttatacccagaattacccggtttagagtgggacttgtcaaagagtcccatttttaataccaaaattatgacatccataaatggtcgtgaattacgggcaagttatcaggctgtacccaagtatgaaatttcaatgtcctatgcattcttacgggaaaacaaaggaagaaaagagtttcaacagttagagggtttctttttagagcgccgtggtgcttttgattcgtttcttttcaaaatgccagatgattttgagtttaactgcacctttacaggcgatggtataacgacatcttttcagctttataaaaccctctataccagtcagattccattaaataatactgaagccaagatcattggaaatgttgatcccaacatgtggaataagttggccagtaaaaatatgtggagcacaaacactgaaaaacttatgtggagtaaggcaacagcacaaattactccagatggtaagtatgaagtttccgaaccgattgaagaaggtatcgaagtcactgtttcaggaacattctattatcgatgccgctttaaagatgatgagcaagagtttgtcaactttatggacaagttgtggaaagccggaaaggttgaattgattggttcactaggaaataagatatga

SEQ ID NO: 65589 - DNA, 1893 bp, Acinetobacter baumannii
atggcagttccagataaaaatgccttaatcgggcctacggtaacagaggcacaatttaaaacaaatctaggtgcgattgtagatttcattaagcctattgaatctcaaatccctacatatgcaactaccaatgcgttgacagtaactagacctgaggtaaatcaaacttatgcaaaagctttagatactggcaaagtttggttatggaataagccagatggctcaccacagggtaattattgggtagttacagatttgagtgattttgatcaatcaaaaaattactccagatctttacttccaattactgccattgggaatatgtatgatagaaatttagataaaaatggtttctttgttaacttatctaatggagaaattagagcggcgtcaaacaccgccttaacagttattgaagtaaaatctggacagacttatgcaattaaagcgagctcattttctccaaactggttctgcgctggtgttaagtctgatagtgcattaagtggtatctcaacaaaattaacacttacagatacaagtgaagcgaatgttaagttgataaccattccatcggggccaacttctcagttcctatttttgaatacttatcttcaggctggaacttttgatattcgcaactcgttagtcataaatgaaggcgataagattacttctacagatccattaaaaaagatcatcaaggaagcaaataatgcagccatttatgatgaagatgcccaagaaaagatagcagacctacaaggttcaactattaaaaaaccagatttagaaacctcttcaaaaaatatttatgaagatgcggtaatttacgaaaacttttacgttaatccggcaacaaataaaattggtactgctaccggcactccatatgtgccaactgctttggctgttatgcaggtagttgctggtaagacatactttatttacagtcctagctatcatcaatattcattttcagcgacattaagtgattcagatacagtatttgcgactaaggaaaataccgcaatcacactcgtagatacagaatacgcaaatgttaagtcctttacatttactgatgtaaatcttaagtatttatttattaatactgaggtaagttcgcagggattcaatattaggaattctttacgtgtgctcgctgatgtctacagtgataattattatctctacaaaattaaaggtgcttccccatacgatgctgaagcacatgatcgtttagataaaattgatagccgtctagcaaataaactatgggtaggagtaggtgactcaatcactgagcataacttccgaacaaacaagaattaccatgactatattcgtgaacgagttactaatctaagtttttcgaattatggtaaatctggttcaggttattttgatcgtttcaacgttgctgacacaattactgaaattgaaccagatttaatatcagtattttggggaacaaatgattgggaatatgccaataagccccttggaaattttctagataacactgatagctctatgtctggatgcataaacattgcactaactggcctaatcaataaatttcctaaatcgacaattgtagtttttgctccattacctcggttgaataactggggagaaacaggaaccaacaatagtaacaactatgatttacttgacttagttttacttattaaaagatatgctgagcactactcactaccttttctcgatctatatcatgaatctaacttacctgtttggacaactgaaggtaatagaatttactttacggcaccaagtcgtccagatcctgatgggctgcatccaaatgacgcgggtcatttaaagatttcgtggagaatacagaaattccttgagtcttatttatag

SEQ ID NO: 65590 - DNA, 903 bp, Acinetobacter baumannii
atggaaggcagcctttcaacacatgagcgattggcagaacggttagttaaaattattgttaaattaaactcaggtgaaaaactgagcgtacatgagttggcgcaagaatttaagacccacccacgtactataaagcgtgattttgagcgtttggaaattacagagttaccgattgtacgtgatgaagtgactaagcgagtttatttaaatccgatggctttaggtaactatggtatgcaagacattgtccattttgcacagttgtctggtgtgcaaaagttatacccgaaattgaatgttccttttttacgtgggcttttggatcaacagaagccacaggtttatgcagcaaaaggttataccttcgaagatacatcactttttacagagcactttcaacaattaaatactgctatacgacagagacaacaagtccagtttctttataaaaatgtgattagacatgttctaccatatcgggtgattcatcatcatggtagttggtatttggcagctactgagcaagaagaactcaaaacgtatcgattaagccgcattagccatatcagtatatctcaagaccttatctttgagcatgatgctgatgtaatacagcatttggacaatgaagacagtatttggtttggttcagaaaaaacagaagtcattttaactgttcaagctgatgttgcgatgtattttttacaacgtgcattgctgccagagcaacaggtgattaaacagttggaagatggtgggttattgatttctactcaaattagccattaccagcaaattttacctttagttcgttattggattccacatgtaaagattgtgaatcctgttaggttacaggaagaattggaagaggaactgaggggatatttgaattttatttaa

SEQ ID NO: 65591 - DNA, 930 bp, Acinetobacter baumannii
atgccattaccagtaattttatggggtgcagctgctgcacttggagcgactggagtttttaaaggggctaaagccataggaaatttaaaagaagccaaagaaataggcaacgatgcagaaagtaaatatggcttagcacttgataaattagagaagaaaaaggaaaagacgaatagtgcgttagaagaattagggcgtcttaagttaaatatttttactcaccaaattaaacatacgattgatgtcataaaaaaatctaaagatgctggtggaaagttggaaaattttgaatcatctatttctatagatgagcttaaagaaatggaagcaatggttcttaactctttaaaacttgaagcaggattattagctggaacaacaggaggtgctttagcaggtttgggagcatatagtagtgttggtttattagcatcagcgtcaacaggtactgctatatcaggcctttcaggtgttgcagcaacaaatgcgactttagcttggcttggtggtggttctttagctagcggtggttttggaatggcaggtggaatggttgctttagggggaattgtcgctggccctgccttagcaataggtggctttatgttagcaagtaaagcagaagaggcactaaccaaagctatagagtatgcagccgaagttgatgaggccgttgaagaactagatctgttgggtactgttctgaaagggattcaaaagaacgtcaaggaggttacttatacgttaaatgaattggttcaaagatttgagagtatgaaggttaatgatgattcagatccacaagcatttaaacagatgatagcaaatactaaaatcttaaaagatttattggattgtagaattatagatgaagaaggttcacctattaaaaatattaagcatacctgccaaggttttttaaaaatttaa

SEQ ID NO: 65592 - DNA, 1695 bp, Acinetobacter baumannii
atgggtaaaaatatcagtggtgcagaatatcctctatcgaaaatatttagttccgattttgattatgtcataccgtcttatcaacggccttatgcatggacaatagatcaggcatctgaattgtttgatgatttatatgatttttatatgctaggaaaagaggaaacgtactttcttggcagcattgttttaattaagaatgagagtatcccatttgctgaagttattgatgggcagcaacgtttaacgacgttaacgattcttttagcactaataacatcctatttttctgatgatttgcgtactgattttgcaagttatattcgagaaccaggaaaagcctctcaaggactgaagcctaagccaagattgacactcagagaaagagatagtgtattttttacaaaatacgttcaatcttttgattttgatgcactcttgtctattgaaccacagacgcttgataatgaatcccaaaagaatattcaagcgaatagtcgtttactcaaagataagttacagactgctttacacggagatgttgagcaattgtgtcgtttcggggcattccttgtccaacgatgttttttagttgttgtgtctactccaagtcaagaatcggccttccgagtattttctgtattaaataatcgggggttagacttacttccttcagatattatcaaagcggagattattggcagagttgctcctgaacgacaagatgagtttactgagaaatgggaggagttagaagttcgaacaggtagaaatgggtttaatgatctatttggacatatacgtatgatttatgccaaagtcaaggccaagcgtgctttacttgaagagtttaaagaacatgtaatgaatcaagtctctacacctgaatatttaattgaaaaaattctagagccttatgcagagtcatacctcattgctaagtcacaagcatatatgtcaatgaaacatgctgaagaaattaattatctattgcgatggttgaatcgaattgataattcagactggttgccagtagcaatactatttcttgcacaacagaaggatcaaccagagtatgtattatggttctttacaaaacttgagcggttagcagcctatcttcatatttgtgcaaaaaatgttaatcagaggatagaacgttacgctgaggttctttcttcattgcatcatcctcattctttggataagccgtcacttcatattgaattgactgccacagaaattgcagaaatgaaaaatgttctgaatggcaaaatctacgaactcacagcacggcgtcgaaattatattattttgcgactagattcatttctatcagatggtgccgcaacctatgatccagctttactgacaattgagcatgttctgccgcaaacagtaggtgagggaagcgagtgggctacattatggcctgatattgaagatagaaaagattgggttcatcgaatagctaatttagttcctttaactcaaaagcggaattcgaaagcccaaaattttgattttgatactaagaaagctgcatatttcggtggtaagcgaggagtatcttcatatattttaacgactcaggtacttaaaactaatgagtggagtcctgcactagttaagcaaagacaaagtgatttacttgagattatggtagataaatggagtctgagagcaagcagctaa

SEQ ID NO: 65593 - DNA, 1773 bp, Acinetobacter baumannii
atgagccaaccacatgaacttgaattgctatgcaacgagttagagtcaaagtttcaagaacatattgttggtgtgggttcttcggaagataaggtgaaaagtaatttttttaccaaggcattgtgtgcatattttttatattcgtatgctgatactgacatagaccaagcagttaagagtattgttgatggccgtgaagataatggtattgatgcaatacatgtcgattcagataacacaatttggttgttacaatcgaaatatataaaaaatggtaatcaagaaccagatttaggtgatgtcactaaatttacaaaaaatggtgtgattgatttgcttagtatgaagtttgaacgctttggtactatttcagcagaattaagaagccaaattgaacatgctttcgagcagtcgaacgtgcaagttaaatgtgtgctagtacatacagggaatgtgttacacgaagatagaacgagacagtttgcagatattgaaaaggattacaacgatgatagccgccctgaatatataaaattccatgattttggcctgcaaaaaatgatcaatttatttttgcagcagagaaatcaaactgaaattaacgaaccaaatattgtgttagagaattttgggaaaaagacacaaccctatattgcttattatggagttatggatgcgaaagatttatgtgcattaggtcgtagatatggagagcaattagttgatcgaaacattcgtgtatataaaggatcaacgaaagtaaataaagaaattgagcatacgctagcaaatgatatagatcatttcttttactttaataacggtataacttttttatgtactgacattagagaaaagccaccaattagtagaaataagacagaaggaagatttgatgttaaagggctttctgtaattaatggtgctcaaactgttggtacaatagcatcaaagcaagagtcgttctatcaaggtaagaacataaaagtcttagctacatttattaaattagacgatttaaattcatcggtttcgcaaaaaattacagagtatcgaaatttacagaacaatgtggatttaaaggacttttcatcattggatgaaaggcaacaacgatggtcagaaattttaaagatttcaaacctgaattatatcattaagagctcgtcaggaaacgtggcattaacagatacacttttaacactaaaggaagtagctcgctatttggcatgttcttattcaggtagaaattccccaaattttatcgtcgccgcaaacagtagtgttgataagttgttgaaaagtccgttatcgaagaaacgtaaacgagaagatgaccctctaaaaaatgcttatgatgacttattccatgatagcttaagttcaagtgaattatggaagctaggacaagttgggcgagttacattaaaagctataaaagatagagcatcaactgaggcaaatcttattgataaccaagagctatcatctaaatctatattggaagagggggcatttatgattttgcacctagtgtatattcaaattaagtcacagcttaatttagctacaccgttcttatcttctgatgaacagacgattatttctcagcaaactgatgttattgctgagaaattagtacaagtgattaatgctgaaacttggaataaacaggcatcgagtatttttactaatcttagtgattgtcgtagaattaaaggtttaatgatggctgcattggcggctgctcaaactgcttcagaaggtgtgtaa

SEQ ID NO: 65594 - DNA, 732 bp, Acinetobacter baumannii
atgtctaaaacaaaacttgaactgacttggattggtaaagacaagcgaccacgcctagagccaagaattttacttgaagatccttcgaagtcttatcatgcaaagaataaagttactgaaaatgatgtttttgataataaactaatttttggtgataacttacttgcacttaaagcattagagcgtgaatatgccggtcaggtaaagtgtatttatattgatccaccttataatacaggtaatgcttttgaatactatgatgatggtcttgagaattccatttggttaggtttaatgcaagcaaggctggaattattgaataatttactaaaaaatgatggatttattgcagttcaaattgatgataaacaatatgcacgtttatatttaataatggctgagatttttggtgaagataatttaaaaactatttgtattaaaatgagtgagccgacaggtgtcaagatggcctctattaataagttaggaggcattgctaagctaaaggaatacattattcttgcgggaaaacaagggattagaggtttaactttagagaaaattcctaaaggttcatgggatttcgaatataaaacggtatgcttaggtctaactcaagatgaattgcaatttattaaagatactttagataatgaagaaagaacagagtcagacataaaaaatgttggctattccagaattcgtggagaattgtgcagtttgcgactttaa

SEQ ID NO: 65595 - DNA, 1119 bp, Acinetobacter baumannii
atgtctaagataaattcagctgaaagtatccgtggtttagcatgcctttctgtcgtattttcacatttaatatttactttttatccttatgcccatgaatttgagtcgaacgttccaactatagaattttttgtaaggctttataattcaccttttagttttttatattcaggaaatgctgctgtttttgtattctttgtattaagcggatatgttctaagctatgccattcttaataagaaaaaacatataaataaaaaaatactgtctatgagtgtgaagcgttatccacgccttgcgattcctgctattatctcagttttaatttgctacctagttttccttatagatattgattcttcacatgtttccaattgggctgcaaatgtgggtgcatatgaaggctctattttatatgccttgtatgatggtgctatcagtgcatttctatttggtaagtctcagtacaactgggttttatggactatgcaaattgaattatttggctcatttcttatttttctgctttgctacttaactcagaaatctaaagtagtaacaattattgtagcagcattgatcacaattttagcttttactgtgactttgaaaatgggatttggattttttagctttgtattggggatgctcttttatttgtatggcaaacggatcaattttttagtagctctaccaatgttgttagtaggactctattttgctggcgctcacaataacagtgattcatatcatttaattgcctctgtattgaataccaagacagcaactttattaaatgttttatgtgcccctttaattgtttatagcattttgatgaatgatcaactttcaaaattattagacaataaactgtttggatatttaggaaagttatctttttcaatgtatttattacatatgttgttaatttacatcgttggtattcctattttcaattatttctcaacttatggttttttaataagctcacttatagcttcaattattgtagtatttttaactctcattgcttcaattccgtatagcaactatgttgacgatttatcaataaaatttggtaagtggattgaaagtaaaataatgagaaaaatactataa

SEQ ID NO: 65596 - DNA, 186 bp, Acinetobacter baumannii
atgaatacattcatcgctacaaccaatacaatacagaagccaaggatcaagcttagtaacccagtagtgccaattcttctcaatgttaatacgctcgcaactgtagattctattacagtgaatgggatgcctagcgaagtacctgactttaaaggactaggcagtatggttaagtcctacctctaa

SEQ ID NO: 65597 - DNA, 375 bp, Acinetobacter baumannii
ttggaaagcaacgcttatcttgctcaagaggctgttaaagaagcgcttacttggctcggtactccctaccatcatcaaggacgagtaaaaggtgtgggtgtaggtgtggactgtggaacgttgatctgtgaagtctacgagaaagtagggcttatggatcatctagatccacggccatatccacctgactgtcacatgcaccagatggggcaacgttatttagaattcattttaggtgtatgtgatccggttgatggtccccacaacctggtgccattgttttatatcattttggcaaatgcatcagtcatggtgcatttgtcattgactggccaaaggtcattcacaattatctccatcatggcgcgcttctaa

SEQ ID NO: 65598 - DNA, 162 bp, Acinetobacter baumannii
atgttaactagaatagtattattgataactaccttttcaatttttcttgtaatatatggttatagtaattctgacaatatgtttaccttaattggtgttttacttctgattgcagcatatttagtcaagagtatgatgaaaaacaagatattttataagtga

SEQ ID NO: 65599 - DNA, 1794 bp, Acinetobacter baumannii
atggataaaagagtagatattcagttattaagagcaattgctgtaatttatgtcgttttgtttcatttagaaatagtaggtatagaaagtggtttcttgggtgttgatgtcttttttgtggtgagtggctttttgatggctattctttacaaagaaggagatgctaagaagttttatgaacgcagagctaaacgtttaatacccgcatattttgctacagttattttaactttacttgcttcaatatttatagtgctaccatctgagttaggtcaggtggtaacacaatctatctacagtttagtatttgctaataatattggtttttggatgcaaaactcatattttagtaaatccgattttaacccattgcttcacttatggtctttgggtgtagaaatccagttttacttaattgttccattattagtttggttctttagtaagtctagagcattcttatttttaactctattaggttcttttgctgcatgtgtatttatagtgggaatatctactaaaacatcattctttatgatgccactgcggatgtgggagtttctaattgggtttattgtagcttattaccttacaaataatggtaatgttaaatttgaaaagtatcactgggtaggcttgctaggtttaataaccctctgtgctataccatttatacatgttgatggacagactttaagtaggccacaaggacatccaagtttcattgcattaggagtgtgtattgcaaccggattagtattaggttttggtattccaaaagttcttgaagacaatccaattagtaaatttttagcaaaaattggggactattcatactcaatttatttagttcattttccaataattgttttatatttatatgaacctttttctggaacaatcttatatccgaaagcctattctgataaagctatcttattagtacttatcatttttgcttcaattttgatgcataagcttgtggagacaagacgaattgataaaatggttaaagtctattggttttctttgttttccttagttctactatctggagcagcgaaagttgcaccctcagctttatatagtcaaaaagaacagaacattttcaatggacttgaagatagggcaacttatcgttgtggtaagttatcgcgaattttagatcttaaagctataagttgtaaaattaataaagaggactttagaaactcagttcttttggtaggcaatagtcatgctgactcaatcaaaatgacatttgctaatgttgcagggtcacataaatttaatacttattttttagtatcaaatacacctcttatggataattcagttactccagagatgttggtagctgaggctagaaaacttaaaactgatcaaatagtattgcacttttcaccaaaagcaatttcaaaagatgttattgaacgagttgttttattagctgagaagtcaaaaattgatgttaaatttattttacctgtcccaatttataacgaatcagttccaaagattttgtatgaaaataatttagaagctcagtatgacgttaataaatatctagacaataatcatgaaattattgcggatttggaaagcattaaacataagtataaaaactttagtacatatgaagtgcatcaagtgctatgtcatccgaattgtgtaattagtgatgccgaaaatcacccatattatttcgatgatgatcatttaaacttaactggtgctaatcaacttacatctgttttcgagaaaatctttaaagagagaaataatgttaactag

SEQ ID NO: 65600 - DNA, 840 bp, Acinetobacter baumannii
atgaaagcgatcgacgcaattactcaactcaatccaaataaatgggctgaaactactcccgtagagcgtctatatttattagaagccattcgcaccaacataaaaatatatggtaatgagcttgctgttgcagactataagataaaaaataatattttaggcgcccatctttatccagctccaacttcaaagctagatacaattgtaccaatggttaacactatctcagcagcaattaatctttataagtcgcttattaatcaagaaatactccgccctctaaaagcagaaaaaaacgaagatgatctctttaatatttatgtatttcagcaagaacaaaaaggcaagttaatgtacgctgatcataaagatctattatatgtgacagatcaacgcaagcagatcaatcctatggataagcccgttgacactcttgctgtacttggtacgaataaccacagctcatcattagaaatagtaaaagcaatattttttaaaaactgcactgttgtacataaatctcatcatctcagcgcaggaactgataaagtatggaaaaaaattatgcaaccattgattgaacatggtgcgttaagcttctgtgactctgatcagggtcaagctcttaatttaatatttcaatctgctgatcctcgtttaacaaaaatctcttttattggcgtgagaggaacagccgaagcaattatgctagccaatgatacaccttcgatctctgaatgtgataataacaatacctgcatattgtccctaatattagtgcttggacaaaaaaagaaattgagccttaaattatacgaatcaccacaatatccaaactga

SEQ ID NO: 65601 - DNA, 993 bp, Acinetobacter baumannii
atgactcctgacagtataaaaatttctgatgttttctggattgctcttgataaacttaatatcaatcgctctactttgataaagcaagcggaattacctttagctatagcacacaaaggagcgagaataaaaatagtagacttatttaagctttggcgtgctcttgaacaattaggtggtccagatataggttttcggctagttgctgctattgatagtaacaatatgcctctctcgtcattagttgcctattatgcaaaaaatttgcgcgatgcaatttatcggattgtccgttataaatccctatgtactccagaagaactgaaaattatcgaaactcatgaatatttatcaataaatattgcgtggccattaaaagatgcaatagctcccgatgcattaattgatgtgacaattagtgtattaattggtttagcacaaaaaagtagcgtaacaaaacttcaacctgccaaaattattctcacaagaccaaaatcttctcttattgattcactttatcattgccctgttcagtggaatgcaaaaaagaatgagatctttttttatcaacgagatttggatcttccacttaagcattctaaccaagagttactaaaaattttagataaaacacttcagtcagagcttcatgatttaacctccaaattaactttttctgatcaagtaaaatggttaatacgtaaatccttgacggctggacgtcctgatttacattctgtagcaaaagagataggtataagtgagcgttcattacaacgctatttaaagaatgaaggagtaagttttcagtcattattgtcttcaacaaggcatgagctagcttgtgaatacttaatggataagcgtttgaatcttgctggaattgcatatttgcttggttatgaagaacaagcctctctctttagatcatttcaagaatgggagggtacaacacctaaaaaatggcgtgaactccatttatctaaagtctga

SEQ ID NO: 65602 - DNA, 813 bp, Acinetobacter baumannii
atggataacctgatctcatcaactaagaaagttattaactttcattcttatgtaaaattacccttttctatttattctgcttctcgggaacaaagaattaaaaatgttcctattgcaaagcctttacttatagtaattttaaagggtgttaaagaactgggtaataaaggtgatatagaatgtttttcaggttcttttatatttctttctaatagttcaagtattgatatgcgtaatattccaaatcaagaggaatattatgctcttctcatcgattttgaatttgaagattttaatgaacttcccaggactcccggaagtcctaaagattatattcaaggtcaacttaatcctcttttagaaagtgctttacatcaatttatagacttttcatcaattgccccttcttctgtaattaagtttagaaaaagagaaatactagaacttatttattattcaggatatacagatatttctaatatgaataaaaatataagtttaactgaaaaagttcaatcattaatttctgatcatttatctacagaattaacagttgaattcattgcatctcagctttttatgagttcttccactttaagaagaaaacttaaaaatgaaggaaatagtattcaagatatccgaaatagagtgaggttagggtatgggttacatctaattcaaacttctaatacaaatattggagacatcgcatttcaatgtggttatcaatctcagtctagatttactgaacaatttaaaaatttgtttggaattacccctcgtgaactacgtaaaaccaaaatgctcacttaa

SEQ ID NO: 65603 - DNA, 663 bp, Acinetobacter baumannii
atgaaaaaagtagcagtaattttatctggctgtggttatttagatggttctgaaattagagaatccattttaaccctattagctttagatgcagcaaatattgaatatcaaatttttgcacccgatgaacctttgtttcatgttgtgaatcatgtaaatggtgaagtaaatactgctgaaagcagaaatattttacaagaagcggcaagaattgcccgtggtgaaatttcatcactcgataaactcgatggaaatgaatttgacggtctcctacttccgggtgggtttggagtcgcaaaaaatttatcaacttttgcgtttaaaggtgcagaggcaaatgtacgctctgaaattaatgcaattttaaaaacgttccaccaaagtaagaaacctatcggagcagtatgtatttctcctgcactcttagcgcttgtgtttggaaacttacacccaaatattacattaggctctgacgataatattgctaaagaaattgaaaaaacaggctcgattcaccatgtctgccatacttcagactgtgtagtagataaacaaaatttatttgttactactcctgcctatatggatgataaagctaacttaaaagatatatatcaaggtattacaaagttagttaaagaaatgaaggacctagcacattaa

SEQ ID NO: 65604 - DNA, 738 bp, Acinetobacter baumannii
gtgttaaataatttcttaaatttctatagtaatcgttcgcttcctaattattttataaaaaaacataaagttttttataatcagaatttaaatttatatatgggctattgcgagtttgaatttaaagagtttgacattcaaatgtttaatcaaatgtcaattttttttcctgatagtttaaatccatgtacagtaaaaagaaaaagtgaatttttagcaggacgttatgcttcacagttagtattgtctgccatcaagaaagattactcctatcaaaaagtcgaaattggaaaattcaaagaaccaatttttccattaaatataataggttcaataacacacagtgaaaatattgcaatatgtatagctactcaatcaaaaaatgtaaattttctagggcttgatatagaacctatcatgagtaaattagattttttagcattacacgataaaatttatacttatcaagagttaaaaataatcaaaaatttaggtattgattcttttttagcagcaacatgtatattttctgcaaaagaaactatattcaaggcattcttttactatttacagaataagatcgattttaataactttaaattatacaaaacatacactagagacaatacaatcataatgaaattccacttagaaaaagattatactaactttagaaaagagatcgttgttaaagcaaaaatttataaaaaacatgttataacttgtctaataaactaa

SEQ ID NO: 65605 - DNA, 537 bp, Acinetobacter baumannii
atgaataaaattgcgctagcttttcttttacctttaattacatgcacacatttatcagctgcagaatttcaactcaagagtagtgatattgcagctaataaatttatgaaaaaggaccaagaatttcaaggttttggttgtgaaggaggtaataaatctcctcaattatcatggagtggagcaccaagtgggactaaggcctatgcaattatggcgtatgatccagatgctccttcaggtagtggttggtggcactggcaggcagtaaatattccattagaagtcacttctatttcttctggtacaggacattttaataataaagatgtaattgaaattaaaaatgattatggccaaacaggttttggcggtgcttgtccacctaaaggtcatggtgtccatcactatcaatttactgtttatgcactttcggaaaaactagatttaccacctaatgcttcagcagcattaacaggttatatggtaaaagctcactctttggcatctagcactatcgttgctctttatcaaaaataa

SEQ ID NO: 65606 - DNA, 4266 bp, Acinetobacter baumannii
atgtttgataaagaaatacaggtgcaacaaaaagttttagctcttcatggaatggggagtaataaattagttacggagcttcaacttcaaaatttaggaattgttaatgaaaattatagtataacctatattaatggtgttattcctgtggatacaccagaaattagtttatctgaattaacaaatattactaatgaagaatggtattcttggttaccacctaaagctcaatggcatgaagttaatagcgaaattcttttaaaaaatatttgtgaagctattataaaagttttagtagttattgaaaaatatggcccatttgatataggttatggttttagtcaaggcggttatattattgatttaatcaataatctaccgaatgatccaatattgcttgaagcagtaaaaagtcatttaggaagagagttgtcttttgatatttctacacaatttccttttaaaaatttaatttatgcatgtgttggtactactctctcaatctcagagcttcgtagattagcaggtctatcgaaaagaagagatgattttcaaacacaaaatattatttatttaatcggaaaacatgatattcaaaaaatttattctgaaaattttgttctagaaaacagcagtattataagtcaagtaatctatttagatagtggccatgaaattaatagtaatgtaccggatcatattaaaaaaagtataaaagattcgcttgaaaataaaatacaaaaaaatagttcgaatagtaagctgagaacatcttgcacctttagctctttagaagttttcgatgattaccaagcaactcaagtatatattgatactaaagatcagccacatactattgtagatttactatctaaaagggcatctactgcgccattatttaggcatgcacgtaataatgatcaaaatttatgtactacatatggtcagatgctagcatttcttagcccaaagggtgaaggtgatcttcgaagaataggggttaaagataacgaaattatagcttatgtagctcctccaggtggtagtgctgaaagtgctgtcacctttcttacagtagcagctcaggcatgcgcagtccctctttctgtaacgatgacagaaaacgagacattagaagccttaaaacaactccaagtagatcacatcataatttttgaaaatgtaaatgccaaaagtgtgattactgcttgtgagaaatattgtgctgaacttagtaaacaaccccactatgttcaaatattaggtaatgaagctcctggtctttttagatttaaaaactcattaaaagattttgaatctttacctcctttattatcatctgaggaaaatgactgtttattattacgaacttctggaactacctctactccaaaaattgttcctctaaaacaaaaggatttagttctaaatagcacgatcttagcgaatagtattggaattaatgagtttgatattacttatagcgtgatgccattagatcatatcggaggaatatcagcttcaattctagctagtttatcagttggtgctgctattacgtgtgatggtctatataatccacaattaatggttgaagctttaaaagaatcaagtcctcaacctacatggtattctagtgtacccaccattcatgttgctactttacaatatcttaagcaaaataatgaaaagtatttaaatgaagatggcatatggactgaacataatttaaggctaatacgttcaggcgcggcagctcttagggaagaagatcgaattgcactaatgggcacttatgactgtcctgtcctacctacatatagcatgtcagaattaatgccaatttcgcagcctatccaaaccgaaatgagttgggatattcaagaaggttctgttggtgtaccactaattgcttcgttaataattgttaatccagaaactctactcccacaaccatacggagttactggtgaaattgctatttcaggagatacagttttttcaggatacaaggataatttagaagcaaatcaaaattctagatttttaatgaagttaccaaatgcaattaaagaacaggtttggtttttaacgggagatttgggacaaatagataatatcggtaacttgaccttaaagggtcgttccaaagaattaattaaacgtggtggagaacaaatctctcctagtgaaatagaagataaattaaatggttacgcgggtattgatcttgcaatctgcttccccgttccttctgagatttatggagaagaagttggatgcgcaattatttcttccgaccccaaatttaataaggaaaatctaaaaacatgggcaggtcaattaagaaaatttttaattgaacagggagttgctattcataaaattccttctatatggactaccgcaaacaaaacagatttgccaatgaccaatagcaagaaatacaaacgcaactccatggcagaggcacttcagattactacaacccaatccccagccaatactagcttaaatacaaataaagaaatattaactaaaaatatttcaccagataaacctaaggtagattgggactcaatagcaggatttagattcattctcgcatgttatgttatgttcatgcattttggctctaataattcatgggatgcttttaataatttacgtcaattccaatggcatgttaacagtttctttatactagctggtttctcattagctatattaatgcctagtttaatccaaaagaaattcgcgtttgtgaaatcaaaaattgctgtaatgtatcctttatatgtattggcaattatatttgcaatggcgaatcttttcgttagttgtgaaccttcaacttttatttctaatttttcttgggcatctttacatagtacggcttcatattgtcagggtacaccattaatagaaagttcatgggctggtaatgtaatatcgtcattaataatttatttaactggacttcaagcaacaccactctggggagcaagctggtttataggattctatttatggtttatctccatgtatttccaatgcctagttgtttttccactggcttataatgcactctataagaatagaggtaatataaataaaatattactttacataggtgttggactagttatcaatatggttatcctatggggtttttggtatgggtatgctattgattttgtgggatatggaccttttgactctattacgggaattaagacaattccttcagcatcccaaatactagaagctggtaaagataatgctgttggactagggttttacttgttcgcgcctttctggatgatatatttcttattggggatcggagccgcatttttatatgatgcaattagaccaactgaacagaaacgttcacaaatttggggttatattgcagatagtattactataattattctttgtgttgcggctgctcatgtttcacagggttattttcatttaacccctgaaattacaaaagttcctgtagatttttatttcatgagacctgaagaagcaaatagttatgctgatccaggaattacgaatcgaatttgggatgaaatttatagccgttcatttgcacctctaactctcctatggatttttgcaattagtacaggaaaaggtctaacagctagaattttaagagcacgtcctttatctcaatttcttgcacccacagcttatgcttgttttctatttcatcaaatggttgggcaatggtactatgcgattacacgtcatggacattggtggaactggtgggaacatcgtaagagtttctactggtttagcccagaaccagttcccgtagaatggtatgagtacttctatcttgtaggtttagttgttctctttgcaaagttagttcaaccatttgatagcttatttcataacatttattcgaaacttttgggaatagccagaaaacaaaaattaaaggaacaacctaccgtagatattgctaatatcgtattaaaaacggctactagtatagctggtttggaagttagcagagatcttggtttaaatgataatggcttagcctcacttggtactgttagatttattagtgcgcttgaaactgagttttcttcatttaattacaacttgtctctttcaatttcagaggttatagcagctaaagatttgaatgaaattattgaattaattcaaagaagattaaatgaagaagaggaatctgaattgatcgaaattgcctataaacaaaatacaatctag

SEQ ID NO: 65607 - DNA, 459 bp, Acinetobacter baumannii
atgtctgttgaaaacatttttgaaaaaattgagttattgaataaggctgtaagagattattttataaagttaaatgaacacagtatatggttgtttctttcaataatgggttggataggtatacctaatgagcaaaaatctataaagatattagcattaataggaatagttcttttctttttttactatcttgcaacttctaagttatggaaagaggcagccgaattatcagaagaagggggaggtaaaacgtttaaggatttattttcatattataaaaatgaagttgagcgaactgatttgtcagcggatgataaaaataatgccttgaataagttagttgaaattgaaaataggtatttcaatttcaggaaaaatggatttaagattatttttaataattattgtttcttttttacgatggttttttttgttctagtactttttaaacaaatatag

SEQ ID NO: 65608 - DNA, 918 bp, Acinetobacter baumannii
atgatggggttttttattgagtggattatgtcactattacgagatatacaaaacgatgctgttaactccagtgttaaagtttctgatttattaagaaagtgcaaaattctagcttatagattagggaatgaagattttaagaaatgggtagactctgagctcaatggttataactccacagaattattgcctgattatagaatattaaaggttgcttctaaggggaattttgaaggtgcttggggaaatggttatcaaaatgctgatatgcctattttttgtttacctgaagatatgcgagaagatctttcaaaagcaaaatttgataagccaattgcaacattagaaagtttatgtactggcaatgaaggaatcctaactcagaattggaatccaataatattagctaaatatggatcaactatgtatcaggacttgcattgtatgcaagcttggaaaattatacctgtaccatcagtaataggtattattgatactgttaaaactaaaattttacattttgttttggaaatagaaatgatcaataaagatgctggtgaattagaaatcaattcaaaccctattccccaagagaaattgagtcagatttttaatatcaatatttcaggaaatgttcagaatttggcatcaggtaatcatcatagcaacattcaacaagaagttaataatcaacttcctcaagaatttattaaattaatagatgagttaaaactatcaaatattgataatgatatagcttctgaggtttcacgaagagttgaaatattgggagcatcaattggaacaaaagaatataaaacattatatggcgattttatgagttttgtgtcagatcacataagtgttttaagttttattgcaccatttattcctatgttatcgagttatttatcataa

SEQ ID NO: 65609 - DNA, 1770 bp, Acinetobacter baumannii
atgaaatcttataaaggaaaggtacaatcaattttttatttaagtttaatctcattgctactatatggatgtaataattctgataataatgaggaggatataccaaaaaaaattggagtgtgtgatagttctcaattaagtaaaagttttagtgataataattataaaattatttctactcaatattttaaaaaaggtgaattattaaaattaaaagaaaatacggagaatacttctatttttgctgctaataatgtttgtgttgttaaggttatagtgggtcccgaaactaatcttcaggataaaggagaaccttcttattctgaagggattgggattgaaatttggttacctgatccggctaaatggaataaaagaattcatgtcaaaggtggcggtggttgggtagggggccaacatcgaaatcccaatattcttgtgggtattacaagaagttcagcagggtcagctgcagccactgccacagttgaaggtgctgtctctgcagtaacagatacaggtcatgttattaataatggctcttttgctatgaatagtgatggaagcgttaatactaaactatggcgtgatttcgcggaaagaggaattcacgaaatggctgtagtcagtaagcttttaacccagcaatattatggagaaaagcagaagtatgcttattggaatggcttttctacaggcggtagacaaggtttaaaagaagtacagattaatccagatgattttgatggcgtacttgccggtgctccagcaattaactggacaaaatttattacctctgagctttatcctcaaattgtgatgcaaagagatttaaatggacagcttttaacaacagaacaacttaatttaatatcaaatagagcaaacgaaacttgcggtcaagttaatagtcaaagttatggctatatacttgatccttcttcatgtaaatatgatccaactaaagatacttctatattgtgtggtacaagtcagattgacagctgcctaacatcagctcaagcttcagctgtgaataaaatatggtatggccaaactgaagatggcagtgtacccgatccgataaatgacaatagctttaattttgatttaacagcaaatcagaaatggtttggactcacacgaggcacaaatttagctcgtttagcaggtgagaaaccatttttacacgctacagatctagttgctttaattcagcaagatagccgtattgcgcagtcaaattttattaataagacgagcaatggtttagatcaatggaaaaacttagattatgcaaccctaaatgaggttcaggaaaaaggaattgcgctgcaaagtttattctcagatattaatactgatttaacggatctaagtaattttaaaaatcgtggcggtaagttaattatctatcatggattagctgatgagttgattatgccacaaggcacaatgcgatatataaaacagttaaaatcgactatgggtgagaatgtcgttaatagctttatgcaagcttattttataccaggtatgggacattcttttgctaatggtacagccaacagtaatgcaaatgttgccttggttactaatgatgagctatataagcagttaacaaattgggttgagaagggaattgctccgactaatctagttgctacctctgcaagtaaagatcgtagcctacctatttgtctatatccaaggaaaattacctatattgctggtaatgttaatcatgtaaatagttataaatgtgaatag

SEQ ID NO: 65610 - DNA, 987 bp, Acinetobacter baumannii
atgaaaatcttaaataaatattcttttattatttttttattatacagtaaccctgtatttgctcaattccatcaaggatcagatattactgatgaattaaataatttgatatcttctactcaaaacaatattatttacataccacctggaaattataaaattgatgctgtcaagtcaataaatttaaaaagtaatattactattattttagatcctaaaaccaccctatccgttatacctaacaacaaagcaagctatcaactctttagaatcaataatgttagaaatgttactatctcaggcggcacacttattggtgataaatacaatcatcttggtgataagggtgaatggggaatgggaatagaaattaaagattctcaaaatatttctatctcaaacattcgaatagataaaatgtggggtgatgccatttatattggaacgaatggagaggattcaaatactaatatttttttaaacaatatcattatgaatgataaccgtcgacaaggtttatctattatttctgtaaaaaaattaaacggttacaatctatatgctaataatacatctggcacaaatccttctagtggaatagacattgagccaaataataacagagctatcttgcaagatatttatttaaaaaatatatatactacaggcaaccaaggttctggtctccattcatactttggtttttacaaagggtctccaaaagctatcaatattaaagttgaaaatcatgtcgataatggatccaaatatggattttatatgcttggtctagataacaaaacaaaaggtagatttgaaattaaaaatgctaattataaaaagagtaagacatcaaatttatgtctttctgaatggaataaccccaatttttctttagatttagcttcctataaatccgataaaatttttacaacaaataatgattgcaagatttataaaaataataaaaaaattagaatttactaa

SEQ ID NO: 65611 - DNA, 348 bp, Acinetobacter baumannii
atgaaaaagagtttttttttagcatatacgacaaacttaaatccaattgatttagttcgaatttttgaaaaaaaatttgatatttcttttattgaacatagcagtgattatttgggaaattattactcttatgagggattattatgtgataattttaaaatattgcaaaataagttacctgatggtgatctgcaaataaatgacggtggaatagaaactattttgaaattgggatttttaaatggaaaaaataaagaaaagcaaagtaagtatgaatttatgaaaaaacaattagcgagtttggataatataaatttacattcatttgatattcttgaagaggaatga

SEQ ID NO: 65612 - DNA, 1212 bp, Acinetobacter baumannii
atgtactttaaacttcctttaatttttttatgcacagttatattaactgcttgcggtggaggtggtgctacacctacacctacacctacacctacacctacacctacacctacacctacacctacacctacacctacacctacacctacagaagattggggcaacttcataatacaagcacaaaaattattaaacatctatcgcacaaataagaaactaacagaattagcaccaatcccattacaagcattcgaacaaaatttttctatttcatctacatgggtaaatgacgcaaaaattttaaaatggggaaattatattcctgttaatacaccttacggaataaatcgaggtgtagtacaccctcaaattcttgagtttcctaataaatttctaggatatcgttatatcgtagttatcacaggatatactaatggaaatctatcagaagaaaatccatttttattaggttcaaatgatcttgagaattttaacttagtctcagggattatagatcaaccagaaataccgcaaaataataaaaaagatgaagcgtacaattcagatccttttattttttatgatgttaaaacaaatgaattagtattaattattagagagttttggactaattaccaatccacaaaaaaaaaccatgaatttttatatatccgcagaactaaagatggcaaaaattggtcaagtagagaaatattatttgaacctcattctggaatggctctatcaccaagcatactttttgatgctaaaacagaaacttaccatatgtattttgttggaaatgcggaaggaaagaattttggattacaacattttactagtcaaaccttaaaaaatgactggcaatatatcaatactattcctacaccaaatgatacatcaatttggcatattgactgtaaaaatgtaggcgataaacaattatgtatttttcaaaatcgtgtcagaaataatagtatagggttcagattaggcatatcttcagactattataattttatttggtctaataactggttaaactcgctagataaagaagtctataaagctacctttttgccgcagtttaatgaaaagagagaaatgagactaatggttctttggacaacaaactctaaatataacagtgatagttataagctctatgcgcaaccaacccaatatatgaatgtaaattatttaaagaattaa

SEQ ID NO: 65613 - DNA, 453 bp, Acinetobacter baumannii
atgagtgaaaggaatcaaagtcgtttgttaacggttggtgaggttgcaaaacgtagcggtgttgcggtttcaacccttcatttttacgaatctaaaggtttaattaaaagtataagaaccaatggtaaccaacgccgttttactctagtggtgttacgttacattgcgatcattaaaattgctcaaaaagttggtattccattagatgaaataaaacaagccctaagtaaatatccgatgggttctaaattaactgcacaacaatggaaagagctatctctcgattggcggaggaatttggatgagcgtattcaaaaactcacaagactcagagacgaaatggattggtgtattggatgtggttgtttgtcattagaacaatgtccattaaggaatccaaatgatgtgttgggacaagaaggtgccgggccacgtattttagaaagaccatag

SEQ ID NO: 65614 - DNA, 180 bp, Acinetobacter baumannii
atgaaaaaaattatctttcttggtttagcgcttgtttcgttaacggcttgttcatcagtacaacataaagattcaactcctccaaaaattggttcaccaaatcctgctagtcaatattgcgttgaccaaggcgggaaattagaaattagaaatgaagcaaatggtcaggtaggttattga

SEQ ID NO: 65615 - DNA, 252 bp, Acinetobacter baumannii
ttgccaaatggacaagtcgtcgaagagtggaaattattccgtgataatcaggcgaactgcgtttcagaagaagctcaaaaattagttgggcaatctggtttaaccgatgatcaaattaagcaaaaaacgaagtcagaaattgttcgtaaagttgctccaggtcaaccgatgacaatggattatcgttcaaatcgagtaactgtcacaattgatccaacttctaaaaaaattactcaagcaacatgtggttaa

SEQ ID NO: 65616 - DNA, 936 bp, Acinetobacter baumannii
atgagtaatatcttcacaggatgtatcccggcgctaatgactccatgtactcctaaccgtgagccagattttgatgcgcttgtgaaaaaagggcatgagcttattgaagcgggaatgagtgcggtagtgtattgtggttcaatgggcgattggcctttattgaccgaagctcaacgtcaagaaggtgtagcacgacttgtagctgctggtattccgacaattgtgggtactggggcagttaattcaaaagaagccgtttctcatgcagctcatgcagaaaaagtaggtgcacaagggcttatggtaattccacgtgtattatcacgtggtgcatcgccaactgcacaaaaggcacacttttctgcgattttaaaagctgctcctagcttacctgcggtaatttacaatagcccgtattatggatttgcgactcgtgcagatttgttttttgaattgcgccgtgaatttccaaacttaattggttttaaagagtttggcggtgctgctgatatgcgttatgcagctgagttcatcacttctcaagatgactctgtgacattgatggctggtgtagatactcaggttttccatggtttcgttaactgtaatgcaacgggtgcaattacgggcattggtaatgctttgcctaaagaagttttacagttggttgaccttagtaagaaagctgcagcaggggatgcgaaagctcgtcgtttggcacaagaattatcaagcgctttagaagttttatcgtcttttgatgaaggtactgatttagtcctttattacaagtacttaatggtacttaatggcgataaagaatatactttacattttaacgaaacggatgcattgagtgaatcacaacgtaaatacgttgaaactcagtatgaattattccgtacttggtaccgtaactggtcagctgaaatctaa

SEQ ID NO: 65617 - DNA, 405 bp, Acinetobacter baumannii
atgagtcaccataacttattcttaagtcatagctggaaatatggagatgcttacgatggactggtaacacttctcaataatagagaagatagaaacttcacctatagtaactatagtgtccctaaagatgatccaatacataatgctcctaacgatgttttattgagagcagctattcggaatcagatgaatagatgttcaaaaattattattttagcaggagtttatgcaacttatagtaagtggattaatatcgaaattcagttagctaaagaaatggggaaaaaaattattgctgtacagccttggggctctgaaagaacatctgttattgttaaaaataatgctgatcgcattattacttggaatagtagatctttagtaaatgctatcaaagagctttaa

SEQ ID NO: 65618 - DNA, 339 bp, Acinetobacter baumannii
  misc_feature (316)..(325): n is a, c, g, or t
atgaccttaagttttttaattgctagaaaaatgaattttaatatcccaggtatgattgctatcatttttataattttagttgcattatttctagtttactcttgggaaaaattagtaaactcatatggtactcttaataaagggaaatttgaaattatttataaactcgaaaaacaactaagaatcaatcattttgaaaaagaatgggatattttgagaaacaagttaaattatcaatcaacaacagttgttgaaaagcaacttattaatatttttagaatcttcttatcctctatactgctttttgctcttgtcnnnnnnnnnnaaataaacaattaa

SEQ ID NO: 65619 - DNA, 729 bp, Acinetobacter baumannii
atgggtgaagcaaaaaatagaggatcatatgaggaacgagtaaaagttgcgaaaatagaaagaccaacaggactctatcggtttttttctaaaccagaacacgctatagattttgcaaatgggaaggtaagaattagtacattaactgcttgcagaggttactcagatccccaacaaggtgataaaggtgaaggtagttcaagttttggttttagtggtgtagtaaataataagagtgaattaaagaaatttgaaaaagaattccaaaagttaggtattgattttcgtgacgaagatgaagattctgtatttaataatattgtcattcagaatgttaagtcgcatagccaaataagggatctttatattttatgtttgacgacgaatcctgattctttaatgaaacagtcgccagagtggaagtatggagtaaaaataaatcttcaaccgaaaattttagcacttgtattatgtcgtgcattcaatagacaaaaaatattagagaaaggttcactcttttacggttatggacctgttgattacgatacatcacgatattatgaggtactagaaaatgagccaaaaaacttagcttttttaaaacctgaagaacataaaccgcaacaagaatatagaatagcttggagagcaaaaagtgatatacattcgtatgaacctatattcttagaatgtccagaacttagaccccatcttaaattacttttctaa

SEQ ID NO: 65620 - DNA, 345 bp, Acinetobacter baumannii
atgatgtctagaaataacggcacccacttaagtgaatcagagcatatcgctcaatccattgaagacataatcaccactccgcttggctcaagagtgatgcgtcgaaattatgggaccaaactcgcggatctcatggatcaacctgtaaatgatgctctgtttttgaaatgttatagcacgatctattctggaattttactttgggaaccaagagtagaagtaagccaaataaatgtgagttcccttaaagcaggtcagatggttctagatattgaatgtgcaattttaagaactggccaagtcttaaatttaagtattcctcttaccattggagcaacaatatga

SEQ ID NO: 65621 - DNA, 897 bp, Acinetobacter baumannii
atgagtattggatcagagattgatttatcccaactaccagctcctgatattgtcgagcagattgcttatgaagttatcctaaaagaaggattagatgtttttcatcaaaaaatgaaagatgatggaattgattatgtcgctttagagtctgatcctgcttataaattagctgaaacatttgcatatcgagaaatgattattcgccatgatgctaatgaacaagcaaaggcggttttattggcttatgcagctggtaaagatttagaacataaagcagctgaaaaaggcctgataagaaaacaaatttccgctgatgcaatggaaacagatgagtcattacgtcgtcgtgtacagatggcccctgaaagctatactactgcaggaagtgaaggatcttatatttttcatagtctaaatgcggatgttcgtgttaaagatgcttatcctgatgctccattagatccggaagggaaccctaaaggaatttgtaatgtttatattttatctactgagtcagatgggatcgctccagaagatttaattgataatgttaagaatgctttaaataaaaaatttgttcgcccgcttacagatcaggtcaatgtactttcagcgacggtccagaactatgaaatttctgctgaaatagaaattgaacaaggtcctgatgccagcattattttgcaaagtgcttatgaagaaatcaaaaaatatgccgacaaaacacatgcttttggtattgccccaagtctctctggtatttatcaagctttacatcgccctggtgtaactaaagtaaatttaatcagtccaacgcaaaacattaccacggtacttggccaagtcgcttactgcaccttatttgatttaaaaataaagggagatagtaatgtctag

SEQ ID NO: 65622 - DNA, 600 bp, Acinetobacter baumannii
atgtctagtttattgcctcccaataccacgaaatttgagatcaattttgattcggctttctctcgagtatcccaaatcgagatttcaactcgtcaatttaatgatccactgaacgctccgtattcagtattaccgtggcttgcttgggaaaaatcagtagatatctggaataaaaactggagtgaaagccagaaacgacaaacgattcagaatgcctacaaagtacatagttctaagggaacaatcggatcagttgaatctgctttaatatcgctcggatatcaaatcaaaattcaagagtggtttaattcttcaccacctttaaaaccttataccttcaatttatttattgaaatctcacaggagcgtttaagagcttctgatttaaaagatatttttgaagtagtaaaagccagtaagaaccttcgttcaaaactactaacaacaagtctcagtatccgttctgatgccgaactttatctagcagctgcattgacggctggtcatgaaactcaattttcacatgcaccaggtggactctatcttgatggaacttgggcattagatggcgaaaaacaattaaatggagtcaatttctaa

SEQ ID NO: 65623 - DNA, 2082 bp, Acinetobacter baumannii
atggctgaaattactggtgaaggcaaatggtctcctgtacgcctacttgaaacttatgagttagcaagaggcggtattaatggaaacatgaatgaacaagctaagtcattagttgaacgtacagaatttttaaaaaatacttctgctacgaaggaagagctttcctcaatttctggtggatcttatgctttcggtactaaggttcaagctgaagcagctggggcagcaaataaattaccagcgaactcaaaaattgaagttcaaaacgatggaataaataatggttattatcgctggacgggatctgctcttgtgccttcggactttaatccattaaatggtgccaatggctacacggatgaaaagtttttagaggcaaatggtattagtcgcgaactatatcaagcactggccaactatcttctaaatgttttattccttcaaaataacagtgatggatcactcatcaagcaagtcgataaagatggtgaagctttttatcatgttgataaagacacgcgcttttggttcgctggtttggccaaagatcttgtcactgaaatttatgaacgtacacgctatgaaacaggtacggatattgaagtaaaacgagatcctgaaggcgaagaatatttcaagatcgataaagatactaaattttattttgctgggctggccaaagatcttgtcaccgaaatctatgagcgtactcgctatgaaacaggtacagatattgaaattaaacgagatcctgaaggcgaagaatattttaagatagataaagatactaagttctggtttgcaggattagcaaaggatcttgtgactgaaatctatgaacgtactcgatatgaaaatggtaccgatatagaagttaaacgtgatattgatggtgaagagtacttcaaagttgataaagatactaaattctggtttgcaggtttagataccgacttggtttcagcgatcaatagtaaagctgagagtgggctttctttaactgataccagcaatttatcaaactattcatacagggatacatttatccctaaagctgaaagattattaaatttttatcgaaatacacaaaattcgggattgcttgcaccagttccgctacacagctttgagcaaaatttttcaatttctgatacatggcttgatcaagcaaaaattaccgattggggtaattatcatcctgtaaaaacaccatatggcgatgattgtggcgtagttcaccctcagattctagagttcccaaacaagtttatggggtatcgctatattgtctctatcactggttatacaaatggtgctttagcagaagaaaatccttttttacttggatctaatgaccttcaagaatttgacctactcacaggtttaattgatgagcctgattcatatacatgggaacacggtactgtctataactctgatgtttttaccttttatgatgtaagaactggtgaattatgtgtggtttttagaacgtactgggcagataccgataatgtcgcacctaatgaatcacatgagaaactattcattcggcgaacaaaagacggaaagacttggtcaaatcgggaagtcatgaatgacaagtttccgctagttgcaccagcaattatttatgatgttaaaacagagacttaccacctatatggtgtagataacggtatcaagcattacaccagtaaaactgcaaaaaacgattggaactttgttggagtaatcccggcacccgctgataaagcaccgtggcatgtcgatattaaatttattggagataagcaagtcatcgttgttcacgatcgaatatggtcaccagcaagtaagaaccgtggattttttcttggaattgcatctgatttccacaattttaaatgggcttctgacttttggaatactgataaccgtggaatttataaagcaacattcttacctcaattcaatgaacaaaatcaattgcgtttaatgtgtctatggacttccgatagctctaatcctgacatcaatttacgctacaaactttttgtacagccaaccccatttctagatgtaaatttcgtggagaaataa

SEQ ID NO: 65624 - DNA, 1149 bp, Acinetobacter baumannii
atgactttggtaatcacatcaaatcagaaaactaaattatctttaggtaatgtaaatggaatcaaaggatcacaagattggtgcttatttctagactttgccagaaatgagtttgttaaaaaaaatacagctggtgttcgtacaaatattactgaagctgatgctttgatttgtacttcaaataagaatttggcgaccaagccaatgacaatggatcagttcggaagcaaatcatttattactgctacaaaccagttacgacactggggagtatcaaatgcttttggttctttttttggtttattaattgaatctgaccagacgaactggtttttaaatagcgcagcaccagctacacaaacaatcgcaaatattccatcaggttcaacacttgtcgcgtcatgtatcggatctggttccctgaaaatttcaggtaatggtattaatactgtcactgttacagagaatgcacctgcaacaattacacctcaggctataggtactgaagtaactttaactgttgaagttgtcggaactttaactcacgctcaggttgtacgttgtgctggttttgcgacggtccatactccaattacaacaactaatgtaaaaccttcatcaggctttgaccgtgttgaaattaatccaaatttacttactgaactcattgatactaataaggcacttacagtcgtagttcagtcagtagctgtgaacaatactaaagatgaccgggttcaatacaatgagaaccgaattgtattggagacagatacactcgttgctggtttgggtttaaataaagatgcgcgggggtatgtaggtaaccgatgtgtttcaacattcaaatctgattcttcaaatcaggctagcgctggcgaaatttcaaatggaattgcccttaatcagccaatcacccaagctttttttgtgaatgagcttggttttaaaggctgtattgctgggggcagaatttatgaagtagcctcagctgttaacctcaacaaagtaaaaagaattcgacttgctgaaaacgttgctgcaccttcggtaatgcaagggggtaactgtattattactaaaattgcaatttttaataagacattaacaaattctgagattcaagaaatttcgaaatcttggttataa

SEQ ID NO: 65625 - DNA, 1380 bp, Acinetobacter baumannii
atgaattataaaataatctacaccaaaaccgggcttcaacttttctcacaagccatgacaagtggtatccctgttgaacttggggattttgcaataggcgacggtggtggaaaaaatgtaatacctgatcctgaaatgaagtctcttgtacgggaacgttatcgcgcaagtatcaaccgtatttatcaggatcctgaatttgagtaccaatttcttgctgagctaattattccactttcagttgaggggtttgtacaacgtgaagtaggtatttttgataaaaataataatttagtgatgattggaaaccttcctgaagtcgtaaaaccaatggcatcggatggagcatttacagatacggtttatcgaatcccctttattgttagcaatactgcagctgttgagcttaaagttaatccaaccaccgcaattgcaactcaacaatggataatcaatacacttactcctgcctattttttccctggtggaactacaggccaaattcttaaaaagaagagcaatgctcctggtgaaattgaatggggtgatgctgggtcagctgaggtttttgtagatacaattcaagaagaacaaacacttgtttctgatcaaaccattgtagatctaaatactgtgaccacaacaggtatcgctgtatacattaacggattgcgtatcactcaaaaagctggtgtggatggctttactgtcaattcggcaactagaattaccctaggtaaatcttacggatcaggtaaaattttgattgttcaaaatgaaccgcaaggggctgctccttatccattagctcaagcgtcaaacttagctgatgtcgaaaataaaggactggccagaaaaaatttaaatgtattcagcaaagaagaaagcaaagcaaatagccttcctcctggtgcgattgtttgttttgctatgaataaagccccaacgggttatttaaaagctaatggagctgctatttcacgtactgtttatgcagatctatttgctgaaattggcacaatgtacggtgagggagatggtgtaaataccttcaatgttccagacgcacgtgccgagtttatccgtgcattagatgatggtcgtggtatcgatattggccgcgtcattggtagcaaacaaacccaacaggttttaaaacataaacatatgggttttggcgaggctattgacggatggattttcggtaattctgctgaaaaaggtcatatgggtaccaatggcggtttagattatgacaattacctttatttcacaaatgatggtacagcttacaagggagaagatccgaacccagctggagtagttggtaatgaaaaccgaccacgtaatattgcctttttagcttgcatcaaatactag

SEQ ID NO: 65626 - DNA, 285 bp, Acinetobacter baumannii
atggatggaaaaaatgtttatcaaactgatacagctggcttatttgttggggaaacttgggcagatttatcccctgaagaaacggatgtttaccacattccgagagggtgtgtagaagtgcccccgccaaatgaatggggtgatgatgtttggccgcgttgggatggtgcagaatggatattaatcccaaaacctaaagttcaggtacccttaacagcaaaacaaaaattagctgagtttttacaagaaaaccctgatgtacttagccttatagagaaaaattaa

SEQ ID NO: 65627 - DNA, 450 bp, Acinetobacter baumannii
ttgaaaagagtccagcatctaaatcccattttaaatattgtatttaagggaaaaattttctttttaagccgtgttaatggccgtgaaattatatggctaaatcgttgtgcagaaatgctacctgagttgtattgggattattcattagactttccttttaaaccccaaagtatccataaagtaaagaatagacaacttcggagagcatgctatcagtcgtttgcacaatataaaaaatcttttaaaccacgacctattcccaaactaaaaattttaaaaaatgaatggccatcattagaggaatggaaagcttcaatgcaggaggcaactaatacgactgttaaaaagtttagcgatacggcagatgcaatgtcttacgcaataaattcattagaaaactttaggactaattacttgtgtagttgggatctagcagctggagagaattaa

SEQ ID NO: 65628 - DNA, 216 bp, Acinetobacter baumannii
atgtatcatgaagaactttttgaactgttttataaaaatgtgcgtttagatatgaacccaccaggctttcctaaacattactgtgaaggtatgaagcgtttttggtatgcacgttttatgaatgcatataacaatgaacgagaagaggtgggcttaatgagttgggcagaggcaccccaaatgtggcttgcaggctatagagaaaatagagaataa

SEQ ID NO: 65629 - DNA, 6324 bp, Acinetobacter baumannii
atgtataaatattttagttctttaacacaagaaagtatccaaaaaaataaagaagcgactctgagtatattggggatttcgcatcctgaactacgtgatgttctaggacagcaaatgtctcaagctatgggtgaagatcaatcatttttatcttcacctgtaatcgaacagatgtttgcatggaagaaaggccagcctactttagaagatttagggggacaactacttcatgcaaatgtgattcatgctttagatcacaaagaaaatggagcctatcgttttaatagtgactaccagccttatgtacatcaattacagagctggaatgctttgttagaagatcacaaatcgattgtagtcacttcagggactggttcaggtaaaacagaatgttttatggtgcctattttaaatgacttatatgaggagttcattcgggaaggacaatctttaacaggtgtgcatgcattatttttatatccgctcaatgcactgattaactcgcaacaagaacgtttagatgcttggacgcgacatttcctaccatcgaatgctattcgttattgtttatataatggtaatacaccagagcataaatcacagaaaactggagaacaaaatcttcatccgaatcaagtgttcacacgtgaagaactaagatcaaatccggcgcctattttggtgaccaatggcaccatgttggaatatatgatggtacgccaaatcgatgcgcctattttgcaaaaatctcaaggaaaattgcgttggatcgtattggatgaagctcatagttatatgggctcacaagcagctgaactagcgatgcaactacgtcgggttctacatgcatttggtgtggaagcgaaagatgttcgttttgttgcaacttctgcaacaattgcaggtgctgatgcagaagaaaaactaaaacagtttttatcagagatttcaggtcaaagtactgaaaatattttggtgattggtggtcaacgtgaagtaccgccattggcatctgttgaaaataaccttctaactttagatgaattggtgtctattgatgaaggacaagaggtttcctctgaacgttatcataaattgtctggacacccaattgcactaacattacgtgaatgtatttgctcggaacgtgctttaacacttgaagatttattcaaaaaaacacaagaaaaagattttaagctatctcagcaagagattttaaaatggttagatttattaacctttacaaaaccttctcatgcagaacaagcttttcttaagatacgagtcaactattatcagcgtgtaactcatggattatggagttgtattaatgataaatgtgatcaaaaatctgaagatctaaaaaactggaactttggccaagtttatgcgacacatcaagaaaactgtgcgtgtggggcacctgtattagaattaacattctgtaagagctgtaaggaaccacatttattaggtttattgggtagggatgatgttcttaaacaatggactgttgaagttgaagatgaatttgcattacttattgataatgaagcagaagagcaagaagaaaaagaatttaaaaaggcgataaagaatcgtttagtcgtattttcttcaaatgaaaataaagagaaaaactatcgtcgagaccaactgaacttagataatttaaaacttgggcaaatttctaaaaatacgttaaatgtgcattattttgagccttatagcagtggtgatgaagttgaatgtagcaattctgaatgtggttcaaaaggaacaaaatataacttgccatttagacgtgcgattttaggtgcaccttactatattacccagactgttccacatcttttacaatattgtccagatattgatcaggacgatattgaagaagcaagcaaaaattttaatgatccagaatttattgaaggtgaattcaaagagctgaaagactgcacaacatgggatatgccagctaagggtaaacgcttaattacctttacggatagtcgtcaaggcaccgcacgcttatctgtcaaaatgcaacaagaagcagagcggtctcgtttacggggggcagtagttggtgcattaatagaacatacaaaaaatacaaggcaacaacaaaccctaaatcctgcagtggcgacattcactcagctattgagtaaagcagaagaagaaggaaatacagccttaatcaatatttgcaaagcagaattagagaagttaaatacaaattatacaaaatttgaacttcctgagataccttgggaaggcctatgtaaacgtatcgcaaaagattttgattttcaaaatggtattttactcgcaaatcgtcatatcgcaggtgaagtttttgctgatgccggaccacttaaactggcacagatgttactcacacgcgagttttcacgtcgacctaagaatgccaacagcttagaaactttaggattggtaaaagttggttatcagggcttaaacaacttaaatgatctgccgaactattggaaagactctggcttaggtaatcaagattggcaagattttattaaagttgttctagattactatattcgtgagaatacagtaatagatcttgctgatgattggcagcaatggttaggcgggcgtgtacgtcctaagcacgttgtgagttttgaactagcaaatcaatttaaatacagagatgatggttcgaaaaataatagtattttggcatggccactagcatcagtgtctaaaaatcaccgcatagtcaaacttctagtattaggtgcaaaattagatttaagcttgcaagcacatcgaaatatggctgatgattggctaaaaaaagcatggcaaatattaaaagctgaatttctagttgaagatgggaattcaaaatatcatcttagaaaggaaaaattaacttttagtttggtggataaagtctttttatgcccaattacgcatcgcttgatggataccacattcaaagggttcacgccttatttaccaatcagtttgccgcataatattgataaatataaaacagaagaaatggtttttccaaagctgtggcagtttgattatgaaaatctcactgcacttcatcaagatttagcagtgagcaagctaagatcactaaatttatggacagacttgtcggatagcgcagtattgggaggattcttctatcgtacagcggagcattcggcgcagcagtcggcaaatttactcaagcagtatgaaacttactttaaggcaggtaaggttaatgtcttaaattgttcgacgaccatggaaatgggggttgatattggagggatatcaactgtggtgatgaacaatgttcctccacatcctgccaattatttacaacgtacagggcgagcaggacgtggtagccaatcacgtgctatttcttacacgatttgtaaaaataatccacatgatcagcaagtctttaagcaaccattatgggcttatacaactgcaattcaggcaccccatgtgagctttaattcacaaaggttaattcaacgacatatcaatgcacagttactagccatctttttaatcaaagaaattggggatactgatattgatcgacctaaactggatttaaaatggttttatcttaaacaacatggtcaatctgattcaatttgtgacacctttgaaaaatggttggtaggaaaagcagtaaaagattataaacatgtattagagtttttgaaaaaaggtacagcattaaaagatattgataatgtagaaatcatagatgcttgcttgacaaaaatacgtgaactcaagacagagtggatagaagaatatgcgattgttgaaagagagtatcaacaagaactggctacgaatcctaacagcagttatctctatcgattaacatgcgaaaaatatcgtttaacccaagcatatttattatctgagttggcgatgcgtaactttttaccgagttatggtttcccaacagacgtgattacctttgataatacaaataagctagagaaagatcgttgggataagctttcaaagaaccaaaaaacaaaagatttggaaagtcatcttgatcgagaggataatttatctcgtgttaaaggcttgccaagccgcaatattgctattgcgattcgtgaatatgcaccgggtgcagaagttatcgttgatggtcgcgtctatacttcaaaaggcatatcacttgcatggcaaaatgttcataatgaacacgataagaaatcccagaaatttgattatgcttggatgtgccatcactgtggtcaaacagggctgacatcaggtgttttgctgaatgaagaacagttgatatgtacaaatgctaaatgtggagaaattataaaagatgttaaaaaagtattacgtcctaacggttttagcgtagattattatgataaacctaataatgatgtcacgacgcaacaatatatccctgttcagaaaccttgggtaggtctttcagaaacggctttgaggtggtcattgccacatgcaaatttgggatatttaaatgtagatccaaatggacatgtatttcaatatagttcaggtttgaatggcacaggatttgctatttgtctacaatgtggtcgagcagattctatggaagagagttacgatggtgaagccaagtttccaaatactttaactccagatcgtccacataaggcacttaaagctcaaaaagatggtgataaatttaaacgaccagattgtagtggttcaagcgtcgttcaatctaatattcatttaggctgccaaataaaaaccgatgtgttggaaattattttaaaacacccgaaccgtaatgaatatattttaaataatgaagatggtcgaattattgcaacaacattagttgtagctttacgtcaggctatagcaactaaattgggtattgctactgatgaattaggttatgcagtaaaagttaagaagattgatgataaagcagttttagttttacaaatatttgatgatctaagtggtggtgctggtttttcgacaacagctgcaaattatattactgaggtattaagattactcatagaaaaactgcaatgtatagaccacacttgtaattcagtctgtggtaaatgcctactagatactcaaacaagacatgatatagaaaatttagatcgtaatttggctttggaatggttaggagatgattttttaaattatctagattctccaattccggaaacagaatttattgcaggcactccattttcgattgttgagcaatatgcacatcatggtgtaacacagatcatattccaccttactggtgatagtgaaaattgggatattttatgttctgcaattagaaaaaaactatttaagttattgaatactgatattaagttagtgattgtagtttcaccaactttaaatttgaatgcacaaatacagcaagaaatgttggcgctcgaaaaaattggcctttcatttgcagtaaataccaatctcaattctaaatatttatacgctcagattgtaggtcaagacaaaataactagtttatatagtcagtcaccagaggtgagctgttttaatgaatattggttggaaagccaaagcccaagttataaatcaacttcttatccagaattaaaattacaaaaatttagttttgattttaaggctattgaatcttatgaaaatgagtttcatcagctaaaaattggtaaagattttgatggagggctggtagatgcttttgcatataaattttggtctaaaattctacctgtttcaaaattaaataatctcgtgaatgatgaagttgtagagattgaatattctgatcgatatcttcaatctccagccaatatcattttaataagtagtttgtttaaagaaataaagaatttattaggtaatcatccaaaatttaccataataacttcctttaaaaataaacaaacacaagaggagaagttgtattctgattttagacaattagatgagtttaagagcttctttataaattattttgaagatcaattatctaaaaaactaaatttatatatatctaaatcaaaaatagatcatcctcgttactttatttttacattaaaatcaggtaagaaagttgatattcgtttagatcaaggtgttgggtattggcagatcaaatattttaattggcgtgaaattcaaaagaaaggagattttcctttcttagagagtatccagaaacaattattatggataaaaagaaataatactaatatgcatgtagtaggtgaagaggattttaaaacggacatatatatcgcaaaatcttga

SEQ ID NO: 65630 - DNA, 381 bp, Acinetobacter baumannii
gtggctgatgaatttagacttactgaagaaatcacagaaagtaccaaacagtgtaatgattcaatttgggaaaaactttatttaagtgttggatcaattccaatttcaaaaattactgctctacaaattttagatgcttgtagattgtatgagaaccaaggtaaatacgattctgcaaaaagaatgcgctctaaagctagtcaggtttttaagtatgcgattgttttagggctatgccaatataatgttgctgatcaaatatcaggtattttgaagtctggaacggtaaaacattacgcagcaattaccgatgaggaaagactagagcaattacttttgggtttatctaaaccatgtgttagtgagttaattattgtttaa

SEQ ID NO: 65631 - DNA, 567 bp, Acinetobacter baumannii
atgcaaatcaatgaaaatattattccctatgtgcccattgcaccacgggttcaggcaaccaatgaaaaaagccgtctactctgcgaacaattatttttgctcatagataatgtaaccagtagtcaaatcctttttaaccatcagactgataagggatacttatcaatttcccctgatcaaattaatgatttgatagaagaactatcaaaaactgatcgttcattcaaaaaaatcgatataaagttattaaattcgtcgctaaaagatcttatttatcctaagtttaatggagaacataccattatcagcccgatctggaacaacacagaggtacgggtttggcaatttcaattaaatcaaattgctaatggggtaaatatggaacttttagataaagatgtggaattgaacttagacatggctttaagtgctttacgtatttggcgtaattcattagaaactgggtctgaaaatagagatgtgatttataaaagaaatgatctgatttataagttaatggatttagaagacaagttgaatattgttcaacagaaattagaggaatag

SEQ ID NO: 65632 - DNA, 588 bp, Acinetobacter baumannii
atgcttaagaaaaacgattcaaaattcataggtttgtttatatcaattggtttaatttttactggttgtacctcaatacaattagtatcaaattacgacgaaaacgttgatacccaaacacaggaacttcaaaagaaaatggatacatattttatatccatgaaaaacctacaaggagcaccaactacttttaaagaaaatcagaagttttatgaaggcgtgttagcagatataaacgctttagaatctagagcagcaatcatttacaagaatgagttaactcaacaacaagttcaattacttaaagaaaactttgcatatttagttttgttgcataaacaatgtttcgataatcaacctgctttaacagatgctcaaaagcaaattgttaaaaaagaaggggttgatctatcaatggattgtaatactgcatatggagcacccattaacttaaaaaatcgcggtgatagagaactaaaaaaaatctatatcaaacccatacagacaagttttagttctcatttaggtgcaatcatgaaacttgagttagcgaaaaaacgtggcgataaagacgagaaaacttcataa

SEQ ID NO: 65633 - DNA, 330 bp, Acinetobacter baumannii
atgagtattcaatttgaagaaatattccagataatggtaaattctgctcaaaagtcttttaaacagcactggcccactattaaagactacgcaacaggagaattcgataagttagcaacaacaattgtaaacattgaatttttgctaaaaactgggcaaatttctgctggtgaagcaagtattttgttagaaatgcaaaaaaatacagccagagctgtaatgctagcattgaaaggaatgactttgttaatggtagaacaagcaattaatgatgcattagacgcagtcaaaaacatagttaataattcattaggctttgcatttttataa

SEQ ID NO: 65634 - DNA, 930 bp, Acinetobacter baumannii
atggcaaaaattaaagtaaaacaattattcacatttttatgtgcagatttgaaaaacttaataaaatttaatgtaatagctgaagaaaaaggtaattcttatccagaattctctgcgaataaaagaaaagaactaaatgaatatttaattaaatatatgactgatgcaggaaactacgagattcaaaatgtagttgaattaatggaatatgtagttattttctgccatgagttagcacattgcttaaataatcatagcgtatataaacctgaaaaaaatgttgaatttgcagctatggaaggacatgctgattttcttgctgggcgtatggcaacagctttttatacatacggtactaatttacagaaaattattaaagatgattataaatatgatgaaaaagatcaaagaaataaaacagcttattgcaaattaatgggacaagcatttagtaaattatattttgattactataaaggaaatgaacatcctcgataccctcacccaactgaaagagttggtttacatatagcaggagttagttcatttttttatcgctctcctaggtttcaagttgtccgaggagagtacgttcttatcaatatgctcttagtaaaaaatttagatccagagattattaccgagatgggcaaggcacatgaatcaaataaaacagaatcagaatttatttcacatgttctagatgtccatcttaaaattcaaggtgaacaacctcaaataaatgatattgaatctccgcagcttcatcatatttttggtacgcaatatattaagaatgaaagaattcgtcgtatgcataaagaacatatgaagaatgaagttcttaattttgtaaaagaaaaagggttaacagacttaattaatgaggaagtctttgacgagtttgaattaagaaaaaataataattag

SEQ ID NO: 65635 - DNA, 1989 bp, Acinetobacter baumannii
atgcaattcataaaagattcttttacagataaagttagaacaggaaaaattaaatctccattacgtcaagatttctcattagaaaaatggaagtcggcatctaaaatcactgactttgataagcaattagagacagcaggtttactatttcatctacaattttcagctatacgccaagcccttaatgaaattaaaaaagctaacctccctttaaataatgtagactttctacatttctttattggaatagctaatcgaaactcagtagtcctaaaaaaacaaatggaacaatatattcctaaggattctaatacatttcttgatttggaattacatgaaacaatattaaaaaataatccattagatatagaacttacaattaatgaagctgttattggggcaatagatggaatttactacaacataactactcatctatcagaatctaaaaaaataattaatttagaaatatcaaatgaggaaattttcgaaaatttacagttagaaagtgcttattctcaaatttatgacatctatgaaaaatattggaattctatactttatgagcaaatgactttatctattatagataacaatatagagcttagatcaaatgatatactgatgattccatatttaatttcagatacacggaggactcaaaaggaactacatggaattctagtagctaaaaatataattcgagaaattcttaataaaagaaattatgtagagtataaaaataataatttttttataagtaactttgataaattacgtccaaaaaagaaagttattcttgaaaattgtcagtttacatttacagaaaaaacaatttcatttctaccaaaagaaataccaaataaaaattttgatataaatgatgtaattgaaatatttctacaactatgttctataagtttagatatcttagataactgtcctaatgatactgaaataccttttggttcatatcaaaaattaaaatcatttagtcctgcgattaacactaataatttaatcaaaggtataagtttagcaacttcaaaaaaagaagacactgttagagaaataatcaacttcttaacttttcaaaaatctgagattaaactcaaaaatagaagtgatctgtggcgaactcctattataaaaattaatgaaaatgaaattatattcattttagaaccattattacatccagtgggaacacgatgttttgaaggatggatggcaaatgctggtgttgagctaaaggaaaaaggaataccatttgaagaatttataaagcaaagattaaattccgctctaaagaaaaactcttacattaataattttaaaattatagaacatgaagttatttcaattgatggagaatcagaggaaattgatcttctagttgttatagataatttaattattattggagaggcaaaatgtattctttcaacagatagtgccatttcttattggaatgctttaaatacgattaagagaggaagcaaacaagctattaaaaaaaacaactttattagaaagaatttagaaaaattcattaaacaagtaggtttaaattacaatgctaacattcaatatataactcaacctatagttattaccagcaatagtatcggagtaggttatagttttttcgatgttccaattgtcgacactactattcttgttaattattttaatagtcctatatgccctctaatttctacaagccagcaaaagcatttagtatacttaaaattatatgaaaatcttgagactcttatttataatttccaaaaatttattaaaaaccctcctcctatccaaagttataaaatttatggaaatactattcatgaaattccaattattagtccttatgacaacttcaaaacaacttggagatttaaaagattggcaattactgaggtaagtagtaagaaaattttagaacatgattttggttttcctatgataattaacgatgaagtttaa

SEQ ID NO: 65636 - DNA, 2961 bp, Acinetobacter baumannii
atgtcggaggctagatctggattttcatttataaagaatatgaattgggatgaggctggtgtggcgattatgtcgatatataaagcctttgaaaatcaaggtacaagttttaagagtaatccattttatatcaaatataaaaatataatggaaaaagagatatctttaactaactcaagaaataacttaaataatgagctgtctttctttgtgagtggagtaaatggctcagaacatgctgaaactaaatttaattcaaagtcaggaaatataaatattacttctgctaaaggtttatctattagtgggggaaatatttctgctcaatcgggacaagttaatttagaagcaaggggagttttagctgaacaatataaatctacaaccattactgagtctaatccacagccaagaatattaaatgcaagtattattattgatggccatacagatttctatgataaaggaaatgaaaatgacgataattatagtatgcgaacattagttagccctaccattattaatggtgataaaggggttaacataagaactgtaggtaaaactaaagatgataatctagtcttacaagccacaggtattacatcaaaaaatggtgacgtaaaaatagaatcaaataaaagtattttatttgatgccgcagttgaacaaagttatgaccgtacaataactactgaaaagaaaaaatcttggggtggtttaaagaaaaaatatattacgactgtagctgagaacaatgatacgaatgcagcttcagttgatatttctggaaaaaatatttttattgaaacgaaaaaactagatccatctgtagatgttaaaaatccagataataatattgatatttattcggggcgttttactgctgatggtggaaaaattacgattaattctggggggaatcttaacttttatacagtcgaagagagttctgatagtaatgtagatattacaaaaaaatcaacgtttgctggaattaaatacaatacttctaaaactaatgcaactcgtacgcaggttactgaattacctgcaacattaaaggcagattacattggtactaaatcgggttttgatacgagacttgttggaacagaatttgaatacttaaaaggtgcatcaattgaagctggtggtaagttagagctaattgccgcgaaaacatctattacagacctcgtaaaaaaagaaaaaaattccgtggtttggcaatcgatgcaagataaagggtcaattaccgaaacagctcaattgccaagattcaatgggccagttttacctacctttaaagcggcaggtggtttgagtgtgcaagttccaatcagtgaaaaagatgcgaataaagccgaattaagagatgaaattttaaaactggcgaatcagcctggcaatgcttacttaaaagagttagttaatcgtaaagatgtagattggcaacaagtgcttcttacccaaaaagattgggactataaatcacaagggttaacggcggctggtgctgcgattattgtcattatcgtaacgattgttacgatgggttcgggaactgctgcggctgcaggagctgctggtggaacagcagcaagtgggactacagttggtttgggtgcaagtatgattggctctgctggtataacgacaactgcggctggagcaattgttccatctacccttggtgctatggcaaatgctgcaattacaagtttagcaactcaagcaagtgtaagtttaattaataatggcggaaatataggaaaaacacttaaagagttaggcagtaaagatgcagttaaaagtttagcaacttcagttgttacagcaggattaatgagtcaagttagtacggcattaaatattaatttaaatgatatgcctcgattagagaagatcgctaataattttgtgcaaggagttggctctaacattattagtaataccttacaaggcgagagtctatcacatagtcttaaaacagcattattagcgggaattagctcttccattcaaggggagcttgcaactaaaatcaaaggactagaagacgttgattatgtacttcataagatcgcccatgcagcagctggatgcttagctggtgcattgcaaaaaagttgtgaatcaggggcaataggagctgctataggggagattgtagcaggccaacttaatgatggtagtagaaatctaactttagctgaaaaagaacaaatcattaatgagagtaaactggttgctagcattgtagcagcctatactggttatgatgtaaatgtagccgcttcgacagcagatagtgctgtaagaaacaataatacggcatatgcttttgatccagctgcttttaatgaaattattaatgagaaagcagagccattaaaggtaacttattatcgagatcagaataatcaggtaatgatgtgtttaagtgctttcataactccttgtaacgtttcaggcagcccagtatcaatatcagaaatatttgatgcattagttggcccaactcttgaagtaatagacagaacaccgcaaggtcaaggcaaaaagagaattgttactgttatagaagaacttgtaactaaaaaaagtatacaagctactgggcgggttgcttcaagagtaaatgttagaaatggtgatgctaatataacaggtagtggactagaatatgcatggaaaaagcatggtggctcttggggaactaataagtcggcatttactatttcaaaagatgaattaaagttgttgttacagaatccacgggtcgttagcactcccgcttataaatcatctacttctggaaactatattcgaacagtagatgttggaaaaaatattggggttgatagtaagaatggaggtaaaccaacctccataatgacagtcataacggatagacaaggtaatcttgttaacacttttccaggaaaaaccattaattag

SEQ ID NO: 65637 - DNA, 1080 bp, Acinetobacter baumannii
atgttgtttggaacacattttcacttaaaaaatgctgtcttatcagtaggggttctcagctttgcacttttaactggttgtggaaataattcacagcagaataatgaaactaaggcagaagcttctcaaactgcgcctgctgctgaactacctaaagaagtacgttttgcttggggtggcggtccccgagtttgggttcttggtaaagctgatggagattttgaaaaagctttaggtacaaaaattaagtgggttgaatttgcttcaggtgcagatgtaattaattacttcgccgcaaatgaaattgacattgcacgttttggctcaagcccagctgttgcaggtattactcgcggattacccattgaaatcattggtttggaaggtctaatttctggtgcagaacgtttaattgttcgtcctgatattaaaaatctgcaagacctagttggtaaaaaagttgccttccctgccaactccactgcacaatatgctttagaacaagcccttgcattaaataaaattgataaatcaaaaatcaaattaattccacttaagcctgctgaaattgtttctgcatggacacgtggtgatattgatgcagcctatgtttggggaccatttactcaacagctagagaaagaaggcggtaaagaaatttatcgtacaacaacgctgaatgaaaaaggtattttggtttataacaacttcgctgtccgtaaagagtttgcagaaaaacaccctgactttgttattaaatttttgaaagcttaccaagatcaagttgatgaatataaacgtgatcctaaagctgcttctgaaaaaatctctaaatacttaagtcttccctatgaccaagtcgaaaccacacttgctggtatcgaatatattcctctaaaagatcaagcctctgaaaaatatttaggtgcgacatcaaatgatgaaaattcaggcttggctaaagccacccaagatattgctaaatttttagtcagtattggcgagctaaaacaatctgatgttccaaagagttatgcacctaatatcgacagtaaataccttattgaagcgacaaaataa

SEQ ID NO: 65638 - DNA, 219 bp, Acinetobacter baumannii
  misc_feature (204)..(213): n is a, c, g, or t
atgactcaaccatttattgagctaaataatgttcagaaaatatttaaacagaacaaaacggaaaatacggtcttagaagatattaatctgaaaattcctgaaggtcagtttgtttgcttacttgggccttctggctgtggtaaatcaactattttgaacttacttgctggttttgaaaaaccaacttcaggtgacatttatgtnnnnnnnnnnatgtag

SEQ ID NO: 65639 - DNA, 951 bp, Acinetobacter baumannii
atggctggcgaaaaatcaaagtcaattggcgaatacggtgaaaaaattggcagaagtcttttagacttattaggatggaaagatactattagaaatattagtattacttgtaatctcggtgatgaacataaaaatgataaaggcaatccaaaacagtctcatggtgatgatgagttatttgtatacgattgcccttttttttcagaccgaagagtagctgtacatgtttccataaaacatagtgaacaatataaccctaatgaagggaaattaaaggcaaaaattaaaagtgatttaattgaactatcagaaatcattgaatgctctaaatatagtgttgagacggattcaattcttaatggaataagtactgaacggcccgatactaaacactttggtttattagtttatacttcccatcacaaacagcaattggataagaatgttacttacttattaaatcatatgatttttaatgaaaaaataaatgatactatttatatggtagataacgatagagctaatttcttatttgaggttcatcgctacttgaactccaattatgattctttcaaatatacaaatcctaattttggttttagtttattaggtgatcaagacaaccatactaactttataacactcaatatgctcaattcagatattttaccttttagagtagatgttgatggttgttttgagattattttattctgtaaagatgaattttcagaagattcattgaaaaagggtattgcctatgcttttgagatatctcagggttttacaaaaaagatatctattggttttccagattttaattatcatactcataaatcagccgaccaaactgcgaaaagaaacttttcaaatgaaaatcagaatatagatatcactattgaaactttttgttttttagaaagttttttaacttctgagataaataaataa

SEQ ID NO: 65640 - DNA, 1161 bp, Acinetobacter baumannii
atgaacaataaaaattttaaagatgaaaagagagttttttttggacatacacttagaactctactcaatagtgaccatattatgcctggtgatattaactttttactaaagagtaaaggtataattagcccatcatctaataaaagtgaaacagtacctttactttcttcagtaatattatctccttctgaactaacttctttattagagaaaacaattacgcatgaaaaaaacccaaagcatagaacgtccaacttaactttatcaaagcctaatagtgcttggaaaaaagaaattcagaatattaactttactcctttagctattgaattagaaaaagagtttagtagtattaaatttacaaaatatcctaaatttacatatgtaattgagcgctcagatttttcaaaagatattatttatagagaacaaacttttgaagcagatattctcttacaagaaactgatggggagcttaatattgatatattttccacacatacttgtaaagaaactgatgatattaatagtaagataattagcaacttaaccaaacagttaaaatctcaaaaaattattgagaaagaggaagttgaaaaaatatttttctcagatttcaatagtcgagaaaggattcttctattaaagcgtttttcagatactaaaggaagtaaattaactctaggtaaaattgtagatgtacttatcactattgatgaaactattcctaatttccctaaagataaagaaataggttggatgaataaggttattaagaatttacggataaatggtgatgatctaggacaattacttcttatctcgaatgaaaaatatcctgattattttataatacgtgatataaatattatctataatctgactgatggagcaaattcagttgaaattaaagtcaattataactttaatttaaaaaaagatattaaacaatctgaacttagttatgaaattaatagtattaactacaaaaaccctatgaatgaaacagcaaaaagagaaattagaaaagttattaataggaatatatgtaacttgattaaaggacaaaaaaattcgattatccagcaaagaatagcacttgaagcaaaaaaagctcctactattcaagatgacttagatttagctataggaaataactaa

SEQ ID NO: 65641 - DNA, 243 bp, Acinetobacter baumannii
atgtttatgaaaaacagtgtattgaagctattttttttagtgtttgttacaggaggaggaataatagtatctggttgtgaaactgagcagacttctcaaaataattcaatggtgggatatgcacaggaacaagcaaaggcacaagctgaatttgcaaatcaacaacaattagaaaaatcatctttatctgaagttaaagtaatagccgatggatcggttcaatcaatcaatacacaaaagtaa

SEQ ID NO: 65642 - DNA, 921 bp, Acinetobacter baumannii
atgtatgaggtatcatctgacaatacgagtaccacaccgcgtaatgaatctaaccaaaaagtagtatctaaaagcagttcatcaactacaaagaatgaaaaattagcgcctcaaaccctcttggctcaaactacctcccttaattcttctgcaccagtctgcaaatataattttgacgcgactcaagcagatttcgatctatggagtaatgaaaatcctggatatgttcctctgagtatatttccattgataacaggtcaaaaatttagtcttaaagtagagcctaggccagaaagtgagtatggttacatagattatgtggctagaagtaaagctagtcttaattcgtctaatgacattggagatttaactctacctcatacaggtattattgcatttgaaatggagtttaaaattccaacaataacgcttgttaactcaggttttgaaaacaatgcttatatgtctagtatttattttactggcgtaacaaataatggttatacagttagatcaagctatggatttgatatgggaagttatgatccagattttggtgaaaaccctcctaggttaatttattctgtaaattatcgtcttagcgataatagtggacctgatcattcctactacaaaagccagaacatgacaaataatacacaggaataccaacgattaggaatatatattaaccagaatactaggcaggttggttttattgtaaatggtgttgatcaaggttataaatctaccttacctgctccacttgaaaatataagttttaatgtagtaagtggtttatcaatatattctaatcagttatttggacaagaactgtctaatgaactcattactgaccgtaatgcgctacagtttaactaccctcagggcacaacagacatgtgtggtaatgccatctaa

SEQ ID NO: 65643 - DNA, 507 bp, Acinetobacter baumannii
atgcctgtttttattagttatagacattcagatagactaaaagcgttagaagtgcggaataaacttgatagaaataatattacttgttatttagatgtaattgatgaagagtcgagaacgacagatgatattacagatgttatcactaaaaatattaagaaatgcactcatttgctagccataatttccccaaatacaaacggatcttggtgggttccttttgaaataggagaagcgactatttttgatcgaagaatatgctcttatgcttttaaagaatttgcttatatatcacgctcaaatctaagtctttataaaagttttttacctgaatatttgcataaatggccgttactattatccgattcagatcttgatgcatttatccaagaatataaaagagatagtgagagagcgatatttgatagctctaggagtgcaacttttgattcacttacgaaaagcggcgcagaatcattccatcgcaatttaaaaagaattctttaa

SEQ ID NO: 65644 - DNA, 996 bp, Acinetobacter baumannii
atgcgtaaagcattaatagtcgggattaatgattacgataatattaattcgttaaattggtgtgaaaatgatgcaatgggcatctcacaagccctagaacgtcatgccacaggtgagccaaatttttctactcgacttttaactacaaataataaaataccgttaacaggcagatttatagagcaaaaaatacaagagcttttctctggcaatgccgatgttgctcttttttactttgctgggcatggtggatttgatgagacaaaaagtgaaggaattatctgtctacaagattatgcattcaataatggaggggcaattcgcatttccgatattttacattgggcaaatgaatctaaaattagtaataaaataattatattagattcatgtaattctggtgcagcaggtaatgatagaaatataaaaagtgatgccagtatgatcggggatggaatcactatcctcacagcttgtactaaagaagaaacagctcaagaaaatggtagtgatcagcatggacttttcacaagtttactattagaaggcttatatggaggtgcagttaatatacttggacaggtcactcccggtagtttatacagttttattgataatgccttaaattcttgggaacaaagacctgtatttaaaacaaatgtttctaaatttattagtttaagagataatttaccattaattgacaaatccatattacgtgaattacctaagtggtttaatgatccaacagatatatttccattagatccatcatttgaacctgatcgaaataatattcctgaagaatttaaacatttacctataaatgatgaacatgtagaaatttttaaaaaacttcagaaatgtaatcgatatggactcatcatcccacatgaggcagaacacatgtattatgctgcaattaattcaacggggtgtaagcttactgctttaggagcttactatcgtaaagtgtgtttaaagggaaatatttaa

SEQ ID NO: 65645 - DNA, 426 bp, Acinetobacter baumannii
atgagtaacatcggttcttgtttatgccataaagtaaaattctctgtaccttgtgaaatcaaaacggtttatcactgccattgcagcttatgccgaaaacaaacaggtactggagcaaatgccgctactttagtaaaagaaaatcagtttaactggttgataggtaaggaatatgtggctacctataaaaaagaaactggttttacttcatcattttgtaatagatgtggctcgcctgtccctaataaaattaatggtacaaactatatgtggataccgttggggcttcttgaacaaccgtttaaaccagatttaaaacttaatttttgtatagagtcaaaacatgattgggttgtgttaggggatgctcataaaaactttgcacatttacctgagttagaagagttcttaaaatattttgaataa

SEQ ID NO: 65646 - DNA, 231 bp, Acinetobacter baumannii
atgatggcattattaattgctatcttttataagggaggacttaaaattgattttgtacttgcgactattgcaggttactttgtcattttttttgtattaaaaaattatagatttccacttattccagaagttaaagaagatagtgatgatcatgtggtatatgcaagatgtatattactagtggtttttcttttatctttatttgttttaatgattggggaattactctga

SEQ ID NO: 65647 - DNA, 444 bp, Acinetobacter baumannii
atgaatgcacaaaaaggttttacattaatcgaactcatgatcgtggttgccattattggtattttggcagcgattgcgatccctgcttatcaaaactatattgctaagtcacaggtcaatcgtgtttacggagaattgtctagtttaaaaaccgctgctgaacagttaatccttgatggaaaatctagtacttctgctacagatttagggtataacacttcaaatttattgagttcggctggccctaacgtaagtgtaaacccaaacaatgatgggactgtttctattgcaggtacacttggtacttcagcgacatcatctgtaaatggagctgtagtaaccttatcaagaacagctactggggcttggagttgtagagtaactgcttcgactaatggcggttggaagagctcatttgttccatcaggttgtgcagcatcttaa

SEQ ID NO: 65648 - DNA, 1419 bp, Acinetobacter baumannii
atgcagccatctgacaaacaactagatgctcagcatcagaacagtactgcacctttaaaaagagccatgagtacccgccaccttgtcatgttatcgctaggtggagcaatcggtactggtttatttttgggttcaggggaagtcatttcacaaactggacctattggcgcaattattgcctatattcttgggggtgcaattgcttacatggtcatgctctgtttaggggagctggctgtacatatgcctgtttcgggttccttcggcgcatacgctcgaaagtacattagtccaagtacaggttacatgatttcatggatgtactggctaacatggacagcaacgctaggaaccgagtttaccgccgctgctctacttatgcaggaatggtttccacaaatttcaatgtggatctggacacttatttttgcagtaactattttcgggttaaatatcagttcaacccgagtatttgccgagtcagagttctggctagcgctagttaaggtcattaccgttattgcttttattgtgcttggattattagcaatttttggcttaattcctttccacggcgctcaaactgctccattgtttagtaatttaactgcccaaggttggttcccacacggttttcttcctattttcaccactatgctcattgtcaactttgctttctctggaacagagttaattggcgtagctgctggcgaaactaaagatcctgctcagaatgtccctaaagcgattaatgctgcaatctggcgtcttctgattttctttgtaggcaccattattgtaattagtgcattacttcctttccaacttgctggtttaggtggtgacaacgtaagtaatagtcctttcgttaccgtatttaattacatcggtattccatatgcagatgacatcatccgttttgttattattactgcactactctcagccgcaaactcgggattatatgcagcttcacgtatgatgtggtctttatcggagcaaaaactccttccgggtgtatttgcaacactttcaaaaagcgggacacctattgttgctttagttgtaacgatgttcggtgcaattccaggcttattatcagagcaatttgctcctgaaaccatctttaaaaacttgctaggtgttgcagcttttaccatggttattgtctggatgagcatttgtttaagtcagttcaatttccgtcgacaatggtaccgttctgggcatacagttagtgatttaaaatatgcagcaccgctattcccaatcgttccaattttaggttttcttttctgctttattacatgtttaagtatggcagcagatcctgaaatgcgtgctggctttataggttgcttaatttttactgccttgtgctatctcagctactttattttctatcgaaataaagcttaa

SEQ ID NO: 65649 - DNA, 249 bp, Acinetobacter baumannii
atgttattcaaaaaattcgctgttgctgctgctgttgctgctactttagctttcgttggttgtactaagaaagaagaagcttctgctgcttctgaagctgtagctgctgcttctgaagctactgctgctgcttctgaagctgctgtagctgttgacgctgctgcttctgaaactgctgctgctgcttctgaagctactgctgctgcttctgaagctactgctgctgctgacgcttctgctgcacactaa

SEQ ID NO: 65650 - DNA, 579 bp, Acinetobacter baumannii
atggcaattaatttagaaaaaggtcaaaaaatcaatttgcaaaaagcagatggtagtagtcttcaacaagttttcttaggtgtaggttgggatgtagtaaaaagtaaaggattttttggatttggaggcagtggtaatattgatcttgatgcttcggtcattttatttgatgaaaataaaaaaatgcttgatgttgtctactttgggcaattacaaagtaaagatggaagcattcgtcattcgggagacaatttaactggtgagggaagtggggatgatgagataattcgtgtgaatcttaatcaaattcctgcccaagtaaaatctttagtatttactgttaatagttttcgcggtcagagttttgagaaagtggaaaatgcattctgtcgtttggttgatcaatcaactaatcaagaaattgcaagttataaactttcttcacaaggtgcccatactggcctaattattgcaaaaatttatcgccataatgatgtgtggaaaatgcatgcaattggtgaaaacgtacatggtcgtacctttcaagatatcgttcctaatgttttacctcatatttaa

SEQ ID NO: 65651 - DNA, 714 bp, Acinetobacter baumannii
atggcacattttagtttagtaggttcaccagagccattcttacatgttgcaatgcgtcgcggggatcgaatttattgtgaaagtaatgcaatggtcatgatggaagatggccttgagttaaagggaaaactacagggtggcttaatgcaatcattattacgccgttttgctaatgatgaatccttatttcagcagcatatcgaagctgtacgtggagatggtgactgtttattgtctgcttcactagatggcgatatgcaaattctcgatgtaggtgctactcaatatatattgagtgatggtgcatttgttgccgcccatgattcagtcaatgtaaaagcaagattaaatactagtcttggaggggcttttttggggaatacaggtggttttcttgttatggaaaccagtggtcagggacaagttgtagtttctggctgtgggactttatttgagttagaagtagagccgaataaagaggttgttattgataatgggcatgtagtctgttgggattcacgtctaaattatcatttatctgtttcaacttcacagaatagtggtttccttggcaatttagtcaatagtgtaacgagtggtgaaggcatggtgttgcgtttttcaggtgctggtaaagtcattatttgctcaagaaaccgaaataattttttacagtggttgatgtcaaagttaaaccgtcaacagtctcattaa

SEQ ID NO: 65652 - DNA, 1296 bp, Acinetobacter baumannii
atgttgaacctagttcgcggacaaaaaataaaattaaatgatattttacaggggcaaccctctttttatatccaaattcaatatcaagcagattttgaactagatatcgctactttcgggcttgattcacagtatcgtttaagtgatgagcgatatatgacattttataatcaacctgaaacgccatgtcaggctgtaggtttgcttgaaaataatactgagtctagctatttcaaagttggtcttcaaaaacttcctttgagcattcatcatttagttttaactgctgcaattgatggtcatgctgtcatgtctagtgtacagaaaataactgtcaaaataatgaatctacaaaatcagcttattgctgaattagaactcaatagccagttatttgatcaagaacgtgccactatgcttattgaaatctatcgtaaagatggtgtgtggcgtttggctgcaattggacaaggttttaatgaggggttggctgcattaattcgccatttcggaggtgaagttgcagatgaaagctttgcacagaaagactctatagtgcaaccatcaagtgttgatctaaagaaaaaactttctctggaaaaagcagaaaaaacagggaatgcttcaattattgatctaactaaaaaatctctgattcagctagagaaaaaaaacttgctagatttaacagcaagagttgcactcgttcttgatgcctctggatcaatggattggcaatatcgccgtggggatgtgcaaaaagtagttgatcgtttgatgccattagcaatccattttgatgataatggaagttttgagtgctgggcatttgccgcaaaaacaacacagctcgatgatgttgttttaactaatgttaatgattttattaatacgactcatcgaggttggaaaaactggtcagttggcgcacggtataatgaggaaataccagcaattgaagctgtgattaattatttccaaaaatttaatgatcaaattccaacttatgttttatttatttctgatggtggagttggaagtcgtcgagaaatgaaaaaaatattatctcaagctgccaagcttcccattttttggcaatttgttgggattggcggacgtgattacggggcacttgaaaagttggatgaaatgtcaggtcgtattgttgataactgtaatttttttagtttagaccggattgatagcgtttcggatgagcgcttatatgaattgttactgcaagaatttcctgattggttaaatgcggccaaacatcatcgaattgttagaaattaa

SEQ ID NO: 65653 - DNA, 576 bp, Acinetobacter baumannii
atggcaattagtttaactaaaggcggtaacgttagtttaacaaaagaagcaccaggcattaccaaaacaactgtgggcttaggctggaacccacgcgtgacggatggaactgcttttgaccttgatgctattgcatttttagttaatgaaaacggtaaggttcgtgcagataatgattttattttctttaataacctaaaatcatctgatggttcagtagttcacaatggtgataaccgtacaggtgagggtgacggtgatgatgagacattaagtgtggacttgagcaaggttcctgctgatgtttcaaaagtaatctttgctgtaacgatttatgatggacaagctcgtaaccaaaactttggtcaagttgctaatgcttatattcgcgtaactaatgatgcgggtggtagtgagatcgcacgttatgacttatctgaagacagtagcacggaaacggctatgatcttcggcgaactttacaaacatggcagtgaatggaaattccgtgcaattggtcaaggttttgctggtggtttagggcctttagcagcctcttatggtgtttctgtttaa

SEQ ID NO: 65654 - DNA, 1065 bp, Acinetobacter baumannii
atgaaacattttcgtttctcaattttttttaccgtgatttgtttaggattatcggcatggtgggggttaactcatggaccaaatgctggtttctctatgatgcttaaagcattgttgattacaagtgtattggcggtaatggaggtctctttatcttttgataatgctgtggtgaatgcttcagtattaagaaactgggatgagttctggaaaaagattttccttacagtgggaattttggttgccgtatttggtatgcgtttagtcttccctttattaatcgttggcgtaactgctgatatgggaatgatcgaagttgccaaattggcactaaatgatcccaaagcgtattcagaaaaactactcgcccatcatgctgaaatttcagcttttggtggtatgttcttgctattggtatttttaaattttttatttgatgatggcaaagatacgcattggttccactggttagaggtacatctttcgaatttggctaatatcccggcaatgtcagtatttgtatccttaattgctctacttgttatgtccgcatttgttcctttagaacagaaattaattgtgattgtagctggtatttggggcatcgtggtatacattggggttcaggtcattggtcatttgctcgaaagcagtggcgatgaatctgatgaagagcaggaatctagcaagtcaggtaatcttgttaaggccggtattggcggctttctttatttggaagttttagatgcctcatttagttttgatggtgttattggtgcctttgcgatcacaaatgatgttgtaattattatgttggggttagcaattggtgcaatgtttgtccgttctatgactatttatttagttgaaaaaggtactttagaagcctttatttatttagaacatggggcgcattacgcaatcggagctttggctgcaattatgttgtacactggaacaggtgggcatgttcctgaggtcataacaggcttaattggaatagcgttcatcacatgggctgtattatcttcgattgcttataataaaaatcagacacaagcttaa

SEQ ID NO: 65655 - DNA, 579 bp, Acinetobacter baumannii
atggcaattagtttaaataaaggtggaaatttatccttaagtaaaacagaccctaatttggtccgcgtcttaattggattagggtgggatgagcgagcgacggatggggctgcatttgatttagatgcgagtgccttcttattaacagctacaggtaaggtccgtggagatcacgattttattttttataatcaacttaaatcacaggatggttcggtagagcatacaggggataaccgttcgggtcagggcgatggtgatgatgaaactatattggttaacctttcaaaagttgctcctgaagttgaaaaaatcgcaattacagtaaccattcacgatgctcagacaagaggccaaaactttgggcagattgcaaatgcatttattcgagtagtaaaccaagatacaaatgtagaagtcgtacgtttcgatttggccgaggactattctaccgaaacggccatggtgttcggagaagtgtatcgccataatggggaatggaaatttagagcagtcggtcaaggttacgctgggggattggctgcaatgtgtcaacagtatggtattcaggttggatga

SEQ ID NO: 65656 - DNA, 1185 bp, Acinetobacter baumannii
atgcaacaactcattacgggcgccaatctggtcttaagctctgcacaatttcatttgaaagttaaaaccaccttgccaacgaatattggtctagatgtaaccgcttatctattaaactctcaaggtaaagtgcgtggtgatgctgatatggttttttatggccaaaagcagacaccaaattgtagtgttgagttaattgaaacgacctacaaagtgccttatttagcacaatttaatattaatacacaaaagttggatgttgatattcacaaaatcgctatgtgtgcgacggttgatggtgaaggtgtactaaataccattcaggatattcaaatagaattatgggaaaatgggcagctcactgctactgcaactgtaaagagtgccgaaaaaacagaaaaggcactgattttggcggaagtttatcgccataaagatcaatggaaattacgttttgtaaatcagggttttaatgggggcttaaagcctttatctgaatattttggtgtcgaaattagtgatcaaccttctgcacctataccacctactcctgtaacgcagccgaaaattaatttaagtaaaattactttagataaacgtaatagtcagattaatttaaaaaaacaggcacaagggtttggagagatcaaaattaatctgaattggaatcagagttctcagcagacacaaccaggtggtttctttaaaaagcttcttaatcagaatcagggaattgatctcgatttgggatgcctttttgaaatgcaagatggtactaaatcggttgttcaggcattaggaaagagatttggtagttttaacgattttccatatatccagctttctgcagatgaccgtactggcgcattaaaagagggtgaatggcttcgaattaatggacagaattggcaacaaattcgtcgagtggtcttatttgctttcatttatgaaggtgtacccaattgggctgagacagatgcagtagtgacgatttatgttcccgatcagccaccaattgagattcgtttgactgaaggacagcctttaggtatgtgcggtattgttgagttagtgaatcagagcggtagtattcaagtccaacgccatgtgcgttatgtaccaggtcatcgagagctagatcaagcgtttagtttcggtttacgttgggttgcaggtagcaaataa

SEQ ID NO: 65657 - DNA, 882 bp, Acinetobacter baumannii
atgttgtctgcattatctctaggagcaactttatatatgccagctactcgtccagatttgtggcacgtggtaaatggtgaaaaatatcctgagctccgctctttagtaatttgtttagaagatgcagttgctgggcatgaaattgaatttgccaagaaaaatctcaaattattattacagcaaattcaacagcggcaacatagggcacaacatcctaagattttcattcgccctcgtcatatcatgatggctgctgagttggcggaatggtcagaaattcgtgccttagatggaatggtattgccaaagtttggtttgactaattttaagcagtgggtggaggtacttccaccagaacttgcttatatgcctacccttgagacagcagagtgttttgatgttggacaaatgaaagagttgagagaagccctgcctgaatttcacaaaattattgttcttagaattggggggaatgacttactaaattgcttggccttgcgtcgtccaaatgatatcaccttatatcaaaccccagtaggtacattaattgcgaatctagccggtcaatttttacctcatggttttgcattaagtgcgccagtttgtgagcattttagtcaagtgaaattattgcaagatgagttgtatttagatttacagcatggcttatcaggcaaaacagtgatccatccagctcaaatttcaattgttcatcaagcgtatcaggttaatgaaattgaactaaagcaggcccaagatattttattagatacaggtaaagccgtattcgcatgtcatggaagtatgttggagccagctacacatcgtcgttgggcagaaagaattctggaaagatcaagaatatttgggttaaaaatataa

SEQ ID NO: 65658 - DNA, 1152 bp, Acinetobacter baumannii
atggcgattatcagtaaagacagggcaagtgaattagttttaaagcatgggtttagtggtagttatcagaaaaaacaagttacttttctattaaaacgtacctatattgagccaatagatacaattaaaaaagagcgactgattcaatctggagaaaagcattattcgcagatgattagtgtggaaagtgcaccaacagaacgacatttgcaattatttgagcaagcaatgcaacaagggcagcagcgcctagcaaaagaagttcagcaattggcacaggccttggttagtcattttactgcaccaatcgttttagtaagttttgtgcgggcaggagtacctttaggtgtactgctttatcatgctatacgagacttggggtacgaatgtatacattacggtattagtattattcgagatcgtggcatcgattttgccgcattggaaactattattgctaaacatggacatgattcgattgtgtttgtggatggttggacaggtaaaggtgctatccgtcaagaattacagcgtagtttaagtaatgattcccgttttaatgggaagcctataccattagttgtgttatcagatattgcaggttgtgcatggctggccgctagtggagaggattggctgattccatcgggtattttaggctctacagtttctggattaatttcccgaagtatctgtgagggtgaggtcttgagtgccaaagagcttaacgctaataatatcgatcaatggcatagttgtattgagtatcctcatttaaaagaatttgatacgtctcagcaatttattgagcaaatcaaccagctccgaaggtcattaaaatcccaaagtaatgctgtctggacagaagcatatcaacaagtgcagcaaacccaaagccagcatgtaatacgagaactggcaaaaaaatataatattcaaaatattaaccgtataaaaccaagtattgctgaagcaacccgagctattttaagacgtgtacctgaactggttttactgcgtgatgcagatgatccagatactgctttactacgccatttgacttgtatcacaaaaacacctgtgcaaattgtaggtgatcaaatcgctccctataaagcgatcacattaattcaaaatttgggaaaaggttag

SEQ ID NO: 65659 - DNA, 831 bp, Acinetobacter baumannii
atggtgcaaatgaataactttttatctggtgcgcctaatatgttgacgcctttaatgctagtcgatctggatgatactttatttcagacccatcgtcgtatcactcctcaagctgactttaagatggtgacaacggataagcaaggacaacccctggcatacatgaacccgattcaacagcattttgtacaatggttgctacataatacgcatttaattccagtaacggcaagaagcgcagaagcattgtcccgtgtacatttaccttttgattacggtgctgtgtgttcacatggcggaacagtattaaatgcggatttcagtgtgaatcgagaatggcatatacaaatgcagtgtgcactagcaccttatcaaaaaaaacagcagatcttaattgaggtgctacagaagcaagcccttgagtttggttctattcgaacttgggttgttgatgagcagggcttgggtttatacgtggtggctaaacaaaatacagaaaatgataatccttatgcaccgaatttcttaccacaactattaaatacattaagtccatcgcttctagaagatttctattttcatttaaatggcaataatttagcgttaattccaaaaccagtcagtaaagccaatgctgctcgttttttattgcaacgattcgcatctcaacaacgtccaattcttggttttggcgatagtttatcggatgtcgagtttttgaacttatgtcattggtggggaatgcctaaccatagtcagttaaatcgttgggtgacacataatttgacacagcaatacaaagaagaaggatattatggcgattatcagtaa

SEQ ID NO: 65660 - DNA, 1140 bp, Acinetobacter baumannii
atgattgagatcgaattacagcgtgggaaattatatttacaacctgataaaaatagctgttggcaatggcaggatttgttgggctttgctgaacgggtaaacccaaagcgggcctttctttttgtttctaaagtactaggtcggcatattccagtcagtcctgatgtaatgcgtcatgcttttactgatttggctgagctggttccagatgacttgcctgaacccattattgtgattgggatggctgaaacagcagttggtttaggggcgggagtacatcaagttttacaaaagcgctatcccaatgcaatttatgtaacgacgacacgccatccagttaaagatgtgcctttgctggcccgttttctggaagagcatagccatgcgcaggatcaattattgtatggatcacctgatgcagatatccaaaagaagattttggccagtaaaagtattgttttggtagatgatgaggcatctacagggaaaacctttattaatcttgtgtcagctcttcgggccgctggtttagatcagctctcacatattgttacggcgacgcttgcagactggtcatcaggaattcatattgcgggattaaattgtcaatgtattgctttgatgaagggtaaatggaaatggcaagatgcagaaaattctcctcctattactatgccaaaagtcgacactgtggcatttggagaatttaataccttaccggaacctacttgggggcgtgtaccggtttatgatacctctgcctatattcgtttaaaaactaaacccgcagagcgaattttagttttaggaagtggtgaatatgtttggtcttcttttttattggcagaagatttgcaaagacaaggtgctgaagtgaaatttagtgccattacccgctcacctattgccatagggcacgcgatccagtctgctttagcttttccagataactatggattaggtattcaaaattttgtttacaatatcaaccctttagaatatgaccgtgtcctgattactgtggaaacttctgctgactcggtcgcaacgagcttattagaggcaattccaaatgctgaagtcatcagtgcagtagagtttccacatcaaactgtgaatttgtatggtgcaaatgaataa

SEQ ID NO: 65661 - DNA, 369 bp, Acinetobacter baumannii
atgtggattgtatttgctgctaaatattggcgagaaatcattattgtgtttctcgcttttttattagccatatctttggccgtactcaattacaaaactggacagctaaaagaagctgaacaaaaatgcttggcacagatccagaaaattgaaaagaaaaatttagaggcccttgcagtcaagcaaaaccaaatcaataaagtgagtgcagactatgaacgtgtcaaagcagaacaaagcacaaaagtcgaaacagttacacgtgaagtgcaaaagatcgttgagcgtcctgtttatctcaatcgctgtattgatgatgacggggtgtaccaaatcaatagccttattaaagccagtaataccagctaa

SEQ ID NO: 65662 - DNA, 852 bp, Acinetobacter baumannii
atgacaattcaaacagtaaatctaggtacggcaccgactggcgcaggcggtgatactttccgctctactggcgcaaaaatgaatgaaaactttacgaataacaaccatgcagctagtcgttatgtaggtactgctgctgggaatgtaatggaagtcggtgcttttgggttggggggttatatgacgcaattatctatgccgaatgactcaactgtgcttggttcgggcttttattattatgacattggtagttctggagcgagtacgtggcagcaagtcgagacgaatgtctttgtattgcgttcatcattttcaaatttaccacgcggctttgagatcggtgttctaccgtacacaaacaagttttatctaagaagtaatgaggacggaggtgcagcttggagggttccggttttaattagacactcggggaatacaactattgatgcaaacggctttattaaagctgcttcaccgatcgtaaaactatttgcagaaaaaattgaacttaatgatgaggctgctgagcagaacattacttttgaaaagctcgatgtagggcactacttgctaaaaggaacgtcaggttttgcaacggaaggttggtatattgaaacgccaaaagatgctaacgggaacattctttttgctgtgatttatcagcagttagaaaataaagatattgaaatcaaaacttttaaaaagaagtttgatgttgagtctgcttcaattattgctgatttggataatccagttgatatttcaacgggccgctggatcgatattcgcttgcaagaaattcctaaaccagtacccgaaatgccagtggtgacagaaaatgaccctgaatag

SEQ ID NO: 65663 - DNA, 1125 bp, Acinetobacter baumannii
atggcagatgaagcatttactccgtcttccccagcagagcgctatgctgaggcattggcttcaggccagtttatggcagatgaagcacaagcacaggcagtgcaagaattagatcgtgtatggaaagaacttttaaatcgttataaggcttctaaaaaagctttccgtcgtttccgccgccaaacttctccaaaaggtgtatatatgtggggcggtgtaggacgtggcaaaacttggcttatggaccaattttatgagtctgtaccatttcgccgtaaaacacgtatgcattttcatcactttatgcaacatgttcataaagagttaaataaactttcgggtcaacgtaatccactcgatatcgtagctgatcaaatttataaagatgctgtcgttatttgtttcgatgagttttttgtctcgaacgtaactgatgcaatgattttgagtgacttattccaaaagttatttgttcgtggtgtaacactcattgcaacttcaaacattgcaccagacggtttatataaaaacgggattcaccgtgatcgttttattcctacaattgaaatggttaaaaagaactgtgtcgttttaaatgtagatgcaggagtggattaccgtttacgtgttttaaaacaggctcaattgtttaaatcaccattaggtaatgaagctcaaagctggatatcagagcgttatactgctttaactcatactcaaacaaattctcatgaaccgattgtgatcaataaccgtgttgttgaaaccctagggcatacggaagatgttttatggtgtgagttttctgaactttgcttaaagccccgtagtccagcagactttattgaaattgccaatatttataatacggttttagttagtaatgttcctcacttaacagacttcttgtctgaaggcacacgtcgttttatttatctagtcgatgaattttatgatcgtggagtcaaactacttttaacctctcaagatagtattattgatatctatcaaggcgagaaattggcttttgaaattgagcgtactcgttcacgtttattagaaatgcagtcagatgagtatttgcattctgaacatcgacatattgatgcgactaaaacttcttaa

SEQ ID NO: 65664 - DNA, 1218 bp, Acinetobacter baumannii
atggctaaccaatttcaaaatatgacggaatacactcgtgaatttgggcgtattctccacaataaattaactttaattccacgtgttacacgtggttatgatgatcgttatgcaaaaactggcgctaaaatcggtgacaccttaaaaatccgtcttccaaaccagtattcagttagtactggccgtgtcgctgtgccacaggacgttgtagatgcatcagtagacctgaaagtaaacaagcgctataacgtagcaactcaaattgacacgcaacaatggacattaagtctcaatgactggtcgaaagaagtcgcaacaccaattgcaacacgaattgcagctgaagttgaaaaagatatgttccttgatgttgtttgtgagacatataatcaagtcggtacgccaggaacaaaccctagtaccatggctacatatttagcagttggtcagcgcttagatgagtacttatgcccaatggactcagaccgttcgttaattatctctcctgcagcaaacgctgctgctgttgatgcatttaaaggattattccagtcgtctgaacgaattgctgaacagtatgaacgcggtgcaatgggtcaaggtcttggcttcgagttttaccgctcaggtcttgtggcaacaattactactggtaataaaacaacaggtgtgactgtatctggcgcgaaccaagcaggctcaacattagtcgtaggtggtttgacagcaggtgatacattcaagcgtgggcaagtattcacaattgctggtgttaaagcaatcaatccagagaccaaaacagcttacagctatgatcaacagttcgtgatcactgctgatgtgactgcttctggcgctactgcatcattaagtattgcgcctccaattaaacttggaagctcaacaggtgatgtaaacgctcgtgatacagtgaactcgttgcctgctgcaagtgctgcactgacttttgaaggtgctgctaactcaacttaccgtgttggacttggttttcacaaagaggctattgcatttgctacagccgatctagtccctcttgatggcattaataactcatcagcaacaattgagggtctgcgtgttcgtgtggcgcgtggctcagatatcttgcaagactacaatcttgctcgttttgatatcttggctggctggaaagttatccgcccagagttttcaacgcgtttggcattagctaactaa

SEQ ID NO: 65665 - DNA, 1395 bp, Acinetobacter baumannii
atggcgaatattattgatgttccattcgtcggtcagtcataccacatgaaagattggtcggttgactgccaacgaactttaaacctttatcctcaatctgttgaaagtggcaacgctccacaagtttctgcacttctacctacacccggattgattgctaaatacgagttaagcggccctgtacggggactatatacaacaagtgctggaatgcttgctgtagttggctcgaagttgtatttactcaataaacaagcagaagaaattggggaaattcttggaacaagaaatgtctattttgcagataaccgaatagacgtattaatcgttggtaatccccatacatatgtatttaacttttcatccaagaaacttaccactttgactggtggtggttttcttggtgcaacagatgtcactttcttagattctcgtttcattgtattgaatcccgaatcggatcaaatccaatggtcaggactattgaatactgagttttcagctctaggttacgctacagcagaagcaagctctgacaagttggtacgaattttcgcacagaacagtcagttatggttagtaggtgaaagaactactgaaatttggcacagtactggcagcgctgatcaaccattcttaagggtatctggcgcatatatcaactgtggttgtattgcaaaaaactctctggctcagttcgggacaagcttgatttggctttcacaaactgatgttggagatggtcaagttgttctaactgaaggttatcaagttaagcggatttcaaaccatgcaatggagcaagagtttgccagttatgaacgcttagatgatgcagtgggatactcatatcagcaagaaggtcactccttttatatgctttcattccctacagctaataaaacatggtgttttgatggatcgacgggaatgtggcatgaacgaagcttctacaacttaaattcgcaacatgaacggcatcgatcacaagttcactgcttttacaaaggtaagcattatgtaggtgaccactcaaatgggattatctatgaactaagcctagatgctgaaacagacaatggccgaataatcatgcgtgagagaactacaccagtaataaatccaaaagggcaacgtctcatctttgatgctcttgaaatatttgtacaggctggacagcatgtaaaccgtgagccaatagtgatgcttgattggtcagatgatcaagggcaaacatggtcctttgatcaacaagaaacgctcggtaaagtcggggagtggaaaaagagagttatctttcggcgtttaggtcaggcttttaatagagtttttcgcttgcgggtaacggattcaagccgacttataattactggcgctcaggctaaagtgagatag

SEQ ID NO: 65666 - DNA, 1323 bp, Acinetobacter baumannii
atggctattgatccaagcatcattacgaatgcaaccctacaacagcaagcacagcaaaatgaaatcggcaaaaatcttgcaggtctaactggtgcacttgggcaactggtgcttggtcgtaaagctcagcaaatgagccagttagccacacctcaaaagcagcaggcatttgctaatgattcaattttttctccatacttgaaccgtgtattaaaggcaaaccaactaacagcgcaaaaaaatgcaatagaccttttaaaggctcaagctgagataggtaaaacaaacagtgaagcaactaaaaataatgctcaagcaggtggatttacacttgataattcacagaaaaagtttgatgcccttcagggtgctttccaacaagcagctttgacaggtgataaaggagcagttcttttaacacttgacacattgcaaagaacaggaacaatcactcctgaagattatgcacacaacttcaagatagtaagtgctatgagtcctgaagaaatcaagcagtatgcaactggtagtggcttactgaataaggacttagcaccttatttaagccaaaccaaaaacaatgaagcagacaatactgcatccgttgctaacaatatccgtacaactgatgcgtcacgttatgcgactgatactgcagcagctacggcagataaaaaccgtactcaagatgctcaacagttcagtcagaagcagcaactggaagaatggctggcgaagaacaagcctattggaacagagatgggaaacgatggttatatgtatgccatatatccgggtgggaagggtgtaagaatctcagatgggagagggtcacccatccaaattcaaccaaaagggtccaatagtacggttgcttctcagaatgaagaaaggcaacgcattagcagggtcaatgctgttcttgatgagattcagggaatcttgccgcaagctacagcgagttatgcgggccgtggtattgatctgttagcacgtggagttggcttagcaactccaggtgatgtagcaactggtaagcttggaacattaggcggtcaattagtagctcttatgccgaaaatgtcagggccgcaatctgataaggatgttgcaatgtacaagcaaatggctggtcagttagaggatccaaccattccattgcaggttcgacaggcggcattagagactattcgcagtttgaacaacaagtatgctgagatgaatacgcaaagggcttcaacagtgtcttatcgaaatgatgcatcaagcaatacacagccgcaaaaccaagcaaaattgaacaatattctgtttggccgataa

SEQ ID NO: 65667 - DNA, 513 bp, Acinetobacter baumannii
atgagaaaaatattattaattagcacttttttggtgtcaggcttaagccatggagcaaattgggcttatgttacttcttcatcaaccaacgaagactattacgttgataaagactatttaaactacaatgctaagactggtgtaagcgaaatatgggttcaatctaaaagaagctcactaactgaccaaaacaagatttatgtaagctcgaaagctttaatccaatatgcttgttcggcgaaaaaacaacgaaccataacaagtattgagtattttgataatggcggtgtttctaattccagaactgttccagcaaaagagttttcgattatttttccagatacagtagctgaatctctttgggaagcagcatgcttaagaaaaggaaaaggggtttatctaccccgttacttatctgagaaagatattaaaaaagtacttcctcaattaagcaacaaatctgatgattacactcctgaaatgattgatcttaagtcagttggaatcaattga

SEQ ID NO: 65668 - DNA, 2307 bp, Acinetobacter baumannii
atggcatcactactttctgccgtacgaacccgcttttttgacaaaagcaacaagcctcttgctggtgggaaggtgtatacctatgaagccaactcaacaaatcctaaagtaacttggtcagatgaggcgctgacagttcaaaacaccaaccctgtattacttgataatgaaggtacagcattaattttcttttctggtaagtaccggtttcgtattgaagatagagatggtgttctggttgaggataacccctcagttacaagtttagtaggaattgatggtgtaactacagaaattgttcgggatggcgatgaaaatcagaaagacatcaatgacaagacagcacaagtagttccaactataagtgaccttttaaatgtggcagttcgtaaaaatcaacagactgtgtatgttcaatcatacaacgcgccgatttttgcagaactatatccgtataaagggggtgacaactttacttatgttgactcattaaaagatcggtacaatggtgtgaccatttttaatggttggttaagggatttaactgacaaacaaatcagcacatacgatgcgggcttgaccggggatatctcaaaagatggagattcgacagtaaagctaaatacgattgcaagtgtaatttcagacggatttgaagttatctttgctggaaagttctctattagcacaaatattagctttaagaatctatataacttaaaaattacaggtattgattcactaatttcaggtaataaagcaacgtgggtctttggtgaaaagattaatggctctaccaaccacaggggcatgatttcatttaataattgtccaaacttgaaaattagtatgttaggtgttaaaggaatccaaaaaaatatttttggttcatttcaagacggagattcatgtatacaaatcgtgaattgtccaaattatgaaatacgactttgtacattaacaaactgctttgcatggccaattattgccgaaggaagcccatttccagttattgaatataatgttattgctgatgcggtgcaccaaagcggtattaacgcatgtgttggaagtggcgtaaactcaaagattaacttcaatcatatttcgaattgcgggctctatggcattgagtttgaaacatatacatatcatgagacagatacatttgagtgtatgggcaatgttatttctgactgttttgttggcattactccgactggcacgggtgtaactaacggtttgataattggtaaccgaatcacaaaatgtggttacactggaatgctattccaaaacttgccgaatagtttatctctatctgttttcaacaacacgttagatgagaactatcgcggatttatttttaaatcttctccgaacacgtttgcactaatgaataatattcgagggcgtgcaaaaactgatctttatttaaaaataaatgtagattactttgtattaaaagttattgatgcacatagctttttaatcaagagaggggctgtaagtggtccgggttctatttatgttaatgggtatcagtttactgttacatcagttacagattatacagacccaactggtgaattcggctcagatactgatctctctaaagttacagtatcagagaatataactgaagaccttgttctaaataagcatttgcagagaaaagttacagctggcagtgttacagaagctaacatttctatgcttaatgacagcaatagtcttattgttaagaacaatatcttaagcggcggtagttatggtttcttttacactcagagcgaagatattgtaattcctgcaggaacaaaacaatatgtctatgataacgagatattagattttgatataaatgctgtgcttcacacacagtctacaagccatgtttattatcgcggcaataaagttagaactaagtcaattgcagcatatgttttgcatcttgatctcatcttaaacggatcatttgcaacaaaatcacttttacaagttaatgacggtaaggcccatacaaatactgataaaccgatacattattttagtgcatacaatgacgagttgattatcggtgtttatgctagttatttgaatggtgcgacaactgggcaaccagcagttaagttaaattctggtgctgctgtaattgaatcaacgccggatcaaacgttaacaacaggtcgatttttcagaattaatgctgtactgaaaaagggagtaaatactgtcgaaatgctagatacagttggcgatttaatttacacaaatacttttattgatttaattgtaccagcgtag

SEQ ID NO: 65669 - DNA, 138 bp, Acinetobacter baumannii
atgagcgaagaactttcaactgaagatgttaacgtttctgaagttaaagctgaagaaacgcttatgagtgagaatatttcaaaagattcttctgaatatattcttgaaatgcggaaaaatcttatttttatagaatag

SEQ ID NO: 65670 - DNA, 150 bp, Acinetobacter baumannii
atgaataatttaaatattttattagtagaagataatcaatctgatattgatgtttttaaatcatctatcgaactatttgatgatgaacattcaattgagacgtctcttgaaatagcaaaaacatatgaagatgggcagagtaaaacttga

SEQ ID NO: 65671 - DNA, 2259 bp, Acinetobacter baumannii
atgagccctctaaaacttaattatattcacctaaaaaatccaagtcttgaagttttcagctgtaatactctccctctaagtaaacgaattaatttattgcatagattaaatcccgttagaagaattcgaccttcaggaaggcacttaacaactattggcaaagaattaatacaaaatgaagccgcagcaattattgagttagtaaaaaatgcatatgatgctgatgctgatcaaataaaaattcaaataaatttagatgaaaataagaaaaatgttgaaattattataatagataatggtcatggtatggacctagatacattcttgcataaatggatggtaccttctacagatgataaatttataagaaaacaaagtcctagtaaaaatcggatgatgcaaggtcgcaaaggaattggtagatatgctgtggcgttgttaggaaataagctctctattaccactattactaaagatttaaatcaagtacaagctgatatagattgggatgaatttaataaagttagatacttagatgagatcaaaatagagattgatgatcgcgtacttgaatatggtgaacctgggactaaacttgttatccacggtaacgaagaatattttaaggtttgggatcgtgacaatattgatatattgatttttgaattaaagaaacttatttcacctttagactccaaaaaaaatgactttcaaattttcctgaagctttctcatgatgaagcgtcttacactgaaataaaaccttttccaatagtagatttctttgactacagaatcagcggagaagtttttgaaaatggcaaaggtgaactagtatactcttgtcaaaaagaagaaaacctacctgatattaaaatatcatttgactactatcaaccaacaaaatgtggatcactaaagtttgattatagggtttatgatctagaaactgatgcattaaaggacttactaataagaacacaaaagtctggaagcaactcagaattgagtcgacaagatatcaaaggattattaagaaaataccacggtgtcggagtatttagaaacggatttagaataagacctttgggagataatggttacgattggttggagatgaacttacaacgtgtaaataatccttccatgagacttagtgagaatcaagttattggatatgtaaggatccagtcagaagagctttctaatttgtttgaaaaaagtgctcgtgatggtctaagagaaaatgatgcttataaaaatctagtcgatatctctcagcaagtactccgtcatttagaaatttatcgctttaaatatcgtgaatcttcgggtaaatctcggaaaaaagaaacaatagaagaaaaattagataatattctttcaagtgaaaacttatctgaaaaaattcaaaaaactcttaacaattcaaatttagagtcttcaattaaagaaaaaatttccaatgacattattggcttggtcaatgaggataatcaaaagaaaaatattgaacttcaatttattaaaaaagctattgcaacatatcagggtcaagcaacattaggtaaaattgtaaatagacttattcatgaaggtagaaggcctttaaattattttcaaaatgaaatccctaatttaaaaaaatggaaagataaatacaatgaaagtggtaatgaacttcattatgctaaagttcttgaacgtgtagatggcgtactaaaaaattcaaaaagctttgtcttattatttaaaaaaatagatcctttagctacagctagacgcccaaatagaaagaatgaaaatttaaaaaaaattattaaagggactttaaatatcttcgaatcagaccttatatcgaatgatatacaagtcaagtttacttgctcagatacaatcgaaattttatgttgggatcaggatatagcagcaatattttttaatttaatagaaaatagtatttattggatgacaagtacaaactcttctactaaaactcttgaaatcattgtaaatgaaaataatggaatattgactgatattatttttaaagactcaggaccaggaatcaaagctgaggatattgaaagtgaaataatatttaatcccgagttctcaggtaaaccagaaggtggcagtggattaggtttagctatagctggtgaagcagcaataagaaataatttaaagctacaatctattgaaaataatggaggggctctttttaagatgacgcttaaaggtgaaaataatgaataa

SEQ ID NO: 65672 - DNA, 501 bp, Acinetobacter baumannii
atgacaagcgattttttagtggatacaaataattcaatatctcctaaatttgcaatccaagttaaatattcaaatgctctcaatgacccacgtacaatagaaaaaatagaaatcgaacgacaatattggaaacagcaaaacattcctttttatatttttactgaacatcaagttcctagaattgtcagtcaaaatattcaatggatgtacagctcaataaatactatgaaactgagtgaacaagatacgttagataaactaaacttttatgcagaaatttttagtaaaaataagtctaaaaagattaatgaattaacgagaatcattgatcaaaaatatcattttgaaataggacaatctttaagagaaatcagagacttacttgctcagcggtatttcatatttgatctcaatatttcatttaaagatctaagaacagatcatattcaattgggtcaacttaatatttggaatgaggtacttcatgctgaaaatcaatga

SEQ ID NO: 65673 - DNA, 519 bp, Acinetobacter baumannii
gtgttacttgatcgatcacgaccaaatgatcagcaaaaatttagtgattacttgaatgatttgggaaagaaaaatggtttctctgatatccaaacctttaaaaaatttctaataaattcctctagaaaatggtattgcatctattcttttgacagcattgatatatttagaattatttctgggctttatattgaacttggtattgatcgagtagaagagtcggatgttatgcggtcacaatgtttcaggtgccttgatcgatacccagaaaactggtcatggaataagatagctgaatatccatgtgtagggccgacttttacgagtaaaaaaattgagccattacagcaattatttaaaactaaaaataaagaagaatattgtggtttgatacagtgttctatgagtaagcttgggctaaatacttcacctctgtcagataggatttatttcgctgatctaatcccagaaggaactttatcttcaaagaaatatggattgataaagaaatatctatag

SEQ ID NO: 65674 - DNA, 1947 bp, Acinetobacter baumannii
atggaaaactctttgctatcaaatacttcaaatcaaaatttacaagaatctgaacaaccaacagaaacagttgaaaaaagtagtctagaattaagttttgacccaaagactatccaacacttaggagtatctctttattcacaattaccaagtgtcttatcagaactagtttctaattcatgggacgctgatgcagaaaatgtaactattttatttaataatcatgatggtaaagaaattatttattcagatgacggtcatggtatgacatttgaagaactaaatgataaatatctagttattggtagaaatcgtcgtgaggaaacgtcattatctcctaaaggaagaaaaccaattggcaaaaagggtcttggaaaactttcagtttttggtatatgtgaccttgttactgtaatttcagtgaaaaataaattaaagaacagcttcacaatgaatttaaaagaaattttaagttcatctagtggcaagtatacgcctattataaacacaaaaaatcaaccgaccgaagaaccgaactccacgaaaatcattctaaaaagtattagacgtaagactggtttcgatacattaaatattgctattagccttgctaaaaagtttacaattttcgatcaactcaacgtgactctcgaagatgcaaatttgaaggtgaaaaaacctttgatttctgaagacgggaaattagtagtcactaatgaattaaaatttcaaggattaaatgaagaattctcttgggagtttcccgaaaatggtttaacaaatcataaatatgaaaataaaaacctaattacaggaaagattatcactaccaaaactccgatcaattcgcaggatatgagagggatttatctaacttcgaggggtaaaattgtaaaccaagcagagttttatggcgctcgtgataatgatcaatttcacacttatatcactggctatctagcaatcgactttattgatgatgaagatgaagatcttatctcaaccgatcgccactctttaaattgggaaaatgacttaacaaaagaattaaaagagtatcttcaagaagttattaagaaacttaatggtgaatggagaaagaaaagaaaggaagaaaaatctagagaattggccaaacagaatgttgatgttcaacagtttgttgcagatttaccttcacatcaacgtgaattaggaatgaaaattatagatcctattttatctgcaccaaatattgataatgaaattacactaagcgttactaaaaatgttattgctaaatttaataatgatgattttaaagaatatgcatcaagtattgctgatcttgatatcagtgatgaaaacaaagtgaaattactaacatatcttgatgattggaaaattgtagaaaataagcaatattcaagtctcgctcaaacgcgaattgaggtaattaataaatttgagcaatacatcaattgttatacaaaagaagttccgactctccataattttttaaaagattttccttggttaatcgaccctcgaattttagaatttgaagatgaagttaggttttcaaaaattttgaaagaaaatttccctgaacaagacttagatgaaaaagatagaagaattgattttctttgtacgaattttttaggacaggttttatatattgttgaaataaaacatagtgaatatgaaattgatctcaaagcgttagaacaagctaatcattatcaagcatttgtaaaacaaaaatttaaaactgaattagctatttcaaatgttgttagttacatcgttggcggatcaattaaagatgattatttagtacaagataaaattgatacatatagatcttctggcaaagtttttgctaaaacatacactgagttattacaacaatcaaaatcatatcataaagaatttattgaaaagcataaggaacttaacaattaa

SEQ ID NO: 65675 - DNA, 1572 bp, Acinetobacter baumannii
atgaccacagtgaacgcaccagaattcgttcgtcatcctaagcttatagcatgggttgaagaaattgcaaacttaaccaaaccagcaaaaatcgaatggtgtgacggaagcgaagaagagtatcaacgtctaatcgacttgatgatcgctaacggcaccatgcagaaattaaaccaagaaaaacatcctggttcttatcttgcaaattctgacccatctgacgttgcgcgtgttgaagatcgtacttacatctgctctcaaaataaagaagatgctggtgcgacaaacaactgggaagatccagctgttatgcgtgaaaaattaaatggtttatttgaaggttcaatgaaaggccgtaccatgtacgttgttcctttctctatgggtcctttaggtagccatattgctcacattggtatcgaattaactgactctccttatgtagctgttagcatgcgcaaaatggcacgtatgggtaaagcagtttatgacgtattaggtacagatggcgagtttgttccttgcgtacatacagtaggtgctccacttgctgaaggtcaaaaagatgttgcttggccttgtaacccagagaaatatatcgttcattacccagaaactcgcgaaatctggtctttcggttctggttacggcggtaacgcgttacttggtaaaaaatgtttagctcttcgtatcgcttctgtcatgggacgcgaacaaggttggttagctgaacacatgcttattcttggtgtaactaaccctcaaggtgaaaaacactacatcgctgctgcattcccgtctgcttgtggtaaaacaaactttgcaatgttaattccaccagcaggttatgaaggttggaaaatcgaaactgtaggtgacgatattgcttggattaaaccaggtgaagatggtcgcttatatgcgattaatcctgaagctggtttcttcggtgtagcacctggtacaaataccaaaactaacccgaactgtatggcaactcttcacaaagacgttatctatacaaacgtagcagtaactgacgatggtcaagtatggtgggaaggtctttctaaagaagttccagcaaacttaaccaactggaaaggtcaacctcacgtaaacggcgaaaaagcagcacatccaaatgctcgtttcactgttgcagcaggtcaatgtccatctatcgatgctgattgggaaaacccagcaggtgttccaatttctgcattcatcttcggtggtcgtcgtgcagatacagtacctttagtttctgaagctttcgactgggttgacggtgtatataaagcggcaactatgggttctgaaactactgctgctgctgttggtcaacaaggtattgttcgccgtgacccattcgcgatgcttccatttgctggctataacatggctgactactttgaccactggttaaaccttggtgcgaaagtaagtgaaaaagctgaagcttctggcaacaaattaccaaaaatcttcaatgtaaactggttccgtcgtgatgctgaaggcaacttcgtatggcctggtttcggtcaaaacatgcgtgttctttag

SEQ ID NO: 65676 - DNA, 171 bp, Acinetobacter baumannii
atgacatttaagaacaataaacagataataaaaatacctgaaaattcaaagattaataaaatgcaacaaaacatggttgtcatgtatcagtttggtgaacgcctacattgtttacaatgtaaacgtgtgtatattgcaaatgataaacgaatgtatctgcaagatttttaa

SEQ ID NO: 65677 - DNA, 651 bp, Acinetobacter baumannii
atgattgaaagtcagcccactcaacaaactgaagatgattctgaaagaaatcatatacccgataacaagaaaagttttctagacaatcttggaaatgtaattcaagcaacttttataaatcctctctcaacgaaacttggagagttttggattgttacttacatagtagctctagccctttcagccttattcgcattattttcttatatattctctacattactaggtcctacacagatacaagctattgtttctttaagtcctagtacactcgaattcttaaatagatgttttaatttaattctgtatatggttccagcatttttaatgtctgcactaggatcatatacaagaattctcttatcagattacagcatgaatgttatcaaatgcttcaaattaattgtgggatctggtttttttggtatagctactttattaggtatacaaagtggaatattttttgatctattaataggacatggatctaatatttctcaattagtaacagtcagtgaacaagcaaatgaaaaaactttctataagataattttactttgttttttaacaggaatgttttctactgtaattttcattacgatagaagaaaaacttaggttactttctaaaaaagtaaatgaagataaataa

SEQ ID NO: 65678 - DNA, 1089 bp, Acinetobacter baumannii
atgaaatacattatagatatatctaaattaaagaaatttgatattgttcttacacgcagtaagcatcttcgctctaaagcaattcgttattttagtgaaggcgattattcacatgcattaatttgtgtatctgatttctctttaatcgaagctaccgttaaaggtcgagtattttcagaaaatcctcaaagattgatatttaaaaatatagatgattgtaaagttcttcgttataaaggtactttgaatcaagaagatcaatcacaaatagaactttttttgcgttcacaaatttcaaccttatattctattaaagaggcagttagaacaaaaaaatatgaaacaacagatgaggaagctcaagaagcaggacagttttgttctcgtttagttgctcaagcttttaatcacgtagatataaatttggtaactaatcctaattattgttcacctgaaaatttaaattcttcagagctgcttgaaaccgtacctgacattattcgtatagcaactgaagaagaaattgctttttctaagacaaaaagccaaatcaaagagaaccaaatccaaaattatttatggctagataatgtcgtaaaattagctaaaaaagagaaatttattattttaaatcaagatgatgttggtttatttttaataaaacatcctcagtatgataaacaagtatgtaagtttataaaaaatactaattatttaggacaatataaacaagatgaagttgttaatccccctcgatataaatattcttctagtgcttctctagatattttgactgaattaaaaattaatcataatgtgattaatagacatttaataagttatgcacgatcgtgtgataattatcataagactaaacttaattattgtttattattgaaaaacttatataagaacttattgcaacagggtaatacgagactgaatgttctgattcgttatataaatagagagctgcttataggaaatggaaataaagaggaactatccgaacttgttgaagaaatccaaagtctacaaaaaaatattagaaaaattttcatgcaagatggccataaagaatatctgtaa

SEQ ID NO: 65679 - DNA, 411 bp, Acinetobacter baumannii
atgagcgaaaatcaaaaagatcctcaatataagttgcgctggtctgaagagcttcgcggaaagatcacagatgcagcaagggaaaataaccgctcaattaatgctgaaattactcagcgccttgaagattcttttacaaacaaaagtgttgaccctgattttttccaaaagaatatgaattttttccttgcagcttactgtgctggtttggaaagcaactatgatgaagcaattgcccagttagaagaggctctttcaaaatcttccacaatggatgaccaaacgaaacagtaccttgagcacaggctacaagttaataaaattctaaaaaaagaaatgaatagattggttcgtatgaactctgaaagagttaaggagtctcaaatagtagattctgataagctattgtaa

SEQ ID NO: 65680 - DNA, 378 bp, Acinetobacter baumannii
atgttaaatataccatttacgattgaatctgacaagattctcgacttagaagacctactaccaaagattccaagtgattttattctgaaaagtataaaaaagcaggaacttgaagatgctgaagttgatctagtttctaagattaatattgcagtagacaatgcaattacccctctacctttgggtattagtgcaattggagagcttctggctcacagtgctgaccaagttgattctgacactattcaaaacatcggatggttgatcgaagctcttggacgccaaatgttcgctttatctagtctccaagaaattagcaaaagtgttttaaccgctgataagggattaaaaggtggaaagggagggttaatgtcatga

SEQ ID NO: 65681 - DNA, 549 bp, Acinetobacter baumannii
atgaacatgcttattaatcaggaatctcttataccagttgttgatatgagtattggtggtgaagttcaaccttgcgttgatgctagaaccttacataaggggcttaaaagtggtgagcgttttgctgattggataaagaagcgaattaagacttatggttttattgaaaatgaggactatgctttggtttcggtaaataccgaaatcaaaaaagggcgaggaggcaaccgtcgtggagttgattacattcttactttagatgtagctaaagagctttcaatggtagaaaacaatgaacaaggcagaatggcaaggcgctactttattaattgtgaaaaagcattgcgccaaactgcatttggattgatgaaccagtttaatagagctgtgctagagttcgagaagtttactgaaatagcttcaaatgctggaaggaccttatgtttggttgggaagcaatacaaaccacaagcattaagcaaggttgaggagttaaagcaaaagattactcctttacttccattcgaagaagatgagatgcaagcataa

SEQ ID NO: 65682 - DNA, 675 bp, Acinetobacter baumannii
atgaaaaagattattttcttaggttttctttcagtgttaataactggatgtgtcgcaccatcctacaacgtcacatcaaaaattacggaaatgacgagtaagccaaatattggagaggtagttactgtcggagttggtgagcaaatgctttatcaaggaaatgtcagtgaagatgaggttttagaaatttccaacccaactaaagtggatttatataaattgccatctggtcaatatacaaagactgggaataatgaaaaaggtgattatttttcaccagttactaaaacaggtttgatggtagcaaaaaatttttttgcagacccaattcaagtgctaatggtttcaaaagaaaataaactttgtgtagtgaccatatttaatgctcgaacatgctcaaaagatgctgagtttgttgtaaaaaaagtagcgtccatgcgcgataatgcattccagcaaacgttaatctacagtggcaaggtgggaagcaagataaatattggttatagagaattctctggaaacatagctcgacctgcttttaataataatgttgaatatgatctaagtgaatctaaagaaattggatacaaaggtgcactacttcaaattatagatgccaacaaccaaagtattaaatataaggttttaaaaaactttaataaggtggattaa

SEQ ID NO: 65683 - DNA, 360 bp, Acinetobacter baumannii
atgtggaaattttttgtttttgttgtattttgcagctttccagtatttgcattagctggttgtaaacaaattcacaatgatattgaagaaagcctaaaagatatagcagcatttaaaagtacagctaattcttacagggagtcaggttttatttcaaaatctaactcgtttgaccaaaaaatagctacttctcaagcgcaaataaatacgcttttaactcaagcaagagatttaaaatgtaagccatataaagattcattaaacgcagataaatatcttaaagcagctgacaattgtgggaaaaacccagaaacagtagattttgactgcaatagagagaactggaaacctagtttgtag

SEQ ID NO: 65684 - DNA, 4479 bp, Acinetobacter baumannii
atggcacaagaatcacgtctcgtcattgtaattgatgctaaaaatgcagagcgtaatgcgcgtaatctaggcaatgaattagatagcattgagcgtaaaggtgactttgccacgaagtctatggatggcttgtctgtcgctacacgtcagcttgctggatatatggctgggctagtaacagtaagttctgccatttcaaagatggatacatatactggactacaaaaccgtctaaagctcgttactaataatcaagttgaactaaataaagctacggaagacactttccgaattgctcaaaaaacctattcagcttgggattctgttttacaggtgtaccaacgttttagtgacaatgctaaaacactgaatttaaccatggatgacactgcacgtttgactgaaaccgtatctaaagccgtagcaattagtggtgctagcgcgtcagcagcagatgctgctttagtacagttcgggcaggctttggctagtggcactttgcgtggcgaagaactcaactcagttatggaacaaacaccagctctagcaaaggctattgctaaaggtatgggtattacagtaggtgaattacgttcagtagctgctgaaggaaaaatcacttcacaggaaatcgttaaagcacttaaaaatgtccaagatgaagttgatgctctttttgctaaaactgacattacaattggtcaatcattaactctacttaataatgaaattactaaatttgtaggagaggctggtaaaggaagcggagcagcacaggctttatcaggttcaattcaggttttagcaaataatttgaatttaattgcagacagtgcatttgccataggtattggcttaatgacaaaagccgttttaacaaaaacggttgctgtacaagcgagtattgctgcgtcaaccaaacaagtgtttgccacaattgctgaacgtaatgcaaatattgcagcagcaaaagctgaagtggaatctgcgcttgccgaagcacaaagtacgcaggtgacactaacgaacatcaaagctactcatgctcagatcatggcagaaatagaactcgaaaaagttcgtttaaaagcccaaatcactgaacaaggtcgcacggctaccatcacacgaatggctcagctaggacgattacaagctcaagttgcgttagaggttgctgccgcagaaacagctcaatcagcatcatctgcaagattatcagcagccttaacagcgcaatctgttgctactagccgtttagctttagcaaagtcagcgcttatggcgatttttagcccaatgggtttagcaattgcagcaacagccgcatctttctatttactaagcagcagttcggatgaagtcaaagagtctcttgcaacacaatctgactcggttagtgatttaacagataagtacataaagttaaatactgtgcaagcattaacagagggtgtgcggttacgcaaagagattgagcagcaaaatgatgcaattgatgatgctagtggagctatcaaacgttttgcttatatccaaaaggaattatttaaattatctggcagtgattatgaagattatcaaaatgccattaagtctattgctacaggtgcaagcgatgcaggtgatctcttaaaaaagatgatttcttctggtcgttttagtcagactcaaattgataaacttattgagttctctagtgcagtagcagaatcaaaaaataagattgagcagggtaatactgctctaaaactcttaaatgctacttctagacaacatgttgaggtaacggccgaatcaattaagcaattaacaattcaaacaaacttaacaaaagtcgctactcaaaatttcactgacatgaaaacacaaatgcttgattcattacgagcacaagtggaattcattcggttaaatggtggtagcgaagaacaagttaaatcgttgaataaggtaatccatgcttattctttaaatcaaatttcagcaactgatgctgtaggcaagttcaacagtaccgccaaagttccgattgataacattaagaaattgcaagaatatgccattaaaacggatcagtctaaaattgcgttgaatcaggctaatgcagagctaaagaaacagaatgacttgcgtaatgagtatctaaagcaacatcaaactgtacttgctgctcaacaaggagaaacaaatgaattaaacaaccaagtcgctgctcaagaaaagttaaataagttacgagacaacgccaacaaagatattctgaaaaatgattttcttataaaaaacactaaggcatttggtggtggcgaaaagggtcttgataaggcgcgtgcggcatcagagttttataccgacaataaaattccgatgactagaagtttaactagtcaggaagctgcaatttttgaggcttggtataagaagcagatagaagtcaaggacttacaagaaagtatttctgagtctaccagaaaacaaacgaaagaggttgaaaaacaaaccaaagagtctgccaaacaagctgttctacttgcagggaataatgagcgagtgagaaatatgcttcgtgtatatcaggctttccgtaatgctggattgggagataaacaagctcgtgtaatgacagctcaagttggacgagagactgattttagaaatgaggcaatgtttggtagtcacaaagacgcaaataatggttataccaatacagggtttttatcatggcaaaaaagtcgctcaactaaattaatgcagtctttacaagggcaaggaatcttggataaaaacggtaaaatccagcaaactcaagatgcattagatgcaatggctaaacacgctgtgcaagaggcgatgaccgataaaagttatagcaaatctaaagcagctcttcttaatgacgatttagactatcgaagtttagagagaaccgttgccaaaaatcttgttggctgggactatgatgggaaaaagcttggcaaagctaaagcttcacagcatttagccaaacaagactcttactataatcagcttaataaaattttaggagataaccccgaagcagcgtcaaaagcaattggtgatctttcgaaattcgaagatgaagcatataaggcacgtgctaaaactctagaggaaataaagcagctccaagcaacatatgattcagaaacagttgctagaagcaaaaaacgcgaggaggaaatcaataaagcaactattttagggcaattgaaattaatcccaaaaattaatgagcgttttgatgcggaagagaagttagctcagaagcaatttgattttgaagtaaatggttataagtggactgaagaacaaaaacttgattacacatatgaaaccaattctttgcgattagttgctgagggtaaactctctgaagatcaaagaaaggttgctttaggtggcctggaattgcaaaaacagcaagagttaggattactaaaacttgctcaagagcaaaggctttttcaggctaggcaatcttatatgcgtgaagttgatgtaatgcgtgaaagataccgattagaacgtgaggaaattgcaaaaacagagaaagaccctaaaaagagaagtcaacttcttgatgcttcagcacgaaatgaagattttgagtaccaacagcgaagacgcaactcttcaaatagctttaataacatgcgtgcagatatgggggggtattctgcttatcaagacttagacaacgagctaaacaatagaagagaaaaaattgctgaagcattggaatgggaaaacattactgctgaggaagcaagacaaacaaatctagcagcagaaagagattatctcctaaaaagagcaaaacttaactcctattatggtgagcagattacaggttccatggtgggtatgctggaggcagcgggtgataaacaatcagcaatctacaaggccatgttcactgcgaataaggcatttgcaattgctcaatcgctaatctctattcaagctggtatcgctcaagctgcaaacaatccgttcccttacaacctagttgctatggcaagtgtcgctgctgaaactgcaagcatcgtcggaaacattcaatctgtagctggcatattccacggtggtaaagactatgttcctaaagaggcgacttatcttttagataaaggagaacgtgttgtttcaccacgccaaaaccaagacttaacaagcttcttggcttctcagcgtgaaatgaaccaatacaacgctatcaactctaatcctactaatggtagtgccactgtcttggaaccaattgttaatgtctacgtcatggaaggtcaaacggctgacgtgactagaaatgatgatggttctttggatgtacgcattagacagattgctggcgaagttgcggagaaggttttcctacagggaattcaaaacccaaatagcagaatcagcaaggcattcaagcaaaactacaatgcaactcctaggcgtcaataa

SEQ ID NO: 65685 - DNA, 2745 bp, Acinetobacter baumannii
atggctgacgaaatcattactcggcaacagttggtagatgcatcagcagatgcggaaagcttgcaaaaatttatcagcgggaccgatattgaagatgtattaacccgcttgggacaaatatacccaacccttgcaaaagctatccgtgttttaatggaaactggtggatggaaagcttacagcactgaagctgagctattagctacagttccaacggtcaatccctctgtgggatatgcttttgatactaaaaagctttataagtgggatggctccgtttggattgatgaaggtttgagtatttatgaccgaacaaaaccctatatcgatgttctttcaaatactaacttcaagcaattaaatactttttattacgcaccaaataacacaattattaaagaatctaactcaggattgttcgcagtttcaattgcagtgcaagctggccaaaaatatgtgtttaagacaaagacttttggtgtggttggttcttattatattgccgattcaagtggtaatgtgttgcaaacacttgcttctagtgaaactttagaacaagactatgtagttacaatccctcaaaatggcaaaatgctatatgtaaactgcacgaaagattatgcgggatttaaattatatttgctaaataatgaaatcgttaatttgaattttgcaggacttggagcaaatgactttcaattcttttccaataacagtggtgtaatcacaaatacaaatagcgggtttttctcgaagagtgtaagtgtttcaagtggtgagttttatttaattcgcacatccacatatggcacagcaccacaatatattattgcagatagctcgaatgcggttataacaattgagcctgcaggagaccgtgggaaagattatattattcgcatcccaaataatgctgctaagttatatgtcaactgcgcttatactctacgtaataacttcaaagttgaaaaaattagcggtgctttagcaaagagtttaattgagggcgcttttgtacttgattacacattcttttatgcgcccagtaatatcattaaaaaagagtcaaatgacgcattatttgcatttgatattgatgtgcaagcaggacaaaactattcaattaacaccaagaccttcggagttgttggtgagtattatgttgctgatagtgcaggcaatattctacagttcaaagcagcagatagtgttgatgaagactacataattactatccccgcaaacggtgtaaagctgtatgtaaactgtacctatgcttattcagttagtttcaaagttgaaaggctttcaaacgcacttttagctaaaatccctgttgttgatcaatctgttcgcagcgttttcccaactttcaactacttcgacaagttacgtgttaattgcccgaacttttaccgtaaattcaaagaaaaaaatgctgatgtaacggttgtactgacaggaacctctttaacacaaggcaatatgtatgcctcagatcgagcagatgccacaactcgtccggcggcgcttcatacgaatgatttagcaagttcagtatttgataagctgataaaacattgggatggtcaaaaatatcgccgatatgatcatactgatttaacttactcaaatagcacatgggttgtgactaacaatgcttcaggcggaatttgggatgattatgcacatgttaaaaatggtttgacaaaaaccacgacagatgcaaatgcaagtgtttctatgacaattccagctaatgcttggcaatttaactttgtttatcgttcagatagtcaaggcggaaactgcaccgtttctattgcggaaggcaatagcaaagttgaagtatttaacggttcatcttgggttgaggcaaacggttatacattcacaatgcttgaatccccagccacatcaacaaaaggaaatacccagtaccaaaaacgcttaaaaatgcgctgcaagaataaagcttctggagggattaattctatcggttcaactaaacagatcaccatcgctaaaggtaataatagcaatagatttaatgtggttggctttgaatggtcacaacgtgaatttatgctgtttgtcatcaatggtgcgcgtggtggttttgaatggggtgatccaactgggaatcgacttgatcaatatcaagatactgatatttggtcattcaatcctgatttattgcttgctgaaataacaatcattaattggggcgcatctgaagcagcggcaatgtcagttgatccactgtattacgtcaatattgcaaaacgagcctactttaacgagtttggcgatatgtctacttcattatatgctaaatcaagcggatacacagtttgtgatgtgatcttctatagtgacacattagcagcaacaagtgctgtaagcggtgcttgggataacacaactcatgagcctttatttgggacagtctctacatctgcatcaaatggcggtgctgttgataatacgaatattggcagggtaaaaaataattttgaaaactatgaagctgtagagcgctacatagcaagtaaagaatatttgtttattccgattttaagctcgtttaaatacgttgctgaaaagttttatggtggttattggcttggtatgcaagcaagcgataagactggcaacaccttaagttacgatggcgtccatttcaatgacaacggtgcagcactattctcgaaaattgtagcttcagtttttgatgaaatttaa

SEQ ID NO: 65686 - DNA, 417 bp, Acinetobacter baumannii
gtgttaaaactgtacgattacttttatatgtatgatttaaatttttttatagcaactcactctccattaatgatttcaaaacttcaggtaaatcgaaaggatttttacagtgattatatagggaatataaactataaaatatttaaagtaattgatggggattttgaaagaattcaagaggatgatgattatagtattgaatctttatattgggaaatttttggtttattaacaccagataattcatttttgtcgaggtattgtgttgctttgttagataattatgacttaaagaaaatttctttttatgagataaaagaagagtttaaaaagttaaaagaagcatgtgacttagatttacaaaaacaagttttaatggatatagaaaataggtttataaacaacaatgaacattaa

SEQ ID NO: 65687 - DNA, 525 bp, Acinetobacter baumannii
atgtatccaaaacttaaagcagttcgacaatcctatgatgaatatgtattaagattcgattcatttcctgatcttattttcatgggaaaaaattacttttatgatttcttcaatgaagtcgaatcggttaaaagagagattggcgattattggaaaatccaaagcggtccaaaactaaatgattatgaaattttcggatgtaaagtaattgttgtagatgatcgttatttcagttttggtttttttgagtttactgatttagaggaaacaaaagattatatttttgataaagattttcgtaatagtgctgatctattttcggtcgataagggtaagaaggatttattagatcatagatcttgggaacctcaaccagtagaacgtttacccgatcttattttaaatattccttttttcgtaatagaagctttcaaattagaaaaaatatcaaagaaagaaattgaggatagaaaacacaattacaaactaagaaaagagatttatgaacccgaatctcatttttag

SEQ ID NO: 65688 - DNA, 2469 bp, Acinetobacter baumannii
atggctgcactttatcactcactttttacagaactaggtttagctttgctccgagaatcaattcaaaacggaacaaagctgggcataacccatatgtcatttggtgatggaaatggtttactgccaacgcctgatgcaacatttacccaaatggtaaatgaagtttatcgaactcaattaaaccgtcttgcaccatctaacgaaaatgcaaactggctagaagctgatggtgttattccctcggctgtaggtggttttaatattcgtgaagtcggtttgtgggctgaagatgtcatggttgcttatgcaaactatccgccgacttataaaccgtccggtgaccaaggcacagctcaaataaaaacaattcgtattgttctacaaattgataatacagcgaatttcgagttaaagattgatgcaagcgttgtcatggcaacgattcaagccgttgaagatgccaaacttaatgtcaagaaatatgctgatgaaacgaaagttcatattattgaatctatagaagatttaaatactttggataaatgggatggtcgtacagtctttgcgaaatcttatcgcacaggacttggtaaaggtggtggtgattttacttatgactcaagtctagctaatgaaaatgatggtgtctctatttttaatggttggaagcgggatttatcaagtggaatactaacaacacatgatgcagggttattaggtgatggtacggatgaaaatcctacaacagcactaaaaaatttgcttaaagcttgcgaccatggctttaccatcattatttatggatcatataaaattaaccaacatttacagatccaaaatgtagataacttaaaaattttgggagtgaatgcatctattactggagatgcggaaaactggaactggtctattgacatcattcctgctggaactcttgttcctcggggaatgctgattggctataaatgtaattttctaaatattagatcattaaaagttgttggtgtgggacaaaataataagaccactcaaaaagttgttgatgcatttcaagacggtgattcaggtattcaattattagcttgtgaagcccctattattgagaacaatgatattagtaatacttttgcgtggggtattctgtgtgaaaaaagcaataacgcgattgttcgacataataaagttaaagatgtttggcatcaatcagggattaattgtgtcgtaaattcaactggtggcactgcccaagtttatggaaatacagttgaaaactgtgcactttactgtatcgaatttgaatcttatacagttaatccaactagttttatttgctatgacaaccgtgcatcagatgcatatatgggtatcacagtaacatcaacaaaccatgcgatgatcggagaaattcacgataatacgattaaaaactgcggtgaaggtgccatctgggttacgaaaacatatcactcattaaataatatcaaagtttcaaataataatatttacaattgtcgtagggggatatatttatcagcaacagtttataatgcaagtattctaaacaacagaataaatgggaaatatttagaagatgtatataaaattgtttccccagatctgttaattctaaaaattatttctagtaatcagtttttaatcagaaaatatccgctgacagttagtggtacgaatggtacatatttcatcaatggaacaacacccatcacgattgcatctgtttctgactcaacagaaaaacttggaccaacagatacttcaggtgacaaatatattgtcactattaatgaaaatgttctaacaagtaatcatctattcaagcaacttaaacgactttctgcaaatggttcattcagtgaatcagcattaaccagtgatggtccttgtaaggaagtttattgggttgataacattgttacatcattcaattacggaattttaaaacaatctggaaatatatctgatgtgtcatatgtcgaagagtttataaataataaatttattgatgctaaatttaactcgatttaccaaacaacattatttccaggcgttaagtacagaaacaataagtatagtggtaaatctccaaatcttgccgatgatgttgtaaagggcggttatattgatctaaatgttggaaaaacactttcatttacaacttcacgtacagatcctgcaacttcaccacccacagttaatttcactcatccagctgcagaaaccattattggcatttatttggaacctttagcagcttcaacaacggggaaaatggcaattgttttaaatggggtaactcaagtcagtaacgttactggaagtgaagcaaaaattattaggtttccagcagttcttgttgctggtgtaaacacaatcagtattagagatactgtaggtgatcttttttacactggttttaatattacttttttgcacccatttagccaataa

SEQ ID NO: 65689 - DNA, 633 bp, Acinetobacter baumannii
atgaaaattttaagcaatcaaacgcctgtatctgataattctctgagtcttggcataccaacgaatagctggtcagcgatctactcatggactgatactattcaaacatctgatgaaaacttaaaacaagatattgaagaaattactgaagcagaaagacgtgttgctttggcttgtaaagcactaattcgcaaatataaatttaaaccgtcttgtgacataaaaggtgaagaagcacggtggcatatcggagtaattgcacaacaagtgaaagcagcatttgatgcagaaaacttgaacggttttgactatggaattttgtgtagagatgattatgatgctgttactgaacctatcttcgcagaacgtaaagttaaaaagccttatcgtgtaacgcaaatgacatcaacatatcaaaatgaaaatggtgatgaacagactattgtagatgaacaacgtgtccccgatgatattccttttgatcatgattttggagatattaaggtcattacaaaaattgaagaggtaactgagacttatgatactggtgaaatccgaattgtccgtgaagcaggatcgcgttatgcaattcgttatgctgaattagcaatgtttatcttggctgctttgtaa

SEQ ID NO: 65690 - DNA, 441 bp, Acinetobacter baumannii
atgaaaagagtcgagcatctaaatcctattatttcagcaattttaaagacaaatattatttttaaaggtcgggcatgtggcagaacaacacttaatttttttggattatgctctgctaggttgccaatgctccagtgggattattctaaagacttctgttttaaccctaaaaaaataaaaaaaatctcagatagaaaaatgcgtaaagcttgctatcagtcatttgctcaatataaaaaatcttttaaaccacgacctatcccaaaactaaaaattttaaaagatgaatggctagctttagagaaatggatagcttcaatgcaggaggcaacgaaaacggctgctaaaaagtttagtgatatgacggatgcaatgtcttatgcatttcgtaccgtcaaaaatggttactggtgcgcttgggatccagcaaaagaggtataa

SEQ ID NO: 65691 - DNA, 582 bp, Acinetobacter baumannii
atgtaccaattaactatcgaaacccaagctggtttgaaaacatcgcttcaaattgaaaatgaagttgcacaacttcttaataagaatggatttccacgttcggcaacaccacgtgaaaaagtactttctgagtttgaagagtgtacaaaaaacctttctctgggaactgcttacgtatcaataaaagagtggttcggatggattttaaaagattcaaattcagagttttttactattcagctggaggctattccagcagttcaagcaactgaaaaaacagatttaactgctctatttaaagatgcacgaatcacaccagaaccaggcaaagaaattctaattaatacggttacaggccagctcgtttctccagctttatatgattcattctttaaaagataccgcataccagctggagaagtgcgcccgtacatgattaaaagttgggcctatttagatgatgtaaatcaggtcttaaatcttagtgcattagaagataaggagttattagcacaactggaaaaacaggcaaaagaggaacaaaaaaatctaaggaaggttcatcactttcagaagttttga

SEQ ID NO: 65692 - DNA, 585 bp, Acinetobacter baumannii
atgactaatataaattttgaacaagaaagaaaagattttgaagctcatgccatcaagttttttaaaagtaatgaagttttcgaggtcaagaatgattcctacatttatgacgaaatcatatttatgtgggactgctggatacatcgagctaagaagcaacatgaaagtcagttattagaaaataactgcatgattgaccaaatatggttcatgaaaggtacaccagtagcgaatcttattaaacatgctgaaggtatttacaacgctgaagtggcggcacagaactcaaaaatcgaatttggcactgatgacaatgaacattggtttgcgcatgcagtgcctttctttggaactgttcaaattgaccgtatagaagagcatggtttagttgagtgggatatccatttcaatgaatgctggcaaggaccctataactctaagcaacgatgtattcagcacttagaagaatgcattgctgaaaaacgacaggaacaaagtaatgaggtaaaaccagcttgcaaaatttgcggtgagaattggtcgatggacgattgtgctatttgcaattcaacggatagagattaa

SEQ ID NO: 65693 - DNA, 171 bp, Acinetobacter baumannii
atgaatcatgaaaaagaattagttcaatgctgccgttgtagaaataaacatttagttaaagatcgcttacgtcaacccaataaatccataagtggattaactgatcgagtgtgtccacgttgcaaagcgcaaagctattacaaggtcagtgaggtgaagaaaaatgtctaa

SEQ ID NO: 65694 - DNA, 396 bp, Acinetobacter baumannii
gtggtttatgtcgcacttcaagttttactctgccaagaattaggtgctgaacgaattggacatggtgttaaagcagttcaagatttaaaacttctagattatttggctaaacaccaaattggtattgaatcttgtctcacctcaaatattcaaaccaacacagtgccttctttagcagagcatccattaaagacttttttagaacatggtgtgcttgctaccattaatacggatgacccagcagtagaaggcattgagatacagcatgaatatttaactgctgccccactagcaggtttaagccctgagcaaatttatacagctcaagaaaatggactaaaaatcgcatttttatcagaacaagaaaaagatgagttaagacagaaatatcaatag

SEQ ID NO: 65695 - DNA, 531 bp, Acinetobacter baumannii
atgagctggacaccaaaaattttgatttcaatgggaatgtcgcctgaacaaggcgtaagtaccggtattttaattagtattggtggtattttcggagcagccattattggtttacttgcttcccgcatgaaaattttctatgccctaagcttatttctgggattaaccgctgtctgtgttttcctatttgtcgccgtttcatctcaagtgagcattgctctcatagtcggtttattacttggcacactcattaatggctgtgtggcaggtttatattctatttctccaacgatttacgatgctgaaatccgtagtcgcggcgtgggttatgcaattggttttggtcggattggggcaatcttatcgccaacggttgcaggcattttcttagataaaggtattgcacctgcaacgctgtatgcctattacggtgtggtgtttattttggctattttcctgattttgagtttaggtagcgctttttaccgaagtaagaaagagcaaaacttctcacttaaaacagcaccttaa

SEQ ID NO: 65696 - DNA, 228 bp, Acinetobacter baumannii
atggaaagctccactttaaaagaatatagcggctctgccactgaacatatggaacttatttttccaaacaacgtgccaattttgaggcagatccttacccaagtcttgaagcacgccgcacaaaactgcataaacttaaaaaacaaattatccgttatcaagatgctttggctgccgcgattaatgctgactttagttcaagatcactcgatgaatctaaactactag

SEQ ID NO: 65697 - DNA, 474 bp, Acinetobacter baumannii
ttgctctttttattatatctcttaatagtgagtataatatttggtcagtttttttcttctatattccagactctattagaatattttagttggttaaatagactcaatgtatatttaggtagtagttctgaaggtgcagaccaaattaaagcttatagtatttttcagttttattttctttttaaatcttttgttcttttacttttatttaagggttataagagcttctctaaaactgatagaatactaacatctatttttattatagctatgtgtatacaagcagcttttgtttttaatagtgctattggtttgagattggcatctttatttggttatatagatattttagtttttttattccctttaaagtataaattctataataagattcatcagatttattatttgctacttcttttggtagggggagtgtttatgtatagttcatttaatttaattgagaatatttag

SEQ ID NO: 65698 - DNA, 879 bp, Acinetobacter baumannii
atgaataaagtactttctgtaatagtaacttttaacccatcaatagagaggttatgtaagttagtttttagtctcgatcggcaggaaacagatatatttatagttgataatcactcatcaaataaacatgaaattaaatttgattctcgtgtcgagctgtataggttagataaaaactacggtatagcttatgctcagaatattggaattcaaaaagcaataaagaataaatatgattatattgttttatttgatcaagattctaatgttgagcataattttattgatcttatgttaagtagttatgatgaattaaaatcgcaaaaagtagcgtgtattagtcctcgtttctataatgatgaatacgatttttattataattccttacgtattaataaatatggtcttagagagagagtttcgttacaaaatataaaagaatccattgctgtttcacttgttatatcttctggaagttttattgttgttaatgctttaaaagaaatagggccaatgaaagattgttttttcattgatgcagtcgatacagaatggtgttttagagcattagatcgtggttttaagatatttatttctaataaggttgtgatgaagcatactattggagataaagttttgaatttctttgggaagaaaattgctttgcattcaccatttcgaagatactatattattagaaataatttttatttattaaaattagattatgttccaaaaatttttgcttacagagatattattttttcattaatggtccaattaataataattattacaattaataatcaacgtaaagagaacttttttgctttgattagggcgattcgtgatggagtacgttatgaaaagagaagttaa

SEQ ID NO: 65699 - DNA, 813 bp, Acinetobacter baumannii
atgaaaagagaagttaacatcttttgttcattagttttatataaacactcatttagtgagttaaaagcaacacttgatagcttattttcagtaacagaaattaaaaagattattttggttgataatcatacaagcgattgggcgatgacatttcagcatcccaaaattgtatacgagaaagccactaataactttggttttggttctggtcataatattgctattcaaaaatatgcttcccaaagtgattattttctcatttgtaatcctgatatttattttgataccaaccaatttatacaattattaaattttgctgaaagccgatcagaaggtttatttttaccaaaaattgtttacatgtctggtgaggatcagtatggagcgagattattaccaagcccgttgaatttatttactcgccgtttttcaccaaagtttgctaagcagctagatcagcaatatttattgaaagattattctatcgatcagccaatttttgttccttacctttctggctgctttatgttctttcgttctagtgctcttttagaacttaaaggatttgatgagagattttttatgtatatggaggatgtagacttatcaagacgttgtgctgaacgatttggtaatgtgtattatccttatgctcaagtagtacatgttcacgaacaagcatcatacaaaaacaaactattacttaaagctcatttgaaaagtgctatacaatacttcaataagtgggggtgggtttatgacgttagccgtagtaagcttaataaaaaatgcttaaaccagtttcgtacataa

SEQ ID NO: 65700 - DNA, 876 bp, Acinetobacter baumannii
atgatcaaaaaagcagttttacccgttgctggtttaggtacacgttttttgcctgcaagtaagtctattcctaaagaaatggttacagtcgttgaccgtcctgctattgaatatgtagtacgtgaggcagtcgaagcaggcattgaacaaattatttttgtaacgcactcggctaaagttgctattgaagattattttgatcatgattttgagttggaaactatattaaaacaaaaacagaagtttgatttaattaaagaaattacggatattttgcctcctcatgtaagtattgtaagcgttcgccaacctcagccgttaggattaggtcatgctgtgttatgtgctaaaagcgtaatagggaaggatgactttgcggtgttgctaccagatgtattagttaaagataattcagaaaaaaatgacctgtctcagatggtttctcgttatactgagagccaagctgcacaaattatggtagaagcagtacctgatcacttggtagatcaatatggtattgttgatgtcacaagaacaccaagtgtaggtgaaagtatagctatacaaggcattattgaaaagcccacgattgggtctgccccttcaaatctttctgttgttggtcgttacatattacctgtaaaaattatgcaccttttagaaaatattcctaaaggtacgaatagtgaaatacaattaacagatgcgattgcaatgttacaacaaattgaggcagttgaggcctatcgtatgcaaggacaaacttttgactgtggtagtaagcttggctatttaaaagctgtactacactatggcgttgagcatcctaaattaggaaacgattttaagcaattgattcaagaactaaagttataa

SEQ ID NO: 65701 - DNA, 702 bp, Acinetobacter baumannii
atggtaaaacaatataaatcgatgtttcgacctaaatttgctatctcgactttatgtattgcggtagcaagcgtttctgtatcttatgcagatggtttctttacaatcattggtccagatggtcgtccaatgattgtacccagtaaaaaagtagaacaaaagcaatccaagagtagagtagaagcaccgaaacaagttgtacaaccgcatgtaaatgctacacctgttcaagaagcatctaaagaaaatgttcagaattcaaaagagcttaaaaagtttgaaccacatcctacaaaaaaattaaatactgcaccgactgcaccgactgcaccgactgcaccgactgcaccgactgcaccgactgcaccgactgcaccgactgcaccgactgcaccgactgcaccggagcttcctttaagaatgagtaaagctcagaaggaggaagttaaaaaacagactagtagcgttaagacagaaagtgttccagctaaaatttattcatcttcacaaagtacttctcaaactgtttcaataccagatccttcaaatgatcgatctaaatttacaagtattgatggcgtagagtatgtaaataatgaatatcttgaagatcaggaatttaatcttgaaggtaaaaacgcttttatgttatgccggatggacttggaagaacagagtttatcgaaagaaaaaaaggtgtaa

SEQ ID NO: 65702 - DNA, 2688 bp, Acinetobacter baumannii
ttgtttccattaggttatgaagaaattgaaaggttttgtaatataagacaagttaaaaatattcataaattaatagaagaaattaaaaaatttgatttattagttttggctgaaagaccatttgatttagaaaatattataaaaaaatggaatgatattggaaaattaggatctcgtttagatattataaaatataatattaaccaacgcttaaatgattctcatactgatgatagaaaatcagtacgtataacttttgaaaaacttttagctggtgcagagcgcctcgcagctacagttatattaactggtaaggctaatattagtgtttcaccattttcacataataatgataatttaaatggtcaacaaatccttccagattggaacagtgaagaaataagtaggttattagagtctggtatttttaatgatattatttatggcgctgtaaggtttagacatagagatatacgtgaatttttagcagctcaatggttttcgaaacagctaaatggagataacagacttgcggtagaagccttattctttaaagaacaattcggagaaaaaataataacaccttctctccgacctatcttgccatggttgattatactggatgaaaaaatctgtcaaaaagtaataaagtttcaaccagaactagcttttgaaagtggtgatccctctcaattatctctcagtgtacgtaaacagtttttttctgaatatataaatagaatttcttataatttagatgatcgttctatgagaaataacggtttaatttcaaaaattgtcagttctgattttgaagaagaagttttatttcttatagaaaaatattttaacaataaagatgttatcttcttcctagcagaaatagtttggcatggaaaattcagtaagtgtattccattattgaaacctatagctctagatcagtctcgtgatatgtattccagacgaatatctattagggctattatgtcatgtgcaaatacaatagaaaaaattgagttatggacagagttaaataaaaatgaagaaattttaaatagacaattaattgcagagttagtagaaggaattgaaccagataaagaaatggttgacttacttatcctctcattaaaaatgtcatcagattataaaaaatatgattttactggtttaaatgagaaactagaaaacttcgtaaaaaaatgtgatgaacaattaaattctaaattgctagctggtattattgagctaataaatacggaacctttttatgaaagaaaagagtgccaaatttcaaaaaaatatttttggctgctaaaaacagcatatcgaataattgaaaatttagttgaaagtcgaagtcaattagccttagaaaatagtacactcgaattattaataaattcagcagcattagaatatcatagtgaatattcttatagagatgagcaaaataaattgaaatcactagttcctgattggagtgaattaaatgataaattatattggcattctatagcattagtacggcagtatgaacaaaaaaaaattattgatgattggagagttgcttgctttgatcatttttggaaatttaatataaatgattttgaacgattgttaggttttatagatattaaggaattaatggatgataagttgatagctcttaatagggcgtttatgatataccatcaaaatgataagcctgagtggatgctagagaaatttaaaattatatgttctatttatccagcattatcgatacatttagaaaatcttatcaatcctattataagtgataatcaaaaaaaacatgaagaaaaaatgaagaaaacaaggttaaaacaggaaaaagaaaaattaaaaaatacaaaggctagattaaattggattaaatcattaaaaaataatcctgaacgacttagtaattcatcttattttttaaaaggtgaattaactaatgattgctattggttaatgaatgaatgtatctacggtaaggattcagtaaatcgtgaagattattcaaattgggaaattttaataaatgaattcgggtttcaagttgcttccgcatatcgtgatgcagctataaaattttggcgcatctttaaacctaaattacattcagaggaacgtttgccaataaacagtactccttatactgtgatttttggtttagctggtttacaaatagaatcaaatgaaaatgaaagttttcctttaaatttaaatctttatgaaattaaacatgcgcttagatatctttcttggcaattaaatgatttcccatcatggttggaaaagttttataagctttttcctgatctcgtcagtgagtctgtaatgaaagaggtagtttgggagcttgaaacatctgacccagctcttgaacataatcatagtcatattcttcagaagatattccaccatgcaccttggttatatgtagatatagctccaaaaatatttaattggttaattagtaaggataaattactacataaacaaactaatagttatctattaaaaataatattaaaatcagatattttaaaagaagaccttagtagattatctaaacagagaatagagctatctgattcagtaggcgataaagcttggtggtttgcattatttgtagatagtgagccagaaaatggaaggcagagtaaaacttga

SEQ ID NO: 65703 - DNA, 204 bp, Acinetobacter baumannii
atgtttgtgcagcataaatccgaatacattaacttaaaccatgtggtaaaagtgaaaaaggctacatcaacaaataataaatatgcgcaaagagatttttataaattagttttatcatttactaacaaagaaaaccttgatttggaatttaactctgaggaagagttagatcagttcttggaaaagttagaaattgtgaagtag

SEQ ID NO: 65704 - DNA, 1074 bp, Acinetobacter baumannii
atggcacaacaaaaaccttttatcctagcgttgaccgatggtaaagcaggccatgaaactcaaactcaaggaatagtgcaactactgaatcaacagcaagagtatcaggtcgaatgggttcaattaaatctacctaaaaaatggttgtatcgtgttctgaagttactgatcaagttttcaataaatacagagtggttacgttatttttttgatgcccaaaccctaagagcattagagcagaaacaggttacttatattgtatctgcagggggaaacactctacttgccaatctattactcaaacaacatttacacaaagatcagtctgtgaaaaatttggtcgcgagttcattacgggggattcgcgctaacttgtttgatgtggtatttactactcatgaacaacaagctgttttgcctcattatttttactatccaattgcaccgaataaaatgagtgctttacctctaacacgcgagcaggctcgagaacatttgagtattcaaaatgctgagcaaacgattgcagttttgattggtgctgacactaaaacagtaaaaattggcgaggtggcacaatgggtaacagttttacaacggattcgccagcaatatcctacagcgcgattactactgacaacatcacgaagaacatcggttacttttgaaaaagaattgcagaaacttgccgagcagtatggcatttttcagctccatgatcagttaacatgggtagcacaagggcaaagttgcgatattaaagattatattaaagcagcagattgggttttggtgagtccagattctacttccatggttgctgaggctgtaatgtcaggaagcaaattagtggtagcttatgatgaattgggcttccaagacgggcatattgaggcacagttaagattcttagctaaacaacactggttgtatttattaaatttaagacaatactataattttccagagattttagaagaattacaggtgcagaatcatacaaaagaaataactagaaaattaaaaaatatttttgtgcatatctcggattcggcaggattaaaaaataaataa

SEQ ID NO: 65705 - DNA, 264 bp, Acinetobacter baumannii
atgttaacgatgttagtagaagtgatcatgggtgtttttatagagaactttaaagcttcagaacatccaattattaatattattatacgtggcattattattgctatacttatgtttttattgatgatattttcagatctatcaaatggtaacaaaagttctattgggctagggctggccataagtattggaggtgggctaataattagcttagctgtttttttaattgagatatttgcaaattatcttgataagaaatggtaa

SEQ ID NO: 65706 - DNA, 675 bp, Acinetobacter baumannii
ttgcctgtagagcaatatcgagaaaaagaagcggcaggtgcggaatatcaccaaggcacgcctgatggttcacgtcccggacaagtatatgtaaatactggcgacttctctgaacgttccaaaatatcaatggaagcgactgcttaccatgaggcaattcccggccaccatatgcagattgatattgcccaaaacctgccaaatttgccgatgttccgaaagcaacccaaccataccgcttatattgaaggatgggctctttatgcagaacaactgggtaaagatgttggtttctataaagacccgctttcagattatggaagactctcgagtgagttgttccgtgcttgtcgtttagtggtggacactggcgtgcattataaaaaatggacgcgtcagcaaatgattgattttatgcgtgaacactcagctttagatgaacctgatattcaggcagagacggatcgctatatcgctattcctgcccaagcattagcatataagatgggccaactaaaaattttagagctacgggagctcgcgaaacatgagcttggagaccgttttgatatcaaagcattccatgacatggttttaaatgcaggaaccttgcctttaaatatactcgatgcccgtattaaaaattggataaagaaacaaaaagtggcagcttaa

SEQ ID NO: 65707 - DNA, 813 bp, Acinetobacter baumannii
gtgcttgcaaatgctccgggtggtttagagcttttaccaagtaaagcttacaataatggacggccatggctattcctgaacggctctgggcttatgaatgggaaagacttacaaaccaatgtcgctcctctccctaaaagtgacccttacgaagaaatatataaagctgacggggtgtggtgggaaatggtcaagaatgaattaattgatcctgctcggatgatcaagaaagataatcctagtcagagagccaaagatgtatatttcaaaaaaattgaaaaagtaaaagagtttcattcaaaaattaccaataaatatcatccatgtacttatgttaactatggacatgactctaagcatttaagttttggaacactcacatggacattagatcgaccattgagaggtttaacggccgagcaaatgaaaaggctaccaagagcaacagcaaagcaaataggtacatatcgccaaaaaattgttcaagaacaaatggtaaaaattaaagaaggcaaaggtgccgatgctaacaatcgtgacttagcacttgagaataatggtatccgctatatttcgttagtaagtggtaatctgggtgtcttttcaatctccaatcaaaacgcagctggagatggtaccgtaccgcaccagtctggttctgctccactaaagcagcctggagttaaacaagtattcaaaatgaaaggttttgatcatcaaggtagttataacaatactctggttaggcgttctgtactttattctatagtcaaaattattaaggaaaataatatccaaccgaaatatagataa

SEQ ID NO: 65708 - DNA, 348 bp, Acinetobacter baumannii
gtgatagaagagcttttaccgttttatgaaaaacaattacaagaatttggtcaacaatctcgggaatttgcccaaaaatatccaaaaattgctcagcgcttatctttaaatcaagagcaaattgatgacccacatattgaacgtctgattcaggctttttcgctgattgctgctcgaatcgataaaaaactaacagacagttacgatgtttttactcgttctttatttgaggtgatgttccctcaatacttacggcattttcctgcgtgttcagttgttagctttgaagatattaataagattaaacagcttacagaacctcatcttgtacctcatatacggttttga

SEQ ID NO: 65709 - DNA, 204 bp, Acinetobacter baumannii
atggcagtaacagtacgtttaaatgacaaagagcaagaatctcttagaaagaagtgcgtagaactcaataaaattctgatcaataaaaatctacagccgattaaggatagtgagctagtgcatataatccttgatcaagctatcgataacgttgaaatatcagcaaacgggaaagttgttgttaggaactctaaagacctctaa

SEQ ID NO: 65710 - DNA, 1218 bp, Acinetobacter baumannii
atgctagatcatatttgcataaatgcgccatttgaatccagcttctactcagtagatgcggaagggcgttatttttttgtagatattgatcttcacaccatagaaattccacttgcgtctcgttctgttcataagaatgatgacggttcgatttctgctgctgctttattccatccttatgagtctgtaccgactcattacacaggtatggcgatgaaagtgtttttcgatgctagttatgaaccttatgtacagattaaggcttcgcctgcaaagttgttgcagggccataacgtttttggatcggatgacatagagcagggtgctgatgagatgattggcttcttacacatggcttacccagtgcttacccgtatgcttgattgggaacgtgcttgggtttcacatattgacgttacgtattctgccaagttgtctgatcagacaacggctaaaaagattctggactttctggctaatgtcagtagcggtcaaactagactttccaataagcggtttgatagctctgtgtattggggtggccagacgtccagacttgtaaaccataaatgctatttaaagcatgatgaatttctttcccagtttgaagaacttaagcaactggcaaaaaagaatgacaaggcagctcaacgagttgttgatgttatgtccgattcacgtttaatcaactggacggtcggactattacgttttgaatcacgtttaaaaaaacgttggcttgaacgtaacggagtacctacgaacctttatgaactcatagcatttcagaaggcaaatcctgatttacttcaaacactttggacaaaggcaacgcacagcatttttgatgccatgagaggtcaaactgtgaaattgattaatgatgaaagtgttttggaagccatatctaactcgccagttgtcgttaccaatagcggtaaggtttctcaaacacgtatccgaaatatttactctacgtactgtttagttcgtgagcatggcttagagaaattagctgaaatgcttcctaagcctacgttttatagacatttatctgaactttgcgaatgtggcttttcaaaggcatttttgcagaacttgcatgacaacaaggctaaaaatgtcattccatttatgaagctcgtagaaatcgacttttcccaacaattgcctgagtggtatgagccaccagtatcgcaatttaaatcagtagcttaa

SEQ ID NO: 65711 - DNA, 735 bp, Acinetobacter baumannii
atgggtattgcagtatatttggcaaatcatggatatatctgttttattttagaatggcgagggcacggcacaagcccaaaaacagatattccatttaattttgaaactgttgcgttatatgaatataaggctgcatttcattatatttatcatcattttaatatggactctttacattgtgtgactcatagtggcggaggtttatgcttaacaatgttcttgattaattatccagaatatttaaaaaatatccaaagtattacttttatagcttgccaagcatttggagcagtaaatgactcttttgactttattaaactcttttctgcaaaacttgttgttaaaggtctaggccagataccagctaataaatttaaattaggacgagtaaatgaaagctattacaccatgcagccatggtttaactggaatttaaaacaaaattttattagtgagtttaaaaatattgattataaaaaacatatgagctctattagagcccctatatattctattagtggaagtggtgataaatttattgcacccgttaaaggatgttataaatatttagaagcttttgaaaatcataataatgtatttcgtgaatttggttactcaaataacaacttggaaaattattctcatagccgaattgttttgagccaaaatgctgctaaggaagtctggcccactatattgcaatggatagataagaactcaaaagaagttctataa

SEQ ID NO: 65712 - DNA, 765 bp, Acinetobacter baumannii
atgtttttaaaaaaaagatggttggccgtttctttcttcgcctttatgagtgtagttcaagctgaagaggttaaaccttataaatattctgaagcttccgattcgtatacttatagagctcaactaactcatactatattccacatttcgtccaatcctttaataatttcaagtaaccttaaaaaagatattctaggagaagatactcagtatgaatttttaaaaaaaatttttaaaaaaaataatagtcttatagtggttacatggcctggtcctatatatggtatgcagagtgctaaagtaacctactatatttatgagataaatagtcttggtgaactaatcaatcgtgatgaagttcattttgacggtgtaagtgaaattgaagtaaacgagacgcctaaaggaatcaaaatttatagcgagcaatcaaaaaatcatggaaaaacatttatttatgaatttattaatgggaaagtatttgatttttccacttcaatgaatacttcattaataaaaaaagaagaagagaggctgtgtaaggggttttatgatttatacacgacttatgaatatgaatatgatccctatcgtaaggttgaaaatatttatgatctaggaacagctaattattcttggatctcttataaagtaaaatcgtcgccgaagctttcagatcagttaataaacacattaaaaggaaggggcttaaaagaacgtcagcaaatgaattatatgagttttaagaatagtttttgtgattag

SEQ ID NO: 65713 - DNA, 396 bp, Acinetobacter baumannii
atggataataagaaaagtaactttattgaggatagtcgtattcttgcattttggcgtgatttagaaatatttactataccttctgctccaacttcaaaagataataataaattcacaaaaataataactttaagatttggtgagaaactaccttgggaaatggtggaatatcagccaacattaaaggatatgtatatccatacagtttatattggtgtagcagatcaagaagaattgactaaacttgttttgcgcaagattgtaagcaaagagttgagtgataaagaacgtgaacgcatttcgggtactgggtggttagcgtcttttaatgtaaacgaaaatggatgtttaagtgcagatagctatgcaccagccagttatgtatatggtacctag

SEQ ID NO: 65714 - DNA, 453 bp, Acinetobacter baumannii
atgttagataagatcagcaaaattttattattaattggaatattatctcttataggctgttccacaatagatagaaaaacttgtattaatcattttaataatagggtttttattttaacaaaagatagtcaaattattaaatcaattaatttaattaataagaatatattttgtggggatcaaccgtatagtgagttttataataatataaatttatttctattaggattaaataacaatcaaaaaaataatttttatgtaatcttattttttactgaattctataaaaatgataatggtggtgagtttattgagtttttgttaagaaataagatcgatatttctgatcaatatataaaaatatcaactaataatcatttaatatctcaaatgaaatatacaaatgaagaattattgaatatcaagaaactgggtaaattgttgaagaaatag

SEQ ID NO: 65715 - DNA, 1653 bp, Acinetobacter baumannii
atggcgatatatcatttttcagttaaaacgattagtagaggtaatggaagatcagccgttgcttgtgctgcatatcgttcaggtgaaaaattggtatgcaatttctatggaaaagaacaagactacacaaaaaaaactggtgtcgaatttacagaaatctatgcgcccgaaaatacaaataccgagttactcaatcgtcagacactttggaaccaagtagaaaaagccgaacgaagaaaagatgcattacttgcaagagaatttgagattgcatttccaagtgaattaaacgctgaacagcgtaaaaaaatgctcaatgaactttgccaaaacatcgttaacaaatatggtgtcctcgttgacgctgctattcatgcaccgcatacagacagtggaagtgatgaacgtaactaccatgcacacattatgttcaccacccgaagtattaatgagcatggtgacttttcagcaaaaaaatatagggacttcagtcgtgacaatggcacagaaactgtaagccactggagagaatcatttgcagagttatgcaatcatcacctggaacaaaatggatttgatgaacgtgtcgatcacagaagttatgaagaccaggaaagtgacctagaagcaactcagcacgaaggtcctcaagcgacatacctccggagacgagggatatttacagaaattagtctgaaaaatgatgaaattaagctacgtaatttaaaaatcaaaaaggtcatcgcactggatgaaaacatcaaagtatctgaggatcttgttcaaaaagtacgaagtgagcttcagtttcaatactctcaagctgagtattcagaaaaaacttctcagaaactttatgaattccaaaatgaagaattatcaaaattaacaacaaaattagacacgatgagttctgcaatatcagaactacgcaaaaaagagcctttattttttaaaacaaaatggatcaatcaaataaatgacctgatcgaccaacacaacacccaactagacatccaaaagcatatttctggtcttagtgaaatagaaaaaaaagagagatattctgatcatttaaataaatggacagaagaaaatcagctgctccagcctaaaaagtcttttgcaaaatttgacgaaccgaacatcactgttaaacaacgaaaacttaatgatcaaatttcaaatatagatcatcaaatttctgaaatatcacgcagagaaactgagtatcaagagtatgtacgcgatcaaagactggagatcataaatagttatatatttgaagaagataactatggaaataaatactttagtcctcaaaatggtgaaaaacaaaagcgactatatgcagaagaaatggaagatctaaaaatccaagaattgcatgcggcttttacaaaaaaaattgagaccgaagcgcagcaagagttttcccaaaaaagagcaatacagctcgaaaacgaccgaaaagatcgtgaatctagagaacagcagttacgtaaagaacgagagcaacaagaacaacgctatgcacaagaacgagagcaacaagaacatttggcatttgtaagacgccaagaacaagaaaaacagcagagaaatgagcctaaaaagccagaaaatgacaataaccatgactacacgccttag

SEQ ID NO: 65716 - DNA, 912 bp, Acinetobacter baumannii
atgagtaaaaatatagtcgtaaaagcgaatatcttgattgaggcaagctacaaacttgatttggtagaaatgcgcttaatacttttagcaattattgaagctagagaaagtaaaacattgattgatgctaactctctgataaaaatatcagctaaaaagtatgcagaaatgtttgatattagcctcaaaaactcttattccatgctacgaggggcttgtaaaaccctgttcgacagacaattttcatatgtggattgggattttgatctattaagtgaagatacttctaaaatcttttttacttctcgatgggtatctaaggtaggttataagccaggttttgtttacttatcttttgctcctgatgtcataccattaataagtcgcttagaaaaagaatttacgcgttatgaccttcttcaaataagtaagttttctagtatttatgctgttcggatttatgaaatatgtatgcaatggaagattgctaaaaagttttatatttctctctctgatttacgaaatacattaggtttaacagaaatagaactttcaagaattgataactttcaaaagaaagtccttgaagtagcaaaagatcaaattaatgagtcttcggacataactattgattataaaaccaaaaagtctggaaccaagataactggctttgagttcacaataagatccaaaacatcacagccaattaaaatggaaatcgccttaaatgataaacaaattcttttgttctcaaataagctagttcatgaaccttcatttgcttcaaagtacagcaaagttggtgaaagttatgatgacttcgctataagaatttctgaaaatttaactattcctgataaggttcaggaatacttaccctatctagaaaaagtcgggttcaatactgcttaa

SEQ ID NO: 65717 - DNA, 519 bp, Acinetobacter baumannii
atgaaaagcctttcagttttagagttatccaagctttacaatatcaatagacagaccatctataatcagataaacaaaggaattttaagtaaaaattctgataataagattgatttctcagaagccatccgtgtatttggtgaacctgcaagaaaacaggatgtaaaagagcctgtaaaaatagacagtccaacttcggcagaagttttactgcttagacagcagatagacatgctgaaaaatcaagtatcagatgccaaagatcgagaagccttctaccaagaacaaattgaagtcatgcaacgtctattggaagctccaaaacctcatgtcactacacctgttgatcctgagccaactcaatctaagcctgagacagaagaaaaagaggaagtgatcacaatccctccaaaagaacctgaagtaatcgagaataagcgcattctagtcccggaacatgtccaaccggaaccggaaaaaagaggcttttggagccgtttttttagaccctatgattaa

SEQ ID NO: 65718 - DNA, 228 bp, Acinetobacter baumannii
atggtaggtgaggttcttgaagtgatggtgcaacttgctcatgaaggtatgaccatgatgtgtgtaacacatgaaatgggctttgcaaaacgcgtatctaaccgtttaatttttatggatgaaggtaaaattcttgaagattgcccaacccatgaattctttgataatttagaggcacgtcatgagcgtgctaaaattttcttggaaaaaattcaggcaatgcactaa

SEQ ID NO: 65719 - DNA, 1272 bp, Acinetobacter baumannii
  misc_feature (1243)..(1252): n is a, c, g, or t
atgccaaaaaaaaggcaagaatcttataaattattaaaacgccatatttgttattacttggcttctggcgttgttacaatgacaatgcctgtgttcgtgcatgctgaagaagcagctgcgagtgcgcctgtagaagctgaatttgattctgcttttttaattggtgacgctcagaaagtcgatatttctcgatttaagtacggcaaccctgttttaccaggtgaatataacgttgacgtttatgtaaatggtcaatggtttggtaaacgccgcatgattttcaaggcattagatccaaatcaaaatgccgtaacttgttttactggaatgaatcttcttgaatacggcgtaaaacaagaaattttaaccaagcacgctccccttcaaaaagaaaataatagttgttataaaattgaagaatgggtagaaaacgcattttatgaattcgatacgtctcgtttacgtgtagatatttcaattcctcaagtcgcattacaaaaaaatgctcaaggctatgtcgacccaagcgtatgggatcgcgggattaatgccggctttttgtcttatagtggtagtgcgtataaaacttttaatcagtctggtgaccgaagcgaaacgactaatgcttttatgggggttacggctggtctaaatttagcaggttggcaattacgtcataatggtcagtggcaatggcaagatacgcctgcggaaaatcaatctaaatcagactatcaagaaacaagcacctatttacaaagagctttccctaaatatcgtggtgttttaacactcggggatagttttacaaacggcgaagtatttgactcatatggttatcgtggtatcgatttttcaagtgatgatcgaatgctaccgaatagtatgcttggttatgctccacgtatccgtggtaatgcaaaaaccaatgcaaaagttgaagtacgtcaacaggggcaattgatttaccaaacaacggttgcaccaggtaatttcgaaattaatgacctttaccctaccggctttggtggtgaaattgaaatttctgttatcgaagcgaatggtgaaatacagaaattttctgtgccttatgcctctgttgtacagatgttacgcccaggcatgaaccgttactcattaactgtaggtcagttccgtgatcaagacattgatctggacccttggattattcagggtaaataccaacaaggtattaataactatttaaccggctataccggannnnnnnnnnaggtattaataactatttaa

SEQ ID NO: 65720 - DNA, 819 bp, Acinetobacter baumannii
atgagggtatttaaaggtgaagaaaatttttatgtagagtgtaaaaagttgcaaagacgtacagattatgcagaaaaagaaagaaatttatttcttaagtcgtgggatgaaagtaaaaaaatattattaaagaattatccaaattattggttctttttagaaataaaaactgaactagtggataatgaagtaattaatttaatagagaaatttgatagattgtctgaggaaggtgatattctctcatatgaagatagtgaagtagctcttataggcaagaagagagatttatataaaattaataattatcttcaggctaattatgtaaaaatggaaagttttactttttctaaattacttggtgaggagtatgtatattccaatgctgatagaactcatatattaataatgcagcctaatattcttgaggttgcctctgctcctgttttgggtctgtttgttaataaattaggtaagtttttaggtgttactaggatttttacaaatgaaaattctcaaaataaaaaatctaaagaagttttgaagcaagtgaaagaagctttagatcaattagaaaattatcagaatagagtggtgcatgttttatatgaagcattagaagatccggttgttgaattaaaaagatgggggaaaattgaagacaaaatgaaagaattagaaaaagaattacccgcggacatttcgatcaagatacacaatctcacttactatgaggatgttaatcaaatgtttgatgtacaagagacaataaaatcgtggggaaaaagagttccattttcaccttttataataaagtaa

SEQ ID NO: 65721 - DNA, 1563 bp, Acinetobacter baumannii
ttgaatgaggctttaactcagacatcaaatacagaacaattaatacaagatataaatttaattttgcagcaatcgaaaggcgataattattatattagtgaatcagaagcaacaaacctaaaagcactaattgaacaagctgaaataaaaatagatgaagataatcaaaaagaattagatcgtattctaaaaattttaaatatgttaaacacaaatataatttataataaattactcaaatacctctcaacaaagattcctaaatttgtttactttaataattatattagagtaaaaccccgtattcatctagagcgtctagctcaacggcaggaaaataatcaacttgatgataaatattttgattatggaaatatttctcttcttaagttcttaggctactcagcaagagagctagcaaatcttggcaaacctaatgaaagccaagctgatcctgaagcatatgctcgatcattagatgatagattctatcgtcttaatgcagcttctataaatttatctaaatcaatccaagaaatttggaatccaagtaacaaaacagatgaagcttctaatttagaaattgtagccgatgggcaatccttaaaagtcgtagtaactgatatgtcgggagctaaggtagaacttgatcaaaggtcagaaggctttcaatggatggtatcttttttcatagtttttgaatcacaagctgataatgattataaaaactgtattcttttacttgatgagcctgctaccagcttgcatgctttaaagcaaaaagaatttattaaaaccattagtaagcttgccgaaaaaaatcaaacaatttatacaacacattctccatttatgatctcacaagatgaattagatttggttagaattatcgaattgaccaatagaacgattggcacaaaagttaataataaaattgtttcaaatgaccctgctgctctatttccattacaagaagctttaggatacaacctagctcaaagtatgtttactgcaaagaaaaatgtacttttagagggcataacagatttatggtacttagaaggagttaactcattatttgataaaaaccttgaccctagtatagctttattgccagtaggaacatcagcaaaaatttcgtactatgcttctatgcttggtaataatgacttgaaaactgtagctcttttagactctgatgctgctggagataaagcagcagaacaagatactgttatacattcgctaggggcaaaaaatatattacgaacaaaagagtttttacagaaggaaattaaaaattctgaaattgaagatattattcgtgaaactttagcacaaatttttacagctaaatatcaaatagatatttcagaagaagataaaaactctgacaaggctattgttgatatctttaagaaacttaaaaaagacttttcaaaagctcaaatggcaaaggcttttttagcgtgggccagagatcactcttatcatgatttatctcatgaagaaaaacaaaattgtcaaaaattgattgaagctatcaacaaaagattgaaataa

SEQ ID NO: 65722 - DNA, 390 bp, Acinetobacter baumannii
gtggagtggattgatcctcttggattaatgagtgaatgtgaaaaaagacaattgatttttaatcagaaattaacaaaaattaaaagtttaatagctgtacatgattatacaaatcgcggcaacgttaatttgaaaatctctggaggtgttagtggcgcaattggttatacaaaagcgacaggaacacttgttggaggaagcgatcatattaaaaaaggaaaagatttattaaaaggattcaaagataccatgaagactattgataaagcacatagcctttgtgataaacataaagcaagattccatgcttacggtgatccatatattagaaaattagaaaattctctagcattaccaacgaaagttccattaaatgggaagtcgacatga

SEQ ID NO: 65723 - DNA, 306 bp, Acinetobacter baumannii
atgttagttaataatcaaactatattttattctggtgatgaaatggtagaggttttaaaagagatagaatatatattagtttctctgcacaaagtaggatctcactatgctgaaaccttacctgattcttatatcgaatatgcagatgaaactacaaaatttattgatgataataatatttgtgaaagactagcgagaattagaagaattttatctagtaaatttgataatagtttaggggaagatgatatggatgatttagaaagagcttttgaaagtttagaatattggaaacccaaaaaatag

SEQ ID NO: 65724 - DNA, 690 bp, Acinetobacter baumannii
atgaaatattggagacagatttttattattcatcttcgtgaccatttaggcacaccgcaagaaatgaccgaccatacaggtgctattgtctggaaagctcaatataaagcttggggtgagtgtaaggtaaaaccggctaagtcagatttctttgaaaattcagaaactattagtaataacatccgtttccaaggtcaatatttcgaccaagaaacaggtcttcattacaaccggtatcgttattatttaccgtatgttgggcattttatttccaaagatcctattggattattgggtggagataatgtatatgcttatgcaccgaatcctgtagggtggattgatcctttggggttaaattcaaaatccaaaaattctgaagaggaaatgatacgtgtaagacattacacaaatagaaaagattcaaatattattgaaaaaactcaaaaaataattgctgctgataataataggatatatgttgaactagctaataggaagcctttatctcaagttgaagcggaggataaatgtcaaattaaacgaggtaaaaggcgtgactatgtagaattcgatgttcaaaaaaataaaacagagtgcattaaaaaccctaggtatcataatgaaaagcttacaatcaaaggcgacgtagataacccgtgtaatttaactattcataggagaaaataa

SEQ ID NO: 65725 - DNA, 660 bp, Acinetobacter baumannii
atgaaaaaatttggggtaagaaatttaatgaatgctgaatctaataaaaatgattttattcaaaatttaggggaaattagaaatattaatttgaataataaaaaaatctatacttttttttataatgagttagaagatcaaatagatgagcacctagagcttacagatacccataaaaactctaagaacaatctacttgaacaaaaaacaataataaatagtgttagtaataaaattagaggtttaacatatagtatagaaaatctattcttagaatatacatctactcttcctagagatattatcttagaaaattataacaaagaaattaattattcatttgatttaattaaagacacagaaattctaatagaaaaatttaaagaactttgcaaaggactttctcctgaattaaaatcaaaagatggaggaaatataatattaagaccacttgaatcttttgttgtccaaactattgagagattaaaaacagtaaatgaagaaataattaaaaatctagataaaaacttcaaaactcttaatagtattaaaaattcattaaatgaagaaattaaaattgaaaaagatagatttgatatagattatataaaattattaaaagccataatttacttaatgatggtgttgattcagcactaa

SEQ ID NO: 65726 - DNA, 495 bp, Acinetobacter baumannii
atgtatatttttcctccaattaataaagaaatcaaaactgggagtattattaaaagcctttcagctaatcaatatcatatcgtattaacaccagcttgcgattttgctcaatcaaaagctagatgtatattattggctgaaattattccaccattagcttatattcgtaataatttccctggaaatgaagcaactaattcaagaaagcagaaactcgaaccaatgttacataacaagaaacaagaatatcactatttacctaaattaagccctttcgaaggtgggttcatcgacttcacatctgttcaaagctactctaaagatgatctaatacgaatttttagtgaagttaaaattcaaatatctccatactttattagtgatattttaggtcgcttttctagttattatgctcgtcaaggacagcctgatttgcatcatgaggaaagttatgtagagcaactattaaaaacagatacacgcccatcaacttaa

SEQ ID NO: 65727 - DNA, 213 bp, Acinetobacter baumannii
atgtttatgtcagaacttactattcaatttgggcaattggttcgtaaatacagaaaagaaagaaacatgtcacaagagcaactggcattactctgtaacatggatcggagttatttaggaagaattgaaagaggagaagttaatcctactttggaaaaaatctatgaaatagcatcggctttaaatatatcagccaattctttattaccttaa

SEQ ID NO: 65728 - DNA, 483 bp, Acinetobacter baumannii
atgaaacaaattgcttcccctatctttcaatcttttcttttacttctctcccacaaccaaattgatggatggacatcaaacaaaatttggaacaacttgaatctttcaaaagatgaaaagcaacgtatcaaccaacagcaactttatagacttttaagaaaactagtgaaacaaggttacttggccaaaaatattcatcatgacaactcaagactttcaacatttgtcgagacagaaagtatgaacgactttagaaaacaatttgaaaatcataccgtgatacatgatttagaaaaacttgaattaaaaactaaagaattaaaagaaaaacaaaagatttgcgaaagccaaattgatgcttctgaactagcacttatggactttccagaattaaaaaatgaaatactacgaagaaaaaaccaattacttcaagatatcgaaaaactgaaagcttacactaactttctaacatcattgatatga

SEQ ID NO: 65729 - DNA, 945 bp, Acinetobacter baumannii; identical to SEQ ID NO: 47616

SEQ ID NO: 65730 - DNA, 447 bp, Acinetobacter baumannii
atggaggtaatccggcagcgggtggtagtgcagcagttgcaagtgaagcggcagcagattacttcgcaaatcaatacaacgatggcaaaaccgcaattggtcgcaatggttgagtgtgacttaagtacccccgcaatagataaacttaaaaatctttattatttacatactgatttagaagggccgtattacttattatttaaagctatttttgaaattaaaaatagttatcccaacgcctatcaaaccacggtgcgctatagaacatggttaaaaaatgaaatttatagtcaacttagaacacttaaatttgatgcttcatttaatgatgccaaactatttttatatatgattgaaggcgcaattattcagtgtttagacaagaacgatgcgtataaaggaaataacgcattagattactttttattactagtatgtcaggggtag

SEQ ID NO: 65731 - DNA, 255 bp, Acinetobacter baumannii
atggattctacagaatacttttggcttactcggaaaaaagaacctaaaactaaacctaaaagctggccactgccaaagcctacacaaaaatatctagaggcagaagaagaatttactgaaactttagataatctggaaattaaatatgaaaagaaatttcagtttaagtcggctttgttgcacaaagatttaaaagttaagacttctcatatctactcaaatttaagtgacaactcgggtatgtggtctgcctaa

SEQ ID NO: 65732 - DNA, 822 bp, Acinetobacter baumannii
  misc_feature (807)..(816): n is a, c, g, or t
ttggaacatcaagatgcttttattgacctacttcagtttatacgacaacagacaggttggaaaattattgctacagggcgtgattatgcattccagcagctttcatttaatttcttgcagtctaatggaattaaggttactagtataaatattgaagcgttttctgaagaacaagtacaacaagtttctgagaacatacctgaacttaagaacctactatcaaatgaaacattaatagatattctcagagtgccattctttattgatattgcagtacgagcaattggtaatggagcacactttcaaagtggagatacagaaattgattttaggaatactgtttggtcctcagtaatagctaaagagcaatttcgaaagtctagtatgccaataaagcgaagaaaaacatttatcgaaattgctactcaacgagctaagaaaatggtattcggtatttctgtagatggctttgattttgaagtaatagcaaaattagaggaagataatttaatttatcgtgatccaaaaaactctactattagtttaacacatgatgttttagaagactgggcattagaagaatttattgaagaacaatttcaaaataattcgaatgaattgagtatatttttaaaaactatagggaatgaacctgcaataagcagggcatttatgttatggttatatcgccgccttcaatttgataaatctacatatgattttgttaaaaatttattaaattctaatattattgaaagtttctggaaagatgaaacaattgcagcaatcttacagcatgataatccnnnnnnnnnntcctag

SEQ ID NO: 65733 - DNA, 615 bp, Acinetobacter baumannii
atgtgtataagagacagtttaaaaggtggagtgcacttatttttaacctctgcattaagtaatttattgacttcttcaggtacaattatcttatcttttgtatcaaataatactattgttggttattattcagcatccgaaaaactttttagagctattgttggattatttacacctataacccaagctttatacccaataagttgcactaaagttaatcaagagaatctagcaaagccatatattaaaaaaatatttactataataggtggaattgcgttaatactgagcctaatagttgctttattatctaagtctatcgttaatttaatctatgggatagaatttattaactatagctatgtgttggctgtaatgatgatttggttattttttggtgtaattaataatattattggtattcagtatttaactgcaatgaggaaagataaagtatacacatattcatttatggctgctgcctcagctacggttttattgaatatagttctaattcctcattttatgattgatggtatattattttcaatgatatttggcgaaatccttttaacattatctatgttaggacttatttttaggttgaaactatga

SEQ ID NO: 65734 - DNA, 255 bp, Acinetobacter baumannii; identical to SEQ ID NO: 65731

SEQ ID NO: 65735 - DNA, 720 bp, Acinetobacter baumannii
atgcagaatccaacaaaaaataaaactccattttataaaacttgggtgttttataaaaaatggactttttgggtagttgttatttatctaagtttggtggttatacataccgtatgtttaatattcagtaaaggagaaaatcgtcttcttaattcgaatgagtttggtgatttcttagctggaacatttgctccattggcatttttcttccttttattaggttacaaacagcaaagtattgaaattcaaaataacactcaagaaagattagaacaaaaaagacaatctttattactttctcaaccattttttcatttcaaagatttatttggatttataattcattcaacaaatggtccatattatttcaatttcagtttcacattaagtaatagtcgagcaatttgtaggcagctttttattctggtaagttttgaagatagtttaataggacaacttcctactggagatacctcttttgggtttataagtaataattttgatgatcagcgagatttttttttaataactgaaagtgagcacataatttttgaagatgactatgtggttgtatatttattaattaattacactgatttaaatgattcaattcaaatgcaatcattaaaattatatttcaaaaatgattccgatggtgggtataaatatactcattacattgttcacaggaatagttatcagaacaaaattttagtttga

SEQ ID NO: 65736 - DNA, 609 bp, Acinetobacter baumannii; identical to SEQ ID NO: 59947

SEQ ID NO: 65737 - DNA, 570 bp, Acinetobacter baumannii
ttgtctcaatattggcaatctattactggggactctatggtcgttgatatccgtagagccaaaaaacaaaaagacttaggctattcaggtgctgctgctgaagtctgtaaatacgctctcaaatttggtgatctttctgtagaaaagacttgggaagctttcaaagttttaaaaggtaagcgattaagtggtgcttttggatctctttggggcgtgaaaattcctgaatcattaattgatgatttaccagatgattctgatttaccttatctagaaatgatttataagttcgtcttttctaagaagtcttattacgatttacaacttactcgtcatgtcgaacctacaggtaaggacgccgccgacgagcttcgaggagtagaaggacgcaacctgttggtgagcatggacgggcgaggagtgagcgacgctgggagggcccgcactggcgcgcttgccccgcagcacggacgaaaaaaacaacactggcaaatcccaccagttactcgtgttcgggttcggaagcgaatccgaagatgggacggatatttatgtgttttacatttatag

SEQ ID NO: 65738 - DNA, 570 bp, Acinetobacter baumannii
ttgtctcaatattggcaatctattactggggactctatggtcgttgatatccgtagagccaaaaaacaaaaagacttaggctattcaggtgctgctgctgaagtctgtaaatatgctctcaaatttggtgatctttctgtagaaaagacttgggaagctttcaaagttttaaaaggtaagcgattaagtggtgcttttggatctctttggggcgtgaaaattcctgaatcattaattgatgatttaccagatgattctgatttaccttatctagaaatgatttataagttcgtcttttctaagaagtcttattacgatttacaacttactcgtcatgtcgaacctacaggtaaggacgccgccgacgagcttcgaggagtagaaggacgcaacctgttggtgagcatggacgggcgaggagtgagcgacgctgggagggcccgcactggcgcgcttgccccgcagcacggacgaaaaaaacaacactggcaaatcccaccagttactcgtgttcgggttcggaagcgaatccgaagatgggacggatatttatgtgttttacatttatag

SEQ ID NO: 65739 - DNA, 357 bp, Acinetobacter baumannii
gtgaaaattcctgaatcattaattgatgatttaccagatgattctgatttaccttatctagaaatgatttataagttcgtcttttctaagaagtcttattacgatttacaacttactcgtcatgtcgaacctacaggtaaggacgccgccgacgagcttcgaggagtagaaggacgcaacctgttggtgagcatggacgggcgaggagtgagcgacgctgggagggcccgcactggcgcgcttgccccgcagcacggacgaaaaaaacaacactggcaaatcccaccagttactcgtgttcgggttcggaagcgaatccgaagatgggacggatatttatgtgttttacatttatag

SEQ ID NO: 65740 - DNA, 465 bp, Acinetobacter baumannii
atgtgtgtaagactgtctcaagcaataaagctaaaggaagaggtaaaactacgcactctagagaaatatcttgttaaactagatacagaaaacgaaatcaaggcaataagaacggatgaagattttgatctattaattaagcaaataacatctagatacctttcacttgataaaagcattcaaaatttaggtttaccggaacagttatctacaaaactacacaaagctagaaaatcaagaaatgaaatagctcactctttaactaaagatttagagggttgtcttgatataaaaattgataactctattttaattgaaaaaatagtaaaattaattggagacattattgatggtgatattattatctcaacattaacaagcatctttaataatgaacctatcttgaatagtaaaattcttaaccaatataaagaaaaaattattgattgggtaattacccagtaa

SEQ ID NO: 65741 - DNA, 357 bp, Acinetobacter baumannii; identical to SEQ ID NO: 65739

SEQ ID NO: 65742 - DNA, 309 bp, Acinetobacter baumannii; identical to SEQ ID NO: 64768

SEQ ID NO: 65743 - DNA, 237 bp, Acinetobacter baumannii; identical to SEQ ID NO: 44371

SEQ ID NO: 65744 - DNA, 1557 bp, Acinetobacter baumannii; identical to SEQ ID NO: 49261

SEQ ID NO: 65745 - DNA, 534 bp, Acinetobacter baumannii; identical to SEQ ID NO: 63634

SEQ ID NO: 65746 - DNA, 1122 bp, Acinetobacter baumannii
atggctctaccgattattactgctgaccaaactttattagttcaagcaattattgtgtacctatacgctgatccgggtttaggtaaatcatcgatgggctttactgcggaaaaagcaatttcttttgactttgaccgtggtgctcaccgtactggtgaattacgtcgaggtgcggttgtacaggttcaacaatggagtgatgttgcaaaccttacgccgcaggacttagcaccctataaaaccgtagtcattgataccgtgggtgcaatgcttgaatgcattaaaacccatctgttacttacggcaaataaccgtcaaaaagatggctctttaaagttaaaggctcaaggattagcgaaccaaacgttcaagcaatacatcaatactttgatcagtttaggtaaagatgttgttttcattgcacacgcatcagaagatcaaaacggtgatcaaattatttaccgcccagatctaggtggtaaaaaccgtaacgagctttaccgtatcgcagatgtcatgggttatctaacaactgttactacaggtgaaggtaaaaatgcccgcgttattaattttaaaccctcgcctacacatcatgcgaaaaactcaggtgctttaggtggtgaaactggtgaagtatgggtaccagatcttaaagcacatcctactttcttggctgacctgattactcaagctaaagatcacattaacaccttaacgcctgcacaacttgcagcagctaaagcccaagaagagctagaaaactggaaacaaagctgtgaagaagctgagcatgcaggtgaccttaatcaattaactgagtcgcttgataaagaacacatgtattaccagaacatgcgccaagcaatgttaatgagagctaaagcattgaattgcacgtttgataaacaacgtggcacttggattagtccaccagaatttaacggtatctcagatcaacaaagagatgaacttcaaaactttattgctgaacgtggcctcgatgtaaaaacagtttgtgagcacttcggcatagatgccctgatccaaattgaagcggcaaaactaactgcagttaaacaagaaattgaaaccttagcgaaaacggggatgacagcatga

SEQ ID NO: 65747 - DNA, 531 bp, Acinetobacter baumannii
  misc_feature (516)..(525): n is a, c, g, or t
atgcctaaaaaatttgaggactttaataatcctaggaaaaaagcacttgcagggatgaaacaaagcatttcagctgaactttgggacaaaaatcttaattttttaactcaattaagagccaagattgcgaaacatccagtatctcatcatcctgcaatagaaactttaaataacggtgaaattaataaagaaaacttaaagcgtattcatttagagtatcgccatgcaatcgtacaaacatttacagacgctttattaatggctcaataccagacaaagcagttagaacctaggttgcatgcaggtgcaaagatgtttccgcgctgtcttttgagtcttaatatatttgatgagtttgggtttcgacctgggaccgacaaagacggttattatcaaggtaacccagaatatgcacattatcctttatttgaagatgtccttgatgattttggagtgacggaggaagagcgccggagttatcaaccaacagaaattgcacatcagctgagagagttnnnnnnnnnnctataa

SEQ ID NO: 65748 - DNA, 408 bp, Acinetobacter baumannii; identical to SEQ ID NO: 54072

SEQ ID NO: 65749 - DNA, 408 bp, Acinetobacter baumannii
atgcttgaagaatctgagcataaagatattgcttatgacgtctatcaggttttaaacggtaattatccgttacgggcaacgggctttttaatggctttcattaccattttagggcttattccaacagcaactttatttgtacctctactgcgtaagccaaaagaactgttgaccagaaaattttggaaagatgcacgtcgtggcgtcaacttaatttttagtccaaaagatggcgtatttggtagcaccattggccagattttcgattatttacgtcctgacttccacccaaatgatcatgacaccactgaatatctagagtactacaaagacaaattactcaaagaaggcggcgcgattgcaccttactttgtgaaggaatttaccccacctgtacgcttgtcttaa

SEQ ID NO: 65750 - DNA, 411 bp, Acinetobacter baumannii
atgcttgaagaatccgagcataaagatattgcttatgacgtctatcaggttttaaacggtaattatccgttacgggcaacgggctttttaatggctttcattaccattttagggcttattccaacagcaactttatttgtacctctactgcgtaagccaaaagaactgttgaccagaaaattttggaaagatgcacgtcgtggcgtcaacttaatttttagtccaaaagatggcgtatttggtagcaccattggtcagatttttgattacttacgtccagacttccatccaaatgatcatgacacgaccgaatatctggagtactacaaaaagaaattacttaacgagggcggtgcaattgcgccttactttgtgaaggaatttacaccaccagttcgtgcagtttcataa

SEQ ID NO: 65751 - DNA, 1167 bp, Acinetobacter baumannii
ttgttccaaccatttacaatccaaaccagattaggcggattctacttcttttattattccattgttggcacatttatgccgtattggaacttatatctccaagatcagggatttaattatcaagagataggtattttatcttctattgctattgtgacgcgcttctttgcccctttagtttggggctggatcgccgataaatccagtaaaagaatgctattagtgcggattgccacatggatggaggcatgtatatggttggctatttttataattcctaatacttttcagtcagttgctttattgatgcttatttttagtttttttcaaaatgctattttagctcaatttgaaggagtaactttattttggttaggagaccaaagggcgaaactttatggcaagattcgaaaatggggatcagttgggtttattgtaggtgtatttacaataggggcaattttagaaatcattccgatttcaatgttgcctatattattgcttatcattgcctcattagcatttatttgggcatttacgatacgtgaaccagaaggggccccaacttcacaaaagcatttagaacctttattgcctgtgctgaaacgtcctgaagttgctgcttttttcacaattgagtttattcttcttttttcacatgcacctttttatagcttctatagcaattttctgaaatcgttaaattttagtacaacggaaattggttttttatgggctatgggcgtggtttctgaaattgtgatgtttgcatatgcaactacgttttttaaatatttttcttggcgtagccttgtagcagtatgtttgattttgacaagtatacgctggttattagttgctattttctctcactatttcataggtcagttatttgcacagtgcctacacgcttttagttttggcttatttcatctcatcgcaatgaggcttatctttcaaaacttttcaatagggcaacaaggtcgaggtcaggctttttatagcaccatgtgggggcttggagtggcgtttgggagcattttggctggtcattactggaaaattcttacgggcgagcatatttttatgatcgctgctttagtggttctatttggtatgtgctttgtctattggttacctaaacaaatcgaaaagtcagtttcttag

SEQ ID NO: 65752 - DNA, 504 bp, Acinetobacter baumannii
atgcgtttaatgattaataaatctatgaaaaatatttatattatgggattattattggcttgttctggttttgctatggctgagacagtgactcaacagccaacagaacaacctgttcgcactgcaagtaatcctaatgctatacgtattgttacgcgtcctgaaattatgggattatggggaatggagattccaaataataaaaaatgtgtagagtattataatttccgcagtagtaacgatgtggtgattaaaagtggtgaagagtggtcatacggtatttatgaatatcagccatctgatgaccctaaagagcagctatcggctttagtaatgcaaattaagtttgataataataaagtagattgttctggtcagaagcaagatcagacaggtgatatttctcaatatttcgtgcaatggaaaaatgaccatactattaatttctgctcaacggctaagggtgagcaatgtttcgcaactttacgccgaatgttgccataa

SEQ ID NO: 65753 - DNA, 1371 bp, Acinetobacter baumannii
atgttgcaaaaagttttaattgcaaaccgtggtgaaatcgctttacgaattacccgggcttgcaaaacattaggaatcaaaactgttggtatctattcagatgccgataaagatttgatgcatttacgtttcgttgatgaagcagtatgtattggtccgggtgcaagtagtgacagctatttaaacatcccggcaattattactgctgcagaaattactggtgccgatgcaattcatccaggttatggcttcctttcggaaaatgccgagtttgctgaaattgtagaaagctcaggtttcacatttattggccctcgcccagaacatattcgtttaatgggtaacaaggtttctgcaattgttgcaatgaaaaaagctggcgtacctacggtacctggctgcgaccatgctgtaactatccataacgcattagctgaagcgaaagaaatcggtttcccgcttattgttaaagcggcagctggtggtggtggccgtggtatgcgtattgttgaacgtgtagacacactacttgagtcagttcaagcggctcaacgtgatgcagaaatgtggttcggcgatgataccgtgtatatggaacgcttcttacaaaaacctcgccatgtcgaagttcaagttttgggtgatggtaatggccacgcgattcatttatatgaccgtgactgttcattacaacgtcgtcaccaaaaagtgttagaagaagctcctgctccaaatctaccggaacaagcacgtgctgatattttacaagcctgtgtacacgcatgtcagttaatgcaatatcgtggtgctggtacgtttgaattcttatttgaagatggtgaattcttcttcattgaaatgaatactcgtgttcaggttgagcaccctgtaactgaaatggtaactggggttgacattattgaacagcaattacgtattgcagctggtttaggcttagagcttcaacaagaagatattgaagttcgtggtcatgccattgaatgtcgtatcaatgccgaagatccaacaacattcttaccttcaccaggtaaaattgaaagtttctatgcaccaggtggtgcgggtattcgtttagattctcatatctatcctggatatagcattccgccatattacgattcaatgattgcaaaattgattgctcatggtaaagatcgtgaaacttcacttgcccgcatgcgtcaagcgttagatgaaatgattcttacaggaattaaaaccaatattcctttacataaagatcttattttgcaggataaaaacttctgttctcaagcaatggacatccattaccttgaaaaacacttgttaaagcaagtggaagaagaaaagaaagctgaaactgcttaa

SEQ ID NO: 65754 - DNA, 420 bp, Acinetobacter baumannii
atggatatccgcaaaattaagaaactcatcgatttaatgattgagtctgacttgcaagcgattgaagttaaagaaggtgatcaatcgatcgctttaactcgtcgcaatcctgtcgttgctgcggctggtgtagcacttccggcagctcctgttgctgaagcacctgttgcaaaaacaccacgtggagcagttgaaacttctcctatggttggtgtgttctatgctgctccaagcccaggcgaagcaccatttgttaaagtaggtcaaacagtatctgctggtgagactttgggtattattgaagcaatgaaaatcatgaacccgattgaagcaactcaaagcggtgtgattgaagaaattttagtgaaaaatggtgaagtgatccaattcggtcaacctttattccgttatcgcgcgtaa

SEQ ID NO: 65755 - DNA, 456 bp, Acinetobacter baumannii
atgagttcgaccattttggtaattcatggaccgaatttgaatttgctgggaaaacgcgaaccagaagtatatggtcatcttaccctagacaatatcaaccaacaacttattgctcaagctgaacaagcctcaattacactagatacttttcaaagcaactgggaaggtgccattgttgaccgtattcatcaggcacaaacagaaggcgtaaaactaattattattaaccctgctgccctcactcacacttcagttgctttacgcgatgccttacttggcgttgccattccctttattgaagtacatttatcaaatgttcacgcacgtgaagctttcagacatcactcttatttatcagacaaagcaattggcgtgatttgtggtctaggtgcaaaaggttatagctttgctctcgattacgctattgaaaaaattcaaccatctaacccaaactag

SEQ ID NO: 65756 - DNA, 1329 bp, Acinetobacter baumannii
atgaaagatatctcacaccgtgaagtttatgcactggttgatattaataattgctatgtcagctgtgagcgtcttttcaaccctaaactcaatgataaacctgtagttgttttatctaataacgatggatgtgtggtctcacgtagtgaagaggcaaaacttttaggaataaaaatgggagtaccttggttccaaattgaaaaagatgctttacaagcaggcgttcaagtctattcaagcaactacactttatatgccgagatgtcccgccgtttttttgctgttctcggtgagtttttctctccagatgatttagaagcctactctatagatgaatgctttattcatctcaccccttacctccaatctatcgatatctctgactactgcaataaagtgagaagcactctcctaaaatggttaggcttaccttgttgcattggaattggatattcaaagacacaagcaaaacttgccaatcactatgctaagaaaattaaaagttttaaaggagtatgtaatttcatcaccttagatccattaattatggaagacctcatgcaacagacatcagtcaaagaggtatggggaatcggctatcaattagtcaaacagctacaaagttatgaggtgtacacatgcctagacttaacttttgccaatgaacaccatatggcaaaggcattttctgtggtcatggcacgcaccattcgtgagctaaaaggccaatcctgtattcaacttgatgatccagctattccaacgaaacggattttagcatcacgaagttttgctcaagctttatccagtattgagattattaaacaagcacttatctttcaccttaaccgggcacatcgccgtttaatgaaacaagaacaactttgtgcctgtgttcaagttatgctttatgaaaaaaccgacaaaccgccctataaaaaagccacatctcaagcaattggtcttcattatgcaacagatgatttatgcatacttactaaagcagctatgcagcaaattgatgttttatataaagaaaataaaagttacataaaaattggagtattattttgtgctctacacgcacgtcagcaacatattgatgatttatggcagcctctggaacttattcatcaaagacaacaattgatggaaactttaggtacagtccgtaagcgctttggtagccactatttacaagttggatatcactcacgtaatccatcttggcaaatgaaacaatgtcatcgctcaaaaaattacctaactcgctggaatgaaatgttaacgattgaagatgcttatacccccgttacacaaaatacatga

SEQ ID NO: 65757 - DNA, 1011 bp, Acinetobacter baumannii
atgagcaaattagaaaagactcaattgcaactcggctatattcctttacttgattgcatcgctttactttgggcaaagcagcaaggtttcttcgaagaagtcgatttagatgttaccttagtcaaagaagcatcatgggcaagtctacgcgaccgtttagcttttggtttattagatgctgcacattgtttatctgcgatgctccctgcagcagcaatgggtgcagaccaaattggtattgcactgcaaaccccgctcgttttaagtaaaaaccgtgcttttatcagcttaagccaaaaattaatttatcaactggctattcaagaaagcgataatgcacaaactaccgcccaaaaagttattcaatacattgaacaagatcatactctttctctagcccatgtatttaaacattcaatccatcattattgtttaagagaatggcttgccttggcagactctagaatagctcaaacgctcaaactcaaagcacttccgccaccgtatatggtcgaagctttagataaccatgtgattgatggtttttgtgtgggagagccttggaatactcaaggtgaacttttaggtttaagtaaaatcgtctgctcaagtcaagacattattcccaatgtggcagataaagttctcgcagtaactcaagaatgggctgaacaacatcctcaaaccttagttgcccttacaacggcaattatgaaagctcaaaaagaattgagtaatttaaaagattttgcacctatcttaaagttattggtcgagtttgggattgtccgatttcactgctctgaagaagtacatgtcgataaatattatatgattcaaaatattgtaaagtacttggttaaagaaaatgcggctccccaacctgaagatttccattggttatttcagcaaatgcaaaaatgggaaaaacttcaattagcccctgatcaaatcatagaactgagtgcacaatgcattaatctcgattgctacaatcaagccaaactctaa

SEQ ID NO: 65758 - DNA, 591 bp, Acinetobacter baumannii
atgccaaaactcaaaatagctcttatcgatgatgatcatgcgcgggccgactatataaaaaatagtctgcttgaaaatgactttgaagtggttgcctgccttactttggaccacttaaatatttttcgtcttgaagatttacaagccgatgtcatcttgctcgatatggatcatccccatcgtgacattattgaaagttgtgtgagtagctatgacctaccaactgttctattcactaaaaattcagataaagacaccatcaaacaagctatagatgcaggcgtaacggcttatattgtagatggcatagaccccacccgcttacataccattttagagatttcaattgagcaatataaaaaacataaaaagctcgaaggtgacttaaaagaagctcaaaccaaactggcagaccgtaaagatgttgaaaaggccaaagtgctactcatgcaactgcatggcttacctgaagacacagcttttcaattactcagaaaaaatgccatgagtcaccgtataacgattggagaaatggcacggcgtttacttgacgctcaaaaattactaaatgatcaactaaaggatgaataa

SEQ ID NO: 65759 - DNA, 2469 bp, Acinetobacter baumannii
gtggaaaaaaatgatacgtttctaagtgacttattaacaacttataaaaaattaaaactctctgatgcgaatgaagcagaaacaagaaaaaagcttattgatgtagtaattgaaaatgtattaggttggactacagatgatatttcttatgaagaaagagtatctgaagatggagaaacaacttatgcagattatattattagaacagctgatgtttctattttaattgaagcaaaaaggctaggttcaactttttatacagttccagaaaagaaaaaagttaagttatctactttttctgaagatgatttaacaggtaaagctataaagcaggcgagagaatattgtcggaaaaagtctatcccttttgctgctgttactaatggttcacaatggattattttcccagctgttagaacggattcagtttcattctcggactctacagcattggtatttgactcaatcgagcgaattctaggagaagagtctagtcattttagaggtttactttcacgtgacggagtaattgaaggaaatttagctttagaattgattggtcgaaaaactgatcaatttgatgaaagaagacttaataaattttttaagggaatttctataaagaaagaaaaccctatttatccattgattgaaggggctgttgtaagtgcattttctgattcaattgttgataatgataatagtattctagaaaaatgttatgtaaagaatgctgataggaaaaaatttgataatcgtatagaaatgcatttacaaaaaagagaacctctttttaattctcagcctaaaagacctatgagaaaaagagagtcatctagtttggttgattcaataaataaagcttcacacaataaaaaaccattagcaatattaattctgggaactgtgggaacagggaaaacaacttttttgcaatatactagacgaatatcatcagctagtttcttcgaacaaaaagaaaaacaaccttatccccactggattgaaatagattttcgaacattttccaagaatgagaatccactagactttatatacgataagttatttgattatataaagactgataaatttttttgtgattatgataggtctattaagtttgcatatgaaaaagaaattaactcattaaaatcaggtcctcttttcctcctagctaatagtgatgaagaattaaaaaaaagaattactgatttattaatagctgattatcaagctattaaaccatatgtggataaattgataggatatgcttcaaaactctctcctatttttttaataatagataatgtcgatcaatttgaagatgattttattcaatcagaaattttttctgattctatagctattgcaagtcggctgggtataaatctcattattgcaatgagagaatctacttttattaaccatagaagttcgcctacttttgatgcatttgattttgacccattacatatagaaccacctgaaattccagcagtattatctagaagattttttcttacaggaaaattattggaaggtaaaagtggagaatttattgcacttaatggtgcaaactttaaagtggaggatctatctgtatttatagatatagtgaaaggttcggtactaggtactgaagttggtgaaaaaattgatgtattatctaaccatgatgtacgcttagcattaagaatgactcgagaattccttgctagaggatataccgatccagcgaaagctttgattactcataaacccgagaagcgatatactttaccgaaacaagaagcttttagatcaatactattaggcaatcagtcagtatatagtgaagaatattctgttattggtaatccatttgattcgagattaaatcgttctaatactgagttgttgagaattttcgtattatctgctttagttcgtaaaggatcatcaaatggtcagggttatattgaaggtcaaataattagagatagcttaaaaactataggtttctctgaaactgatacactagcaattcttaaagatttatgtactttaagatttgctcatactaaatctcatggaaaagctgatatcaatagtagttattttgctagtcgattaggtggacatattataaagagtttaattggtgattttacttttattgagaatatcttaatggatacatttatatccgaaaaagatcagtgggaacaattaaagagtatttcatcatccattcaagaagagcgggatattgtaaggaaaattaatcaaagaattgaccgtataaagattttttatgaattaatgataagtcaatattccattttattaagcgaagcaacaaaaagagggcttgaccctatatggctaagtaatccattaattgagatgaaagataccttgtggagtaattgtgataaagcctatgcttctgctaacagaatatatggtgagaatgcacaaaaatag

SEQ ID NO: 65760 - DNA, 534 bp, Acinetobacter baumannii
atgcttaaaaagaatgtcttattaattttaggtgccggtgggcatggtaaatctgtggcagaagctgctctcttatcgggcaaatggaaaaaaataatgtttgcagatgacagttggccacaaagaacagatatagctggctttccaattgttacgaatataaataatattccagatataatatcagatatttctgcagcaattcctgctgtaggaaataaccctcttagacaaaaatggtttcagctattagaaagtttatcgatacctattgctacagtcgttcatccatctgccatcataagcccaaatgttgaaattggtaatggagtagctattatggctggttgtatagttggattggatgtgaaagtagaagatggagcaattataaatatggcttcatcaattgatcatgatacacatattggtgaatttgctcatcttagcgtgggtgttaaagtggtcggagataagaagatagactccttatcatttttacccgctggaagtgtgattactcatttaatgtga

SEQ ID NO: 65761 - DNA, 1017 bp, Acinetobacter baumannii
atgctgatgatttggataatattagcaagttttttaatttcgttcttgcttacaggctatatgcgccattatgcattgaagaaaaatattattgataatccgaatgaaagaagttcccatacaattccgacaccacgtggtggtggagtatctattgttatcactttcttattagttttagtgggattgatagttagtcatcaattagaagcaactacgggttcaattttagttgctgctggattaggtgttgcagttttaggttttcttgatgatcatggccatatcaattcaatgcttcgattagcaattcactttgttattgcgattagtactgtttttttcctaggtggtttctctgaggttacattgtttaatggaaacctgcagttaggttggaccgcaaatattattgcagtactttttcttgtatggttactcaatttatataatttcatggatgggattaatggaattgccagtgttgaagcaattactactgtactaagtcttggttttatttatttagtattagatacaccgttatctagtgaattattatttattttagccgcatgtgtacttggttttgttctatggaactttcctaaagctcgtatttttatgggagatgccggcagtggttttcttggattaattctaggtattctggctttaatttctttaaaaatagaccctgctttattttgtgcatggatcatatgtctaggtgtatttatcgttgatgccacttttacattaatccgtcgtgtgattaatgggcataaaatgtatgatgcgcacagatctcatgcatatcaatacgcttcacgcaaatacaatagtcatactaaagtgacaattagtgtacttttgattaatgtattttggcttttgcccgttgcatatcttgcagcgcaaaaagtactgatgccagagtttttattattaattgcctacattccattgattttaattgctttattttttggtgccggaaaaactgaaaatgcttaa

SEQ ID NO: 65762 - DNA, 957 bp, Acinetobacter baumannii
atgaaaaatattttagttacaggttcatctggctttgtcggtaagtctttgatccgttcactcattatgagtaataaatatcaaaagatatatgctttaaatagacggtattcacatactctacctgaaatagtggagcagttagtcgcgacttctgaatctgttttttcgacacctattcctaatgatattgatgtaatcatacatttagcaggaagagcacatatattaaatgataatgtgcaaaaccctttagaacagtttagagcggtaaatgtggagggtacattacaactcgctcgacaagccttagaaaataatgttcagcggtttatttttattagttcaattggtgtaaatggagccgtaacaaataaaaaagcttttgatgaattagatccaccacaacctcatgccgattatgcaatttctaagctggaagcggagcaagcattaaaagaattatttgagaatacaaatactgagcttgtcataattaggccgccattagtatatgctgctgatgctcctggcaactttgctcgattacttaaacttgctttaactaacctacctttaccttttgcttccctcaataatgggcgctcttttgttgctttagaaaatctagtttcatttatcgaagcttgtattgagcatcctcaagcaaaaaatgaattatttttaattgcagataatgaggtactttctacccaacagcttgtgatttcaataagaaaagggatggggcgaaaggcaaacttaatttatatccctaagtttcttatgagggtaggggctatatgtgtcggtaagagtaagttgtatgagcaattattcttatctttagagatcgatgcttcaaaagcgcgtaatttattaaattggactcctccaattaatgcgtatgctgctctagaaaaaacaggaaaaatatattttgagagaagtgagtaa

SEQ ID NO: 65763 - DNA, 672 bp, Acinetobacter baumannii
atgaaaaacttaatgagacaaaaaacgggtagcgataatattacagtgattccgaactgggtagatttcactgaaatagatgttagacagaaacaacaatcttcaattattagctcacttggctggaacgaaaatatagttttccaattttttggaaatatggggcgtgtccaaggcatctctaatttattagctgcaataaacttaatcaataatccatctgccaaatttttatttattggcggtggaaatgatgctcaattggtaaaagagtttgctgaagacgaagccaataaaaataaagttgcttatattggagagttagctgcccaacggcgaagtctaggtttgagttcatgtgatattgctatcgttactttagcggaaggcatgcttggcctcggtgttcctagtaaagcctattttactatggctgctgatagacccattttagctattatggaagaagatgcagaagtggctaatatggttaaagaacatagtattggttgggtttgtgagccaaatgatccagtgagattagcatcattaattgacgaaatttgcagaactaagttgaacaaattgtctaattcaccacgccaaattttacaagattattatcatcaggataagttgctgcaaagttttgctgatattgtggaatcgtaa

SEQ ID NO: 65764 - DNA, 390 bp, Acinetobacter baumannii
gtgatcgcaggtgaatatgcagatgcaaaaggtgcagcaagtacatttagtccattaaatgtatgggacggtaaattggtaaaaggccaaaaacataccctatatgtacctgaagggcatactacccttgttgttgtgctagagggtgcggttgtggtcaatgatacaaaccgtcttgaaggcaaaactgttgcgattttatctcgtgagggcgttgagtttagcttaaatgctgaagaagacactaaattcttagtgttgactggccaaccactgaatgagccaatcgaaggttatggtccatttgtcatgaataccaaagccgagattatggaagcgattaatgattttaatcgtggaaaattcggttcaatcatgcaagaaggataa

SEQ ID NO: 65765 - DNA, 879 bp, Acinetobacter baumannii
atgaacatgcaaagcaaagaacagttctctttcactaaagctgaacgtaaaaaagcaaagcttaagctaaatcttaatggcgccagtggttcgggtaaaacctactctgcccttgtgttggcttcaagtcttggcaaaaagattgcggttattgatacagaaaatgaatctgcatctttatatgcaaatgaatttaactttgacacattgccattaaaaccgccctatagccctgaacgctttgctggcgcgatccatgcagcatacaacatgggctatgaagttcttatcattgatagtgctagtcatgaatggattggaactggtggatgtttggaaatcaacgatgaagcagctaaacgttttaaaggtaacacttggtcagcttggtcagaaaccacaccacgtcaccgcaaatttattgacgcgattcttcaaacagatatgcacattatcactacaactcgtgcaaaaactgagactgtacaaggtgaaaaaggaaaagttatcaaacttggcatgaaagctgagcagcgtgaaggctatgagtatgagcttaccgtttcactcgatatgttgcatgaaaataaatttgcaatccccacaaaagaccggaccaaactttttaatccaacaggcgaagtaatcacaaaggaaactggcgaaaagctcattgcttggcttaacgatggtcgcagccaagaagaagcgcttcaagctgcttttgatgaagctatcaagcgcatcaatgcaactacagatgttgctgaacttggaatcatctattcacagttcaaaggtacagattgtgaagctgaaatagttagcgcttgtagtagtcgcaagcattctttaattggcacacaaggcaatgcgtga

SEQ ID NO: 65766 - DNA, 321 bp, Acinetobacter baumannii
atgagcaaagtatctatcgaaatgtcagcaagtgctagaaacgcacgatccatgatcttgcaaaaacttgccgtccttaataacggtgatattgctgaagagcttggattagatgcaacagtattttcaaagattaaaaatgaaagaaaaaacaatggcttgacggaacttgaaatgttttgtgagttgttgaatttgattggattaaagattgtggatgccgacgatgtttactgctcaaaggaaacagcagaagcgacacgcgagcttttgaagaactgctttaactcaccagagtttatgcgaattttattcaaataa

SEQ ID NO: 65767 - DNA, 360 bp, Acinetobacter baumannii
atgaaaccagaacagtttattcgtgagtttggtgtggagaaggcgagagatttattggatcaattgtataagcttggctgtccagatgatatgaaaatcactgtaattaacggtatgtggcaacgtacgagcaatgggttcacgtatccagacctcaaacgtctgctggagtctttggatttggtcaattgttttgatgatcttgaacaggctaaatcatgggtttctgatatggatgaagaccttccatacgtgtttaaaggcgatacatacgacaaccgtttctataaacatgaattggtaacagctatagcagaccacgaatcaatatacggaggcggtgaatctcatgccaactag

SEQ ID NO: 65768 - DNA, 840 bp, Acinetobacter baumannii; identical to SEQ ID NO: 49428

SEQ ID NO: 65769 - DNA, 846 bp, Acinetobacter baumannii; identical to SEQ ID NO: 45622

SEQ ID NO: 65770 - DNA, 216 bp, Acinetobacter baumannii
atgatgcgatcaataataaattgtggtaaaaagcattatcgaattgctgaagaaaaaattaagaatgcaaaatacccggtaatttttgctagaaaaccagaaaataatccctctaattcaatggagatcgcactagtaatcggtggggtactggcagcgctaatctatatattaatttatattgtttatattattatagtagaaattaaatattaa

SEQ ID NO: 65771 - DNA, 780 bp, Acinetobacter baumannii
atgaacaaaacaatccaaagcttagtcgtagcagcttttgctggtttcgcagtcacaacttatgcaaatgaacaggctcagcaacagaaaattcattttccagcgattgaaaagagttatttgaaacaagtaaaacgttatgaataccaagatgttgctcgtttagatacaggactaaataaagatcaaattcgagctttactaggcaatccacaatttagtgaagggctttttgcagtaaaagtttggaactatgtgctagatatccgtgttcccaacacacaccaataccagcgttgccagttgcgtattgattttgataagcactatttagcagaacgtttatcttggaagggtgaagcgtgtgaaggtttagttgttttgggagcaaataatcaggcaccagaacgtagcactgtaattgcagatcgtacagcgagtgtcctatttgcttttgaacgatttgatgcgagtgcgattgaagaaggtactaatagcgttgtgaaaattgctgagcaaattaagaaaagtccaacaacaaccccaattattgtttctggattcacagacccattgggtaagtttagttataaccaagagttatcatctaaacgagcgaatacggttgccaagttactggtacgacaaggtgttgaaccaagccgtatacaaatacaggcgaatagccagaccgacttatacaagcagtgtagtgataacaatagttcacaacttattcaatgtttagcgccaaatagacgtgttaatataagttggtaa

SEQ ID NO: 65772 - DNA, 1461 bp, Acinetobacter baumannii; identical to SEQ ID NO: 50217

SEQ ID NO: 65773 - DNA, 309 bp, Acinetobacter baumannii
atgattatttatgaaatgatttatcactctggtccagaagattacacaagtgacttctataaagagaataacgaaaagtctagacgtcatttcgttaatcagatttcaaaagatacaaggcaaacattatctgattatttggcagatccatattttaataaagaattagatgcctatgtgatcgaagcttttgaagaagaaattgaagcacttaatcacatgaaggttgagtttattaagaatggacgagtaaaccactcatcttacgtatcaatcgtggtagctgaaagattagttaaggatgtgtga

SEQ ID NO: 65774 - DNA, 186 bp, Acinetobacter baumannii
atggcccaaaatgttatgaaaaatcaaaatgagcttattaatcaattgaatgcaaaaatggaaaaggctttcgaaaccaatacggacatattggaattagcaaatttgggacaaatggtagatattattgctcatgaattggctcgtataacagcgaagacaataaagaagaaacatcaaatataa

SEQ ID NO: 65775 - DNA, 567 bp, Acinetobacter baumannii
atgaatgaattgcgtaaacaaataattgcaactgagaaaagaattagaagtattgatgtattaagcccagcagtaagacaaagaaaagaaagttatgatattacagcgcagtttaaaacaatacttgaaggatacgcacctaaacttcaaagacataatattaattataaaataactgttgatgactcctctgaactaaaaccagtacaggttacgatggttagaggattagtagcacaaattatggaaaacttactgaccaattcagtatattggcttgaccaagggttaaaaattggcgaaaaagaaaaattaattgaactcaatattgagagcgatactaaaattatatatatccgagataatggcccaggggttgacccagcttatcatctagatattttcaagccctattttacaaatagaagagggggtaaaggccttggattatatatagccgcagaaattgcaaaatatcacgaatcaaaattatatttgtctaatgaaattgaacaagatggaaagttaagaactttcatcattgaattaccgaagagttctatttga

SEQ ID NO: 65776 - DNA, 261 bp, Acinetobacter baumannii
ttggctagagaggttgaaaattataatatatcaattaatttgatgagtccagggccggttaaaagtgaaatgagtccagatgctttaatagatgctatagtttgtttgcctacaatcaaatatttattagatggaaatggtaaaaatcagcatcaatttttctattggttaggctataaggttccactctttcctgatttagatggtattaactggttagaaggtattggtaatgaaaaaatagaaaaagtggtattttaa

SEQ ID NO: 65777 - DNA, 576 bp, Acinetobacter baumannii
atgatttttctatatttagttatggatcgattttttattgactattcaaatggcagagaggaactagggcactatagtattattttatttgctttcactgccttaatgattataccagcaacagttgctgagctcttatttgtaaaaattatcaaacaaagctgtgaagctggtaagcgttttttttggagagaaacgttcattacgcttggtattacaatagtgggtgtcattgcagccaatttttgcatggattattttgttaagaagtttactaattatggctttttaactgaacaaatgcatatagcaaccttggcagttattccctttgcacttacagcgatttactatcatgtaatgaatggactggatttaagaagagaaattgttctagtaaacctaagtgtatgtatcatcttggctttatattatatataccctttgttttttaatcaaagctatggtttagactattatttatatgcaaaagtagcaactggttggttagtttttctgggatatcttttctttattttgtttagtaaagatacagttttgaaagaaactgcttaa

SEQ ID NO: 65778 - DNA, 324 bp, Acinetobacter baumannii
ttgcattcggtccctttattaaattctgaatgtcagtttacttatgataatgattcattagtaaaccctacatttaatgtttatactgctcttatgccaatttatgcagatggtggttctatcttagttggttttatgttttttgtatttgcttttattttgggtctaattaaagattataaaaatagtttttttataacttttttattttatttagcacattattttttcatgatggcacataatggatatgtttttaactctggtagctttgctattttgctagtcttattatttatttttgattttattcgaattagatag

SEQ ID NO: 65779 - DNA, 822 bp, Acinetobacter baumannii; identical to SEQ ID NO: 59049

SEQ ID NO: 65780 - DNA, 459 bp, Acinetobacter baumannii
atggtgattgatgtttcccatatgaatgaacgagctttttgggatacagctaacattcttcagcagccaattgtcgcaactcactcaaatgttcatgctttatgtccacaagccagaaacttaacagataaccaacttaaagcaattaaggactctaaaggcatagtcgggttaaattttgatgtcgcatttttgcgtaaagacgggcagcgtgatgcaaacacatccattgaggtaattttagaacatcttgaatatttaatagatcaaatgggagaaaatcatgtcggttttggttctgactttgatggagcactgattagtcatgaaattgaagatgtaaggggactacacctactgattgaagcaatgcaaaagcgacattattcgaatgagattatagaaaaaatttgtttttctaactggctaaccgtgctcaatcgcatcctaagtaaataa

SEQ ID NO: 65781 - DNA, 369 bp, Acinetobacter baumannii
ttgatcaaaactgatactgcaataatcgaaacaaggtttgttgagtttctaattaagtacgttgaaaaaatagaatcggtacattgctcagatgataaaatttttaaattagaactaggaaataagtatgaatttgagttacatcaggaaggatacattttcgtagaaagaatttcagatgatgaaatttttaatgaacaatttctagattcagaaattttgataagtttgctgtatgcgaaagaaaatgagaatgagattattccagtaggtacttttcacagtgtctcaggggtatatgatgcacttgattttaaaagtgctattaaacctcttttaccagatattgagctgctggcatctttctaa

SEQ ID NO: 65782 - DNA, 336 bp, Acinetobacter baumannii; identical to SEQ ID NO: 46142

SEQ ID NO: 65783 - DNA, 984 bp, Acinetobacter baumannii
atgagttatctatttttatcgtgtacagagaaatccaaagaaacaaaaaccaagattgatgagctcgttgatcaatgtcgttatcgtgactggaataatcttcattactggtttagatctgttgagaaattctgtccttgggtaaggaaaattcatcttgtaacctgtggtcattttcccgaatttttagtcaaaaatcatcccaaattaaatttagttactcatgatcaaattatagaacctcattgtttgcctacgtttaattcacatgcgattgaaatcaatattcataaaatagaaggcttggcagaacactttgtttattttaatgatgacacctttattaatagccctttagaaccagagttcttttttaaaaatggtttaccttttgatggtattcaattacaacctttgatggtggtgggggaagagaactttttaggcgcagttgctttgacggatgtcgcaattattaataaatattttgataagagaaaactctttcggagtaatccttctgcactttttaatcatcgatattcgataagtaataatttgggcaattttttaagcttatataatcgaaaattctcaagcttttatagtactcatttaccccaaccgtttctaaaatcggtgtttgaagaagtttggagaaacgaagagagctacttaaaagaagtatcaagtcatcgatttagacaacctttagacgttaaccaatacctatttcgattatggcagttatgttcggctcgtttttacccagtaaatatatttcagcgtgggcagaactttaatttaagaatacaaaatcttcctgaaattaatcatgttattaagaatgagcaacttccacaaatttgtctaaatgacgatgaacacgtggttgattttgaaaaattaaaaacagaaattatccaaatttttgagcaaaaatttaatacggtttcgagttttgagaaaaagataacacattaa

SEQ ID NO: 65784 - DNA, 381 bp, Acinetobacter baumannii
atgagctttatcactgaacaagaagcgatagaacatgttgaaggctttgatgctttatctgtcagtgataaggctcaattcctccaaatggctgatgcatatctgttagcacgtaacgtaaagccttatgaagacgttacccaagtacctgaacctttaaaaacagcctcctatcaaatcatcaagggcattatgaaaggtgatctatatcaagggcaggaacaggcactaaaacgtaagaaagtcaaagcagatacggttgagaccgaaaaggaatatcaggacggatcagtaaagcttagtgcgattgagcaattcattcttgatttgattaagccttacagcaaacgaaaagctgtattttttgtcaggaaaatctaa

SEQ ID NO: 65785 - DNA, 336 bp, Acinetobacter baumannii
atgggactttcatcatttaaccgtgcacgggaaagacaacaaatgacagaaacaaaaattgctgagctcgaagaacaactggcaactgtaaaaggtgaatttattgcctttcaaaatgatcctgaggcaatgaaagcacgtattgctgaactggaagtaggtgaaggtggtcaaactcctgaagatggccaaaagcccagtgatactcaaccgcaaccaattaactatgcaggcctcaaagtagatgagttgcgtgcggtcttgactgaaaaaggcattgcatttgaagcaggcgctaaaaaagaagaacttttagcattaattccaaaggaataa

SEQ ID NO: 65786 - DNA, 918 bp, Acinetobacter baumannii; identical to SEQ ID NO: 58010

SEQ ID NO: 65787 - DNA, 519 bp, Acinetobacter baumannii
atggcgggtattgaacattttacggcggtacttgccgaatacatgatgaagcatgaaaagaatttctattataccgacgatgccaaaagccgtgctttatggatgtggcatatgcttgaagaatccgagcataaagatattgcctatgatgtatatcaattactcaatggtagctacccactacgagcttctggcttcttcttagcattcttcactattttaggtctaatccctgcgactaccttgtttattccggttttaagaaaaccgcaggaaatgttgactagaaaattctggaaagacgcgcgccgtggtgtaggacttatttttggtccaaaagatggtgtattcggtagcaccattggccagattttcgattatttacgtcctgacttccacccaaatgatcatgacaccactgaatatctagagtactacaaagacaaattactcaaagaaggcggcgcgattgcaccttactttgtgaaggaatttaccccacctgtacgcttgtcttaa

SEQ ID NO: 65788 - DNA, 285 bp, Acinetobacter baumannii
atgttccattcggcgaaatggaaccatgactatgaccttactggaaaacgtattgccgtgattggtactggtgcatctgccatccagtttgtgccccaaattcagcctaaagcaaaagaactgtttgtattccaacgtacagccccttgggtactgccaaaaccggatacagacttaggtgagtttagtaaatcaattattgcaaaatatccagcgattcaggcaagttggcgggcactgttgcaaatagtcggtggtgataaacttatcatccccttttgctga

SEQ ID NO: 65789 - DNA, 711 bp, Acinetobacter baumannii; identical to SEQ ID NO: 49722

SEQ ID NO: 65790 - DNA, 801 bp, Acinetobacter baumannii
ttgataatccgatttctagcactgcttttctcagctgttgtacttgtctctcttggtcatgcacaagaaaaaacgcatgagagctctaattgggggaaatactttagtgatttcaacgctaaaggtacaatagttgtagtagatgaacgcacaaacggtaattccacatcggtttataatgaatcccgggctcagcagcgctattcgcctgcgtccacattcaagattccgcataccctttttgcgctggatgcaggggcggttcgcgatgagtttcatgtttttcgatgggacggcgctaaaagaagctttgcaggtcacaatcaagaccaaaacctacgatcggcaatgcgcaattctaccgtttgggtctatcaactattcgcaaaagaaataggcgaaaacaaagcacgaagctacctagaaaaattaaactacggcaatgcagacccctcgaccaagagcggtgactactggatagatggaaatcttgcaatttcagcaaatgaacaaatttccatcctaaagaagctttatcgaaatgagcttccttttagggtagagcaccaacgcttggttaaagacttgatgattgtcgaagccaaacgtgattggatactacgtgccaaaacaggctgggatggtcaaatgggttggtgggtcggttgggtagagtggcctacaggcccagtattttttgcgttaaatatcgacacgccaaacaggatggaagaccttcataaacgagaggcaattgcgcgtgctattcttcaatccgtcaatgctttgccacccaactag

SEQ ID NO: 65791 - DNA, 390 bp, Acinetobacter baumannii
atgagcatcttcgatactccacgctacaaagaaaacccaagcgacattttcttcgaccacttcgtgatggatgttattggacttttgcctcccggcatgtcggaaaatctggatgccgctatatcaacgagcggcggcgcctggaggcaaaagaccaaacagctgatcaatctctcagacactatcgagattgcaatacttgatctgtggtacagaaattctgcaattttagagtcacgcggagaactttatgatccgtatcactttgcagtaaatttcgtagatgcttattttgcggaaaatagccaagtagatcagtggccaggtaatgcgctagaggttgctaagagccatattcgtgaagctcagcaacgcaaggcaaatgcctaa

SEQ ID NO: 65792 - DNA, 477 bp, Acinetobacter baumannii
atggcagcacttaaaaaagagataaaactctatatagtacggtcacttgcaatgtttaatactcctcaagagacagtagatctcgtcaacgaagaatttaaggtcaagatatcacgccaacagtgtgaaaggtatgaccctacaaaacgagctggtaaagatctgagtcaggaattgaaggaagaatttgaacatactcgtaaagagtttttagaaaagcctttaaatattccaattgctaatctaactgttaggttacaacggctagaaaaacaatatgcagtacatgcaaagaatccgttattttccctaaaaattcttgagcaggccgcaaaagatatgggtgggcagttcacaaataaaacagagctaactggcgctggcggtggaccacttcaaagcgagcatgtcactcaaattgttgcaacgcctgaacagatacggcaggtgttagatgaactcaaaggtaaatactaa

SEQ ID NO: 65793 - DNA, 633 bp, Acinetobacter baumannii
atgaaaagaccagagccaccagaacgcttacttaagttagatcctaattatgacagcgtagactttgagccttcaaaagaactggagaattggatttgggacacattcattgattcaaactcaccattgcataatcctgatcacgaccatttaacttattttggtagtcgtttttttaaagtgttatgggcatcagctgcatttataaaggctggtcaagtcgtactggggcagacagagcgagtaatgtttcgtgctggaggctggcagaagatgcgacaagaaagacaaatgattaattggtttggctacatccctgagtacgttatcactattgatgcacgttatgcatctgaatgcagtgatattgatttttgtgcacttattgaacatgagctttatcacattggtgtaaagcgtacagatgagggcgacatgatctttagtcctattacaggaatgccaaagcattatttacgtggccatgacgttgaagagtttcatggtgtagttggtagatacggtgcaaatgacgccgtacaacatatggtggatttagctaatgcaggtcctactatttcaaaagcaaaaattgcacatgcatgtgggacttgtctactaaaactggcttaa

SEQ ID NO: 65794 - DNA, 228 bp, Acinetobacter baumannii
atgggcgctaaagcttttgtaaacttctcagctaatgaagtaataagtcaaattaattgtggtttggatagtattagtaatccattcattattgaagaaccagcaaacttgttcgagaagaatgttcaaatggatgtacttaaatactttgaaggttcaaatactaaagtagatataaatcagaaagatggatatctgatttttaaagctagaagagatttaatttaa

SEQ ID NO: 65795 - DNA, 276 bp, Acinetobacter baumannii
atgaaattagttcgtttagaaacaacacgacaattagatggttcatttaaactgcaatttaatgatgatggtataactccatcatatccaaatactatcaatgatagtggcgtagatgtagctttaggaaaggttagtaatgattctatttggtatcacttcttggatagaaatgagacaagatatctaatctatttaaatggttatcatggtcgaatagatggtaatgaaattcaaaatcttgaaaaagcccttgataattttctgcaatgttaa

SEQ ID NO: 65796 - DNA, 900 bp, Acinetobacter baumannii
atgatttacaacattgtttcagtttccggtggtaaagactcaactgctactttgcttctagcaatggcgtggggtgtagagaaccttcaggctgtatttgcagacacagggcatgaacacccagcgacctatgaatatgttgattacttggaacgaattttagaaatccaaattcaaagagttaaggcagattttagttttgaaattgcccgaaaacgtgagtatgtcagcactgtatggcgtgaagagggagtttctgaatctgtcatagaaaatgctttagctgttcttaaacctacaggtaatccctttttagatttgtgtctttggaaaggtagatttccttctacccgtagacgcttttgcacttctgaattgaaagttaagccgatccaacaaatgttttaccccattttggatgatggcaacatgattttgtcatggcaaggagtccgtgcagatgagtctttggatcgtaaatttttgcctgaatgcaatgaaattattgaaggtctttacaactacagaccaattttgaagtggacggcaaaagacgttttccaagctcatgcagacatgggaataaatccaaaccctttatacaaacaaggcatggggcgggttggttgtatgccatgtattaactgcaataaagatgagctgaaggaaatagcaaaacgttttcctgaggaaattgaacgggtagctgagtgggagcgaattgtaggattagtttcaaagcgccaatcggcaacattcttcacttctgattatcgagggcatggcattcaccagctggtggaatggtccaaaactgtgagaggtggaaaacaatacgatttagttgagcaaatgataggcatcgaagcttgttcatctgcatatggtttatgtgagtag

SEQ ID NO: 65797 - DNA, 348 bp, Acinetobacter baumannii
atgagtgaattatatagtagccaagctgtcatagatgttcttaatgaaagagagcgtcagatccagatcaaaggctggacaagtgaacatgatgataagtacgagcaaaatgaattggtgcgcgctggtgctggatatgcgaatcacgtagttgaaagagggtgggtttacagcgactatggagcagaagcctatcaggatgaagaagtgccagacttttggccttggggtgattgctattggaagccaaaaagcccaagacaagatctggttcgtgcagccgctttattaattgcggagattgagcgtcttgatcgagaagttaaagcggaaagtaaggaggggtga

SEQ ID NO: 65798 - DNA, 2175 bp, Acinetobacter baumannii
  misc_feature (2097)..(2106): n is a, c, g, or t
atgtataacttaatttcatcaaatcaggaattatatagtctggaaaaacatttcgaaataatttgtaatcggcatccacatttaaaattactagaatcacaatggcgcttcgaccaagaacttattagcaaagctctgcaaaacgtaagctctatttttccacattatagtcgccatgatgtatctcattcacgacaaattattgtaaatattgagagactacttggtgataaaattaagttcttgagtgctactgatacatggctaattttagaagcagcatataatcatgatatcgggatggtcattactcaaaaacaaatcgaagatatgaatactcctgaatttgaagaatttgtatattctttaaaagctagtagtgacgataacttaaaaaaatttgctaaaaaatggattgaaaataaagcgttgttacctcaaaaagctgcagctcatgactttttccatcaatacattcagcttttagccgaatggtacagacaaaaacatcctacaaattccgcaaaaatagtaagaaatcccgttgaagaaattggcttaaattcatcaagaaatgagttattacccaaacgactattcgatgttcttgctgatatatgtaaagctcatggcgatagttttgaagagctaaaaaggtctttacctaaagcagaagctggaatggcttcagaggattgtcatcccctatatgttgcttgtttattaagaatgggggatttattagatatagatgacaatcgtttttgcccagtaatgatgtcaatgtgtggacataacttaccaaatttaagtaaggcgcactatgataagcatcattcaattaagcattttagacttgattcagaacgaatagaaataaaatgtttatgtcctacccctgaatcttatgaagctgcttatgattggtttaactggttacaacaagaatatcatcaacaaactcaacattgggatcagatagtaccgtcgaaagaattaggtcgtttaccaaccttaatgacacctgtagttgatatagatgagccatatttaatattaaatcaaggaagaaagccaagttttaaagttaatgaagaagctatattcaaattagttagaggaactgggttatattcttcaaaatttgattgtataagagaaattttacaaaatgcagtggattcaacattacatagaatatggattgaacataaagatgaggttaaaaatttaattccaactgatgctaaattgcaagagatttatgataattataaaatgactataacctttgaaccaaaagaagaaaattcaaatcgatggatattaaaagtaaaagaccaaggtataggtataagctcaaatgacctaaaatatatgttagaaataggtagctctttccaaaacaaagaaaagcaaaaaaggattaaagaaatgccaaaatggtttagaccttcaggagcatttggaattggacttcaaagtgcatatttactttcagataaatttacaatgattaccaaatcacttacagataatcaaaaactaaaaattacttttaacaataaaattaaaagcgtaattattgaaaaaataaataaaaatattaattatggcacagaatttacaatcgaaattgatattgaaaaactaccacgcaatatttcttattcctttgcacaacaatctttaatagatgaaagattaaaagaatttgactttacagagaaaaactcaaatctatctttcgtagaaacaattaaaataaatgacagcattaataattttttactaaacgcacctatatcatccaatttaaatattaacaaaagagataataaagtttattttgatcaagaaacctctattttatttaatattattgagtttggtgactttggatctcgaaatagttataaaacttattttagaggtcaagaattttcagatttatttactgattatgaaggcattaattatcttgctgatttttaccatactaaatctgataattttttaacttataatagagagaaaattttacccaatgcaggggtaaaagctaaaaaattattacgaaaagggctatctaactannnnnnnnnnggcgaccaccgagatctccacctaagccttcgtcggcagcgtcagatgtgtataagagacagatattga

SEQ ID NO: 65799 - DNA, 177 bp, Acinetobacter baumannii
atggggtggattagttgtgaggatcgcttacctgaaattggatcttacgtttttgtatatctctcatatagagggtttcaagaagttccatacatggtgacgcaatttaataaatacgggttcaatatttcaaatgtaacccactggatgccactaccagaaccgccaaagaattag

SEQ ID NO: 65800 - DNA, 609 bp, Acinetobacter baumannii
atgaacattctccagcgtagtgaagattggcattcggaacgctgtggcaaagtcacagcaagtcgagtaaaggatttaaatgcaaagcctaataaaggcaaagctttaaatgcattaggtttaacaattctagctgagcgcctcactggcgttcagaaggaaatcttcacaaaccaagctatgcaatggggtatcgataacgagccttatgcaatcgcggcttatgaaaatgagacgggtaactttgtagttggaacaggtttaattgaccatcctttcattgaaatgttcggagcttcaccggatgggcttgtaagtgataacgggcaaatcgaagttaagtgtccagacactacaacgcatttgaacaccctactgactaagcaagtgccagatgagcacatccctcaaatcacaagtcagttggcttgtactcgtcgtgaatggtgcgactttgtgagctatgacccacgtctaccaaaaggactacagatcatcattattcgtgtctatgccgaagacttggcgatagaagcactagagcaagatgttcggaacttcaacaaggctatagatgacgcaattaaaacattgaaggtggcagcatga

SEQ ID NO: 65801 - DNA, 447 bp, Acinetobacter baumannii; identical to SEQ ID NO: 57549

SEQ ID NO: 65802 - DNA, 666 bp, Acinetobacter baumannii; identical to SEQ ID NO: 51886

SEQ ID NO: 65803 - DNA, 1341 bp, Acinetobacter baumannii
atggttaatcgtcttagttttcgtaatttgcgtattgataattttaagttaatcacctggctacagatcttcattatagccattacgcctaacttcattttctttcaatcagctaatgcaactactgtcgctggtgaaggttggtcagtaactaagaaattagtccagggggctactacgttttatgacggggcaaaaaacgtagttttaaatggtaagaattatgcagctacgggggctgctgcgattactccaactgctagtcaagtcagtaaaatgattgttagaactggggctgttgttgctgttgatcttgctattaaagcgttaattggttctgttgattatgttatggatcctgcgaacaatgaagttatttataaggttcctggtgaaaatcctgcaccaacaaactgtaaattaaattattcagattgcccaccaacaataaacaatctctggcgtaactcaggtctacaagctactttctttttcactccacaagctgcatgcgataacattgctacggttaccaagactcaactcacatcaatggttcaacaaaatgcgacgaattatcgttgttatatagttgatactaagggggtatctaatagttatgtagtatctgcatctatcaaccccaaatatgatcctaatgcaccgcctgcaccagatacatcacaaacgaaaagattaggttatgacgctgtagcagcacgaataatgtctgatgcaattgcagaaaaacccgaaggcaaagcatatgtttcttctgtagcagatactgcattagaacaggatgaacaaagacaaattgtccctgcaaatgacattgttcaacaattaaattcatctcaggctatcccgacctctaatactgctcaagggcaagctgtacctcaaacgaatccagatgatccgactgctcctaaacctttgcctactgacattacattaaatttccctgtgttttgcgagtgggcaccgactgtctgtcaagctgctcaggctgctatcgatttccctaaaattgttgctgactactggaagaaaacagataaatggatgaatgaatccgcatctgatacatcagaaacgaaaccagaagttaaagaactagaactaaattttgatgacggtagtcgaattaatttcgatcaaacttgcccacagccgcaacctattcaggtcacttttatgggtgttacccaggatgcaagtttttcttttgaacccttatgtaacttcatgatcatgattcgaccttttgtcattggatccgcctatttaattggggcttacatagttatgggcttatcaagggggaatagtgagtaa

SEQ ID NO: 65804 - DNA, 237 bp, Acinetobacter baumannii
atgtctgtaaaaacaatcattgagaatgcacaagttcaaaagggaactaaaaaaactgatggtggggctttttatttcgttgaggttatggagcctgtacgtaaatacatcaatcctgataaaccacaagatgcagctactctagaagcactcgctcaaagtggtgaaactatctctcaattaacattacatcagcgcaatcgaagccttgtattttcgtctgcggacttagcgtaa

SEQ ID NO: 65805 - DNA, 189 bp, Acinetobacter baumannii
atgatttccgcatatctaagaattaacaaaaaagaggaaaaatccctcttagaattatcagaacaagttaataagcagagactagatttaaaaatgggcgtactaaaagaaagtgaaatacttcatcgacttatcaatgaagcattcaaaaaggcaaaagccgaagatggcgaagtaaaaattaaataa

SEQ ID NO: 65806 - DNA, 1182 bp, Acinetobacter baumannii
atgaatctaggattaagtcaaaaaaaatccgcccttggtatatttacgaaatctcatgccaagcttgaaaacaaagggtttgagagacttcacgattatatccttcaggaccaggcatctaaattgttacctactgaaagagtaactaactgtttaaagaaacgtatcgataaagaaaagaaacgttctgttatgtttaatgaagaacgccaaaaggctcattgggctaatgttcagcgttgtggttctatttggtcatgtcctgtctgtgcaaagcaagttactgaaaaacgtagagaagaactaaaaaaagcatgtgccgaatggaaaaatagaggtggcgtgcttaggctattaacgcttactaacccacactcgtcagatacatatttgaaaggcatgatttatgctcagcgtgctgccttaaaaagattttttgagggtcgtttaggtcgtgaaactttggctcttttgggtcgtgttcacatggttcgttcttttgaagtaacttttggttctaatggttggcatcctcatttccatatacttttgttttgtgaaaacaatgatttatccattcaacttgaatcaactttcacttgtgaactattaagagcatggcaagctgcttgtgttaaatctggtttaccaatgcctaacgagcatggtttagatttaagagatggtacttatgcagataagtacgtttcgaaatggggtattgagaacgaattaaccaagggacatattaaaaagggtcgtggcgattctttttctgcatttgatttacttcaactttctgttgaagatgttgaaatacatggaaaattagcatcaaaactttttcaagagtttgcattaacatttaaggggcaacgtcaacttgtgtggtcacgtggtgctaaagccgatctagatattgctgagaagtcagatgaggaactagctgaagaaaccgagttaactagtatcctgcttactgaagttgaaaagattgtttttgatattcttaagaagtaccagaagcgtcatgaatatttggtttggcttgaagatgattataaaaatggctgctttggttctggatctgctgaatataatttgagtttattaatacaaaaagaaatcgatacattggaaagtcatgaaattgatttcatgacttatcgcgggattatttaa

SEQ ID NO: 65807 - DNA, 198 bp, Acinetobacter baumannii
atgttatctaatttgccaattcgtgttgaccaggaattaaaagacactttcatagcttgctgtaaatcccaggactctacagcatcgcaagaattaagaaaatttatgcgtcaatatgtgaaacagtacgcacagcaagatttattttcaaaatctaaaagtgctaatatgacaacaagacaaaaagacaacatttaa

SEQ ID NO: 65808 - DNA, 141 bp, Acinetobacter baumannii
atgacaaaacatgatgcacatgtacgtaaatttaaaatgcaatttttccctattcatgcttttatttttacggctatgtttttctttttaatagggttgttatgtggttctttcctctctgtggttaagtgttctatatga

SEQ ID NO: 65809 - DNA, 1365 bp, Acinetobacter baumannii
gtgtcagatgtactcaataatgaccaaggggcgatcattgccaatggtggtgtagatttagatagccaaaatggtctagataaccaaggcggtcaactgaatttgggtgctattcatattaaagggaatagctttaataacaaccaaggtgagctcacagttaaaagtgctgatatccaaacctcaagttttagtaaccagcaaggattactgcaatcactcacttctttagatgtaaatagccagtcgattgataatcagggcggtaaaattaatgccttgaataatattagtatgatctcgagcggaaacattctaaatcaagctgggcagatcgcgagttcgtctgaactttatttacagggattgggcctaaataacagtgggggtgatctggaggctgaacaattattaaaacttaatctttcaggtcatttgaataaccagaaaggaaaaatagtcactaataataacttggatagttcgctttttggtttagataacgaccaaggtgaaatttctgcaaaaaatattacgattcaaaacaaagatcaggctttaagtaatggttcaggaacgatttatgctgaccaaagtttaaaaattcaaactggatctttaaataatgcagtcaacggtacgttatctagtcatgaaaacctgcaaattgacagccagcaacttgtcaatcagggttatattcgtgctgatcaacagttaaaaatcaataatacaggtgttatgacacagcaaggaggtgttctttcagcctacggtaatattgatttggtgagtcagcgtcttgttagtgatgaaaaaagtattattgcggtcggtatcaatgctcaaggtgagcaagatcaaaatgctcaagcggatttaaatattaaaacagagcaggcacttgagcatcacggaaaactactggcaagccgtaatattgatttagatggggcaaatgtagatttatcgcaaggaacggcagcagctcaaaatataaatattacagctcgtgatggagatataaataatcagtctggtgtgttacaggctgattctattcaattaaatgcagtacaaaatcaacaaagtttaattaaccaaagtggtcaaattcttgctaaaaaattgaatctgaacattgggaaagatattaataaccaacaaggtttgattcagcacactgcgacagatgacctgaatttaacagttcagggaattattaataaccagcaaggccgtattctcacaaatgcaaatcagttaaatattaaagcacagggactcaatagtgactctggtgtgattttgcattcgggacaagctggcttaaatatgactctaaagatcaaatcacggatgtaa

SEQ ID NO: 65810 - DNA, 846 bp, Acinetobacter baumannii; identical to SEQ ID NO: 53374

SEQ ID NO: 65811 - DNA, 336 bp, Acinetobacter baumannii
atgtctgaagatgttcagtttaatcttaggatacccgctgagctaaaacagcaaattgttgaggcagcaaaaaagaacagcagatcaattaatgctgaagctcagttaagacttgagaaaacatttgaacttgataaattgcctgcaccaacaagccctaaaaatattaatgatccagaaaaattagaagaatgggcacaatctatcttaaaagaattattaaagcttaaggagctttctgaccgtgtagaagaattagagcatgctgttgaatatctagagagatatcaaaatgatcaagataaaaggattgatggtttagaaggtcgttattaa

SEQ ID NO: 65812 - DNA, 543 bp, Acinetobacter baumannii; identical to SEQ ID NO: 56982

SEQ ID NO: 65813 - DNA, 363 bp, Acinetobacter baumannii; identical to SEQ ID NO: 59579

SEQ ID NO: 65814 - DNA, 165 bp, Acinetobacter baumannii
atgaatgtagagcatttgagggagttctacggtgtagaaaataactctcaactagccaagaaaatcaaaaaagcacgctcaggtattaccaaatgggagcgagaaggcataccaccaagaagggccgcctgtttggttgtgttcgaaatgtggaaagaaacttaa

SEQ ID NO: 65815 - DNA, 333 bp, Acinetobacter baumannii
atggctttgaaattgaagggagatactcaatcactacaagctgttgcaacaggtgcccagggttatccaacctataatgatataaaaggtgcaacatgtaggttgcagactccaggaaaaggtgagaaaagtgtagtggggcatattttgttaggtgatatttctctaatcgatctaaagaaaaagttcgataaacaatttttaaagagtgatttatctatgttaaaaggtgaagatttttttattgaagatttttttgaggtagctgaggaattaaacattttttatagagagctagatattagtaaaagtgagaatttttatgttcaatga

SEQ ID NO: 65816 - DNA, 180 bp, Acinetobacter baumannii; identical to SEQ ID NO: 57001

SEQ ID NO: 65817 - DNA, 198 bp, Acinetobacter baumannii
atgaagaaaatactttttattgttgataacttaggtaagggtggtgctcaaagcattacaagtgctctcgcaaactttttaagccgctcttcattaattaaagtcacagtttgtgcacttgataatacgaatcaggaatgtcatcttgaaccatcagttgaacttattagtttaaatattcgccatgatttttcttag

SEQ ID NO: 65818 - DNA, 360 bp, Acinetobacter baumannii; identical to SEQ ID NO: 60465

SEQ ID NO: 65819 - DNA, 183 bp, Acinetobacter baumannii
gtgttaatcgaaaatggtgagctagaaaaagtagcaggcttagaactcagcccagcatcgagtcatgtcatgctttgtggaaacccacaaatggttgatgatacgaaagaggctctaaaacgccgtggtctcacaatgaatcgtcgtggtgaaggaaatattgcggtagaaaattactggtaa

SEQ ID NO: 65820 - DNA, 468 bp, Acinetobacter baumannii
gtgtctttagaaccaggtggccttgcagaaaaaattggcaatcgttatgaatcctcttgggtcgcatttcagcttttaagattattagatgaaaaaatttcttatgtacaagtagaacctattggtccagatgaagatgctgtagatgttattattggtaatttggatggatataaagaacatcatcaatgcaaaattggaaatgtttctgatgatgcttggtctctttctactcttcaatctaaagaacttctaacaaagggttttcagcacattctatctggctcaaagtcttacaaggtagtttcaagaattggatttagaatactagaagatatttgtgaaagtgctagacacagtacaggttcaagttctgatttttacaattatcaaattcaaaatattagtgaagaacgacgtaaattatttagtgaattgtgtacaaaattagaaaataaagaaatttaa

SEQ ID NO: 65821 - DNA, 2451 bp, Acinetobacter baumannii
atgaacattaaacccacttgggataccaagcctgatatgtttgagggcagcatttcaaatattaccccgcaaacacaacaaagcccactggaggaagtgggcaatggtgcaagtcattcaataattgaagcacttgaagaacatacagtcccattatttaacaataatccactacacggtgcaatggctgaaatggtgggtggttgtcctgtagaaatccgccgttcagtgattgagaaagccacccaatatggagaagctgatgataatgccctatatggtttagccgtatttgatctatacaacgagcatttacagcctacaggtgcagtattcactaacccaactattaaaggttttaaggatattgttttcggccatggcggtttgtatttcaaccggtcaaagttgaatgaattacctttgattgtgacggatgacattcatcttgcatttaaaacagcgtatccaatctatgcaccgtatcaatcagataagattaatgcttataccctcaagacattgatgcaagcacatgctgatctatgtgtgatagccccagtccatcagcaagatgctatacaacggcgttacagtggtatggatgtcaaaatggcgtttattcctgaaccacctaattttgcgatgccacaggatgaactggatagcatgattcaggtggcagttgaacaagccaaagcaccgcctaaaggacatttagctaaaccgttcaaaatggatgatggctcgtggctgcatattcttgatagtggcttatatcagatcaaagaaaaacaggacgaaaacggcgaaaccaaacagagcaaaatactcatttcaaatgctttgattattttgggagaagctcgaagcctaaaaaatgacaactggaaacgtgttattcagttccatgataaagatcatactttgcatacattgattatcccctatgaaaactttatgggtgaagcacaggacgctttaaagttgattgctagtcatggattgatgccaccacgtcagacctacaagaaaaatgtattcatcaactacctacaggactaccccattgagaagcgatttcgatgtgtagatcgtactggatggtatggcaatagttttgtgacaactagccgaacctatgggaacaatgtcgatgaagaattactttttcatagtgaaatgaaagacccctacggcacaatgggaacgcttgagggatggcaagaattaagccgattgatcgaacctcatgcccttgccgttctgtcctttgcatgtgcattctcagggcaattgataacaccattagatatagaaagcggtggatttcatatttatggcacatcaaccgatggcaaaagtaccattacaaaggcagcttgtagcgtatggggcaagcccaaagacgtatcgaaatcatggcgcaccactgacaacgctttggaaaatgatgctgaactccgcaatgataattatctcaatctcgatgaactacggcaggcagttccgaaagccgtgtcggatattgtgtatatgctaacaggtgcacaaggaaaagcacgtggcagtaaatcgggtagaaatagagaaaataagcaattcaatttaatgtacacctctacaggtgaaattgctttagaagatcatttaagacgtggcggtatcgaaatggatgcagggctattattgcgctttgctcatattcccagtgattcaggcaaaggatacggcgtatttgagcgtatcaattatggcaatagctcgagcgatttaggcaaccgcattaatgagctatccgccaaacactacggacatgcaggcatcaaatggcttgaatatctgaccgccaataaagatgacttgatgctacaagcgcaatccatgctcgatgacttcatagccaaacatgccaccaaaaacagccaagcggtgcgagtattacgccgttttgcactggtggcagttgcaggtgaattagcaacacaggcaggcatcacaggatggcagcaagggcgaagttttgacgctgtagggcaatgttttaatacttggctaggcacactgggcaacggcgaaaacattgaggaaaccaagatactggagcatttcaaggcattctttgaagcacatgggacaagccgttttgaaagcctaaccgttatccgccatcctgatggtgaagtgattagaccacgtattcataaccgtgtcggctactatgaccctgacgaacgtatttaccttgtatcaagcactatgtttaaacaggaaatgtgtatcggcatcaatgaagccaccgccaaaaaggtacttaaagcaaatggatggcttgagtgtgaggatggacgctataccaagcgtgttagatcaaacctccctgatggtacacgcccaacactgatgcactttaagatagatgcaatacaaacctttaatgctgaatcctga

SEQ ID NO: 65822 - DNA, 327 bp, Acinetobacter baumannii
atgccaaacgtgaacaaagtaattttaatgggtgtgctaggtcgtgaccctgaaacaaaacaatttcccaatggtggaagcattaccacattcagccttgctacatcggagcattggaaagacaagaccaccaatgagcgtaaagaggctacagagtggcacagaatcagcaccaatggacgtttagcggatgttgccagtaagtacctcaagaaaggcagtaaggcatatattgagggcagtttaagaacaagaaaatggaaagatcaaagcggtgcagatcgagaggcaacagagattagggcggatgtgttgcagttgctttga

SEQ ID NO: 65823 - DNA, 711 bp, Acinetobacter baumannii
atggctagaaaaaaattagaagataaaatcaaaagagttggctactttgttggtggtggaatattgggctacttattgatcagtttttttatactaagttcatttccactacaccagtaccttctggataaaaaacttgcttatgatgttttaaaagatagtctaaccataggtgctgcatttcttgccccaattgctgcatttgttttatttaacgactggagggttgagtatcacataaaagaacaattcaatagtattgatgaaattaaaaaaatactcaaagaagttgaaacgacaattggtaaatacgtaaatagaatttttaaagaaaatatcaactgtaatattgagtttgaaaatttttctgaaagattaattttattagagtatagggatctcttaggaatccttttagttgaaattgatgaaaaaaatcagttagtaatagattttaaaaaaaatgttgggatgtattatgcaaagctaaacgtagctcttaaccatttaaatatcatggaatttaatacttatcgagaaggtaaattaataaaagacgatataggtagaaaaatccacgaaaaagaaatcaaaaatattcgtgatgattttatggatagatatctaaagtttcatgaaattcataacgaactaacaagtagatacttttcgatagttactttgggaaatgagattaaaagaaacatgtaa

SEQ ID NO: 65824 - DNA, 429 bp, Acinetobacter baumannii; identical to SEQ ID NO: 60511

SEQ ID NO: 65825 - DNA, 642 bp, Acinetobacter baumannii
atgaatcagatcagaccatttcctccaactgattttatggatcaggccgaagaagaggaagcaattcgtttaataccggctccagacctaaagaaatgggttgtggctaattacttaactattgggggtcctatttataatccagatcatgatcatattgctgagctgcttcatgataatgacgagtttttagcattcgcgtgggcctcttctgcatataaaagcaagcaagctatggtgttaggccagtgcgaaaaagtcatgttcaatgttggtggctggcgtaaagctcgacaagagcaacagatgcgtgattggtttggttttgtacctacttatttaataactgtcgacgcttctttctgtgagcgtgcaaacgatacagagttctgttacttacttgaacatgagctttaccacattggagtgatgagagacgaggacggagaaattgtttatagcgatagttctggtcttcctaagcactatcttgctggtcatgacgttgaagagtttattggcgtagttaaacgttatggaccaagcaaaaatgttaagcgacttattgaagtcgcaaaaaatccgccgtttgtttcgaatcttgatatttcaaaatgctgcggcaactgtgtaatcaattga

SEQ ID NO: 65826 - DNA, 471 bp, Acinetobacter baumannii
atggcgacactaaaagagcctgtgaaaatctttatagttcagtctcttgcttgtcgtgatacacctcaagaagtggctgaactcgtaaaacaagagtttggcgttgatatagatcgtgttcaagttgcaacttatgaccctacaaaggttgctggtaagaacttaagcaaaaagtatgtcgaactatttgaaaaaaccagagatgagtttgataaaggcttaattgatattccaattgctaataagtactaccgattgaagcaataccaaagacaacttgagaagactagaaacgtcaaaacagccttaaagattcttgagcaagccgctaaagacattggtggtcaatttactaatcgccaagaaattacaggcaaagacggcggaccagtccaaacagttaattcagaaattccagttccaatggaagattacttaaaagcgcggagggaagtcttagatgagtactga

SEQ ID NO: 65827 - DNA, 1452 bp, Acinetobacter baumannii
atgagtgatgtaacttttcaacatgctgaatatgttaagaacttgccatactggcaaaaacttgatgatgtttgtgaaggtgaagatgcagttaaggctaaaggtgaaaaatatttgccgatgccaaatgcacatgataaatcacctgcaaataaaagcgcttatgaggcttatcttacccgtgcagtcttttatgaagtaacagggactacatcaaatagtttagttggtgcagcttttgcaaccgatccaagttttaaatttcctccggaacttgctcatttagaacgtaatgcaaatggtgctggtttaagtacttatcaattggctcaaaatggaattcgccatttattgaagcattatcgttgtgctttatatgtagattatcctgatgtgccgccagctcgtaatctagcggaatttaaagcacaaaaagcctatccgatgattcatttactaaatgcccttgatgtagtgaattgggattcagtaatgatcgataaccagaaaaagctttgcttagtggttatacgtgaatttaagtctgagcgcggtgctgatggatttagtaaaaccgaacaagagcaatatcgtgtacttcgtttagagcaagagggaaatggggaatatatttattccgttcaggtgtacacaaagggtgaaaagggtaactgggttggcggagagaagaagtttccaacagattacaacgggaatttctggacctatataccttttacatttgtaggtgcaattgataattcagaagagattaaaaagccaccattacttcctttggctaatctcaatttagcccattacagagacagtgcggactttcaagagtccgttttttatatggggcaacctcaatattatgcgaagggtgttaattgggagtggtatgaccaagccaagaaacgtggcatctacattggagcgaaagtacttttgcctttacctgaaaatggtggtttaggaattgtacaagccgaccctaatactcttgcccgggaagcgatgaaagataagtgggaaaaaatgaaggagatgggggcgcgtttaattgagaagggctcgggaagtaaaaagaccgctaccgaagcgaatagtgatgacgccgttcagcattcagttctttcgctctgtgtcgttaatatgaatgaagccttgtcagcagcattacgatgggctgctaagtttgtaacgcctaatgtggatgttctaactaaagatgatttgatgttcgaaatcagtcaagaatttaacaaacagggttatttagctgagttagctcgacagttatttgaagcagctctacaaggccgatcttcatttaaatcatggtgggaatacaaccaaacaggtatgttccctaaacaaaaatatgaagaagagcttcagaatgttgaagcagagcaagatgggactttaaatcaaaaggtagagtga

SEQ ID NO: 65828 - DNA, 429 bp, Acinetobacter baumannii; identical to SEQ ID NO: 51300

SEQ ID NO: 65829 - DNA, 243 bp, Acinetobacter baumannii; identical to SEQ ID NO: 51299

SEQ ID NO: 65830 - DNA, 192 bp, Acinetobacter baumannii; identical to SEQ ID NO: 45978

SEQ ID NO: 65831 - DNA, 768 bp, Acinetobacter baumannii; identical to SEQ ID NO: 51336

SEQ ID NO: 65832 - DNA, 957 bp, Acinetobacter baumannii
atgactacgacagttaattcagacatgatcatctataatcaattggctcaaactgcttatttagagcgtttgcaagataatttgaatgtatttaaccaagcctctaatggtgcaattgtttatcgcaatgagatcattgaaggtgatttcaataaagaagcattctacaaagtgggcggtagcatcaaacatcgtgatgtgaattcaaccgccaaagtagttccagagaaaattggttctggtgagtctgtaggcgtaaaagtcccatataaatatggtccttatgcatcaactgaagaggcatttaagcgccgtgctcgtacaccagaagaatttgctatggttgttggttacgatcttgcagatgcattggttgcaggccgattagagtacagtttagcttctttaaaagctgctatttctagcaatccagacatggttgcaaaaggtagtatcgttgttgatggccgcaaagcattgactcgtggtatgcgaaagtttggtgataagtttggccgcattggcttatgggtgatgaactcagatacatatttcgatattgtcgatgatgcaatcactaagcaaatttatggtgaatctgaaatcgttatctacggtggtttaccgggaaccttaggaaagccggtcttggtgacggacgctgtaggtgataacgatgcttttggtttgcagtatggcgctgtcactgtaactgaatcacaagtaccgggcttccgagcttatgacatcaatgatgaagaaaacttagcaatcggtatgcgtgctgaaggtgcatttaacttagatattcttggttatagttgggatacatcgaaaggtgaaaatcctgaccttacattacttggttcaagcgctaactggatcaaatatgcaaccagcaacaaaatgacagcaggtaccttacttgatttatcgggtacagcgacaactggttaa

SEQ ID NO: 65833 - DNA, 666 bp, Acinetobacter baumannii
atgaagattatctatacacgcattgcagcagcggctgcattagagacaggcattattgctaaccctgactattatgaaaacccaaatttgaaagcaaaagaggtaattatttacggtaattatccaaagattcaaaaggattatgaatctttggaagttccagttgaagttcgtaagttggaagtgccacaaaaaacgactttggccacagtaaatgtcgcagtgggaattacccctgaacttcaagctgtgatggatgatgcaaaagctgaatgtgaaaaggtagttgaagaaaacactcagcttaagcagaaaattgccatcttagagcaggccggtggtaaccagtcagagttgttatctgaaaattcacgattaaaagatgcagcagtcttagcagataaagctctcaaagatgctgaagctcaagtggtcggtataaaaactgaatttgaagcttttaaaaatgatattcctgcaatgcaggcacgtattgctgaattggaagctggaaaagcggcagaaaacccagctacagaaacggcagctaatgattttgaaaactggtcaaatgatcaattaaaagagtatttggctagtaaaaacattggttacaagccgtctgcaacaaaagcagaacttcttaaattaatcccgaaggaataa

SEQ ID NO: 65834 - DNA, 390 bp, Acinetobacter baumannii
atgagctttattactgtagatgacgcaaattcaattttgggcagcgattttgcaccagacagtgataaggctcgtctggtgaagctggcaaatgtgtggatgaaaaacagaattggttttgtaccagatccaattgatccacttcttaaggacgcggcttgtgaaattatcaaaggaattctggccaaagtaatttataacggcaaagagcagcagttgaagcgtaagaaagttaaggctgattctgttgagtcagaaaaagaatttcaagacggatctgaagcaatctctagctttgaacagatagcaattgattttattgattcacttgatttgaaagatccaaatgcaagttttaatggctttggcataccactttacagggcatga

SEQ ID NO: 65835 - DNA, 369 bp, Acinetobacter baumannii
atgggcttacgtgacgaaattcaggcagacattgctgaagcatttaatgatgatttagcagatgccattcatacctttacatgtgagcggatctctaaaacgaattgggatcctaaaactgaaacttatgttgaagttaaagaaaactattctggccgtggcgttctgtttggctcatacagtcaatatgagatccaaacacttggagtactggccacggataaaaaggcaaccgtgcttcaaaatgaagtaactatgactccaaaaattgaagatgaatggttaactgccttaggctcattccgcgttattcatatccagcaggatccaacctctactatttggaaatgtcagttgaggaaggtttaa

SEQ ID NO: 65836 - DNA, 711 bp, Acinetobacter baumannii; identical to SEQ ID NO: 65823

SEQ ID NO: 65837 - DNA, 408 bp, Acinetobacter baumannii
atgataagtacagattacgtacctttatggcacacctctccatttcaacatgttcaatatacgcttgctcgaaatcaaattcacatggatttgttatttgaagatatggataaggccgatcaatttttggatatgggagcggatgcgcaagttagtactttttctgatggtgcatatgcgattgtccagattggggatacatccgataaagatcaaattcaagtttatggattgcttttacatgaagctgttcatgtctggcaaaagatgaaaaagctcatgggtgaacgagaaccgagctctgagtttgaagcttattcaattcaggcgatcgctcaggatctctttaagatgtatgaggaaagcgaggttaaaagtcatggggtggaaggggaaaaagccaactag

SEQ ID NO: 65838 - DNA, 369 bp, Acinetobacter baumannii
atggggtggaaggggaaaaagccaactagttttagtcttgatgtgtctaaagcggcagaagaccatgtgaagcatattgttatggatactgtgcaatctttagttaatttaagtcccgtcgatactggtgcataccgtgcttcacatatggtttcggttggatctggtgactatggcatacgtggacctgaaactaacccaattcaagatgccgctattcaagccgtgaagtttaagttgggcaatttagtttatatccagaacaaccagccttatgcagagcgcttagaaaatgggtggtctgatcaagcgccacaaggtatttatggcctcacttttaattttatttctcaaaagtacggtggctaa

SEQ ID NO: 65839 - DNA, 444 bp, Acinetobacter baumannii
atggcctcacttttaattttatttctcaaaagtacggtggctaaaatggcaatgactttagagcagaccaggcaaaccattattgatcgcatgcaaagctttactggtattgctcaggacagaatccaatatccaaatttaccaggctttaaagttccaaaagaaggtatatggtgtcgtttaacgattgcaggtggtcccagttttacttctggcattgcagataagccatgtactcgccgtaccggtaatatcatgattcaatgctttgcacgtcccaattcaggaataattgaaatcacaaaattgagtgatgcattacttgctcattttgaatatttcacaatcgaacacttagaatgtttgaatggccaatctatttatgcgggtaaagatgctgacttcattcagtacaacgtatcaataagctatttagttaactaa

SEQ ID NO: 65840 - DNA, 354 bp, Acinetobacter baumannii
atgagcaattttgtttttaagcgtggtgacactttcaacttaaatcttcagctagttgatatggatgaaactttgcaatatccacccgatgatgttcgccgtgcaattgatctgacgggttatacctttacttcacagattaaagctttggctgatggagcagctgtggctaccttgacttgtgcagcattaagccagagcacacaaaagggttggcttaatgtgaaatctggagcaagcacagctgcttggcccgttggtttgtgccaaatggatattaaagcggtagtaagcggcaacactcaacacaccgaaactttgactttccaagtgattgacggagtaacagcataa

SEQ ID NO: 65841 - DNA, 1149 bp, Acinetobacter baumannii
atggcaaatcttgtatttaaatttaattgggaccatcgaccgttccagttgaactcagctcagggcaagcggcaatttatgctgccattcgcttccggcattcccaatttaagccctaacttttcacaagttcaaggaactgcagcaatctctcaaggtggtacaggggcaatcactgcagcagaagctcgatcaaatctaggagctgctgaaaaaggggtgaatactgacattactgaaatgaaaggtttaactactccactttcaatagcacaagggggaacgggtgcaaactccgcaattagtgcgaaagttgcattaggtctgggtgatgctggtgcattgggatattcagcaaatgcggttgctttgctttttaataagacacttgtttccgattgggtgtctgttttagggcttaatagatttgccaacatttcacatggtgactggcaaggcgggagtacagcaaactctctctatatgcctatgcgttatgggacattgatgggctatcacgccaatgattcaatcggtacttattcatggcaattcttcaaaggtgtgcaagggcaccaaatgtcatatcgatatggtgctggatctgatgcatggtcagcatgggggcatttaaagaccagcttcaatacatcagttgatgcaaacggattcttaaaatcagcctcaccagtagttaagttgtttaacgaccatatcgaactcaatagtgatgcagaaaaacagccgattgaatttaagaaagttgatgtaggcgattatttacttaaaggctctttaggctttgcccaagaaggttggtacatcgaagtacccaaagacgcaaatggaaacacgatcgtagctgtggtgtatgacacattggaaaacggtgatctatctattaagacttataaacgtaagtttgattttgaacttgctgcagttgttgcagacttggaattacctatagatattccagaaggtcgctggattgatattcgcttgcatgaagaacctgaaccagagcctgagccacctacaactgaaacaccttttgatttccagcctacaaacttatccgaggctgtggctgctgcaatggctggggtggaaccgccggaagtctcagataccgatgaaacactttaa

SEQ ID NO: 65842 - DNA, 918 bp, Acinetobacter baumannii
atgagttcaggcgcaaaaattcgattatatgcttgtgaagaagcagtattagggacgactccagcaaacccaatttggtacacggttcgccgtgtaagtgatggcttatcagaaaatgtctctacggaagaaagcagtgaagtagttgactcacgctatcgtcaaggcggtgtagttactgaagcggaagttgctggtcagttagagtttgaattgtcacttggtacctttgatttattcttaagtgctttagcatttaataactgggcaacgaatagcttaaccattggcggtaatgtacgtaagtctttaacgctggttaaagtttttgaagatattgggcaggtgtttatctaccgtggtgtgcaggtaaataccggtgaaattaccattcaaacaaccgggaagatcactggtaactttggtttagtaggtagctcgtttactcgtcagcaaacgaaccctgtagtgaatccggttgcagcttcgactcgtccgcttgtcagtatgccgaacgtggaaaacttgcttgtaaacggccagtcaattcaaggcaaagcatgtctacagtctttgaccatttctattaacaataaccttgaagcaatccgttgtatcggctcaggcaagtacacaccagagttctacattgaaaagatgatggatatcgaagcgaatgcttcatttatgttctcgtcaacttcagcagggtggattgatgccattaaaacacgtgatgtatttacactgacctttgatattaaagatagtaaaggtagtaaatactcgttcaatttccctcaattagaagtgatggaagccaatcacccggatggtggtggtgatgacatcattactgtagatatcaactttgcccaagttcgtacagcgccaacaattgtacgtgctcttgtttaa

SEQ ID NO: 65843 - DNA, 552 bp, Acinetobacter baumannii
atgggcttttttatttctaaaatttcagaggtagttatggctttaaaagttggaattattaaaagctcggacgtatcaaaatggtgtgaatacaagggggctgatggcgaagtacaggcagagttcaaagtccgtggtattgcctataaaccttttcaggtagcgattgaacgggcaggaaaccagatctcgtctaaaggctatgatgtaatggtaaaagatgaaaatgccaagctttaccacgagcttttaatggatgcatgcgcggcccacttaatcgaagactggaaaggtgtggtatttgccgaaatcgtagacggtaaaactgttgagaccgaaaagccatatacacctgagaatgcctcaaagcttcttaatcttggtgatattggtatttcaatctggctattcattaaagaacaggcccagaagattcaggaagaagccgacaaggataaggctttaattctgggaaagtcatcgagctctacaaataccaaaaagcgtatgcgtcgaaaacgccgcacgaaatcgaacaaatcaagttcttag

SEQ ID NO: 65844 - DNA, 486 bp, Acinetobacter baumannii
atggccgctccgtggatctcatcgccagaaatggcgatgcgagatccagggcagggcggccgccatcgtcagacctggcgatggtcgacgccggcgcgcatcgtcggatgtggcgatgcgagctcgaggtcggtggccaccgccggcgacctggtgccatcgtcggcaatggcgatgctgcagctcgacgtgcgcggcctggtcgtctcggcatcgtcggatgcggcgatgctcgagcgaggcgaaaaaaaaccgcctcggggtatccgaggcggcaagtctgcatgcggttcagggaggaagaaaccgcgccggcgatcagggaggaaaaccgcgcggcctgatgtgcagctcggccactttagccggatttttcgacttatccgatgcgagcggcccgccgtgggcgctgctcgatctgctgttgctttttctcgacgtgcttctgctcctggtgctgctgctcgtcgcgctgcacctggctga

SEQ ID NO: 65845 - DNA, 2967 bp, Acinetobacter baumannii
atgatcgtcggcgacgagctgggcatcggccacgatccgggccagcacgccgcctatgtgggttcgtggatcaaggcgctgcaagacgagccgctggaggtgttccgcgcggccgccgatgccgagaagattcacgactacgtgctggccttcgagcagaagcaggttcaggagcaagaccagcagcagagccaggcccaggacgaagccgtggcccaggccctggccgtggacattgccgaagtcctggacaacccggacgtgtctttcagccactaccaggcattccagggcgacaccctggaagacgccttgcgcagccgtggcctcgaaaccgtgggcagcatcaccggcaccgatcccgagcagttctacgcggtcgcgcatgaccggctgtcgccggtgttcggcatcgacccgagccacaccgacaccgacaacgcctacctggagcgcaagggcttggcgcaagagttcgccaacatggccgaacagctccacctcgcgcagcagctccagcagcacggcgaacagatcgtgtcgagcatcgacgccgaagccaggtggagcgacggccagcgcatctttgcgttccacgaccaggacggtgaaccccaccaggttcgcagcctggacgagctgaacaactacgcgcccgaccagttgatggccctgccggcgctgacccagcagcaagcggccgtcgcagaccaggaggcgaacatgaccccaccgaccaacgaccaggcggccgccctgctggccgcccatcctgccgacgcggtgcagggcatcgagcaggccgccgccgcgcgccggcagctcgccgccggcgagatcgacggccaggcgttcgccgacgcgacccgtcaacaccttggcgttgagctgccgcccgactggagcggagagctgcgcatcgtcggcgtggccgagcaggacggccagaccgtcgatgccgcccaggccggcatcgagccgcaggcgttccaggtctacgcgcgcaaggccgatgcgcagttcggcgaggacgcctttgccttcgtcgccggcacccgcaccgagggccaggccgaggctctggccgagcgcctgcacctggtcgatgcgctgggcaccgacaaccagcacgagcgcgccgccaagctggcccgcgtgcaggaagagcgtgtacggcgcgaccccaacgcgaccgaagaggacatttcagccgctaaagaggcacgcaagaccgccgaggcgtcggccatgctcaacgacagcgacgcgcagcgccgcgcggccgagctggagcgccaggaacgcgagcggcagcaggcgcagccgcaggccgagaagcccgaacggcagtacatcaacgtgccgtacaaggagaaggacgaggccaagagcctcggggcgcgttgggatcggcagcaacagtcctggtacgtgccgccgggcaccgatgccgctcccttcgccaaatgggcgcagggagccgctacagcggccgtagagccgcgttcggcccagccggcacccgaagcccagggcgaggcgcagaagcccgcgcagcaggcccagcaggcccgccagtacctggccgtgccctacgagcagcgcaacgcggccaaggccgccggcgcgctttgggacaaggccgcgaagtcctggtatgtcggcccgcgcgccgacgcggcgaagctcgaacgctggaagcccgagaacgtgcaggcccagcaagggccagcgatgacgccaagggaagagttcgccgaggccatgcgcagcgccggcctgttcaccggcagcaacgcccagggcgatcacccgatcatggatggcaagcggcaccgcgtgccggtcgagggcggcaagaagggcgcgctcgatggcttctacgtgggccacctggacgggcacccggccgggcggatcatcaacaacaagaccggcacggacattacctggaagagcaagggctacgccttgagcgaccaggagaaggccaagctccaggccgaggcggccgagaagctggcacagcgagccgtcgagcaggacaaggcccaggaggccaccgcgcagcgcgtcggtcggcagatggccgacctcgtgcccatcgagcagccgacgccctacctgcaagccaaaggcatccaggcgcaggccggcgtgatgaccgaccgcgaaggccagaagacctacatcccggccttcgacgcagagggcaagcaatggacgatgcaatacatccaggaggacggcactaagcggttcgccaaggactcgaagaaggaaggatgcttccacccggtcggcggcatggacgccctggcggccgcgccggcgctggtgatctcggagggctacgccacggcggcccaggtggccgaggccgtgggccacgccacggtcgccgccttcgacagcggcaaccttgaggccgtggcgaaggcgctgcacgccaagttcccggacaagccggtcatcatcgccggcgacgacgaccggcacctggtcatgacccacggcaacaaccccggccgggagaaggccgaggcggccgcccaggccgtgggcggcaaggcgatcttcccgatcttcgcgccggccgagaacacctacccgcgcgacttgcccgccatcacgcccgacagcttcaagacccacctgcgcgccgagcagcgccttgccgacgccgccgccggcaaggtcgagctggccggcgacgaggcggccaagctcaaggcgtcgatgttgagcggcgcgcagatcgcggcgctgtccacgatgaagcagcacaccgacttcaacgacttggcgcacaagagcgagctgggcatcgagggcgtgaagcggcagatcggcgcggccatcagccaggtgcagcgcgacgagcagcagcaccaggagcagaagcacgtcgagaaaaagcaacagcagatcgagcagcgcccacggcgggccgctcgcatcggataa

SEQ ID NO: 65846 - DNA, 183 bp, Acinetobacter baumannii
atgaagttaaataagttgagtttggttgtttttatactttttatatttactgggtgtggtgaaatttattctcaaccttctgataaatatccatttgaagtgaaaatgaaagctttattaggggataaccttaaaattgtgaactcaatacgtaaagcagaagttcaaattttcttcttttag

SEQ ID NO: 65847 - DNA, 354 bp, Acinetobacter baumannii
  misc_feature (294)..(303): n is a, c, g, or t
atgaattttaagcctttggcatatatccttcttgcgacctcaagtttaacagcgtgtaccatggcacctgtaaaagaacaaaaaattgagccgtttgtttttaaggaaccagagcttacacctccattttatgcattaaacccatttaattatgatgctccgcctgcatttgaagttgctttaaaagaagctgctgcacagcctgtaaccaaaatggttgtaactcgtcaggacgatccaaccaaaacacttacattagatacgaataaattgatcgtacctacagtcaacaannnnnnnnnnagtcaacaactcacaacgttcaatgaagtacgcagttttagcgggcgataa

SEQ ID NO: 65848 - DNA, 582 bp, Acinetobacter baumannii
ttggtatgggattcagcggacgcttaccctggaccaaccaatttccttattcttagtacaagtcatcaattcagtattaaaaaaacattaggcttaatcttcggtggaagtattggtgctgcatcattagtcttaattacaggacttggaattggtacaacactcaatgaataccccaagattcaattaatattaagtttcactggcggcatttggttaagctatattggatggaaaatttttaattatagacctgatctagaatctaaaatccaaaatcaaaataagaaaaatggtttttttacaggcttctttttacagtttatcaaccctaaaagctggttgatggctattgctgttattactgtttatacagcacaactagctaactactatcagtcactcattctattttcattcatctttatgctgatttctctaccttgtttatttatttgggcttatttaggaaaaatcacaaaaaaaatactttctacagctcatcatatggtgctctttaatcgagtattaggtactgttttacttatttcagtatggtatccaatattgcatgctatttaa

SEQ ID NO: 65849 - DNA, 192 bp, Acinetobacter baumannii
atgagcactcatatcactactacagcaaatacaataatgtttccgaaggcttgtactctttgccaatcaagaaaaaatgtacagctttttgcaggactgttggtatgcgatcaatgccaggaaaacatcaatctcacgaatccagacacattctcggccaatgatgagattgaacaaaaagcccaggattaa

SEQ ID NO: 65850 - DNA, 582 bp, Acinetobacter baumannii; identical to SEQ ID NO: 65848

SEQ ID NO: 65851 - DNA, 315 bp, Acinetobacter baumannii
atgcaagttattacagcaaaagacgcaaagtcacgatttggtgaattattggatacgatgcaaagagaacctgtcttagtaaccaaaaataaacgtccagttggtgttttcttatcgttgaaagatgtgaaaggtactcacttggaaagtctttttgatattgaaagtgatgattatgaagattgggaaaaagagaaaatagcagaagccctaaattctttgaaatcacatccatcacaaacgactgcaatgaaaacggtacatgctacagcgatgcaaaaagcacgagaattggtagcgagccgtagcaaatga

SEQ ID NO: 65852 - DNA, 219 bp, Acinetobacter baumannii
gtgagtgacgagctagagttgagtccaaactcaaaatatattagtgaaatatacacggatgaatcagagattgagatgctaaaaatggatttagttatagtcgctgatactatggatgaatggttggaagaaaatacaccgatagacccagatatttgtcgttatatgggaatgctgtttctgtcattagctaacagattagaatcaaaaagaaactga

SEQ ID NO: 65853 - DNA, 1098 bp, Acinetobacter baumannii
atgattgtatatagcccacactcaaaatttacgatgcaaagaatcgctgaccatgttgctaatggagcttatttttatgccaaaattgactggaaagaatatgaggattggataaatggtgagactaaaactatttttaatagtgtagatggactgattgaaaaactcacagaacgttatgatttaaagctcactccaagacagcgtaattatcgtcttgaaaaaggttatccagtttgtacttgtattgttcaacgtgatgtttttgaaaagtacaaatggacaattcatttactattcaccacttctaagacacgggattttaatttgcagtgtggcgtatcatctcaaaaaattgttaatgccaaagatagagaaaaagtagaaaaattacaggagaaatttaagggtttcacttggataaagcctgaaattcaggctgaaatggatttgatttacagctatttcaaagatcgggagccgctgcaatttgttttaaatacgcctatttctctaaaagtcacgcagcacatgacttttgagcttgtgcgtacagatcacaaggtctataagccgactgaaaaagaatataaagacagaattcggtcattttcttggtcttggagatacagcaagcagtcatatttacgaatgaaagcccgactgatgactgttgtaaataaacttattagccaaaaaaataataagttagctgaaaaaaaccgagctgatttgcgtaactttttcaaaatgattgaggcatgggcagtttttaagagtaatcgacagcaatcgggtgaattgcttcattttgcccagcgttttgttcgtaaaaaagttaaaaaatcatggcagcaaattgagattgaaccgcctcacttggtttatctgcccagattagaaaattatgctgaaactttggatgaatatcgtgatcgtagagaattatttgatcaatatggacttgaagttcctcttgatttagttcgaaaaggcgactttatgcagatagcagattatatttatcgtgaaaaagatagaattgagcatcgcaataaaaagacagatgaatcgttattgtctgaaaatttggaatga

SEQ ID NO: 65854 - DNA, 894 bp, Acinetobacter baumannii
atggctttaaaaaaacagctaaatctgttttttgatgatcttgcgtactatccacactgtaccgataattttgcggatggacagtacagaaccaaaaaaacagaagcaatcaaaaagaaatacatcgaatttaatcagccttgcctgattagttattttgtctttgatctcgattaccctgaatcggcacttgcttggcgagaagaaaacttgcctgagccgttttgggtcgcacagaatccgaagaatgggcatgtgcatatctgttaccgccttttgtttccttacccaacaaccgaaatcgcaagtatcaagccaatgcagtacgctgcaaaaattcaggctgctatggctcgaaaactcaaagctgattcagggtacagccgaaaactgaccaaaaacccatataaccctgcttggcggacgatgtacttcactgagaagtcgtatttgctcgatgagctggcagactatgttgtggttaaagcacttagcaaaagcgagcaagagcaaggtttaggacgtaactgcaccatgtttcagcagggtgcatcgtggtcgtatagggctgttatggagtttaaacaggcaaatgcccctttccaactgtggcataacgctgtcaaagatcgcctaaaggacatcaatgcaggtttccccgaacaactcccctactcagaagtgaaagccacagcaaagagcatagcaacatgggtatggcagagattcagtgagcagggcttaaagcaatggcatgctgagaaagggcgtaaaggtgggcaaaaatctaaacgtggagctaaagctgattcagagcgttcaacgaagccttgggaagctatgggaatatcacgcaggacgtactacaacagaaagaaaaatggcactctgtaa

SEQ ID NO: 65855 - DNA, 630 bp, Acinetobacter baumannii
atgagtagttttgatgaaatacaaaatagagaagctgggctgcataaaaagttatctgcaaaacagatggggatgattgcgattggtggagcaattggaaccggattgtttatgggaagcaaatttgcaattagctttgcaggtcccgcagtcatagtcagctatgcgattggtggtttaattgcttttgcgcttatggcttgtttggctgaaatgacagttcagcatcctacttcgggctcatttggtgcatatgcagaacattatataagtccacttgctggcttcttagttcgctactgttactgggcttgtattgtactggcagtaggtacagagattaccgccgttgctgattatatgaagctctggttcccgaatgtagactcttgggtctggattggatttttttcactgaccttacttgttgtaaatgcctatagtgttaaagcttttggactagtggaatactggttttccacaattaaagtttttgccattatcgtatttattcttttgtctattggtatcttgacgcaaagcaatcagggaatgacgcaagttgtaactcatttatcaggacatgggggcttttttccaaatgattgctgtcgcggctggcgaagctaa

SEQ ID NO: 65856 - DNA, 285 bp, Acinetobacter baumannii
atgcaagaagcaatcgaaaaaggatatttgggtggcaaattaataacacctaaaacaatcaaattcactgatgaaatgcttgatgcagtagcagtgcaggcggaagttgaggacaaagaccaagctgattggatacgtgaagtcatagctaaagctctacttgttgctgatgctaagtatgagcgtatgacaagagcaaggatgaaagccaagtgtacttcgggcactttggtacaccaaaaagaaagcccatctgcgcgaacagatgagcctgacgttcaataa

SEQ ID NO: 65857 - DNA, 675 bp, Acinetobacter baumannii
atgaacatgccaattttaacacagttcggaaattccgagcaatcaatgacaagtctggaaatcgcagagctttgtcaaaaacgtcacgataatgttaagcgccttatcgaaaaccttattaatcagcaggtaatagcatgccctcaaattgaggttgtgcaaaaagaagccaataaccgcatttataacattgaggtttatgtgttcactggcgaacaaggcaaattagattcaatcaccgtagttgctcagctttgcccagaattcacggctgccattgttaagcgttggtacgagcttgaaaaccaaaacgctgcacaacttcctcgaacctttgccgaagccctccaattagcagccgatcaagcccgccaattagaactcgcagcgcctaaagttcaatacttcgacaaggttgtagaccgctcaacacttcttaatgcaacacaagtagctcaaaagcttggtatgtctgctgtggcaatgaataaattgctagatgacttagatgtgtatagccgcaatgtgaagcgtgctcgcgtgtttaagcaatggttcattgacgcagggtatggcgaattaaaacaaacagagcttggcttttctcagccaatgttcaccaccaaaggtgaggcgtgggtaatcgagaaattagtgagtgagggcgcagcatga

SEQ ID NO: 65858 - DNA, 219 bp, Acinetobacter baumannii
atgcgtccctgggcgttggggcgcaagaactggctgtttgcaggttcgctgcgcagtggtcagcgagcggcaaacatcatgacgttaatccagtcagcaaagctgaatggcttggatccgtatgcctatttaagtgatgtgctgaaaaggctgccgacacataaagtgacccagattgaagagttactgccacactgctggaaacctaaatcgaattaa

SEQ ID NO: 65859 - DNA, 1203 bp, Acinetobacter baumannii
atggataatcgatggattaaaatgagtgttttggccttaagtatgagtgccattacagggacaatctatgctgaggatcaggtacaacaaacacaggtagaatcatcaaatcagagcacagaggcaggagttgaggtaaattctctagctactgaagcgacaaattcttcttctgttagtacagatgcgggaacacaagcttctgagacatcatctacgaatgtacctgaaaataatagcggggcaaatcaagctgctagcgccctgcagaagaaagaaggtgatgcaagtcaagagacaaatctacaagaagtatttacttcaaatgaacgtcaatattctttaattaagaagggggtaatttcctcttattatgatctcgattatacctattatcgtgatacaagaattgatttggcattagatagtagttctacccgtttaaacagattacgggttgaagaagatgcaaaccatactttaactaatagcttcacagtccagtacggggtactagataacttaactttatcagcaactttaccttttgttgcgaagtctgaaattattcgggatacaacaaccgcaggattgggcgatatttcattaggggcgcgttgggaaccttttcctttaaaacaaggccgtctacctttagttctttttggtagcttatcaacgaagactggtgatagtccgtatgaaattggtttagatgagctttcaacagggaaaggatattattctgtaggtgtcggcgctagtacccgtaaatatattgacccagttgttttatttgcatcagcctcggccaattacggatttaaggaaactggtttaaatcaaaacagagggggaggtgatgatgaaaccggtcctcgtattctaaaaagttttgatccagggattagcggtggtttttctttcggttttgcatattcatttaactatgatgtgtctttaaccatgtcgtatcagcaaagcttcaatatggatgccgaattccaatttgaaaatggggaaaactataaatcacccgatcaaagtagcgcgatgttgtcttttgctttaggtgttcgcgtttctcctgagactattgttaatggtacggttggaattggtttaactgaagatgcgccagatatttcacttggcttgtcattcccgttagatattttaggttttaataaaaaacaaaaataa

SEQ ID NO: 65860 - DNA, 219 bp, Acinetobacter baumannii; identical to SEQ ID NO: 65858

SEQ ID NO: 65861 - DNA, 831 bp, Acinetobacter baumannii
atgagttatctatttttgtcgtgtacagagaaaaatattaaaggtcgatctaaggaaacgggtgccacacttattgttgtacttattattttattgattgttatttctgtcggggttttggcaataagagtagcgattgtttctctaaaagttgcaactaatagccaagttggccaattaaactttcaatcttcagatactccgttagagcttattgtacagatgaacccaaccacattgacaaatattaccaatgtgattggagcagcactgaaagcacatgaaagtaaccctggtgcggaatataacttttgctataaaccaacttctacatctgtaagttttgctcaaactcggggagcaagtttgcttcgagctggcagcgccaataatgctgtagttgaagacggtggagtagcaggtttctgcgatttaacaagtgactatgggagtaatcgtcaagcggtagttactcaagttgctgtcagtatcccaaccgatgccatgcctgatattccgggttcaaatctacctcgggacataaatctttccgaaggaacccaacttcctaaaagcatgctatctacgcaacgtattcgggttattacaacagcgtttttacctgcttatgcatcaacctctttagaaactttgcaatctgattgcttaagtacgagttccgcaaaaattagtgacaactttgatagtgcattaacggataagcaaaccctagctgattgtttggcaaaccataacgtaccttttagtactcaagttcaagaatttaactataccaataagctgactgaaatcacggcaccaggttcataa

SEQ ID NO: 65862 - DNA, 588 bp, Acinetobacter baumannii
atgataattgagatagagacccatccactgcaaccgtttttgccagaaaatgcccgtttattaatgttaggaagttttccaccaccacgtaataaatggaagatggacttttactatccgaactttcaaaacgatatgtggagaatttttggtttaatcttttttcaagataaaacttattttttaagtgagaaccaaaaaagctttaacgaagaagctatccgcagctttctgattgagacaggcattgctatttttgatacggcgtatcaaataaaacgcctaaagggcaatgcttcagataagtttcttgaaattgtcactccgacagacttagcggttttattgaaacagattcctcaatgtcacactattatgactacgggcgataaagccacagataccttaatctcagttttacctgagaacacggaaaaacctttaattgggacatctacatcaacttattttgcagaccgcgatattaatttatatcgattaccgtcatcttctagagcatatccattagctcttgagaaaaaagcagaagcctatcagaaattctttaaggaaatcggtttcttgtaa

SEQ ID NO: 65863 - DNA, 201 bp, Acinetobacter baumannii
atgactgctgcaaatactactgttttggaacttttaggcaaacaagtttctttcacatacgttactgaatgggctgaattgcctaaaaaaggtacgctaacgtctgttgttcttagcttgaattccgaacctgagattcttattgatgatggagactttatttcgatgtctgagattagggattttaagttggttgaatga

SEQ ID NO: 65864 - DNA, 240 bp, Acinetobacter baumannii
atgatagttgtgactataggtaaaaatgctttccctggcagtgttcaagaccagggcaaatatttagataattttagatctgattttaaagctgagtttggttatccgattatgtatgacgaggatgccaagctagaaggtattaaaattggttttcgatttaaaggtgctaatggagtgcctttgaagatggttgataagattttgaataagatcaaatcagcttttaacgtgcaataa

SEQ ID NO: 65865 - DNA, 933 bp, Acinetobacter baumannii
gtgcagcgctgtggctctgtttggacttgccctgtctgcgcaaagcagattactgaaaaacgtcgtgatgagcttaagagagcctgtgacgcatggaaaaaccaagggggtgaggttttccttttaacccttacaaatagccattctgcgaatcatgctttgaagtctttaatttcggggcagaaaaaagcgcttaggcttttttttggtggtcgcaaagctgttgaactttttacgaagttgggtcgtaagtaccagattcgttcttttgaagttacttatggccagaatggttggcatcctcatttccatattttgttgtttttggatggctcttttgaccgttcttttaatatccgtgatgatttagctaagcattggattaattgttgtattaaatcaggtttacctgctccaagtatggaacatggtttggacttgcgtgatggtaagtatgccgatcggtacgtatctaaatggggtatcgagcacgaacttacaaagggtcatattaaaaagggccgtaatggtggatttactccttttgatcttcttcagttatccatcgatgatgaaattgtatatgggaggtcaaccagtcgtttatatcaagaattcgctattagttttaaaggtgcacgtcaattggtgtggtccagaggtttaaaagcgtatttaggtatcgatgaaaaatccgatgaagaactggcagaagaaactgagcttaatgctattgaactgcgaacagtggattctttcatattcagccttttatgtaagtaccaaaagcgccacgaatttttaaagacactagaaagggactatgaaaacgggtgttttggctcaggtgaaactgagcaaatgctggttgatcttattgaacgagaaattcggtttttagaaaaagggggtactgttttttcttccgtctaa

SEQ ID NO: 65866 - DNA, 288 bp, Acinetobacter baumannii
gtgaccgctttggttgctttctctacattattggctgcaagtacatatctggcgctagcagcacttgctccaaatttagcttgtgtttcggcatttgttgctcttacattcgctaaatgtgcctcagcttcagccaaggcagcttttgcactttctatcgatttttgcttttgcaattgggtagctgcattgttagcaactaatgatcctaatttggtatttaaagctgacacttgtgttgcaatcgctttagtgagcaatgctgtaccacccaagatcgcaacataa

SEQ ID NO: 65867 - DNA, 174 bp, Acinetobacter baumannii
atgaatcctacagctttgcggttcataagggagtatgagcatgaagtttatgaaggtgcgaagtatgcacgccagtatggtgatcttcaaaggctttacgatgcttcaagtgatgaattcttcattgaagaaatcaacgatgcttatgaagagtttaagaggagcttggtatga

SEQ ID NO: 65868 - DNA, 828 bp, Acinetobacter baumannii
atgagcaattgggtcaatgtcacacaggataagtctacaggtatagaactaattcatgcccacttcaaaggctttgcatacgatcctcatctacactcaagttatcttataggggtaacagagttaggacatcaacaattcaattgtagaaaaaaaattattgatagctatcaaggtcaaactttcatgcttgaacctgaagaagttcatgatggtaatgcaccagatcctctcggcttcacttataaaatgatgcatttagatccagcatggttaaaaaaaagctatgaaggaatatttaatgagcctatcgaacttgctatcgaatcaaccctacgttctgatcctcaactttcacatttgatactttcaacctacaatatattgaataacaatgaatctcaattgatgaaagatacgtatttagatcttttattagaaaacttagtaaataaaaaaattttatataaacgtgaaaagtctatccagacattacctaatattgcattaaagctaaaagaaattttacatgaaagtctctttcatgatttagacttacaaacactctcaacattggtgaaaacagatcgtttttatattaaccgtgtatttaaaaaaaactttaactgttctccacatcaatatctgatccaactccgtttaaataaggcaaaagaattgttaagaaaaggattatcagcaacaactgttgcttcatatctttgtttttctgatcaaagtcatctaggtcgatggtttaaacgttgttatggcataacattgaatcaatatcaaaaagcgtgcacaaatgttctagatatatcttga

SEQ ID NO: 65869 - DNA, 297 bp, Acinetobacter baumannii
atggacatgcgtgcaggtatggatacgaccatggctcaggtggtgagagtctttggctacatcaaaccgcattgcgcctacctgttctgtaataaacgtggccatcgcatgaaagtgttggtacatgatggactgggcatctggttgtgtgcccggcggctggaacagggcaaatttcactgggttcaagttcaccaaggtgaaaccgtggccctcagcccggaacagttacaggcactgatccaaggtttgccctggcagcgcattggacgacagcaggtggtgacgatgctttaa

SEQ ID NO: 65870 - DNA, 297 bp, Acinetobacter baumannii; identical to SEQ ID NO: 65869

SEQ ID NO: 65871 - DNA, 612 bp, Acinetobacter baumannii
atggttttaccaattgtattagattgccatttggctgctgaaaagccatcgatagagcagggtattaactttatatatgctggtaatcttggaaaaaaggataatattattgattttattaactatcttccaacattacatcaacaattaaattgtccaattttatttaatatagctggcgtaacattctctcaattaaaagatcttctaggaagtgaaaactttgatagaattcaatcatatataaaatgtcatggtcggctgtcgagaagtgatgtaattgatttatatagtaaatctcatttttctgtattgtttagagatgataaacgttatgcccacgctggttttcctactaagttagtggaaagttggtctatggcaaccccagtaatctgtaatcctattggtgatattactttgtatgctcaacatggagaaaatgcatgtattgttaacgatattaatgaagttgcaaaatttctaggtgatgttttaaaaaacaatcaatataaatatatgcaacagcaatgccaagaaacaattgagttaaaacttagtaataaagtctatagtaatcagttattagagttttttagaagattaaagtga

SEQ ID NO: 65872 - DNA, 225 bp, Acinetobacter baumannii; identical to SEQ ID NO: 13704

SEQ ID NO: 65873 - DNA, 297 bp, Acinetobacter baumannii; identical to SEQ ID NO: 65869

SEQ ID NO: 65874 - DNA, 222 bp, Acinetobacter baumannii
atgcctagcctaactctcaaagcgacatcaaaaagatgcttcgagcctaaagttctaatgattctaattgagtgtctgcctgatgaacaaaggcctcctatcaaagagttattaacctcttatcctgtagaaattaaactaaatttaactccagaagtcttagaacccactgtcgaaaaaatactaaaacgattaggcagagtatttattatcagtaagtag

SEQ ID NO: 65875 - DNA, 501 bp, Acinetobacter baumannii
atgaataatagccatcttgttgctttaagaaaaaatcaaatgcgtattagaaaatcttcaagactattagttattaatgaaaatcatcaaatcctattatttcaattcactcatacaaatgatgccttagctggacaatcacattgggcaactgtaggtggaggtcttgaagaaggggaaaccttcgaacaagcagcttgccgagagctttatgaagaattgggtgtagttaggcaaaatgtaggcactcatgtggcaacacgcaattttgaaatgatgctacctagtgcagaagttgtgatttctgatgaaaggctttttattgttttcattaaaaatgaagaagtgaatacagcaaactggactgaacaagaaaagcttgtgattagtaaaagtcgttggtggacgtttgatgagctaagacaaacagatgagattgtttatccaaacaacattcctaatattcttgtagatagtttgcctgaaatttttaaatcctaa

SEQ ID NO: 65876 - DNA, 297 bp, Acinetobacter baumannii
atggacatgcgtgcaggtatggatacgaccatggctcaggtggtgagagcctttggctacatcaaaccgcattgtgcttacctgttctgtaataaacgtggccatcgcatgaaagtgttggtacatgatggactgggcatctggctgtgtgcccggcggctggaacagggcaaatttcactgggctcaagttcaccaaggtgaaaccgtggccctcagcccggaacagttacaggcactgatccaaggtttgccctggcagcgcattggacgacagcaggtggtgacgatgctttaa

SEQ ID NO: 65877 - DNA, 297 bp, Acinetobacter baumannii; identical to SEQ ID NO: 65869

SEQ ID NO: 65878 - DNA, 297 bp, Acinetobacter baumannii; identical to SEQ ID NO: 65869

SEQ ID NO: 65879 - DNA, 399 bp, Acinetobacter baumannii
atgctcatcggtatcaatcaccacagcatcacctttacgctgagggatttcaactgccacgatttctttagaaaaaaagcctttggcttgcgcgcttgcggtgcgttgttggctcaccaaggcaaactggtcctgatctgcacgattgatgttaaactgttcagcaacgttttcggcagtctggggcatagtgtctacaccatacaattctttaagtttagggttaatgaaacgccagcccatggtggtgtcttcaatcttctggctacggccaaaggcactgtcagacttacccatcacatagggcgcacggctcatgctttccacaccaccagcaattaccaagttggcttcacctgctttaatagcacgggcagcaatggcaatggcatcgagtga

SEQ ID NO: 65880 - DNA, 300 bp, Acinetobacter baumannii
atggctaaagagtttgattgtccagtaattgcattagctcaactcaaccgagcagcagaaggacataaacctgttgcaagtgacctcaaagactcaggtcaaatcgaacaagatgctgaccaaattatcatggtccacccattactcgaaaaagagacaaatgcacctacaggcgtaactgaattgatcattgctaaaaaccgtcatgggaagcgcggatctgtaaaggttcaggatcgcttagatatttgtcgtttcgtaggcatgtcatttccagtggaagagagaggtgcagcatga

SEQ ID NO: 65881 - DNA, 258 bp, Acinetobacter baumannii
atgaaaactttaaatagaacaaagaaattaaactttgatgaccagcttagcttactcgtgtttggctgtcatgcatcagcgcctttcagtgtcaaagacgtgaaggaatcagtgtttgatttcaatcgaggaaccatctacagcaatcttcaaaaatttgttgaatggaaatatttcgaacgtgttgggaaaaatcattacaaggcaactcaatacgcaaaagacatcctgaatgttaaaggggagctgaaagcatga

SEQ ID NO: 65882 - DNA, 219 bp, Acinetobacter baumannii; identical to SEQ ID NO: 65858

SEQ ID NO: 65883 - DNA, 324 bp, Acinetobacter baumannii
atgaaaccagaacagtttattcgcgatttcggggtggagaaggcgagagagttacttaacgctgattctgattttaaaacttactgcctaattgataagtctttttggggtgagtctgagggtacttgtagtttttgtgttgatcttgatggcgtcaagcgtctggtggaatcggttgatttagtagaatcatggggtggaattgatgatgtaaagctttatgacttgtctcattgcaaagacaagcctgaatcgactggatacaagttgcttcaagcaattgctgattacgaatcaatatacggaggcggggatgaatcttaa

SEQ ID NO: 65884 - DNA, 2895 bp, Acinetobacter baumannii; identical to SEQ ID NO: 45648

SEQ ID NO: 65885 - DNA, 2184 bp, Acinetobacter baumannii
atgcaaaggactacgaaacactttcaaattaatgcattagcacttgctatagcaatgagcacaatttcagcgcatgcagagactgatcagcagacttcggaatatggaactcttcctaccattaaagtaaaagctggaagtggccaagaaaatgaaaaaagttatatagcagggaaaacagatacagcggttccactgggtttatctgttcgtgaggttccacaatctgtttctgtcattactcaacagcgtttacaagaccagcaattgtcaactttagttgaggtcgccgaaaatgttacaggggtaagtgtcaaccgttatgaaaccaaccgaggtggaatctattcacgtggttttgtagtagataactatattattgatggtattcccaccacatatagcttgccttggtcttcaggtgaaattttctcaagtatggccttatatgatcatattgatgtagttcgaggggcaacaggtcttacatttggtgctggaaatccatctgctgcaattaatatggttcgtaagcgtgctacgagtacagagccaacagctaacgtagaagtgagtgcaggtagttgggataattaccgtgttatgggcgatattgccaactcccttaatcaatcaggaacagtacgtggacgagcagtggcccaatatgaacaaggcgacagctataccgacttgttgtctaaagaaaagctatctttattgttaagtgctgaagcagatttatctgaaaatacccttttatcgggtggggtaacttatcaggaagatgatccgcgtggaccaatgtggggaggtttacctgtctggtttagtgatggcacaaaaacgaactggtctaaaaatatcactacaagtgctgactggacacgctggaatgttaaatataccaacctatttgcagatttaactcataaatttaatgacaactggtcagctaaactgtcttattctcatggtaagcgtgatgctaattctaagcttttatatgtttcaggtagtgtagataaaaatactggtctagggctatctccttatgcatcagcgtatgaccttgaggtagagcaagataatgcttctttgcagctcaatggtagttttgatttgtggggcttagagcaaaaggttgttttgggttatcaatattccaatcaggactttacagcgtatgctcgttcaactgatacaaaaatggaaattggcaatttctttgaatggaacggcagcatgcctgagccagtgtggaatgcacctacactcaatgaaaaatataatattgaacaaaatgcactattcgctgcgacttatttaaatccgattgagcctctaaaatttattttaggtgggcgttttacaaattatgaaaagaatatatatggtcgtagttcatccataaaatatgaccacgaatttgttccttatgcaggtattatctatgatttcaatgatgtctatactgcatatgcaagttataccagtatttttcagccccaagataaaaaagactttgatggtaactatttagacccggttgaaggaaacagtactgaagtaggcctaaaatccgcatggtttgatggacgtttgaatggtactttagcactttatcatattaagcaagataatttagctcaggaagcaggggacgtcactcgtaacggggtaaaagaaatctattatcgggcagcaaaaggtgcgacgagtgaaggttttgaagttgaagtaagtggacaaatcacaccagactggaatattacagcaggttatagccagttctctgccaaagatacaaatgatgtcgatgttaatacccaacttcctcgcaagatgattcagacatttaccacctataaattatcgggcaaattagaaaacataaccgtgggtggcggggtgaattggcaaagcagtacctatattaatgccgaaaatcccaaagaagttattgagaaagtcgagcaaggagattatgcacttgtaaaccttatggctcgttatcaaattacaaaagatttttcggctcagcttaatattaataacgtatttgataaaaaatattacggtgttttcccggcgtatggccaaattactttaggtgcccctcgaaatgcggcgctaacactaggcagagtaaaacttgaagtgcgacataaaccacctaattaa

SEQ ID NO: 65886 - DNA, 171 bp, Acinetobacter baumannii; identical to SEQ ID NO: 51532

SEQ ID NO: 65887 - DNA, 285 bp, Acinetobacter baumannii
atggtgtctgatatttataaagaaggtatcaaatataaaaaatgcggtgtcatattaacagggttagaacctaaagttggtcatacctatgacctattaaccgatttcgaagtcatagagaagaaagaacaattgatgaaagcactagataacgtgcacaacaaatttggaaagaaaaaactaggcgttggtccttgttatatacctggtcgaacctggtcgatgtcgagagataaactcactaaaaacccattcatgtgggatcagctaacaattgttaagtaa

SEQ ID NO: 65888 - DNA, 735 bp, Acinetobacter baumannii
ttgatcagtttaggtaaagatgttgttttcattgcacacgcatcagaagatcaaaacggtgatcaaattatttaccgcccagatctaggtggtaaaaaccgtaacgagctttaccgtatcgcagatgtcatgggttatctaacaactgttactactggtgaaggtaaaaatgcccgcgttattaatttcaaaccttcgcctacacatcatgcgaaaaactcaggtgctttaggcggtgaaaccggtgaagtatgggtacctgatcttaaagcacaccctactttcttggctgacctgattactcaagctaaagatcacattaacaccttaacgcctgcacaacttgcagcagctaaagcccaagaagagctagaaaactggaaacaaagctgtgaggaagcagagcatgcaggtgaccttaatcaattaactgagtcgcttgataaagaacacatgtattaccagaacatgcgccaagcaatgttaatgagagctaaagcattgaattgcacgtttgataagcaacgtggcacttggattagtccaccagaatttaacggtatctcagatcaacaaagagatgaacttcaaaacttcatagctgaacgcggcctagacgtgaaaacagtttgtgaacacttcggcatagatgcccttatccaaattgaagcagcaaaactaccagcagttaaacaagacattgaaacattagctaaaacggggatgacagcatga

SEQ ID NO: 65889 - DNA, 726 bp, Acinetobacter baumannii
atggataactacaaaatcattaatactcacacaaatgagattatcaaggcccttaatgaccttggctatgtatggacaccaaagaagtttgatgaacaagattgcttgctaaaagcacattggattctagctaaagagaaaggtgaaattgcatattcaagtggcactcatattgattctccacttgtatttaaagaactcacccttcctcagcttcgagaccttgttgttttgcatcggaatgatgtgaaggatgcgaatgtaagtgatgggacgcactataacttatatcagacaagtgataaccgtttatttttctatgctgaatcagcaaatgaatgggtaatttctgacttaagtggaaatgcagaaacactagcaaagttaaaaccaattacccaagacccagccttgattagcggtgcggaggcgttgcgatatatagcatgtggacgccttgttcaatggatcagtaaagactttcctaattggacagacttagatatcacaaacattaatgctaagaacttcattgatgaagagcgcattaaggaaagtggttttaagtatcgcctcaaaccaaccacactaaccgtaaacgctgagcttcctaaaccaaacaaagaaactcaacacaattcattggtgtatgcagtcacttacgagttcaaaactcgcgaagaacgcaatgcatttgcagacaagctgagaggtactaactcatga

SEQ ID NO: 65890 - DNA, 486 bp, Acinetobacter baumannii
atggaaccagcaacattcccaatcaatagttattcgggaattgttcaggtaattaactatctgaacaataaccactccaaagcagccgcagaaggcaaacctttagtcgttagaatcaatcagaaagaagacgatagaagcgccgcacaaaaccgtttgtactggatgtggcttaatcaatgggccaagaagcagggaacggataaagactacgagcatctgttctttaagaagaacttcttagcaaagatctatgatcgtgatgacgttggccaatataagaaaacattcaaggctgttagagagctgaaggattctaaacatccactctaccaagatgtggcaaatggcctttgtgagctaatgagcactacagatgcaagtacagcacagttcactgaatacctgaacgacattcacgccttctgcaacaaacaagggtgttatttggaaacgcctgatgatcttaagtatgtgcttgaataa

SEQ ID NO: 65891 - DNA, 189 bp, Acinetobacter baumannii
atgacaatgaatcctagagaagctgaagctgtaattgaatgtgaaaaaattaaagggaaggcagcaattgctgtggcaatattgaatcacgcttgttctgggacgtcggggttcaacggtataagtgatgaaactaaagaagacttaattaaatttataactgatgtccagaaaacattagatgaataa

SEQ ID NO: 65892 - DNA, 768 bp, Acinetobacter baumannii
atgaatcaaaaatatcaaattaaactttcacaacttataaaaggctgttttatatatgcaattgcgaattatgctttagcacagcctatagttgtagaaggtgtagtgccaaatgaagcaagtaaacaggctattttaatgaaaatgcagtctgtttatggtgcagatcaggttgtcgataaaatacaagttcgaccagttgccgctccaaatggatggagtgactctgtcacacgagtgattacacctgatcttaaaaaagtttctcagggtaagttaagtgttaatggaacccgatttgaactgaccgggaaaatgctaaatccgacagaaatacagccaaccattcagtcttttcagagtttggtacagcctccatatcaattattttcccagctttctgtaaatcaggctgagcagaagattattgatgatgctttaaaaaatcgaattattgaatttgaatctggtagtgcagtattaactgaagctgggcaaaaaattcttgatgaaatggctgtggctttaaataaagtgggcgggaaaaaagtcaaaattgtggggcataccgatagttctggtgatgcgaccaaaaacttaaaactcagccaagatcgagctttagcagttaaaaattatttaattagtaagaatattcctgctgatcatttatctaccgaaggtttaggttcatctaagcctgtagcggacaatacttctgcggaaggtaggaagaaaaaccgccgaattgagttcaccgttttatag

SEQ ID NO: 65893 - DNA, 483 bp, Acinetobacter baumannii
atgaatgagtgtaataaagctgatcatcagagaaatccattagaactatttgaaatatttttcacttcaattacacctgtaatgactccaataggtattcgaagtcaaggaatgcaggccatacattatttctggaaacaacggtttctaaatgtatttcggggaataccagaggataaagggcttgatcaattttcagatttaccaattctctggttgtctgcatggaaacatcaacaagagaaagtggaggagctagaaaaacacatagttgatttggagcagcagatgctaagggattcagcattagcaaccaaagcgcagatagagcgtaacgagctgcaaaccatatacacccaacaaggcataaacatgttgaagatgcaaaagcgggtggatgctttaagcaaaagactttcagaagcaacggggttggttgttgaagatttagagcaagcgctcaagggggtgcatagtgactga

SEQ ID NO: 65894 - DNA, 369 bp, Acinetobacter baumannii
atgaaagcaggcgaatttttaaaagttcatggactgaaattggccaaagaagttgttgagggggcgcctaattcagctactcattatgagcttacggtcgatgggagtgcttacttcaagtatgaaaactttgactggtttagcattgaaggcggcgagcaaattagaacatacatggaaaatcatgagacatgtcacttgatcccactgaatgaccttaatcgtctggtggagtcggttgatttagtaaatagcttaggtggattaaaagcagcacgttcagaagctcataaagattgttttgtatataaccagccattgctagcagctattgcagcatacgaatcaatatacggaggcggtgaatga

SEQ ID NO: 65895 - DNA, 1020 bp, Acinetobacter baumannii
atgaatgatttggctcttttcgcaggcgctggtggaggaatactcgcatctcatctcttgggatggagaacagtgtgcgcagttgaacgtgatgcctacgcagcacaagttttggcgcaacgacagaatgatggaattctcgaagctttcccaatttggtctgacattacaacttttgacggaaaaccatggcaaggaattgttgacgttatatctggcggctttccgtgccaagacatttcatccgcgggaaagggggcgggtatcgaaggtgaacgttccgggctttggtcagaaatggcacgaattatcggtgaagtacgacctagctacgtgttcgtggaaaactcaccaatgcttgtttccagaggacttacacgagtcatcagtgaccttgccaaaatggggtatgacgcgcaatgggcacgtttttcagcatctaactttggagcgccccatatccgtgaccgaatctggattgttgcctacgccagatgccagcgaagggaagcggggaccagccaaacattacgatccaaaagcgaaatcccaaagtggacgaacgctaacaacatgggtagcaacatttccaacacccaaagcttcagatgccaaaagaatggattgcccttcggagcgaaacaggaaaagtccatgtttagaatcaacagtaaagatgtggccaacaccaaaagcatccgattggaacaaacgagggaatgtaagtcctcatccgagaaatggcttgccgggtgcggtcatgaactttccgacaccaactgcgagcgatgcaaacaagtggagcaacgagtctttagccgaacgcaaagagaagggtcgtcagatccgtctcaatacagcagtttcgccagagggtgggaatggtgggcgactgaacccgaactgggtcgagtggctgatggggtggccaatcgggtggaccgacttaaagccattggaaatggacaagtttcaatcgtggcgaaaagcgcatttgaatttttaggggaagatctatga

SEQ ID NO: 65896 - DNA, 501 bp, Acinetobacter baumannii
atgcaagagatgacattaagccgagatgcacaaatagctctctggcaaatgataaacaaaactcccaattgcacagctaaggaaattgctcaggctataggggattcacataacactgtttgcaattacggcaaccagaacatgccaagttatttgcctagcatgaaaaagcttgaagcaatgatcttctttactcaaaaccctgcgttactcaaagtttgggcacatgagctgggctttgctttggttccagtcgcatgtggcagttcaaaacatcatgagttatctatttttgaagcaatgatgcagcacaacattaaaaacggtaaagcaaaccgtgtcgtatatgacgcatatgaagacggaattattacaccgttggaatatgaagaaattcatcaactgactcagaacttaattgaactcatcacagcagttgatcaagcagcattaaagcaaatgaagaaatgcacagcacagttaggaaatgaaaaagcctga

SEQ ID NO: 65897 - DNA, 243 bp, Acinetobacter baumannii
atgaatccaattcaattagcagtcgaagctgtaggagggcgaaccaatgcatctcttttacttggtatttcctataacgctgtaagaaagatggaagagaaaggggtattacctcgaacagattacacagaggaaacttcatattccaaaattctagctgataacagcaatggaaaaattactaaggaatggttgcttgataaagccaaccctaaacatcttcagacaaataaaccttcctaa

SEQ ID NO: 65898 - DNA, 747 bp, Acinetobacter baumannii
atgattgctatgagtacaatggtcgagcgcattcaggaatcgctgaaaaaaaagaagttgtcatggtcaaaagccgcaacttccattggtttatcgcctcaagctccagctaagtggaaaaaaggccaaataggtaaagagactctggataagcttgcagcattacttgaagttgatgcgggttggcttttgaatggagggaatccaacaaaattaaatcacttaaacattgatgatttcatggccaaacatgggttaaataaaaaagaagatgcatcttttgatactgaagacattcttgaacctgatgtggttcagtttgaaatagcaaatggatacatatgggtagatgtagtggaagcaagtttttcgtgcggtactggggaatcgattgaatttcattttgatgtaattaatggaaaataccctttcccgccatctttttttcagaagaagcaagttgatccttcatgctttcgtttgattaaagcaaaaggcgatagtatggaagaatatatctataacgatgatttagtaggaattgatatttctcaaactaatattattgatggtgaaatctatgcagtctattttgaaggagaaggcatgattaaaaaaatctttaaggaagaaggaggtacgttgatacttcatagtttaaatgagaaatatcgagatcggaaagttacagaacaaaatggcgtgaatttcaaagtcatgggtcgtcaagtttggcgcgcaggttaa

SEQ ID NO: 65899 - DNA, 219 bp, Acinetobacter baumannii
atgaataattcagaactccctataaacaagttaatttcaaagattaatgaagctgcttcgaaaaatgaaccgcttaatcttacaaaagaagatgttcagatcttgtcaaagagtgttggcgatagcttctttgtgcctgtcttaactaatgagcaagttgttgaattatctaaacaaggtaaattgggaagcccaataataaccactaaaacagaataa

SEQ ID NO: 65900 - DNA, 783 bp, Acinetobacter baumannii
atgagtaatcctaaaactgtttcagttgatggtattaaagtattaattggcatcttccttaaccatacccaatatatcaatgtggtggaagatgcatctaatattatttgccaattaatagataagcataaagatacattaattaaagaaaataaagatggaacaataaactttaatttaccttatgacaaaatagctgatgaaatttataatcataaacagccaattttttttgattctttagatgtttttgttaatacagtttactcctatattgaaactaaacatgattcaaaaatactaatttcttatcgaaaatttacaagacatattctattagctgttcgtcaaaaaaactttattaatgaagtaactaaagatgcaaaagatgcagcaaatttggcgtctaaagttgctaatgatgcctctgttttggcgattaataccgaaagtgaaataaaaaactctgttgtaaactatattactatcttaggtatttttgccactattatatttgcattatttggtggagtaaatttggttagtgctattaataatcttctagcttctgagcatagaccaagattaactaccattatgttcctgatgagcgctttggttttaactatatcaacattattagttttacttatgacttggcttaatgaagttaaaggattaggggaagcaaagtggaaaaacaaaatgtatctaaaaatatattttggaataataggggtttgcctacttattatgattttatccgcttgccgtttaatgtaa

SEQ ID NO: 65901 - DNA, 531 bp, Acinetobacter baumannii
atgaataataatttagtggcgatggatttcgcaaactatctaatttggtctgcaaaagaaaaatttaataaaggtattacaaacctgcaattacagaaatttttatattttgcgtatgtgaaataccttattagaaataatgaaaaattatttaatgatcctattgaaaaatggcaatatggtcctgttgttccttctgtatatcattcatttaaggattatggtttttttgaaataaatgaacctaagcaagagtttgatgtaaattttattgatgggaaattacatttaaatgagaaaaagtttgatccaagtgtaattgatagtgatcataaactttctagcattttaaatgatgttcttgtaaagtggattaatcttcctgcttttaaaatggttgaagaaacacataaagaaccaatgtggaaaaactatcaaacacaaattatgaatggagaaagaggactgcaatatactgatgatgagattaaaaaattctttttaaaaaataacagtgaccttccattttaa

SEQ ID NO: 65902 - DNA, 246 bp, Acinetobacter baumannii
atgagattatcaccattttctacaccaatgctttggaagatttttattaaagcaatcgccactttaattgtttcatcatttttatctaatgttgttggtgctttacctgtaataccacttgctaaatccaacactcttaaatatatcggattgatctctttagacttaccattaacggcagtaaatttcccaatcgtatcaagattaacatttcctaaaaaaacctttttattatctttactttga

SEQ ID NO: 65903 - DNA, 531 bp, Acinetobacter baumannii
atgacacaaactattgatttaagtaatttagatcgacatattcagcaatctttaaatgggataaggcttttatatgacaatcaatttgacgctcaagcaaaatattgtacttatattttaattgatcagctcgcttggctaattagtggttccgaaagtcaagttaatgtttattttaaatcttgggtgaaaaagtattttatcaagtattacccccaaataacgcctgaagagatatgggcatcaagaaatggaatgcttcataatcattcatctatttcgcgtgacatcgtcaatcagaaagtttctagacaattattttttttagataatttgaaacatcaagaggatataaatccagaatttaattatccaagtttttttgtcgttaatacaagccgttttattttatatgctcttctaggtgcagttaatgattttggaaatgatcttcggtctggaaatgtaccagatatagaggatgtaaaagataagcttggaaagttattagctgaagtaaaaccaaattaa

SEQ ID NO: 65904 - DNA, 546 bp, Acinetobacter baumannii; identical to SEQ ID NO: 53566

SEQ ID NO: 65905 - DNA, 138 bp, Acinetobacter baumannii
atgttacgtgaacatcaaatgcataaaaagattattgaaaaaatacctaatttaaaactgtgggaaagtgaattattttataaacttaaaattcatatcgaaaagcaatcatcctacaaaaaactaccaacatcttaa

SEQ ID NO: 65906 - DNA, 294 bp, Acinetobacter baumannii
atgtcacatgtacagtctgaaattgaaagggcgattatcgctctaattatagaaaaaatgaacaaatatagtcagtttttctatacaactcataattatgatattttagatatgaatctgcctatacatagttatctttttataaaaagagatcatgatcacaactcaatttttattaaagctgaaaatcattttaataaaaatgatcgatcaattattaattatgtaaaaaatgatgttttatgtactttgccagacacatatttaatagatgaactcatgatggaagattaa

SEQ ID NO: 65907 - DNA, 180 bp, Acinetobacter baumannii; identical to SEQ ID NO: 51115

SEQ ID NO: 65908 - DNA, 1275 bp, Acinetobacter baumannii
ttgcatgatacaactggtaaacaccagcgagtactcattaatattggtcaaccaacaaagccagccaagttgagacagacggaagggcgtatctatcgaaccggacaagcatcaaatgctattcagagatacttgactactggtactgcatgggaacgggctgcatttgcagacacgattgctggacgcgcagaaacagtagataactttgcaaaaggtgctgatgctgtagtaagtatcaaagaagcgttaattcaggcttatgaagaagctaaatatgaagagccaagtctaaatgatggtattggcggtaaagcatatgatgaagaaaatgcccgtattgctaagttaaccccatttgatcaagcactaacattctactatgccaaaggcaaacgttctgaaagtcgtaataaccgcgaaggtaaggaatggtatgcaacgcctgaacctctaggattcaaaatgattgaatgggcaggggtacacactggcgattctgtgcttgagcctagtgctggtgatggagctattggtcgttttgttccgcaggatgtagagttgacaatgattgaaccgactgagtctttagctagtcgtgctcaaatggcaaatacaggtgctaaagtaattgttgatacattcgaatctttagaatcattaaataagtatcatgcgattgtgatgaatccgccatttggtcatgctggcactttggcaattcaacatatcaagaaggcttttggtcatctttatgatggtggtcggattgtggccttggtaccacgtggttcgatggattctaaagtggacgaatttattgatagtacacctggtgcaattctgacagctgaaatctggttgcctcaatcgacctttaaaaatgctggtaccgccgtttcaactcgtatcatcattattgaaaaacatgcaggctctaatgatgttccaaaaacacgagaattagacttcacgcaccttacaagtgtagaggatctattttcagaaattcgtgatatcgcaatgcctcctagaaaactacgtattgatgagcagcttgctaagtacgaactttatgtcagaactgaacgtagtaagtatgttttcaatggtgacggcgttgataaacctcagatcaagaatatcatgctcaaattctggggttcggaagtgaatgagtttgatgaaattgttatgccttataataagtctgcagaaatcatcaagaagattgatgaatttgagcaagagaatggcactagtctagcagcttag

SEQ ID NO: 65909 - DNA, 222 bp, Acinetobacter baumannii
atggctatcattcgcaaacaaaatgaaattgatgtatatgcaaaccttgaagaaaagtgtgtgacaatatgcgaaactgaaggacattttgatcaacatggtggcgggtttgaggattcctttatcaatattgatgtagctcatcttgatactgttattgctgctcttcaggcttgcaagaaagaaattttggaatctggaactcagaaaagcgaaaactaa

SEQ ID NO: 65910 - DNA, 357 bp, Acinetobacter baumannii
atgacagatttgaataaggaaagagaggcttttgaaagattctatgccaaagaatgcaattgcagttatgaagatttaaagcgccaacttgatcgtcaagaggcactaacaggacacagatatttaccaactagtccttgtcatgaagcttggttgatttgggatgccgcatggaatgacgccagtgctcaggcggtgccagatgggtatgttttggttcctaaagagattccagatagcgttgttagttatttagaaaatagtggattccattggggcgatgggactcgtgatcattacacgcctatttattctttgatggttgaagtggcaagcgaatcgggagctgagggatga

SEQ ID NO: 65911 - DNA, 786 bp, Acinetobacter baumannii; identical to SEQ ID NO: 16905

SEQ ID NO: 65912 - DNA, 642 bp, Acinetobacter baumannii
atggagcagatcagaccatttccaccgactgattttattgatcaagcagatgaagaagaagcaattagactaacaccagcaccagatctaaaaaaatgggttgttgctaattacttaactattggtggacctctttataaccccgatcatgatcacataggtgaactgcttcacgataatgaagaatttttagcattcgcgtgggcctcttctgcatataaaagcaagcaagctatggtgttaggccagtgcgaaaaagtcatgttcaatgttggtggctggcgtaaagctcgacaagagcaacagatgcgtgattggtttggttttgtacctacttatttaataactgtcgacgcttctttctgtgagcgtgcaaacgatacagagttctgttacttacttgaacatgagctttaccacattggagtgatgagagacgaggacggagaaattgtttatagcgatagttctggtcttcctaagcactatcttgctggtcatgacgttgaagagtttattggcgtagttaaacgttatggaccaagcaaaaatgttaagcgacttattgaagtcgcaaaaaatccgccgtttgtttcgaatcttgatatttcaaaatgctgcggcaactgtgtaatcaattga

SEQ ID NO: 65913 - DNA, 1179 bp, Acinetobacter baumannii; identical to SEQ ID NO: 46091

SEQ ID NO: 65914 - DNA, 171 bp, Acinetobacter baumannii
atgaatattttttatttaatcacaggtttagctattttattaggatggcatatcctatatatacttaaatttcagaacatttttgttactgtgcttgctggattacttgttttatcatttatgatagttcaaccactccttcctcaagtatatttgttacatattaattaa

SEQ ID NO: 65915 - DNA, 198 bp, Acinetobacter baumannii
atgttttttaaatttaacctaattacttatatctttttatctatcggtattttcttattttgtattggtttatattggtacaagagcaagaaatacaaagacgacatgtgggttcaaaatgtcggtcaaatcttctggcttgctggatgttttattattatcaatagtattgctttcagcgtaaaattcattcactag

SEQ ID NO: 65916 - DNA, 225 bp, Acinetobacter baumannii
atgaacaatgactcatcaaatgttaatgtgttaagtaaaaaaatacaattcggtattattatgtttgctttatctttaattttgcagatactgaatcaagtattttttagaaatagtgataatgatatttattcaaaactatcaatattattcttattttttactgtgtcatcagtagttattttagtatacttagttaatgaatatagaaagagcaacaaataa

SEQ ID NO: 65917 - DNA, 315 bp, Acinetobacter baumannii
atgtatattaatctagtattactttcagattacgaaagatgctctgcccttattaaaagagaaataaccgaagatatgtataaaaaggtaacttatctaaaagaaaaatataatctccctttaaaaaaaccactcgaaaagataatgaaagaaagaggttttatatcatattttgactacgaatttttatttatagaacacttttacaatagattcaaagctatggaattagaaatgatacatgattcaaagattttagaagcaagagaacgtgtcggttcagctaaaaatatagctaatgataataaggagtaa

SEQ ID NO: 65918 - DNA, 669 bp, Acinetobacter baumannii
atgtgtaatgtcggatcaggtcgtccttggagtccggcaacgccagcaggctttcccgctcggcggcggacaggatggaacgacgtggcatatttactgatccgttctcaagtattgatacagggtttcgcgactgattccgaattcacgagcaagcttggtcttttgctcgccagcctcgacacgttggcgcagttcggcaatacgctcagacgacagggatttcttcctgccacggtaagccccgcgttgcttggcgagcgcaataccctcgcgctgacgctcgcggatcagggcgcgctcgaactcggcgaacgcgcccatcaccgagagcatcaggttcgccatcggagagtcttcgccagtaaaactgaggtgttccttgacgaattcgatatgcacgccgcgttgtgtcagcgtttgcacgatccggcgcaaatcatcgagattgcgcgccaggcgatccatgctatgcaccaccacggtgtcgccggtgcgggcgaagcttatcagcgcttccagttgcggacgcttgacatccttgccggatgccttgtcgctaaaagcgcgatcaaccttgacgccttccagttgccgttccgggttctggtcgaaggggcactgttgcaaatagtcggtggtgataaacttatcatccccttttgctga

SEQ ID NO: 65919 - DNA, 405 bp, Acinetobacter baumannii
atgcaacgaacatttataatcttactttccagcctaatactcggttgtacagatgatatcgttacaaccaaatttacagatttgcggcatgcgaaagttgaacatgcttttgaacgcggttggttacctccaattttaccgcccagtacaaaaaatattgttgaaacaaatgatctagacttgaataaaggtaacggctcttttactttttcaccaacagacctaaagtattttagcgatcaaggtgcaattccaattaaaataagtactgtaaatcatggtacaaaaaaggaaatgcaggatcaggggtttcaaattttcgtatatgctaaagattcatcactttggtatatagcagttcatccagaagggaaaggaaactattggattgagttaataagatag

SEQ ID NO: 65920 - DNA, 600 bp, Acinetobacter baumannii
atgatcgcaacttcaattgagcaaatacctaaaattgtatgttttgacgatagtccacgtgggcgtttattgctgggtgctgcttatctattttataaacaaggttatgacaaaaccacagttcgccaattgggtgaatttattggtatccagtcaggtagtcttttccatcatttcaaaagcaaagatgacattttagcgactgtcatggaacaaaccattatttataactttgcccgcttaaaagaagcagccgaacgttcaaatgagccagaacaacaattacgtgatttaatcaaagctgaactgatttcgattactggggatacaggtgcagcaatggccgtactcgttcatgaatggtttgccctatctaaagaaaaacaagattatcttttaaagatgcgtaatgaatatgagcaagtttggctcagtgtgattgaaaaattacgtgcccaaggcaaggttaagcatgatgcctttatctggcgacgtttggttggtggttctatttcctggtcggtcacatggtataacccagatggtaaagtcaaagtggatgaactgactgaaatggtttgggaaatggcactaaaataa

SEQ ID NO: 65921 - DNA, 2895 bp, Acinetobacter baumannii; identical to SEQ ID NO: 45648

SEQ ID NO: 65922 - DNA, 1323 bp, Acinetobacter baumannii
atgtcattgattagaacacgtaaaaaaattgtttcctctgcaatcgcctcatcgctctcgatgatagcaacaactgcgatggcgcaagaagcagtttcgcaattaccaactatccatactaaagcgactcaagaagaatctttaaaggttgatcaatcagcaaactctaaatttgttgctccccttctagatactcctaaatcagtatcagttatctcaaaacaacttatagaagataccaaagtaacaactttagcagatgcattgcgtactgttcctggcattactttaggtgcaggtgaaggcggtaatccgaatggtgatcgacctttcatccgtggttatagttcagaaagctctatgtatattgatggtatccgcaactctacctcacaaaaccgtgaaatgtttgcggtcgagcaagtagaggtaaccaaaggttctgcatcagcaatgggtggtgcaggttcagttggtggcagcatcaatatgatttccaaggtagctaaaaagggtgattttctagaaggctcagtagccgctggtactgataactaccaacgtatcactttagatggtaataaagactttggaaatggcattgcagcacgtgtagctgttttgggacatcaaaatgaaaaggctgtccaaagtaatggggctgaatataaacgtgttggtattgcaccaagtattacttttggcttagatacaccgacacgtgcaactttgagctactattatttacaaactgatgataaacctgattcaggtattccttattgggattcatctcttggaaaagctcaaggtaaaccggctgaagtcaaacaaggtacatattacggctggaaagatcgagattttcaaaagcaagaaaatcacatcggtacaattaaattagaacacgaccttaccgacaatataactattactaatacggccatgtatgccaaatcaaaaaatgattatgtctggacaaacccagatgactcaaaaggtaatgttggcaaaggtcttgtttggcatcgtttgaactcagctattacagatagtgagacatttaccgatcaattagcacttacaggtaaatttgatactggcttcttaaagcacagatttaatgtaggagcagagtacagcaaacaaaaaactgataaaggcggctataacattattgatgccaaaggtaatgtttctagtactggcttctatagcgattgttcagacttatcaacaaattggtgtacttcgtcaatggtccaactcaaaagccatttgttgaccgtttacaagcacgcccagactttgatgcaactgtag

SEQ ID NO: 65923 - DNA, 705 bp, Acinetobacter baumannii; identical to SEQ ID NO: 63548

SEQ ID NO: 65924 - DNA, 237 bp, Acinetobacter baumannii; identical to SEQ ID NO: 45926

SEQ ID NO: 65925 - DNA, 384 bp, Acinetobacter baumannii
ttgaaattttttgatgaatcgccagttgcaaaaaattttttaaaagaatgtattaagaatgatcgtgtagttctaacagaatgttacgatgtcagaatttcaaaattagtaagcacgataacttcttttaagaatgaagagttagattttataactgatattcattgtagtattgataataatgaacgaattcgttttttaactatttttgagggatactgttttgaatttttttactatacggattcatctcagtccgtttctagtttaggagttcttaagaaaaataaacgaatacttagaatgccatatattgatgttttttcaattcctgagtttcgaaaaagtctgttagatatgcttgaggcgcaaaatagtaactaa

SEQ ID NO: 65926 - DNA, 1443 bp, Acinetobacter baumannii; identical to SEQ ID NO: 51382

SEQ ID NO: 65927 - DNA, 5793 bp, Acinetobacter baumannii
gtggcattaggaccggatgcaatcgatggcacagtggtgaatgttaacggtactaactacaccgtgacagcagctgaccttgcaaacggctatatcacagcagcgattcctgtgacaggcgaaggccctgtagcgatccatgctgaggctgtagatgcgcaaggtaacgtagatgttgctgacgcagatgtaacagtaacactcgatgtcactccacctgatatcactacaacagtattagcaattgaccctgttaccgcagacaatattcttgatgcgacagaagctggtggaacagtaactttaactggtacattgaccaacgttcctgcagatgcaacaaccacaggtgtagtggtgactataaatggtaatgactacacagcaacagtagatgctatagcgggtacttggacagttaatgttgcgggcaatgaccttgctctagatccagacttaactgttgatgctaaagcgactttcacagatctcgctggaaacagtagtactctacaagatacacaaacttatactcttgcaggttctatcactgcctttgacaacactgatcatgcagttcttagtccgaaaccagcgcttgttggtgatgatgtaagtctaggtagtacttcttatttagtacttacatctgtagcaggcttagaccttcaacttggtggtaattctctaggatttactgtcgatgctggccatgaaggtgatgttactttccaatatagtggcttaatcgacgcagctgtactttctgattacaagttagtagttcagaagttcaatacaacaactaaccaatgggaatctatacatggtgatgctaattcatcattaattagcttgcacttgttaggtattggtacaggaaatgttcctggtgcagtccttgatggtttagatgcgggtcaataccgtgccttcttagcctacgacggactgttaggattgggcgtgttaggcactctttctgccactatggatgattatgatttgtctgtagcaggtggatatgaaattggtaatgctgaaggtaacgtgattactgatccagatccaacaacaggtcaagtcgatcaggtaactgcaaatacttatgtttcatcagtgaatggtcatccgattgatgctgatggagagacatttgcaggtacttacggaacaattactttctatcaagatggtagttatgtgtatgtaccaaatgcagatggttctggtgtaggtcaaactgatgtattcacatatacgttaactgactcagtaactggagcaacaggtcaagctaatcttaatatcgtgtttgattcgattcgtgcagcggataaccttgttgaggttgaactcaatccacaatatcaattggtgggtacagagactgattcagcattctatggcgttctattgaatgttggaaatattgttgacctacaactcctcacagtagatacggttgactttactatcggtgctggtcaggaaggggttgcaacatttaacttcaatagcttgattggtgcatctgctttaggtgactacaatgttgtgttgcaaaaatacaatgatgtgacaggacaatgggaagcagtgaatggtacaggtgatcgttcattactgaacttgaccttgcttggtaatacgccaactgcgcaaataggcgggcttacagagggtgaatatagagcattcttatcattcaatggcttggtaggcggagcagtagctgtaacattaaacggcagtgtagatgtctataacccagcggttattactggttacgatgtcgtagcagctcatggcaacctaatctctgatccaaatacgaatggtgatgttgatatcgctacacctaacagtattatcagtgaagtcaatggtgttgcagtaagtgcatctccaactgagattattggtactcacggtactttactcatctatgcaaatggtgattatacctatacgccaaatgctgatagtgctggattaggtcaggttgatcaatttacttataccttgttagacccagcttctaatataacttcacaagctacgttctatgtacatctagatagtaaagttgtggatatgaattgggatgcagctgatccatcacaacctgctactgtaacgattacagcagtggatgacgctgtaaatgctgcaattgctgctgagcctcatctcatcgaagatgacagagcattgggtagtgcaacttatcttgcattgttatcgttggctggcatcaacctacaagctcctttaccattcgtgaatagtactgtggagttcaatgtaggtgctggtgaaactggaaccgcaacctttaaatacagcagtttaattaatgaaggagcactcggtgattaccaacttgtagtacagaaattcaatactgctacaaatcgttgggaatcaattaccggtagcagtgaagcttctttactgaacttaagtgtattgggtataggtgtgaatgcgacaccgggagtggttgttgaagggcttgacgaaggtcaataccgtgcctttatgacatacaacggcctctatggtaagagtatcctaggtacattgtcaggtacgatggatgtttacgatccaaaccaaattgactttactggtttggcatctgaaggcaatgtcattactggtcttggcgtaggtacaaatgctgatgctgtaactggatacacaattgttgattcagttactgtaaacggtgtgactacgaatgttgatccaaatactggaacaattattcagggtcaatacggtacgcttcaaatattcgcgaatggtgattacatctatacgccgaataatacgaatgccaacctcggtctagtcgatcacttcacttatacgttggctgatcctttgggcggcaatataagtgcaagtctagacttcactattggcaacagtacgccagtgattgccgtagacgaccttgctgtagctgttgttaatccagaatatctgcaaattggtaacgatgttgcggtagatagctacctatatgtggcgttattaagcttaactgacaattttgacttccagttgggtggacaaggtgttgactttactttgaccgatagcaccttaaatgatgtgaccttcaattacagtgcattaatagatgcaagtctgcttgctgattatgtactcgtggttcagaaatttgatactgcaaccaatcaatgggtagctgtaaatggcactggagaagcggacttactcagtctggcagcctttggtggaaattcagtgacattggaaggtctagctgctggtcaatatagagcctatatgacttatgctggtagtggtgttggcgttagcttattaggtacattgtcagttcagaaagatgtatttgatgcgacaaatatcacaggttatagcactcaagttgcagaaggtaatgttattcatgatgtcggcttaaatggacacgcagatactgcttctggttttagcacagtaactagcgttgaatttaacggcacagcatttgctgttaatgcgacaggtgtcacaaccattgtcggtgaccacggtacattgtcaatttatgctaatggtaactacagctatcagccaaatggtgaggctgcaagccttggtcaagttgatcaatttacttacaccttgtcagatggtctaaatacatcgcaagcgaccttgtatctccatattgatagcgatgcagtcgatatgacttggaatacaagtgatccatcacaacctgctgtcatcacagttactcctgtagacgcgattgataacgttgtttctgctggtgtagatatcgttcctcaaggcgagcttggtgtagctgtaggttctgcaacttatctagcattggtgggcattacagaggacttaaatgtttccttgttaggaacaccaagtgttgcatttacaattgatgctggacacgaagctgatgtgacattcgcatatgctccagtgctttcattatcattgtttaatgactataaagttgtattacagcaaaaaggtgctgatggtgcttggcataatattgacggcggctcaagtactggcttactcaatattggtttactaggtaacggtggaattggtgttactgttccagatctaggccaaggtgaataccgtgcatttatggtttacaccggtttaggagtaggtatcctaggtacaatgagtgtagtgaaagatgactttgattacacagttgcgcctaccaatacagcggttgttgcagatggtaatgtattgactgatgacgtaactacgttaactactcaagttaccactgtgacatctgaagtagtgggtgctctaccacaaactgtcggaacagatacagttataaacggtgcatacggtacattggtgatttctacaaatggtcactacacctatacaccaaatacaactgatctgagcgcgattggtaaagtggattcattcacttatacaattcgtgatgtattaacaggggcaacagatacagcgacattacatgttcaggttggttcaccagacgtaacgatcgcatgggatgctgctaacccagcaaatgatggcgtagtacaattaactgctaatcctgatcatgtggttacaactacagacttctcaaatgctgctgatctaccagtagatgtggcgagccctgtggtttctgtaaacctcatcggttctaattcagtagtgtctgatcagtttgtagtaggagctggaactgttgctaatattgatctatcagcggtttatacagcacaacctttagcaagtgtactaccgacagtaagttatgtgatccaaagctggaatggtacagcatgggtgaatacaatttactcaggttctcaaactgctctaggaagtgtggcaactattcaagcgggtagtgttgcattccaagacactgttgagcatttagctgcaggtacctaccgcgtacaatatacgctaacaggtgtttcacttggtgcgacttcactagatacaaatgtttctacaacgacagttcatctagatacttatcgttcagattggatcagcggaaatgtgttggcaggagacaacattggtggagtagcggatacaggcatcttgtctcatgaaggagctaaactccaagtttgggataatgcacaaaatgcttatgttgatgcagttggacaaacaatcaataccggtaacggtgtattgattatgcaatcaaatggtgaatatgagtaccgtccaaatgatgtgactacaaccacacaattggcgtctactgacagtattaactataagattgtgtccgtaactggtggagttgaatctcaatcaaccttaacgattgatttaacacatactgattacaatcttctttacacaagtacttctgcgaatgacacattcacaacaggtacgggttcagatactgtgatttatcaattgttgaatggaactgctgctacagctaacaatggtgcaaatacaggtggtaacggtgtagatacttggactgacttccatgttggtaatgttgctacagacaaacaagctgatctgattgatatcagagccttgttagatggagatcaaacagatgctaatattggacaatatctgaatgtcactacaagtggtggtaacactacaattcagattgaccgtgatggattatcaggactcatcccaggtaataacttcactacattgttagtcttacaaggtgttactacaacagagactgaattacttaacaatggtcaaattctctattaa

SEQ ID NO: 65928 - DNA, 1647 bp, Acinetobacter baumannii
atgaatacgctgcctgatttaagccaactgacccatgaacaactgctggaatttaccagacagttggcgatgcagcatcagtctctggcacaatctaaacaacaactggaacaatcaaatcagcaattagatgccagagttcaacatcttgaagtcaccaatcagcaattagattctaaagttcaacatctttctattctcaatcaaaaatacgagcatgagcttgcactatttaaacagcataaattcggcagtaaaaatgaacatctaaccgcaaaacaaatccatctctgggatgaagcggttgaagaagatattgcagcggttgatctggaactggaacgactgaatgcagataaaaccaatgcagctgcacagaaagccccagtcaacaaacctaaacgtcggctgttgccagatcatctacacaccctccgtattgagcatgaacctgaatcaacacaatgcagttgtggctgtaccttgcgtcgtatcggtgaagatgtcagtgaaaaactgaatttcagaccggcacagttctataaggaacagcatgtgcgtggtaaatgggtctgtgatcagtgtgacactctgactcagcaagcgatgccagcctatgtgattgataaaggcattgcttcacctgaattgcttagccatgtgctggtgtcaaagtatgccgatcatttgcctttgtaccgtcaacgtcaaatctttctacgcgcaggtgttgatctgtctagatcaacgttatctgactggattggccgctgtggggtggaactggaacctctggccaatgccttaaaacaggtggtactgcaacagcaggtgatccatgcagatgaaacaccggtgacggtcatgcagatgggtgaaaatgagaaaaagcccaaaaaaggttatgtctgggcctatgccagcacacagtacaatccagttcaggcagtgatctatgactttcaagatagccgttctggccagcatgctgaagacttcctgaaaggctggcagggtcatttggtctgtgatgattacagtggttataaagcacgctttagatcaggtcaggtcattgaggtgggctgcatggcacatgcacgtcgtaaattccatgaactacatgtgaccaagaaaagtcaggtcgctgaacaggcattagtgctgattcagaaattatatgcgatagaagcagaattaagaaaaaagacggatggtacagcggaagaccgctgcgaataccgacaacagcatagtcaaccggtcatgcaacaactatatgaatggctcaaccaacatcaactgacggtgccatcgagttctccaaccgcccgggcgatcaattacagcctaaaacgttggactgctttaagccgctatctggatgatggcaatctacccattgacaataattggatagagaaccaaatgcgtccctgggccttggggcgtaagaactggctatttgcaggttcgctgcgcagtggtcaacgagctgccaatatcatgactttaatccagtcagcaaagctgaatggcttggatccgtatgcctatttaagtgatgtgctgaaaaggttgccaacacataaagtgcctcaaatagaagaattactacctcaccgctggaaacctgaaccccgttaa

SEQ ID NO: 65929 - DNA, 975 bp, Acinetobacter baumannii
  misc_feature (933)..(942): n is a, c, g, or t
atgatgaacgctgatattactacccgtattgagaaggatcttattggtcatcgagaaatcaacaatgaccattattacggagttcaaacattacgtgctttagaaaatttcaacttaacaaatagcaaagttggaaatttccctaatttaattaaagcattagctatggttaaactagcttgtgctgaagcaaactataatcttaaaaacttagatcaaactaaatttgaagcgattgaatacagctgtaatcagcttattcgtggtaatttccatgaccagtttccaatcgacatgatgcaaggcggggctggcacttcaaccaatatgaatgcaaatgaagtattggcaaacgttgctttagaatatatgggccattctaaaggtcaatatcaatacttgcatccaaataacgacattaatatgtcgcagtcaacaaatgacgtataccctactgcaattcgtttaggtttattacttagcctagatgagttaaatcttccatttaacaatttgattcttagcttcttgaataaatctcaagagtttgcacacattttaaaaatgggtcgtactcagttacaagacgctgtgcctatgacattaggtcaagagtttggtgcttttgcggtaactctacaaaaagaccttgagcaaattaatacgcttattccaaatgttttagcttatatgaatcttggcggtacagcgattggtacaggaattaccactgaatatagttaccgtgaactcgcgattcaagcacttggaaaaatctctggtaagaaaattaagtctgctcctgatctaatcgaagccacttctgatatgggtgactttgttcttttatctggtttattaaaacgtactgcaactaaactttcaaaaattgccaatgacttgcgtttactttcaagtggtccacgtactggnnnnnnnnnnaatttcattaataccagtacgtggaccacttga

SEQ ID NO: 65930 - DNA, 669 bp, Acinetobacter baumannii
atggctggcatattcgttactttatatacagcgcataatcatccgaattatgtcaaaaaccttatagttttaggtagcccaatcgatagctatgcttctggttatattggaaaactctaccgaaccataaacaacactattgcccgcaataaaaagcttcaggaacgtatctactcaggtttaccgaagcgtttaattcataccccgggcattttaaattccttaggctttaaaattcttgaccctaaaggctggttcgatggtcatattcaattacttaagaaccttaataatcttcagttcgtacaagaacatgccacattaagcagttttttaaacaatatgattgattatccgggaggtattaatcaggacatgttatttaatgtttggctgcaaaatccattaatacaaggttctattcagttaaaagataaaaaaatcgaattgaaaaatatcgactgttcactcttagttggagctggtcgtagtgatcaattagtgacggcagatgcagctcagccattaagtcagttaaccagtagccaagatgttacatttactcttattcctggcggtcatttaggtctaatgtcaagccaagcaagtgcgcaggaattctggccaaagctagcaacatggctgagtgagcgttcaacaaaaatctaa

SEQ ID NO: 65931 - DNA, 420 bp, Acinetobacter baumannii; identical to SEQ ID NO: 60258

SEQ ID NO: 65932 - DNA, 420 bp, Acinetobacter baumannii; identical to SEQ ID NO: 51541

SEQ ID NO: 65933 - DNA, 474 bp, Acinetobacter baumannii
ttgaaaatttcattgatttctgcaacgtcagaaaatggcgtaatcggtaatggccctgatatcccatggtcagcaaaaggtgagcagttactctttaaagcgctcacatataatcagtggctccttgttggaaggaaaacatttgactctatgggtgttcttccaaatcgaaaatatgcagtagtgtcgaggaaaggaatttcaagctcaaatgaaaatgtattagtctttccttcaatagaaatcgctttgcaagaactatcgaaaattacagatcatttatatgtctctggtggcggtcaaatctacaatagtcttattgaaaaagcagatataattcatttgtctactgttcacgttgaggttgaaggtgatatcaattttcctaaaattccagagaatttcaatttggtttttgagcagttttttttgtctaatataaattacacatatcagatttggaaaaaaggctaa

SEQ ID NO: 65934 - DNA, 864 bp, Acinetobacter baumannii
atgcgcttcattcacgcactattactggcagggatcgctcactctgcatatgcgtcggaaaaattaaccttcaagaccgatcttgagaagctagagcgcgaaaaagcagctcagatcggtgttgcgatcgtcgatccccaaggagagatcgtcgcgggccaccgaatggcgcagcgttttgcaatgtgctcaacgttcaagtttccgctagccgcgctggtctttgaaagaattgactcaggcaccgagcggggggatcgaaaactttcatatgggccggacatgatcgtcgaatggtctcctgccacggagcggtttctagcatcgggacacatgacggttctcgaggcagcgcaagctgcggtgcagcttagcgacaatggggctactaacctcttactgagagaaattggcggacctgctgcaatgacgcagtattttcgtaaaattggcgactctgtgagtcggctagaccggaaagagccggagatgggcgacaacacacctggcgacctcagagatacaactacgcctattgctatggcacgtactgtggctaaagtcctctatggcggcgcactgacgtccacctcgacccacaccattgagaggtggctgatcggaaaccaaacgggagacgcgacactacgagcgggttttcctaaagattgggttgttggagagaaaactggtacctgcgccaacggggcccggaacgacattggtttttttaaagcccaggagagagattacgctgtagcggtgtatacaacggccccgaaactatcggccgtagaacgtgacgaattagttgcctctgtcggtcaagttattacacaactcatcctgagcacggacaaatag

SEQ ID NO: 65935 - DNA, 1011 bp, Acinetobacter baumannii; identical to SEQ ID NO: 50915

SEQ ID NO: 65936 - DNA, 1722 bp, Acinetobacter baumannii
atgttcatagaaattggtgaatttttaaatcttcgtctaaaacaaatgggtatccaacatctttttggtgtacctggtgattttaacctctcatatctagaacaagttgaagcagacccacaactcgaatttattggaaattgtaatgaattaaatgctgcctatgcagcagacggttatgcacgaattaacggtttttctgccttggcaaccacttatggtgtaggtgacttaagtgctattaatggtattgccggtgcctatgcagaaaatgtacctcttattcatatctcaggtattccacctttacatgcagttcaaaagggcactctcatacatcatacgttagttgatggtaactacgacaacattatgaactgtatgaaagagttcacagttgcccaaactcgtttaactcctgcaaatgcagcttctgaaattgaccgcgtattgcgtcagtgtttccttgaacgccgtcctgtacacatccaactacctggtgatattactcacgttaaaattgaagtgtctgagcgtccgctcgacctaagctacccagctgttgaacctgaattattgcaaagtgtggtaagcaaactttgtgacattattgagaatgctcaaagtccagcgcttttaattgataatgaggcttcagtttttggtgtaacttcacttttaaatgatttatctcagaaatgctcaattccatttgcaggtatgaatactgcaaaaaatattatggatgaaggctcacctcgttacatcggaacttatgtgggtggagcaagccaaccgcatgtaaaaaatatcattgaacaatctgactgtttaattggtgttggcgcgcgctttaccgatgtaggctcagctgtatttacgcatcaaattgagaccaagaactacatcgaaattaaatcttatggcttgaatatttttggtcaggattttccgggtattgaaattggacaattacttgtcgagctaaataaaaaagttgcaccacgtaaatcgtcaatacctcttcttgaaaaacaacctcagaaagtaattgaagcgccagcccaacagaagcttagtcaagatgtgctttggaactacatttcagggttcttaaaagaagatgatgtgattattggtgaagtaggaacatcaaactctgctttatcaggtatcaaacttcctgctacagctaaatatattgcacagccgctttggggttctattggttataccttgccagctttgcttggtagtttgttagctgctcctgagcgtcgtcaaattttgtttattggtgatggttcattccagcttacggtacaagaactctctacgattatccgccatggtttaaaaccaattatttttttgttgaacaatggcggctacaccattgaacgtttaattatgggtgaaaatgctgcctataacgacgtgcaaaactggaaatacactgaaattccagcggtatttaacggtaaaaaaggccatacaacttatgtggttgagactgctggacagctgaagagcgttttagacaacgttcatcaaaatgatcaattaacctttattgaattgaaactaccagcaatggatgcaccggtgagtttgaaaaaatttgcttctgtgattgcacgttttgactatggtgatcgcggctacgaaattttaaaggagcgttcccaaccagttaaatgtaaggatgcaatctctttttaa

SEQ ID NO: 65937 - DNA, 399 bp, Acinetobacter baumannii
atggcaatgactttagagcagacaaggcaagctataatcgatcatatgcaagctttcactggtatagctcaggaacgaattcagtatccaaatgcaccaggctttaatgtgccaacaaaaggagtatggtgccgtttgactattgcaggcggcccgagttttatttcaggaatagccgataatccttgtacacgccgaaccggtaatatcttgattcaatgttttgatcgattacatacgggggagaaggctttaactgttctaagcgatgcattgcttgcacattttgaatatttctcaatcgaacatttagaatgtttgaatggtcaatccatctatgcgggtatagatgctgatttcattcagtataatgtgagcattgggtttaaggtgaattga

SEQ ID NO: 65938 - DNA, 162 bp, Acinetobacter baumannii; identical to SEQ ID NO: 46255

SEQ ID NO: 65939 - DNA, 1059 bp, Acinetobacter baumannii
atgataggaattgatttattttcaggagctggaggattatctttaggggctatctatgctggtgttaatgtaaaatatgctgttgagctagataagtatgctgcaataacatgttctcgtaatcatttagatacaaaagtcttgaatgaagatataagattgatttctgcatcaaattttgaattaattgatgtggctaaaactgatcttatattatttggagggccaccttgtcagggtttttctacttctaatcaaaaaaatagaaataaagataattctaaaaactggttgtttaaagaatatttaaggatagctagagaattggagcctaattggattattattgaaaatgttaaagggctactcgagacagaaaatagattgttttacaatgcaataatttctgaattaaattatttgggttatacaataagtacgttgctgctaaatgcttccgattatggcatcccacaaaatagaaatagaatatttattattggctcaaaaaaagggaaaattgtaaaaaaacctcaaaaaaatttaaaatatataaatgttaaagaagctttatgggatttaccagatatcgataatggacataatatttctgaaatgtcttatcaatgtgaacctcattcagaatatgctactttaatgcgtacgcatacaaatgagactgtttgcaataatttagttactagaaactcttctttaatccttgagcgctataagtacattccacaaggtggaaattgggaaaatattccagaaaatttaatgacaaattatgcagatagatcaagatgtcatacaggaatttatagaagattagaagagtcaaaaccggcggtaacaataggaaactttaggaaaaatatgttagttcatccttggaaacatagaggattatctattagagaagccgctcggttacagtcatttcctgatgattttattttttatggttcaatcggctttcagcagcagcaagtaggaaatgctgtaccacctttgttagcaaaagttatttttaatcaaattttagaaagttgttga

SEQ ID NO: 65940 - DNA, 1062 bp, Acinetobacter baumannii
atgaacgctacggaaaaattattacctttagaaatttatcttgaaagaaaatcaagagaacctcaaaattttcctcataataaaacagactattttgaaagatataaaataattaaaaattacttagcagcgaatgtctatccacatattcatgctggtacttctgctgaagatggaggggtatacacagatcattcaattaatcattttaacgctgtaattacatatttaggtaaattaattgatattgacatacaagacttagataaagaactgcagattagcccttatgaaatttatattgcactagtagcaattttattgcatgacgcaggaaatatttttggcagacaagggcatgaaaagaaaacctatcaaataatgcgagaaattggtccagctgcttgtcctgacaattttgaaggaaggcggattggaaaaatagcaacagctcatggtggaaaatttgagaaaaaagatggtaactttactaaagatactatttcgcaattagatgaaattgattctttaggtggtatttcttttagacctagattgattgcggcacttgttagatttgcagatgagatatgtgaagatagaagtaggggagtgaagtatttattagctcgacaagctttaccaaaattcagtgaggtttttcatcagtatgcagaatccatttcaagtgtagatgtagatttcttgagtaaaagaattttgatcaaatttgaaattgaagaagaggatgccaaaaaaaaatttgggaaaggggattcaaataatgtagaagaggtctatctaattgatgaaattaatatgcgtttagaaaagatgtttcatgaattaatttattgtaaaaattttatgtatgaagtatgtccattaaataaaattcgggcagatattactatatattcagataatatggatgacttacaacaatcatttgaattggaacaatctggatatccaaatgaaaatttctcattttcagttagttatcctcactggaaaggggaaaaaattgttgagattttaactagtacaactggggtttaa

SEQ ID NO: 65941 - DNA, 1752 bp, Acinetobacter baumannii
atgatcaatcctttttccgtaaaaacaccagaaacattaacagcaaaagatatagctactttattcatagatgttttttcagattttccaaaagtattagagtttaaccacacttttattcatggtgctaggggaactggtaaaagtatgatgttgcgttacttagagccaaaagttcaattggaagcaggtaaagtaacaaactatgcagatttagatttttttgcaatacatttacctattaaaacagctaattacaatttagctgagttagatagactaaaagaagcgccatattggatatttgctgaacatttttttattacacttatttgtaatactattttagtaaaattacgtgatatagcacctcaagagactactcctgagattcaaaattttttaaataacattttggaattaattaattggtttggtgaaacagatattaaagaaattaattcaataatagaattagaaaaaatattttcacgtgaaaaagttaatataaaaagatatctatcactaatatcttttaaacaagacaatgaaaattataacggtataatttttgattatgaagatttttttatacaatttataagatcggtaagggatctcagttttactcctaatggacctattttcttaatgattgatgatgctgataatttaagtatcaggatgcaaaaagtattaaataattgggtctcatatagaacgacaaatgaaatttgtttaaaaatttcaacgcagaaaagatataaaacttggagaactaatcaagatattttaattgaaagtcctcatgattttactgaaattgatattaatgctgtttatacttctaaacaaaaaagtagtttttatgaaagaatagaaaagattgttgagaaaagattagaggtagctaatattaatgtttcaccacatgattttttccctatagatttattacaaaaagagcagttagatattataaaaaataaaattggtgaagagtgggataaaaatattaaaagagtatctagtcgaaaatcagatgatataactagatatactgtttctgaatatatgaaagagctagaagctaagaaaaaaagtaatttatatagttatgcaggatttgattcattaataaatatttcatctggaatgattagatattttctagaaccagcttcaagaatgtttgcagagttggaaagtagaggtgaaagtaatattaaatgtattccagcaacattacaggatgaggtaataaaaaaatggtctgaagagtatattttgatcgattttgaaaaaatgaaaaatgaccagaatacgcgatttagtataggtgctatagacaaagtcgatcaattaaaaaatttaatagatgcattgtgtacattttttagagtaaaacttttatcggatgactcggaaagacgctttatttcttttatgttaactaaacaaccaaacagtgaactcaaagagattttagatttagctgtagaatggggatatctgaatgttagcactatttctaataaagaaggtacaggccgaaatattctatacacgttaaatcggagactagctcctttattcaagttagatccaacaggatatgcagcacatctttctgtaactccagaaatgttaaatatagcattactcaatcctaatcaatttgtgagtgaaagattaagagaagtaaaaaaagcggatcaccagacattggtacaagatacattagatttctag

SEQ ID NO: 65942 - DNA, 933 bp, Acinetobacter baumannii
atgaaatacttatccacctttgaaggtttagaatctttacctaagaaaattgattattttctaatgtgtgctagttatgaggatagaacactaactttctatgatcaaatagaagactctagaattaataaatttaaattattttattttaaagaatttttaaaatatacagaaataaatataaaaaaatatgagaataagtttaatatttcgaaatatattttgagtattagctcaccaatttctattgctgatagtttggttgagtgcttttcagatttagaaagaaaatcaaatgtggtagtggatatatcaacctttacacgagaaagtatcttaatcatcttgaaatatttgagtttaaatagtgataaattttctgaaatatattttttttacagatgcgctaatgttagttctgatttaagtagcatagtaagacagataagatcagtactaggttatatgggggaattagaggaatataaacctcttcatctagtattgttaagtggttttgaaatatcaagagctaaagaaattatagatactatcgaaccagattatatttcaattggttttggagataaagataaatcaatttctactggattgtttgaaataaataaagattttaccgagaaaattatttcttattacagaaatgaagaggtactaaatatttttaatcattcattaattgatatttatgaggttaaaaagactattttaaatttagtagataagaatcctagtcataattttgttgttgttcctttgagtaataagctttctacagtaggtgcagggttagctgccttagaaaattctaaaattcaactttgttattctgaagttgaaaactataatattgataattattctcaaattatggatgaatgctttgttgagttattaaactttaattcataa

SEQ ID NO: 65943 - DNA, 399 bp, Acinetobacter baumannii
atgatgcaatatatgattgagtggttgagaactaatcgaaatgaaatcttaaaaaaatatcccgaagcagaacctttattatattattttagtgattattttaatactgttgcttgggttgatcctattattgatattattaaaagagctattagaggtgaaggggctaatatccaggaaacttcagcttatttactcatggatgatgtagttgatgaaggacatattattgatgcggcagaattttattttaatggtgaacttgatggtaaagtgccatttaaagtttttgcttcggttttagaattaatagcattagcatatgctgagcataatccagaagaaaaggaacaaattcttgatttaatgccacggcttaaaaaagtttatgatatttga

SEQ ID NO: 65944 - DNA, 945 bp, Acinetobacter baumannii
atgatggaagtgcaagaatatcgtttaatttacaattggaaagatattgaggaaagaccaaattttttgcctgaaattactataaataatgaagaagaagcgatagacaatcttagtcatattattgcaccttatcaatttagagataaagttaaatgtggaattagtcgatgtaaaactaaacataactatggttttcttgttaagttgaaaactggaaaagagattataattggtaaagattgtgggaaaaaatattttggagctgaattcaaagcacaatataagttgatgaattctcttagaactgagtctgaaaactttaaaattttagaagagaaatttttattaataaatgagctaaaagataattatgaaaaaataactttatttgctggtaaacatggaattcataaaatacttcaaacaattaaacagctaagtaatgctaatgagagtttaaattattggacagtcgctgatatacgacagaatattaacaattcaggcgatatttggatgaatgttaggaaaactgaacaagaaatagaaaatgaaagaagattacgtgttgagtcacagggcaatatttatgatgctacatcgagtcagggtgagataaaaatagatttatatcgtaaagagaaaattgcaaaggtggaatgttttgaaattacatataaggcatatgaaatagaaagtttaataaaatatttttcttttattcatagaactttaaaacatccaagagatatgaaaaaagaagatcgcaaaaagttggttaaagaatttagggcatatgaacaaaatatgcgtgaaataaatgatttttgtttgaagggaaataagcttttagcttatgataatcttttaaagattgaaaatgcaataaaagatagtgttgctaaaaaagaatttcgaaattgggctgcacagtttatgtga

SEQ ID NO: 65945 - DNA, 981 bp, Acinetobacter baumannii
atgacactagtagtagcaggttttgatggtgatgaaattttttttataggggattcagccattactaatacttcaggtagtattccaaaaacattattatctggtttcaaaaaaatttacgcaattcctattattgtccatgcacctttttttgttagagagtttagaagatacataccttttcaatcttataaagcagaatcagtagttgctttagcagggaacacattaatagctcaacatattctcaatactattaatgaacatttagctaaagttagagtaaattactcttatgatggtgaaaaaactatttactctttaattcgacattgtgatgtgagaaataatcaattttatcaagaaagacgcctgtgggatgaatctgaactttcttacgatcaggtgatgagtgctattcaatatagtgacctaaaagacataatagaatattcaataggcgaggcggtaaactctgcttcaaaacatattttgggtgaagaagactggaagagaataaaagataatgaatatttgttttcattgtcttgtccacataaaaaggaaaattttttatatagggtggtttttgatgaggaagagcgggcaggtgttataaaagctattcctaagattgaatcaatacaaaagggacaactgggtattattggtataaaaaattttaatgaacaattatgtgaaaaatacaatgaacttgtaattacacgatctaatatttccttagaaatgctaaattgtttcgagaaaatcataaataattgtaatgagcaaggttttaaaggagtagctaagccgataatttataaaagatatagtgagtctaagctaactaaggcaatatatataagacaaaatggggattggatgaaaattgatgaaaatgatatttcaagagttattgttgataaaaatatagaattatcatttgataatagatttgaatataatttcgatttttag

SEQ ID NO: 65946 - DNA, 282 bp, Acinetobacter baumannii
atgtccttatcattcttcggtaaaggaatcggctctttaggctgggcagtgatgtctgacgttgccccaaaagaaatggttggtttatcaggtggaatgatgaatgcatttggtaatacggcaggaatcgtgaccccaattgtgatcggctatatcttggcaagtacaggctctttcaaccttgcattaacttatgtcggtatacatgccatcgcagctgtcatttgctataccgttattgtcggtaaaattcagcgcttcgaattaaaacctacttcttaa

SEQ ID NO: 65947 - DNA, 1185 bp, Acinetobacter baumannii
atgagtgcattacaacaatggacacctacaacgttaggcgagctattaatctttacagggggctctcaaccccctcttagcgttttctctaaaattgagcacgaaggatatattcgacttatccaaattcgtgattataagacagataaatatacgacttatattccgaaagatttagctcgccgattctgcgatgctaatgacattatgattggtcgatatggtccacctatctttcaaattttgagaggactagaaggcgcttataatgttgcattaattaaagttacgcctaaaggaaatattctcaaagattttgcgtggcactatctaagaaatgatcgtcttttcaaacatatcgataagctatctcgtcggacatctgggcaaacaggtgtagacttgaatgagttagaaaattatccaattcagttaccaccactagccgaacaacaaaaaatcgctcaagccttaactgatgcagacgactatatttctgcattagaaaagctcatcgaaaagaaaaagatgatcaaagaaggtttactttcagagttatttaaaaaagagagtgaatggaatgcttacgcaattgaagatctagttttacctaataatgggttagtacgtggtccatttggcggtgctctcaaaaaagaggattttgtaaatgaaggttataaggtttatgaacaaaagaatgctatttataaaaatagtgaactcggaacatattacataaataaaaataaataccgaaaacttatccgatttgccgtacgctctgatgatttaattttaagttgctctggaacaatcggaaaaatttatagaattccgtctaattttgaaaaaggtgtaattaatcaggctcttttaatcattcgaataaatcaaaccataattgacttagattactttgagcattatttcaatagacaagattttcaaacttcaatcattgatgatactcagggtggagctatgaaaaatttagtcggtatgcctatctttaagaaaaagattatttattgtccagatatgaacaaacagaaagaaatatcaaagatattaaataatttagacttagatatcgattcaattgataaaaaacttgataaagctaaaaagcttaaacaaggtatgatgcaaaaactactcactggcgaaattcgtttggcctag

SEQ ID NO: 65948 - DNA, 183 bp, Acinetobacter baumannii
atgaatataaaagccatatctattgctggtgttgaaatgtacgttcaggtgctgaacccaactgaaccagaaaaaaagaaatggattatacgaacaaattctggaaaaaaaattgctatgaacaaagatggtaaatcatttcatagtccagaacatggacaagatttcaagttattagattga

SEQ ID NO: 65949 - DNA, 534 bp, Acinetobacter baumannii
atgtttgaaaatttaaatttagtttttaataaaccagaagcatttgcacaagtacttgcagctttcattggcgtatctggtttagctttcacctttattattacattttttaaaactaaagcttttcaaaaatcagaaaaaattgctgaggcgaggctgagtatttatctggatcttgtagaaaaatatactgcttatgccgctttcctttacataaatattagaactttaggatcagaagcaacgaataaaaaaaaaactgattgctttctaaattttttaacatcttgtaataaggcttatatggtttgcagctcaaaaacaaaagatgagctagatatgggttttacctttatatattccttaaatagtaaaatagatgaatatggattagaggaacatgaaaaactatccttgatacaccaaattgaaaaaaaagcgatgcaactatccttacttttgcgtgaagaaataggtgtattggaagacagggaattagagaaaaatattatcgaaagaaattttggtaaataa

SEQ ID NO: 65950 - DNA, 1416 bp, Acinetobacter baumannii
atgggcttaattaaatttactaaagattcgttccagaactttgccgctcgtgttgggttgggttctgggaatcaacatgatcaatctggttatggctttaattttttaagccgtcagcgattaaaactcgaagcaatgtatcgctcttcttgggttgttggtcaggtagttgatgttgtggctgatgatatgacacgtaaaggtgtcaaattaaacggcctatcaactcctaaagactctgagatgattgaccaagagatggaccggttacaggtctgggacaagcttaataaaaatattaagtggtcccgtctctatggtggttcattggcagtcatgatgattgacggacaaaacgtctcaacaccattaaatgccaatactattggcaaagggcagtttaagggtttaatggtgttagatcgctggatggttcagcctactttggaagatttagtaaccgaaatggggccagattatggcaagccaaagtattacgatgtaattacggattcggtaggtctttgcaatcaacggattcattattcacgtgtcatacgtatggatggtgttgagcttccatattggcaatcaattaccgaaaacctttgggggcaatctgttattgagcgcctagaagatcgcctaacgatttttgatagtgcaactttgggcgctggacaattagtttataaggcacatctaaggacttataaagttaagaagttacgtgaaattattgcagctggcggtaagttttacgacgctttagttaaacagattcaagagatacgcatgtggcaatctaatgaggggatgacccttatggatgctgatgatgcttttgaaacccatcaatatagttttactggtttagataacctcttgctgcagtttggccagcaaatatctggtgccacaggcattcctcttgttcgtttatttggtcagtcgccagcaggattaaatgctacaggtgagtctgatctagccaattactacgacaacattaaccaacagcaagaaggacgtttacggacgcctttacaggtcctctatgctgtgttgcatatgtcagtgcttggcaagcctttacctgattcatttagttttaaattcgcttcattgtggcaattggacgatgagaaaaaggcaaacgttgctaaaggggtgacagatgcagtactcgctgctgaagaggccggcctaatcaaacgctcaacagccttaaaagagttgcgccaatcaagtgaagttacgggcgttttctcacatattactgatgaggaaattaaagaagccgatgacgaggatccaccgccaccaggtgaaggtgtagatgatgaagaaacaaataaatcggataacaccgaatcgtgcgagaaagaccgagatacgttacagccagcagcttag

SEQ ID NO: 65951 - DNA, 252 bp, Acinetobacter baumannii
atgagtactgaaactttccactactttttaacgtatgcaacttttattgatgttactactggagaaattggtaatttaaccattacacaaggttatgctgacaataaaattaccaaatcaggtttaaagtttattgcttcagaaattgagaaatatgttaagtctcaagatccttcgagagttattaaggatattgatattaaatctgtttcttatctcggagaaatgactgaaacagaattcaattcataa

SEQ ID NO: 65952 - DNA, 1329 bp, Acinetobacter baumannii
atgtttaaaagcaaaaaagctaagggcaaaaaaacagtagatcggtccaatatttatacttctgggcaaattggtcgtacacgtgaaataacacctgaaggatatttactttgccgtgatgttcgattggccagaactggaattttaatctatgggcatggtgaggttcccattgaaccagataacaccggattgattcaggtctaccgtggagaagatgttttattttctcctacaacaattgccagtacagaaggtaagcccgtaacagatgatcatccaaaagattgggttactcctaaaaattggcaagtgttatcaaaagggtctagtcacaacgttcaccaaggtgaaggtgaagatgctgaatatttaatggccgacttattaattatggatgagtcgactattgaggctgttcagaaaggaaaggtagaaatctccctaggttacgatgctgaatatacacaagtcagcccgggcaaaggggttcagagcaatattgttgttaaccatattgcattagttgataaagggcgatgcggttctcgctgctcgattggagatagttttatgacgaccaaggtcaaaaagaaaaaaatcagttttgctgaccgtattcgtaacttggtgaaaactggtgatgcggaagaggctgaaaaaatagcacaagctgtagaggatgaagacctagaccttcctacagaagatgaagagccagaagatgacgataaaggcaaaactaatgatgctgctattaatcgtgaaattctaaaaatgctcaaaactatggattctcgcttggttaaattagagaaaaaaaccaaagacacggatgatccagaaaagaaaaccgaagatgatgatgacgattcggaaaataagacaaaggatgacggtgatttaactgagcctgaaaaagctgaaaaacttgatgaatctggtacacaaacttataccggtgactcattaaaagaagttatttcacgtgcagaaattctatcaccgggttatcgcatgccgaccttcgatagtgcgaacaatggcaaagctgttttaaacactaaacgatcagttctcaaagcagcatatgcaactgaagacggacaaaaggctattgccccgtttgtgggtcttaatcctgactttgataaattgcctacatttacgattgatgcagcatttgtcggagcatctgagctcatcaaacaacagaacaatgccaaaggtgtgcgttctggtatttccactcgagatttcggtcgagcagcaccaacgcctgctgaaatcaatcaacgtaaccgtgaattctggaacaaacaaggataa

SEQ ID NO: 65953 - DNA, 489 bp, Acinetobacter baumannii
atgtctaacgcattcctatatcgcatgccaagcggcatccctggtgatgtctctcgtaaaagccaatcaacaattgaatcacatccagtaggtgcacaattccctgcatttggtttgttcgggaaggttgatactgctacaggtaaatttgttctcttagctggagcagatacagccgcaagcatttatggtttgttagttcgtgcatatccaactcaatctgctcaaaacgaacttggtaaagccacaccacagcctaacggaattcaagatgttttacgccgtggctatatgactgtgaaatgtaatgctggtacagctaagaaagcgggtactgtttatgtgcgtattgccgctggtactgaagctaaaccagttggaggtattgaagccgcagcagatggtgcaaacagcattatcttgccgaatgcattctttatgcatgatgccgatgcacaaggcaacgtagaaatttctttcaacatttaa

SEQ ID NO: 65954 - DNA, 1026 bp, Acinetobacter baumannii
atgagcaagctaatagttgcaactacaattgcgcaagcggtggcgatggggacagctaaacctgtacgggctcgtacacgagatcaaatgatgacatttgatgcacagactgtagatagtacgggcgctttcttagtcggtgaattagaacgcttagaccagacaatgcatgagccattagctgatgtaacgtggtcgcgtgacattgatctacgttcagacgtatcaattgcagatgaaatttcgagtttctcaaatgctacatttgcggcggctggtggtgcatctcctaaaggtaagtcttgggttggtaaaaacgcagatgctattcaaggtatcgcgttagatatcggcaaaacagcacagccattaacactatgggctaaccagattggctggaccattcctgaattagaatcggctcgccaagttgggcgtccagttgatgcgttgaaacacagcggcttaattcttaagcacaatatggataccgatgagcaagtttatatcggtgatgatgtaattggtgttcaaggcttgctgaactctgacaaggttggggcaacaaacgttaataagagctggaagttggcaactgctgacgaaatgctagccgatgtaaatatgattctttataacgcttggattgcttcaggttttgcagtttgtccatctaagttgttgttaccacctgaacagtttggtttagcagtaacgagaaaagtatcggaagctggcaatatctcagttctggaatacatcaaagttaactgtatttcgatggctaagaacggaaagccattagatattcaaccgtcaaaatggtgtatggggcgtggtaccgcaggcactgaccgcatgatgtgttatacgcaaaatgaaaaccgtgtccgcttcccaatggttcctttacaacgtacaccagtggaatatcgtgatttacgtcaattgactacctattacggccgtttgggtgcagttgaatgggtgtacccagaaacagcgttctatgccgatggtctataa

SEQ ID NO: 65955 - DNA, 411 bp, Acinetobacter baumannii
atgagcaaacaagtacaaattcttctttctcgaccattatcggtaaacctcggaactgatgagcacgggttaccaagatcccacaagttgaatgcaggattgcaaacagttgatgaagagattgctgataactggttcgtaaaggcacactgccaagaaatttcatctaatgatatccaaacaggtgagcttcaaaagcaattggaaaaagcgaatgaagacctaagcattcttcaagctcaatcagatgaagccaccaagaaaattgaacaacttgaagggatcgttaaagagcgtgataccgaaatcgctaatttaaaaatccagttggataaggcccttcaagctcaggcttcggaagtaaaaactaaagaacctgcaaaagctaaagagccaccgaaggaaacctaa

SEQ ID NO: 65956 - DNA, 1986 bp, Acinetobacter baumannii
atgagtgatacagttattcgtgacttctttgtgtccttaggtttctctacggacaatgaaggcgctagaaaaatggtcgatacccttaaaggggtagagctaaaagcggcattgctgcacaagactttattgcttctagcaactggtgcagttgtcgcagtaacaaagacagcaagtgaactcgataagctgtattactcatctcaacgtattggcgcatctgcttcaaatattcgtgcttatggtgatgcaatctcacaaatgggtggtaatgctcaaaatgcattacagtcacttgagaatgtggcgcagaagatgcgtaactcacccggttatgaaggcatgctaacaggcatgggtgtagctacacgtgatggtaatggacagttgcgtgaccgtgtggaagtaatgaaagacctttcaaaaacaatgaaagggatggattactaccaggcaaatgcttatgccagttctttaggtattgatgaaaatacccttatggccatgcgtgatgataagttcatcgacaacatggagaagtaccagaaattacgtcaaagtgttggcttaactgatgagcttaccaagtctggtaccgatttcatggttgagttccgtgacatcaccatgacgaccaaagctattacagaagttgttgtaatgaccgcaggacaagcacttattccagtgctaaaggtgatcaataatttcttacgtagtgcgattgcatggttcgctgaactggatccgcgttttaaagctatcttggccactggcttaaagtttgccttgcttgcgattatctttggcggctttattggcacgatcgctaaattagcttctgtgttgccaatgctgaaaagtctactctttttaatcaagtctttacgattggccttcttggcttctccaatcggaattgtcttggctttggccgctgcaattgctgctttgtgggatgattaccaaacttggaaaaatggcggtgaaagccttattgactggtctaagtgggaaaacggaattgaaacagcaattagccgtattaaacagttggccgagttaatcaaaagccttaaggataaaactgtagagtttgttagcaaggcaattgatgagccagctggtaccgcaaaagaaacagttgctgcagtaactgaagctgctaaaacaggtactactgctgtattaagtgcaactaaatcgactgtaagcactattaagaatagtgtttcaaattcaagcagcttttctcaaaagtataagagtaaaacctttacttcagataaagcaaaaactattgaagcagttgcgaaaagaataggtgtggatcctaatgatttggcagctgtaatttcttttgaaacaagtggtacttttagccctagtgccaaaaaccctaattcttcagctacaggattgatccaattcatggcgggaagtggtggtactaaaggaaagtactatggtatgagtcgcaagaaattcgcttctttgtcttttgatgaacaaatggtttatgtcgaaaaatattttaaagagagaggctttaaatcatctaaaaaacgtgatgtagctgatttatatactgctgtcacgggttatggctacaaaaaaggaagtgaagcctatgaacttaataaggtttgggattcaaacaaagatggttatattgcaaaaggagaaatggttcaaaatactgcttttaaaaagcatcaacgtaactatttcacacctaatccacctttagcacctaatataaatattagcaatacaaaaaacttagcgaatgttgggaaccctcataaagagcaggtaaacaaatcaaatgcgagttctgctaatataactatctttcagtcacataaaactgaaatgaccattaatggcgcagacaatccaaaagaaactgctcaggtaatacagcgtcataatgaaaatacaatgattcaaatggcaagaaatgttaagccattaattggttag

SEQ ID NO: 65957 - DNA, 387 bp, Acinetobacter baumannii
atgaaaaaggtcttagtaatgttagctgcttgtatttcaattcaagcatttgctcatgaaaatccagacagaaaaggtcaatgttttattgttgatggtaaaaacattactaagccttgtgttatttcatctggaggtggggctggtggaatgtatacagcactaaaaattggaaaacaaaatattttaatcgaggaatcaaccatggacccagatagtgaagatcgttcaatcgctatgggtaaagatgttgatcatatgcaggacgcagaagaatattaccgagatggtgtttccaaaaagataattaaactatataaagacggttcatggttctgtaataaacaaactaaaggcaagttagatatttgttataaaactaattaa

SEQ ID NO: 65958 - DNA, 357 bp, Acinetobacter baumannii
atgaagaaacttatctcacttatattcactgcaacgatgagtatgagcgttctagcaaactgtgaggtctattttaatgatcctactgatgtcacaaaatgttttgaggacgaatcattttccaaagtcacaacaaatctcaagaaactaaatgaaatatcaaaagaacagttgagctataacccaactgttttaaaagtgcttaataaagcacaaagagattggattgcttaccgtaatagttactgtgattcatatagcaactatcacggcgaaagaaataatcattctaattgcatagttaagctaaataatgaacgtgctcaacaattgcaaaaagatattgatagcaattaa

SEQ ID NO: 65959 - DNA, 351 bp, Acinetobacter baumannii
atgaaaaaactacttttaataactttgacatcaattattagcgtcagtgcctttgcggactgctcaaagactaaaactgcttttgaagctcaaaagtgcttaaatcaagaagtcaaactacttaaaactcaattaaataagacatataaaaaagtttatgatgaaacatcagcaaaagaagagttagataatgcgcaaaaacaatgggtgaaatttaaagagttgcaatgcggcgattttgttacggcggatactcaaggaagcccagcaacagttgaatatgatttaacatgtcaatctattctatataaacagcgcattacattcttaaatgaattgtttaaccaataa

SEQ ID NO: 65960 - DNA, 390 bp, Acinetobacter baumannii
atgaaaactattatttgtttgttaagtactattttggtttcaatttcagctatcgctcatgaaaatcctgatcgtatcgggaaatgctttgttgtagatgggaaaaatagtactaaaggatgtattgtggcctctggtggtggtgctggcgggatgtacacacttcttacaattggtgagaaagaatacttaattgaagagtcaaccatgaatcctgatagtgaagaacgatctatatctatggggggtggctctgatgaactattggaagcaaaagagtattaccgtgataagaagactaagagagagcttaaagaatataaagaaggtgcctggctttgttataaacaattaagtggtaagatggatgcttgctataaaacgcgttaa

SEQ ID NO: 65961 - DNA, 1173 bp, Acinetobacter baumannii
atgaaaattaaagagctagaacttataaatattgggggaattccaaaactaaagttaaataattttgatccaaaaatgaatatcatttgcgggccaaatggtattgggaaaacaacaataattgattcaatagcccatatattctcaaacggctataccaatttacttaaaaggaatgtaaattctaaagatggttctataaattacacaattgaagagtgtgaaaataatactcattcaagttcaatttatgttgatgtatatgatcctaaattagggtgcggtattaatacactttaccaatattcaaataaaattattcatcttaaaactaatagaacttttttgtatgaaaatttaaatgcgattacaaaagatgaagttgtagatataagtagatcttcagaatatgcgacgtcgggtatctatcaccataattctaaatcatggtttatacacaaatttgttttttcaaatatacctaattcacttacagaagaacagctacataattttgatttagcgaaaagatctttctcgatgttaaacaaagacttttcttttgaaaaggtcgatccagatagcttagaaattattattaaaacaccaagtggtaatattatttatgaatatttgtcatctggatttaagtcgataatttctatcatatttggaattatcagagaaattgaatttagatttcaaaataaaagaataaaagctgaagattttgatggaatagttttaattgatgaaattgaacttcacttgcaccctgaatggcaggaaaaagttagtagtatacttaaaaagatttttccaagtactcaattcattttaacgactcatagtcctcatgtaatccaaactgcattaaaaggtgaagttattgctttagagcgggaggggaatgatgttaaacaaagggacttggtagatcaagaatatggatacttgggctggactgttgaagaagttctgaaatatgttatggggatgggttctctaaaaacagttgaatataacaatgcccgtgaagtttttatcaaagcatttaaaaatcaagatcttccaaccgcacagaatgctttcaataaacttaaaaaaatgcttcaccctgaaagtgaactaattgaaatttataaaatgcaacttcttagtcttggagattaa

SEQ ID NO: 65962 - DNA, 723 bp, Acinetobacter baumannii
atgattaagttaactaaaagtgaaaagcctgaatttttatctgatgaaaaggtggctgaactcacagccttatttcatgaaaccaatgaatcagtatggaatgataagcgcattaaaacacccttattagttagttctcatgggaaatgtgcctattgtgaaactgggctaacggatccaggtatttatatggaagttgagcattttaagcacaaaagctcctttccagatctagtagtagattgggataatctattaccttcatgtaaaagatgtaatggtacaaaaagtgctaaagacaaattaattattaacccatatattaatgatccaaaaatggaattattttttgataattattgtatttttggaagtacagaattaggtaataatacggagtctgtggtagacctaaatgaagaggtgttaatggttaaacggtttaaaatttgtcgtttagcttttttaacattaaaagaaacagcagctgaatttaaagaattgtcaaaattagatcattataaaaggagaagatttaagaggatcctttcgatggctcagccttcaagtccttattcagcgtctgtctcaactataattcattccactcgagagtatgaagagcttaaaagtagatttatcagtgaaggattatggactgatgaattggaaagattacatgtagtctccctcaatatagcacttcctcgtagagcaagataa

SEQ ID NO: 65963 - DNA, 1887 bp, Acinetobacter baumannii
atggcaacaaactggaatgcggtactagcaaatatcactaattccgctgatatcttagcaattctccggaaagttttaggattgctcgatggtaaggtcgatttaacaaagatcgatgaaattatcgcagatttagcttcgatgaaaattggggtggatactgctctaagtgacgtactttctgcactagttgaattcgattctgcttctcaagaagcgcttcaacaagttattcagtcggggttaatagagggatttactacagaagctgagctattagcaacacgcccaacagtttcaaagaagtatgctaaagccgaagacactaaagttatttggttctggaataagccagagggcgcacctgttggaaactattggactagtacaggattgagtgaattaaatcaagcaaagaagtatgttgatgaaaaggctatttttgatagcggatcggatatcgtttgccaaaaggatgtgaatgggaaaacggtttttgttgttaaaaaagatggtaagtttcatatcattggtttgccaaatgacatagcatctactattaattttctttattctttgattagcacttcaacaagtaataacttaattgaagtttttgaccagaatggccgtgcatcactaactcaaaaccagtatggggatttgattttacccaatatcggcaatttaacacttgcattaaaagctttgaagaatgaggtatcaagtcagaattcattaaatctgacagcagcacatttaagcggtaagtatgctgattcagtcttatcagagaatatgcaaaagttcgagcatactgattatttgcttaaagcttcagatgtaaacgcactgaatattttccctcatgccgttacaatgctccgcatccctgcaattacacggattggtaaatcaaaataccttttattctttgaagctcgtgaaaacagtagtgactttggtatgaatagccaaggtgttgccaccgttgatattaacgaaacctctggtgtagctacaatttctaatgtgcaatgcttgcatgccgcattcactgactcagaaaataagctccgtacatttatgaatgcttgtgctgttaagttagatagtgggcggattatctgcttatatgtacgaagatatagtacaactgagcatcaattatataagcgctattctgatgatgatggtttgacgtggtcaaactatgaggatattaccagcgttaaaggttctaccggctggaacctgctttgcccatgttcacagggtttagttaagcgttatgggcaacataaaggccgaattgttttccctctctggacttcaggtactgcatatataaccacagcttttagatctggttacgtttactcggatgactctggagcgacatggcaccttggcgagtttgctgattatgcttccgcaagcgaggttcaatgtgctgaagatttgaatggcgatatgttgtttagtatccgtctagaaaatgctactaccccgaaagtaattgcaagacactccgacttaaccaagaaattcacaatgcttcaaaccaatagaccgcttacatcagcaactgtaatgtctggattgatacaaggcgaaaataagtatgataagtctgctaataaattccaattaacagcttgtcaaacaatgggtagaaccgatttgcttatacatacctcttatgacggcggcgaaaattggataactcatctattgccttcaacagcagggaaaagtgttgcttattcttgtattgaaaatatttctgcaagtaaaaagtttctgatgtgggagacagatgacactgtgaattttaagtactcagtagttgctttatcaaatttaataaataatgaggtcagttaa

SEQ ID NO: 65964 - DNA, 297 bp, Acinetobacter baumannii
atgaaagaaataaatgaatccattaatactgaaaaaaacatagaaactgcatcagcggctagatcatcattaccaatttcgtctcaatatccacctactcttatattggttagcgccaaagacccaattgttgacccaaaacaaagtattcatctacatcaattactcgatggtaaaggtattccaaacactttagaacttatacaagatgccaaacatcctgtgcctgctaatgtgtggaaaactaaaagtgattcatttttggaaaagactttgaatatggaaattaagcaataa

SEQ ID NO: 65965 - DNA, 681 bp, Acinetobacter baumannii
atgccaattcttgacctgcgatttgcattcttctttgcaaatccaccagttaacttaaaatacgatgagttttctgtatcacttagaagaaaaaatgttttcgctcataataatttagatttacaaacgtttatctttcctataccaagcgatgctcctgcggactttccacgttgtcaaattacatctaatgaccaaaattttgaattatccataactggcgcaagatgtgatcttattttcaaacacgaaaatcaagaaaacattaccttaattttttctgatattattaaggaaattaaagatctatttgaaaaagaaaatgttgaaataactagaattggttacataactagacattttcaaattcatagtaatcctgaaaaaataatcaaagagaaactcttaaaacttgatgaacccgatttaagtgaacctttcttacgttttgttttcaaaacaaagttttataacactttgtgtaatgataattatcaaattgaagtcggaaaacaaagagattttgttaatggtatagaaaatgatgttttgttaattacccaagactttaatacttttccaattgaaaagatgattattacaagtgattttctatcatcttttttaaatgaaatacctaaagaaaaattaaacagatatattactttacttagtgaataa

SEQ ID NO: 65966 - DNA, 1311 bp, Acinetobacter baumannii
atgacagcagaagttgcaattattaattctaatggggtggctttggccgctgatagcgcagtaacagtaagaggaaaaaagatttttaactctgctttgaagctattttctttatctaaaacagaacctgtaggaataatggtgtatggaactgcggagcttctagcagttccatgggaaactctaataaaattaaataggaaatctattaatggtaaaaaatatcctaaattagaagattattgcgatcagtttattaattatttaaaaacacatactcaatatttttcagaacaacgacaagaagaatggttgttgatgcagataattgatttgtataatgatattgtagtgtttgtacaagaaatgattcaagaagaggctttacatggaacagttatggaggaggataaaagagataatttaataaaaactagaattgacttctatcatgattacttaatgcctagacgcccaagaacattagatataagtaaaagtgaagagaaatcattaagactaaaagtaaaagagcttgtaaaaaaacaagaattaatcgattatttttttaaagattttaatttaaatagtgtttacacaaagaaattagaaagcttagctatttattgtgtaacacatcatacttttcaatccagtaattcaggtattgttatagctggttttggtgaggatgaaatttatccctctgtatttacttatgaaattgcaggcatgtttaacaataagttaatttatagaaaagttgaaggaaaatgcatgcatgagagtgcaaatagtcctgttgggattattgcttttgctcaagaagacatggtcgcgactttgatgaatggaattaatccgaactatgatagattcgtcaatgaaatagtacaaaattcttttgacgaaataaaaaaattagtaaaagatagaataatagaaaaccccgaatgttcagttacagtttcgtctggtgatttcgatcaagtcattgaccagataacgcagggaataagagaaaatgtaaacactcatcgttggatggagcatgttgatccagtggtgagcatggtcggagctcttccaaaagatgaacttgcagctatggctgaatcattagtgaaccttactgcttttaagcggagaataacagagtcgttagaaaccgttggaggacctattgatgtagctgttatttcgaaaggtgatggatttgtgtgggtaaaacggaaacattattttccagcagaacttaaccagcattttatagcaaactatttaaaggataataatgatgcaaaagattaa

SEQ ID NO: 65967 - DNA, 180 bp, Acinetobacter baumannii
atgatgcaaaagattaattatagctcggtaaaaagagagtttataaactatacggatactaactttgataattttgcagagttaaaaaagcaaactgagttgagtagtcaagctaaaaatttagctaaacaaactgttaataaagcatttgattctattgtacaccagaagaataagtaa

SEQ ID NO: 65968 - DNA, 126 bp, Acinetobacter baumannii
atgaaagattggatctatttttatatcgagcacacaattaagtatgaggaaccattctataaagagtcaggatggtcattaggtttaaagaataattttatagttttaagtgagatttactcttga

SEQ ID NO: 65969 - DNA, 486 bp, Acinetobacter baumannii
atgaatataaatgtaattagtgctcttttagttgcttttttttctgcatttattagctttctagttcaactatattttaaaagaaatgatcggaattatcaggcaaaatcttttgaattgtcaattattgctgaagtagaggcaactttaaatattattgagaagcgaaaatatagaaaaggtttagaggaagggctattcttttttgaattaggtgaaaaaatatctgaaaataaaatttatacactggaaattcaaattcaagaaaattatttaccaatttatttcaataatttagataaaatttctttcattagtccggaaaaagtgaaagatgttgttaggttttactcgcttttaatgagtttagctcaagatgtaaaaccagatggaatattaaataaacaaccttcaagagaagcttataaggaatgtctaagtgtatttgatgaggctattataataggtaatcggatcataaagtaa

SEQ ID NO: 65970 - DNA, 666 bp, Acinetobacter baumannii
ttgggctatacaagacagtcaatagcagtagcaattttgttatatgcttttctaaaacttatacaaaacgatagaaataaatttttattttttttattattagctgcatgtttccataaaacagctataatttttattttattttatcctttgctttttataaaaagaaaaaaaatactgatttttttatatgagtttttttcgcttgtattaatcactatagtgctttatatttctagtttgagtgaaaatactgtttatactagtgaagagttgaactcaagtggagtttttttaagattatcattacatattattcctgtgataagttattttttattgcgtaataaagtttttaaaatagataaatcatatttaattttagattattttgttttattgattttttattgtgttggtttgtcatttgttttttcgactttagcggatagatttaatttgtatttaatattttttgacctttatgttgtttgtatgctatatcacaatttgaaattagttaatagaaaaatatttatatttattttaacaatatttcttacttcttttatttatatttggatgttaaatagtgttcttgtttctaaagcatggttgccctatcaaaactatctaatagattatcttttaaactatgttttttaa

SEQ ID NO: 65971 - DNA, 276 bp, Acinetobacter baumannii
atggaagaggttaattatcattttaaacaccctcgagaaacagacgaggcctttttcgaagaaataaaaacttcctatatatttgaagatttctttgctaaggagttaagtaagtatagaaaagtaattatctatactttaagcagtacagcagctttgaatattatttctttagataatgttgaggttagattaataaataatgatgctattaatattagatatccagatttggtaaggttatttattaatagcggtgcagtgctattaaattaa

SEQ ID NO: 65972 - DNA, 2091 bp, Acinetobacter baumannii
atgatagattttgtttttggtaaaaaggttaaccctgctgcaattgatcaattagttaaatgtttttcttcatgtgatgatatagagggaactttatacattggctatccaatgtttgaatctggtgatgaagctttcttaacagatgctttattagttactaaagaatatggtgtggttgtatttgatttaaatacttttaatttagaaagtgaagatgaagttattgcttatcaagatgagttatatagaggtacattacaaaaattcctatctcaaaaagagttaattagtcgccgtaaattaatatttgaaattgaagtattatcgttaagacaagaaaataatcttgaacaaagttttgtaactttagagcaagttatccctactattcgagagtttgaaccattaccagatactacttataagctcattaatgcagcaatccaaaaaacagaagttcttaaaccaataaagaaaagaaccaaggttcaaaatgatgattccttcggtggaattatgaaaaaaattgaaaaggaaattgctaatttagattcgtggcagaagaaagcagctattgaaagtcctgacaaacctcaaaggatacgaggcttagctggatctggtaaaactattattttagcaatgaaagctgcatatcttcatgcttatgaaccaaataaaaggattgttgttacttttcaaagtaggactttatatcaacagtttgaaaaactaataagtaaattttattttgaacacaaaaaagatgaacctgactttgattatttaactgttcagcatgcgtggggaggagagtatgaaaatggtgtttattcagaaatttgtagatatctagactgcccacctttaaatttcaatacagcttcaaataaatatggaagagaagatgcttttaaaggtgcttgcgccgagttgttaaattacgttggcgatgcaaatatagaaccgatttttgattacgttcttatagatgaggctcaagatttccctgaggagttttttaagcttgtttataaatttacagatgaacctaaaagagtggtttgggcatatgatgagctacagaacttaggtgaacatataatgctacctcctgaaaagctatttggagttgatgcaaaaggcatcccattagtaacacttcataacgaagatgataaagctcaacaggatgtaatgttaccaatatgttatagaaacccaccatggacattaagttttgctttgtctgttggccttggtatttatcgtaatgaagggcttgttcggatgtttagggaaccttcattctgggaaaatattggttttgaaagagttggtggcgaattaaaattaggtcaaggcgttactctgcaacgttcaaaagaaagaacacctgattattttaataatttaattgaccctgaaactgcattatcacttaataaatttaattcagaagtagagcaggcgaaatgggtagctaatcaaattaaatataatattgataagcaagaacttgatgcaagtgatattttggtaatatatccagctccttatacaattgctaagcaagctgcatatttgacttatgaattgagatgtttaggtatagatagccatgtcatcggtgctaaaggtatcagtcgagatatggtctttaaagatgattctattgctataactcatatctatagagctaaaggaaatgaagctgctatggtgtatgttatggattctcattattaccaaagtggatatgagttgggtaaaaaaagaaattctttattcacagctattactcgtacaaaagcttggttaagagtttgcggaattggtcctttaatggaagcattagtagaagaatataatagactattggaaaataattttaagctatcatttacatatcctgatagcaaattaatggatgaattagatcaagtatatggtgataagacagaagatgaacgtcaagaattaaaaaatagctttgagactattaaacaaattaaaacaatgttagataaaggagagctaagtattaatgatgttccagaagatctaagaagcatttttgggggctaa

SEQ ID NO: 65973 - DNA, 720 bp, Acinetobacter baumannii
atgtctataaaaccagatgttatggctaacaatattaataagttatgctttgagtgggaaagagcaggtttagtattatcttctaatactacggttgttaagcaaaatggtgaagggcgaagtttaataacttggaaagaagatggtggtccacttaaaaataatgatttttcaactttatcagaatatcttactttattgaagcactctcaatatacgatggttttgtatgatggttcaattttacaaatatcttataagatgaagagaaatgaaattatagggcatcgtttatgttggtttccatcacctttaaatcttgaaaatgtacaagatattgaggaaatcatatttaaagttcatgaatctttgagtaccaatagtagtttgttagaagaatatctaacgaatcctgatcctcaaactcatattatgcttaatagtttttatcatcgtagtcctatacgatttgattatgacattatgcctgatgaccgaaaggacaaacatccagatgtgcatttgcatattagtgtagaagaatgtcggattccggtaaagggcccactctgtttaagaaaatttatggctttcgttgtagaaaatttttatcctcatttgcctcttgatggtagcttagtaaatgatttaccaagttggttctcaagtaatatgttgactgattatcataggggtaaatttcatctttatagtttataa

SEQ ID NO: 65974 - DNA, 1068 bp, Acinetobacter baumannii
atgcctagtatccctgcgatgtatgatagtactgctcttgaagcaatgagaaaggctgtagtgcctagtatccctgcgatgtatgacagtactgctcttgaagcaatgagaaaggctgtaatgcctagtatccctgcgatgtatgacagtactgttcttgaagcaatgagaaaggctgtagtgcctagtatccctgcgatgtatgatagtactgctcttgaagcaatgagaaaggctgtagtgcctagtatccctgcgatgtatgacagtactgctcttgaagcaatgagaaaggctgtaatgcctagtatccctgcgatgtatgacagtactgctcttgaagcaatgagaagggctgcatcatctatagcaattaacaaatcattaggtctacaagctgatatacaacgacttatagctgctaaaacattaatgccagacttaaatgctaaaatttttaatttacatcaaaagctttacgctattgctggaataactgagcaaagactaaaccagaataattttgattctactcacaattatttagatccatttgatgaattcaatgaaaagtacaatcaggacttacatgttgatgaggctgcaatccaaacactagatttagttctgcatcagccagagacattagagctaatatctgaattaagaaatataggcgtttttgatacatcaagtgggtctatttttttaaaatattcagaaaccttacctgaaagtaaagcctcaactattttaaatcttatactttgtatattgttatggtttgctgagccaattatcaaccaatatgagccgattcaaaatctccaagagaaatcagcaaattttttaaatggtgtggatggtctagcacgcataactaaagattgtgacttaaaagatcaacctaacggtctaaaaaaaataagcttagagaaagaatcagtagtgactgtatataaaacaaatgacgagattgaggatggatggtctaaaatcaaatttaataaagatgggcatgatcttactggatacattagaacatctgaacttcattcactcgactaa

SEQ ID NO: 65975 - DNA, 615 bp, Acinetobacter baumannii
atgaataaaaaagaatcattaacaactgtaacagatgttggaatcgaagtattaagtgatggaacaccaattgtttctccaatatataagttattcaaagctggtcaacatgcttttattcaaaataggatcaataattttgtgaaagcagcaaatattgaacattcgattttagaaaaaattattgatgatgaagactacacaaatatcttattcttatcattagatgttgtatctagaacaacgtgtaagatagcaattgcatcattggcattgatatataaaaatcataaagagaatactcaatttattaaaagatcattgcgagcctttaaagaaattgatgatttaacattatctgtttttgaaaaaatatatgaagagtatagtgatactagcgaagcactgcactttactgaagaaaaagaaggtggtctttattttataaatgaatatgatgaggttttggatcttataaatagaggtttttttagtcaagtcgcatcttctaaacatattacaactaaatttagaccactttctgcaatcaagaactcctcaactgatgtgttttatgaaactatacaagaagctaaaaaattgatatcaacctag

SEQ ID NO: 65976 - DNA, 228 bp, Acinetobacter baumannii
atgaaattagattctcgttatattgatattgagaatggtattattgctcagaaagatgattatattattttagtcaaaacatgggctgaaatttttgatgaatgtaaggctaaacttcaatttttccaagagagcctcaagtataaagcaaaggctatagatggtatggagcatttacaaaaacattttccaaaatatatagagggcgttactagtacgattcagtga

SEQ ID NO: 65977 - DNA, 1722 bp, Acinetobacter baumannii
atgcaaataatattacctaaaaataatttacattcgaaaacgcaagaagttcactttgaaaaagtaacagcacttattggagaaaatggagcaggaaaatcttctatattgcaatctatattttatggttgcctactgagtagaaatgactttcataacaaaaaaatagtatgcttctcatcaggacaaaatgaaaaatattctaaatatttctctgaatatctagcaaaagaacgccaagcaaatcgtgggttaaatttggggtgttgttactatgataaaacttggtcaaatatattaattttcattgctactatgataaaaaatggatatgtaagaaaatttttaagtagcaaaaattatatagatgagtcttttgataaaagagatgatatcacgactacgttaaatatatctattcgagttgagcaagtttatgtaaatcgaatacaagatgctttaaaagaagaggaacgtggagatggcaatacatttagaacatctccttatcatcttactcttgaaagtttcatacattcaattgttgataataattacgaatttgatgagccattattaagtaaaataaagttaagctacgaaaatttttttaagccaaattttgttgaatcagatgaaaatttttttgattcaattattacattctttacacaagcagcagataatgattatttttttgataagccaacggcacagttaaattttaaaaatgatttatttgtaagtgatttaagtgatggtgaatatcaaattttattcatttatgcgttactagacttatttgatgacgaagatacactatttttattggatgaagttgattcacatttacattataaaaatatagaacaattatgggccgcactacattctataaagggctataccttaacaacgactcatttacttgattcaataacgtctcctttaaatagttttgataatttaaaaattgttgataaagggatcattcatgaagatagaaaaattagagccattatagaaagattatcaaatttatctcgtatggagtcagttaattttgaagtttgcagtaagctagataatatagtattgatggatgattataatgattggactatattcttagcattagctgaaaaaaaacaattagatatttctaaaatatccaaagtccatgtaataaaacaagcttcaagctatggcagtattaatgaaatattaggaaaagctaaaattgagtgggtaaatacattgttgtcatttaatttggctaaagcaaaaaatatctttatgatttgtgatagagatgaagctaaaataaattttaaggaagatggagtatctgttgcagctaaaaatgaattacttggcaaaataaataaaaataagaagattaatactcatcttttagcatggcaaagaagggaaataaagaattatttattgtcctatacggcactttctaaagcaggtttaattaatgagataaataattgtaatattgcgcaaagggattttttaagagaaaatgatcctggtgataataattcaattagaaatatgaatgtaaaaagtttggtgacaaaattaattgatacagatggtattggattggatatagataagttgaaccactatattgataatgtcccttctttagaaatcagcaaggatattgaagatatgtataattttatagttgagaaattatcatga

SEQ ID NO: 65978 - DNA, 1311 bp, Acinetobacter baumannii
atgatgataacagttactgaatatgcagaattgcagtcatatgatttgactgcaatttcaggaattaaaaaaagatatgttagtcaaggtacattagattggctcattgagaattatcaaaattggatatcagaggattcagatgctgaacctatattaactgattttagaaagaatagtttccggttgggggcttatgttggttatattcagagtccttataacgacgaacagattcagatttatcctaaaattgacataggtgatggttcgataactgagtctaggttgatcttaaaaaaaatgctctcagtcgtgtacgatttgaatgctaaagagctatcagaagctgaattagatcatcaagagttgcctcttcatgaatggattatttctagatttttaaaagaattagaagacttgcttcacataggacttaaacgtgattatgagttggttcaggatgagcaatgctttattaaagggcgattattagcttgtaaacagatgcgtagagggcctggtcaagaagctatttttgatcttgaatatgatgagtttttatttaatggtattgaaaatcagttaataaaaacggcattaaattatgtgcttgaacttacaagaaatgaacagtcattacttatggcttttgatttttctgttttactagaatctattagtgaatcaatgaatccaattgatgatcttaataaatggagagaagataggctgttaagtcactatataaaaataaagccttggtgtgagattatcttgtccagtattagcccgtcttttcaagaaggtagtcataaaggaatttctttattattttctatgccacatctttatgaaaagtatgtagctaagttgttgaaaattaaacctggcttaagattacatatacaaactagtcaaagaactttaattcaacatcaacctataaaagagagggaccaacgctggttccgattagagccagatttggcaatcaaggatgggtgcgaatttaaagttatcctggatacaaagtggaaattaattaatcaattacagacatcttctggtgataaatatggaattaatcaagctgatctatatcagatgtttgcatatggtcataagtatttggatggacgtgggaaattagttttaatttatccgatgcatcaaaaatttaataaaattttacctgtttttaagttttcggatgaattgatcttatatgcaattccttttgatctaaaaaaaggaaaattagtagaaaaaaattttatagaagaaaactttaatagtgtatttatttaa

SEQ ID NO: 65979 - DNA, 858 bp, Acinetobacter baumannii
atggcagtaaccccatcaccgttaagatatcctggtggaaaaacagccataatgcccatggtctctaaatttattactgataataatcttaataattataactacatagaaccctatgctgggggggctggattagcgttatcacttctcttccataggtatgtctctaatattcatttaaatgatatagatatttctatttggtcattttggtattctatattatttaaaacagatgattttattgaattaatcaaatctactgaaatcacaattgatgaatggcatcaacagaaatatattcaaaatattaaaaatgaagttgatactttaacgttaggattctctacttttttcttgaatcggacaaatcgctcaggcatcatacaaaaagcaggtgttattggaggattagaacaaaaaagtaaatatcctttagattgccgttttaataaaaaatccttaatctcaaaaattgaaaaaatttctcaatacagagaatttatccatctatacaacatggatgctgttaattttattgaagaaatagaaaaaaaaatagaagaacgttttttttgtatagatcccccatatttcaaaaaaggacaaagtttatatactaatttctatacgcctaatgatcatgaaaagctttctaaagtaattaagaaaatagaagggcagtggattttaacttacgataatattatagaaatcaaaaacttatactcaaatcttccacagtataattttgatctaaattatactgcggctgaaaaaagaaagggaactgaattacttattacatgtccaaatttcattgtttctgattcacttaatctatcaaagatagtttaa

SEQ ID NO: 65980 - DNA, 1608 bp, Acinetobacter baumannii
atgccatatcaaaattcaagtaaaaagaatgaaccagcaggaaaaaatggacaaagaacatttgttagaaatccagatgttgataagtttttagctaatagcacttgtttagttcctccaacttctgaagaagcaaagaaaattacggaagattatataatttgggacgaaggagataagagccttccagattatgtggttgcctcagatgctagtccttacacagaaccattaaaaggatattaccctagtacacaattgggctatgtaaaaaatagtatggtcattattgaagttcaaaaatttgataaattaagaccaacagaatcaaactatattgatccatttaaaattgctgaattacatcgtagtggagactctatcgcatttactttacctggctgtaatattagatataaaaattctacaaccgtaaaagatggattccgtcttgcagtctatgagcaactatcagatatgaggacaagtttcactaatgatagtaattttaatgttgttggaaccctattagctattgataacaataaagttgaaatagatagttgtccatcttgtgcagtgaaaataaactttcaattcactaagggacagcagattcttaaatgtcctatttgttctgaagatgtatatataactgatagcttacgtattcatgagcaaatttcagatttaggagataaccgttcagcaatcacacgatttatgaatgtagttgaacatttaattattgcgtcatttatacgtatggttggttatactaacccagagcaattaagccgtatagcttttattatggatggtccattagctatttttggacaacctgcaaaagttcatgcacgattattgaagctttattcaaaagtattcaaatatttagcgttgaaaaacttaccaatgccgctcattataggcatacaaaaaacaggtactgttgtagaacatgcagtatccatagctaagtatattcagaatggagctttcagacttattgatgatgaatataggcataaatatatcgcagctaagtcagagtcatctgataattttggacatgagacatattatggacaagattttatttataaaactcgcaatggtaaggtctttgcttttgctgtggtttatccatttgagactaaaaacattgataactttaaaagtgaggacttttcaataactatggactcacaggagctcaaagttgaatgtttaaatgaaaaactcagaacatctttatcatcgatattaaatgatcctgagaaacttataaaaatactatctatagaaaacggaatagctaaaattattggtgaaaagattattgttcatagtaaaggggagggagtagaggggataaaagttaaagtctccgctaaaaaaatatttagtttgcagaagattgagcttcagcaatataagccaatgcttggccgagctatgaatttaatatcatattttgaattagagttatatgaaaatgcaatcataccgattgcattagctcatagacatgcgtctatcagtttagtacctggaggtcgggttctagatttactttcaaaaaatggattaaatttaacttaa

SEQ ID NO: 65981 - DNA, 2178 bp, Acinetobacter baumannii
gtgaatcgagttttaacaaatgttttaggcagtgaagataaactagtaggtcttctgggagaaaaaccaatagataatcttgtgggctttgtatattcaatgaactttaatgaagccctcattctaactaatgataagtttaaagagaaagtttcaggtattcctcataatagttttttgattgcaacttccattaacccgcataatattgctttggctactaattttgatagggaagtcatccttctacgagttttaggtccttcaaggttacctacagatgatgatttcttaaggactagaattgaacataatcaaagaagaacagaagaggaaatttttgtcaatgatccattagatggactggatgtattaacacatgctgaattgcaagcaggtggattaacttgccgaattttaggtacattttatctaaataacggtgagcttcgtttaggtagtgatattgaaaactatatgtctactagtagattaagagtttttaaaccgaggggagatatattaagaaaaattgttaatcatgttaatagtgaagtacaggctaaagctttagaagaagctaaaaagtcaggttttcattctatgccctctccgatacagattggaacagtaagatatacttccacatcaagattacatcgttcaagcacggaaccgcttgttccagtttttattcaacctactgattttttagcaaggcgcactgcaattctaggtatgactcgtacaggtaaatctaataccttaaaaacaacagtatcctcagtagcaatgtctgccctcactgataacacaaaagttggtcagattatttttgatatcaatggagaatatgctaataccaatcaacaggatgatggtagttcaattgccgatgtctttgaggatcatgttgtccgttatagcgggatgccgggtgaaaataaagcagtaagagatttacgtaataatttttatgaacgtccagatataggccttaatattattcaagaaatattaaaagatgaaaatattactgctggggatatgagaattttagtttcgtctctatcattagatctcttgccagatgatgcttcacatagagaacaaaaaagatttgaaagattatcagcaggctttaaagcacttttatacgtaagagggtttgagcctccgaaagattacaaagttaccttagaagtagctaaagctgttaaaaggcaaatccttgaaaataattatctagatgagttaagtagtttaaaagaacaattaggtagagatagtcttagtcaagctgaaattgaggattatgctcagaattttttccctgattattcaaaaggcgtttctctagatgaactagtgaggttttttaaagatgcaagaagtgctgataagaaaattcgaaaagattatgaattagcggaaaggaaatctaaagaaggtggaaaaattccatcgggtgtttggagatctttaagaagtaaaaaagatggagaggattggttggatgataatttaaaagctctaactaatcttattgttggtttaaatgaaactgatattcctataagagttaaaagctatttaggaccaataactgaatatcatagtattaagcgacaaggtgtagtagaagctgaaatttatgatttattgttagatggtaaaattgtgatattagatttatcagttggtactgagatggttcgtaaagctatggctttacgtattgcaagttatattttatctcaatcgatgagtagatttcataaacaacaatctttaccaaatatagttatatatgtagaagaagcacataacttaattggtaaaaaggatgagttagtgggtacatggccaagaattgctaaagagggtgcaaaagctaaaattgcttttgtatatgctactcaagaaccgtcctcaattcatcctaatattttggctaatacagaaaattggtttgtaacgcatttaaataatgaggatgaattaaaagcactaggaaaattttatgattttgcagattttcatgattcattaaaaactgctcaagatgtaggtttcgctcgaatcaagactttatcatcaccattcgtagttccgactcagattgacagatttactccagaaaagctaaaagaaaaattaaataaattgaggggctaa

SEQ ID NO: 65982 - DNA, 960 bp, Acinetobacter baumannii
atggaattaataaataaaaaaattaatattagtttttatagtccccatttactcaagcaaaaaattttaaacaaatcagcagtttgtacacaatttacagcatctagattgtattcaccagaatcttatttaactatgggaaaatcttataatatttgtgatgtaaaatattataaagataaggcgctcaatctttttgatcatgacctagaagcttcttttgaaagatatatcattgaagaaagaaaaaatttattaaatacttcacaaaggaataagcacgaaaaatggcttcataaagttgaaaatgatcttaaatttatttttgagaataatactacacaactctcatttgatgacaagaatgatcgcgtattaatagtccagaataatggagataagttttttggtttaaaagaacttccttcaggttttaaagcaatttttaatatttactcgagtcttctaatgcgaactcgcttattagatattactaatatagatttagaaggaatagtagttattgatgaaatcgatgtacatttgcatatttcactgcaaaagaaaattctaccattccttattaaatcatttcccgaagtccaatttattgtgagtacacactctccatttgttattacctctacttctgacactatagtatatgacatctcaactggtgagttttttgaagatgacttaagcggttactcttatgagtctgtaatcaaaggcttattccatgtaaatcctataagttctgagacaaaaaaatctattgaaacccttaaaattcttttgaatgaaagtccaatcaactacgactccataagattaattatcaaaaatttaattcctctaaaacaaaaagacttattagataagtcagttaaaaacctttatttacaagctatcaatttactggcagacaataatcaattggagaatttagatgtttaa

SEQ ID NO: 65983 - DNA, 690 bp, Acinetobacter baumannii
atgtttaaagtatctaaatctgctaaaccaacggattggactaccagagactataaggatcctatagttgttcgccaattaaagaaagattttcatgggaaatgttatatctatgaacaaaagcattttcccaatttaaatgtagaacatttcgttccccatttaaatgatgaaactcttaagtttgattggaataatctctattatgcttgttctcgttgtaattctattaaaaatcagtattacgataatatgcttgattgctgtaatcaggatcacttagttgaggaatggataagaatttattacagaatgcctgatgaagatattgaagtaattaatgcttgtcccagtgatcattcattttgtgagaaagctgaaacatctaaagagctcatttctaaatgttttaataatgccaacagcggcatccaagaggtaacaaaggaagacctaagagaaaaagtgatcgaggtacacagcgagtttttagatttaaggcgagatttttttaagaatttagataattggcttgatgaagaaaaaattattgaagctagaaaaattaggcatcgcttaaaatcacattatccattttctgcaattttacgtgggcatatggaaaaagattcaaaatggagaaaggctctagaagaaattgaagaactcgaactccagcaatctacttaa

SEQ ID NO: 65984 - DNA, 432 bp, Acinetobacter baumannii
atgaatatcacaaatttttttagaaaatttgctgatacttacaaagagacctatgaacgtgaagaaaaattactcatggaaaagcagcgtgagcagattaactcattgaaaattagtgtaagtatgagtgaaaatttaaatgagaaagatcttttagaactagctcataaatatgtgacttttgttgaagatattccaacacaccatagtcatgagataacttccgaagtcgttcatgaacatcagattattcagtggttgacaactgaagaggttctttcaaattgtgtttatggagtgtctactgaagattcttctagatggcatagtgtaactcctgaaacatctacagttactcctaaatcttatgggcagaaatgggctagttctattccagtaaaagcgcacatcaaaaagaagaaagtactataa

SEQ ID NO: 65985 - DNA, 1023 bp, Acinetobacter baumannii
atgggactactatttctaatacctattttggtaagtgggttcttttttttatcaaaaagccattttcataagcataaatttcagaaacttgatggacaacagttatatttaaaatctgcattatttgggattttttttacaacattagcttttatttttacagtatggttaatacaagggaatagatattttttatttgatatattggcattaaaagacttaaaggataatttaacagtttacattataaattcgctttatagttctaatttaactttggaaaataaagtatataaagagactgagatgtataaaacaatttctttttatatattctttgtttttacttttataaattctatatttttaacgataattggagttaaattatataaattttattatatttttaaggaatatgtaaaaatatctaatttaactttaaagataatagcgtatattaaatctttttttattgctattagtaaaatgtttccatttttcgatggtatgagtgctaaattattgttgacttatagagctcataataaagggctagattcagttaaaaaggaaattaaagatccattaaataatttattgtattcttctatcttgttaaatattaatgatctaagtaatgatagcgactctaaattattacttttaactatgaatgacagaaaggtatatataggaaatatattaggttttggaataggagatgaaagattttcattaacaagcgagacttttatatttttaccttttcagagtgggtatagagataaattagataaatcagtaaaacttacaacttcatatatagatgttattaataatgctaaggacgatgttagtgagataactataattttacgtagagaaaatatcatatctgctgttaaatttgatgaaaaaaggtttaaagatatacccgtaacttctgataaagaattatttaaagaaaattataaagtaacaaaccataaggtaactattaattccttaaattctaattaa

SEQ ID NO: 65986 - DNA, 555 bp, Acinetobacter baumannii
atgccaaatttagttctcccaacacgtgcattaaaagttgtaaatacatcaattgagttatttcaccgccgcggttttcatattgtgggcgtcgacagacttgtaaaagaatccgaaattaccaaagcaactttttataactactttcactctaaagaacgtctcattgaaatgagtctaacctttcaaaaagacggccttaaacacgaggtcatttcaattatccatgctcaaaaacaattaacactcattgaaaagctccgcaaaatttattacttacacgccgacttagatgggctttaccatttgccgtttaaagcgatttttgaaattgctaaaatacatcccaaagcttatcagaccgtagttgattatcgaaattggctgattaatgaaatctataatttgctattaacgaccaattcaaatgcttcaaaacaagatgcccacatgtttttgtttgtgattgatggggcaatggttcagcttctagatccgaacaaaccagatgaacggaagagattgcttgagtattttttgttggggtttgggtga

SEQ ID NO: 65987 - DNA, 666 bp, Acinetobacter baumannii
atgctgaactctcggcctcaccctacacgccctttaattaaatatggaacattacttttaggtgcgcttttagcgggttgtaattcctcatcaagtttagaccccacaccgacacaaaagcagatcacaattaagcgcgataaattcggtacaccgcatgtatatgcaaatgatacctatggacttttttacggctatggatattcggtagcgaccgatcgattattccagatggaaatgtcgaaacgtacaggacaaggtacagttgccgaggtgctcggccccgactatcttcaatatgatattgcaacacatagccgttttgacccagaaaatattaagcaacaactcgccgcgctctcaccagaagaccgagcaatttttgaaggttatgccgcaggttttaataagcgtgttaaagaggttttagcagatccagctcttatgcctaaagagttcacagatcatggttttaaaccatcaacatggcaaccagaagatattgctatggtttgggtgggcttaattttaaatcgcttcttttcagcaagttcggaagtatcaaatttagatttactcacgcaattgcaaaaagaaaaaggtcaagaagaaggccttaaagtctatcaacaattacgttggctagacgaccctaaatccaagtaa

SEQ ID NO: 65988 - DNA, 339 bp, Acinetobacter baumannii
atgttgagatggcttatttttctaattattcctatcatgcttccaggttctttatatcttctatttattgagctagctaaagtatttaatgatacagctcaaagagtgattgcccttatagtgatgtatattgtagctgcttttattgctgcgacagtaacttatgaaaataatccatatggtaataaattgaaacctgttattgtagtattatcaattggagcattattatttttattttcttccaaaactataattgcaattatctattttattgcaagtatatttatagtttcaaaatggcataggaaatttaaggataaacctctaccaaactaa

SEQ ID NO: 65989 - DNA, 774 bp, Acinetobacter baumannii
gtgaaaaagataatgttagcaacactaatgggtttcagtggaataagtagtgtatttgctgagtgtacttatagttttgatgcaacattaactcagttacaatctttaggtaatacttctattcagaagtttccaactattacaggaaataagttttcttataagacatcacaacaaagtctaatttacatggctttcagtcaagattacctttcacgatttttagcagcaaatgattcatctgcaatgctatatacaagaggggataaagtaataccaacttctggaattatagcgtttgaatataaaattaatgttcctacattagggaatacaggttatgtaaatattttcccagctttagcggctggtattatgcagaatggtaaggctgtaaattttatagttgcttaccaacatgggtcgacaactaataatttttatattcaaactacatcaaatgatagtgcgttagtttctaatggctttaacttagctccagaagctacttctgatggttatcaaaaaattggtatctatattaatcagaactctaatcaagttggtttagtttttaatggggttaacaaaggttattttgcaacgttcccttctaaactcgataatctatatttttcattaacctctaatttttataatttagcagcaactgatgcgaataaagatgtttcgatcgagttcctactggatcaatcaaaaattacacaaacttatccaacaggtactaaggatatttgtggagtagctttgtaa

SEQ ID NO: 65990 - DNA, 1179 bp, Acinetobacter baumannii
atgaacaataaagtttttctgtacttggcggtattctgtatttctatagatagttacttccgcttgcgtggcatagccggcattggctttcttttgatttatcttttgactattaaatttgaggctaaatttaataaaactttacttgtcccaacagtcatcatgttggttgggtttattgtttatacaagtttggcttttttattcccaaatatatacctgcaaattcctgatgatagagatacgttctttttcaaagtattagaccggctctcattaatcattcttgcactaatgatcttttggtctttcaacaaggttaattacgcattaatactcaggaaagtagcgctatttcatatattctatctattaatacaattcgttctttactatggagttggactgaagtttgatctgttaggaatatttggtattgaacagcgtacatctatggattatagcggttcgacagtattccgacctgctggtcttttctgggagccatctaattttgctgcttatactttggcattatatctaccgtatttggttaaaaatagtaactttagaaagaaagactttcttctaccagtttcaattattttgactttatcctcagctgctttcctagtaggctcgctacttttgatcatgatgttgcttaaatcaggattaattaagcgaccaaagattttttttacagcactcattattgggttgccattagtttattttggctataattctcagaaagaccgattctcagatggtgtatctgataacgctaatactattttgcgaacaaatttggttgagtacgcttgggaatctcgacttaataatccagttcttttaattggcggtacaggcctatactcttacgacctatacatttataaagaagagcaatatgcatatgggcgaactattgcttctattcaagatgctacactctttgtatttacttatcttttaacaggggtaattgggctatttttattaattttacttatcttaaatgttaaaggttttagtaataagcttttcgttttaacttttatgcttactaagatttctttcttatttccaatattcttgttctttatttacatggtttttgaagaaaagatcagtaggcgaaatgctgcaaaggataaagtagaaacaaccaaataa

SEQ ID NO: 65991 - DNA, 1182 bp, Acinetobacter baumannii
atgaaaataaaaccatatatatcaataggtttgattttaaacttatcattaaccgcttgtgtcaaccaaacattatccccaccagcatcagtaacagttatacccacaaccactctcattcgtgccgatattcctgtaaaagaacttactaaaatcgaggcgtttacaggtaaaaaaggtgaaattcaaagaatcccagcaatcttaaaactgaaagataatcaaattttatatttttggagtggtggtgttaaaggctatgatggagatcttgagggtgcaaaattattcaaaaggattcttcaatataattctaaaggacaaattattgatagtggaaaaaaagaattatttttctcatcccccgatttaaagggagttgctaaacaacccatgttgggtagaactaaagatgggagaattatattgatgtttaatgtaagacagccatctttagagaaaaatggatatcggatttataagattatgcttgcattttcaagtgatgaaggaaaaacttttacgaaaccaatagaaattcctaataaccctattgcaaaaacacaggctcttggcactactggcactattttaactcttccatcaggtcgtttaatttgtcctgtctattatattaattatttaagtgcaataggaatgttatattcagataattctggtgtaacttggaaatatggacaaatatttaagccatcatatacagttccttttgaaccatctattactctagatgaacataatcacattattatttcatctagaacttccaatcaagcttatagagaattatcaatttccactgatggtggtgaaactattcaagatttaaatttaaacaaagaacttataacacctcctgttgcagcttcaattttatatgatcctgataataagttttttttacatagttctccaactggaaatgcacgtgatcactataaaattcagctgagctttaatgacgccaaaaactgggagaaaagttattcaccttttcctccatctttttatataggctactcacaaatcattaaattagacaaaaacagttacgccgttgctgtagaaggattaatgaataaatatgttcttaataattctgaaaatgtagggatatttatttttaataaaaaagagttatttgatcatttatcacaataa

SEQ ID NO: 65992 - DNA, 1008 bp, Acinetobacter baumannii
atggcatttgcgatcatgatttatcatttaatcagttgggaggtttttcacccaaaagctgggaatgttctaggaaattttggtatttatggtgtttcaatattctttgtactttctgggttaagtatgggaattgtatataacaactatattaaagattttcatacatctattgtattctttgtgcgtcgcttgtttagacttttgccactcttatggatagctattgctattgttgcagggataggttttatagttaatggtcagcttgatatttataaaatctttttgaatgtgacattattgtttggctttgttgcaccagccgagtatataaatattggagcttggagcattggtaatgaaacattctactatgctttcacacccttccttatcatgctttatgcccaaaataagcaattagggaatttagctgttttagggttagttgctgtgggagtatattttgctttctctgctttagatccaagtaaaattttatcagctcagtggcaaacctacattaacccctttaataatttcttcttgtatgcttgtggacttgctttgtattacaacttccataatgtaagcatgaagagtatagcaaatgttctgatcgtaatctcacttgctgttttatgcttgtatccagtagatggtgatcaaattaatattaccactggtttcaaccgaattgtttttgcgttggcttcaattgctttaacgcttggtttttataagttagaaattgatcttcctagctggtttgctaaaccttttgcaaatttaggtgaagctacatatggagtctatttattacacccagtcgtctatatgtttgttaataaagtagttcaccaaccaatgctgtgtatcattgttacttccattgctacaattatcgcagccaatatttcttatggagtttatgagaagccttttatcaagattggtaagaaaatgacttctcaagaagttaaaagcatcccgcacctcacataa

SEQ ID NO: 65993 - DNA, 168 bp, Acinetobacter baumannii
atgggccaaagtcgagaagagcaatatcatttagttgaagaaaatactcgaaatgaagtgatggttgtttttaataaaaaattaattgaaattatctatgactatattccatttccggtgaatgaaagtgagagaaaagcatacaggaaaggaccggcacggatctaa

SEQ ID NO: 65994 - DNA, 1035 bp, Acinetobacter baumannii
atgaaaatactttttttaattaattccttaaaaaataagtctggctctgaacgtgttgctattgaattggcaaataagatgtcggctatagaaggttatgatattactttattaaatagggagtcgactagaaatagtacagcatatcctgttggtgaaaatgtaaatgtaatagcactaaatggtaatttatttcagttttataaaaagcttaaagaacatatttctagcaataaatatgatgcggtaattgttcataatatgggtaaattgtctctactatgtgcctttgtaccaaatattaaaaaattagtggttttggaacatgtttcttttgtcagccgtcctcaaaaaatacaaattttaagtaaacttttatatcgaaaaattgatcaagttgtgactcttactcaaaatgataaagagcaatttgataaatttcattcaaacgtccttgtcattcctaatttttcgccatttcctattagctcaacgcatcagcagaataataaacagattgtaacaattggtcgtttaactgatcagaaaaattatatgcatctccttcaagcatgggagaaaatacagcaatctattcctgagtggcggttaaatatttatggagaaggtgaacatcattcaatgttagaaggctaccttactaaaaagtcacttcaaaatataacattgatgggaacaacttcagatgtaaagcgggtatacgaacaatctagtttctttgtaatgtcatcaaaatatgaaggcctaccaatggtgttaatagaggcacaaagctttggattgcctatagtgtcatataattgtccttatggtcctagtgatgtcattcaagaaaataaaaatggattattagttgaagatcaaaatattgataaattagcagaagcaattctaaaacttgcctcatctccagatctattaagacgcttttctcaagaatcattattaaatgctaaaaaatatcagcctgaacagattttaaaaatgtgggttgagaaggttttagaaggataa

SEQ ID NO: 65995 - DNA, 1038 bp, Acinetobacter baumannii
atggtcttgagtgtaaaaaaagagttgttatggtttcttatattaagtattcctttagcaattctagtaggagataggggagcaactcctgatactcagatatattttgatgtttttaaatatattaacaattacaacttattaaatccacaagaattttatgtacaaacagggatggaaataggatttggttggtatagttggttactaagttatttgactagctctagttttcttcttttttcatttttttctttcttaaatttctattttatttataaaactgcaagagctttaaaattaccatatttttattgtttgctattctatatccctagcgcttatttctttatgcagcaatttatgcaaatgagacaaggtttagctataagtatggtgatattctctatagttagattgttccaatctaggacagatctctttgcttggtgtattttaatagcatcattttttatacatcaaacatccggattagtttttatatttgctgttatattttacttattaaaaaataactttttactttcaatagatagaattaaaatgaccttaattctagccttttttatttttgttgttttatttaagttttttttgttaaattttttggttggatcatttgagagattgcagagttatgcaaatactgacaattattcagaagatattgcattattgagtttgccaaatataagaaccatgcttgtagtttcatttcttttatttttttcaaaagaaaatattttaaaaagagatgaatataaattttttctttatctaatggttattgctttggcagcaagggttggtttttctgagttcgctattatgagtggtcgtttatcaacggcattttcatatgttgagatatttgtattaccaattttatttttgagccgctttaataaagtttgctgtttattatttggaataatttattttattttacagataattataactttaggctttcaagcaccttatcttctagaattgtacttttctcctttatattga

SEQ ID NO: 65996 - DNA, 219 bp, Acinetobacter baumannii; identical to SEQ ID NO: 63722

SEQ ID NO: 65997 - DNA, 144 bp, Acinetobacter baumannii
atgaacgatcaagacattttaaacttctggttttcacctgaacaccgttcactctggtttgcaaaaagtgaggattttgacgcaaaaattcgggcactgttgcaaatagtcggtggtgataaacttatcatccccttttgctga

SEQ ID NO: 65998 - DNA, 1599 bp, Acinetobacter baumannii; identical to SEQ ID NO: 46980

SEQ ID NO: 65999 - DNA, 630 bp, Acinetobacter baumannii
atgatgaaaattgctgttctagtctctgggaacggcagcaacttacaagccttgatagatgcaaatctatcagggcaaattgtaggtgtactgtctaataaagccgatgcttatgccctagagcgtgctcaaaatgccaatatcgcgacagccgtaatctctcacaaagactttcctagtcgtgaagattttgatgaagctatgcatcagcaacttatcgcatggcaagctgacgtggttattttagctggctttatgcgtattttaactgctgactttgtcgataaatggcaaggtaaaatgcttaatatccatccttcattattacctgcctataaaggcgttaatacacatcaacgtgtattaaatacgggggatcgattacatggctgtaccgttcactttgtgacttctgaacttgatgctggtcaagcaattgctcaatctgccattgaagtaaaagaatatgacaatgttgcatccttggccgaacgtgtacataaacttgagcattttatttatcctcaagttgcagagtggttatgtaatggccagctcacatggaaaaatggacaagcctatttccgcaatcaaattcttgaacaccctatccgttttgcatcttggtaa

SEQ ID NO: 66000 - DNA, 1368 bp, Acinetobacter baumannii
atgccaccaagacagtctttaattcatcagcaaaatctttggaaaacattttttgttttcttattgcccctgattgcaaccaatatcttgcaaaacctgtccggtaccattaacaccatttttgttggacaaatgatgggggtcgatgcgattgctgccgtctcggtttttttccccattttgtttttactgcttgcgtttattattggtatttcaacgggtactactgttttagtggggcaggcatggggcgcgcagaatattgaaaaagttcaaagtgtggtgggctctactctgtttatgaccatcattggcggtatcattaccgcaatcattggtgtgttttttgcccatgatattttagaacttttaggtacggatccgaaggtgatgcacctctctttgccttatgtgcaatggatgttggcaggtagtcctcttctctttgtttatattatctatacctcaattttacgcggtgtaggagacagtactactcctttacttgcactggctttaaccagtgtgattggtttggtcattaccccgatattgcttaaaggttattttggtttacccgctttaggaattattgctccggcaattgcgaccattactggctatgtagctattctcatttttcttgcaatttatctaaacaagaaaaagcatccacttcgaccgaaccgtcagcttttgcaacatattcgtcataattcggaattaagtaaaatcattttacgcctaggtgttccaaccggtattcaaatgattaccacttcaatggccggtttagtcattgtgggtttagtgaaccgtttcggagctcatgccacagctgcgtatggtgccgtgaatcaggtactcaactatattcagtttccagcgatttcgatctccatcgcggcttcaatctttgcagcacaagcgattggtgctggtaagtcggacctactcgcacgtgttacacgcactgctttgggaatgaactttttatttacaggtaccttaattgcacttggctatctattttcaaaatatttgatggctttattcatcacagatccaactgtggtggtgttagggcaacagcttttatttattgtactttgggcaattttattctttggtgcaggtgccatttttgcatcaattatgcgtgccagtgggactgtaaccgtaccaatgctgattaacatctctgccattttatttattgaaatgccatgcgcttactggtttagttcgatgtgggggcttaaaggcatttgggtcgcctatgccttggcatttatcagtttatgtattattcaaggcttgtattatcaatttatctggaagaaaaagaagatcaaagttcttatttag

SEQ ID NO: 66001 - DNA, 159 bp, Acinetobacter baumannii
atgaacatggatatatattcagcaacacctcctgttgctaaaaaacgccgaaaatacagcaaagaattcaaactcagtattgtcaatgcctgcaaaaatcctaatacctcgatcgcttcggtcgcactgcaacatagtattaatgtaagcgtccgctga

SEQ ID NO: 66002 - DNA, 459 bp, Acinetobacter baumannii
atgtcattgatcgcaaataccaccgttgtgcgtagtcgttttttagatattcaacaaactgtctctgagccaactgatattccaaatcaaatacgttatttggaagatggtgtattgattagtgaacatggaaaaatcaaatggtttggtgcatgggcagacgctcaacagcatcttcctgctggagttgaggttcaacattatccagaacaattgattgtacctggctttattgatacccatattcactttccgcaaaccgaaatggtgggagcttacggcgagcaacttttaagctggcttaatacttatactttcccaaccgaaatccagtttcaggacaaagcatatgcaagtgaaattgcccagttctttattcaggaactcttaaaacacggtacaaccacagcactagtgtttctgtacagttcatcccgaatctgtggatgccttatttga

SEQ ID NO: 66003 - DNA, 204 bp, Acinetobacter baumannii
atggccacttataagcagcttcaagaatatataaaggaacatcaccaaattacagctcagtcctgttggattgctcatgttaaatcggaacatggaataacaatgcgaactaatcggcaaggtaaagaaagagttaaaccatgtccattgaagcatagagataaagttgaagaggctctaagacattttaagatgatcccctag

SEQ ID NO: 66004 - DNA, 405 bp, Acinetobacter baumannii
atgataagtttatcaccaccgactatttgcaacagtgccgatttttgtatttcggctttaaatgaagcgattgaaaaatatggtcgacctgaaatatttaatacagaccaaggcagccagtttaccagtgatgcatttattgatgtattgaaatcaaatggcattcaaatcagtatggatggtaaaggtcgatgggtagataatgtgatggttgaacgattatggcggagcgttaaatatgaagaggtgtatctcaaagcctacagcaatgttttggatgcgaagaagcaattaaacgcatattttgaattttataatttgaaacgacctcattcgagtctggacaaaatgactccagatgagttttactatgaccagctaccacaacaaaataaggtagcttaa

SEQ ID NO: 66005 - DNA, 705 bp, Acinetobacter baumannii
gtgaatgagctctattcaagtaatgttcactattctgttatggcacaagaagaaggcgaccagaatctcaaaccagaaaaatctaaaagtttagagttaggtatgtttttgaattggaataattgggtcatgcaacttgttgggtatcaaatggattttgaaaattatatgtatttatctcattcaggtgttgctgtgcaaaatcgattacctttaaaatactggaaacagacagacactgacgtcaaagggtttgaaattgatttaatttatgattttaatctagctcatattgggaatattaaactaggtggtttagctgattttgttaaaaataaggctgttaatcctacaggtataaggttagctaatgatggagtttacctaccaaatatgcctactaatcgttatggcatgtttcttgagtggagaaatgattcttggaaaggtaaaatttcaagtatttactacgatgagccaagatatctaggtaagaatgtaatacaggaagttcctttatctggttacaacttacttgaatttaagatagataaaaaattaaagattaaaaatgcttcatttgatatatttttaaatggtacaaatctgctgaacgaagaggctagaccacaaaactctcctctaaaatatattgcccctctaccagggcgagcatttcaactggggataactatgcatatttag

SEQ ID NO: 66006 - DNA, 204 bp, Acinetobacter baumannii
atgaaaactgaaatcatagaagctctagcgttagagcttactaaggcaaccattgctgatactgaccctttaaccattaatataaaaagcgctgatctttgggttaagacattcaatgaatctttaaaggctattgaggatgcctcaaagagacttgagccgaagcgcaaagccgcatcaaaacctattcagggaataagataa

SEQ ID NO: 66007 - DNA, 720 bp, Acinetobacter baumannii
atgattttgcatggcaatttatcttataaacttgagttaggtaatactcttttaaatccaaaatttatcaatcagtatggtgagttaatgcaatttgatattgctatatcaaacccacctctggcattaagtaattgggggtacgaggaattaataaaagataaatttaaacgttttacacttggaatgccacccaaatctagaggtgattttgcttttatcctacatatgattaattcaattaacgataatggacgtatggcaattatagttcctaatggtgttttattcagaagtggaactgaagctgaaattcgaaaaaatttaattgaaaataatctgattgatacagtcattggactacctgaaaaacttattttcggtacagccatccctattattgtattaatattgaaaaaaaataaaactcataacaatataaagtttattgatgcatctaaaaaatttatatttgacaagaatttaaattctttaagtaaagaaaatattgatgaaattgtaactgcttacaagcaggataatattatagatgattttgtttatactaccaatataaatgagattcgtgaaaatgaatataacttaaacatttcaagatatattaagcacaaagaaataaatattaaagttgatttatatgcaattcaagaagagcataataactgtctcttatacacatctccgagcccacgagactag

SEQ ID NO: 66008 - DNA, 336 bp, Acinetobacter baumannii; identical to SEQ ID NO: 49257

SEQ ID NO: 66009 - DNA, 942 bp, Acinetobacter baumannii
atgggcagtcttaatcttgcagctataacagctacttctccatacattaaaaagatccaatcggcattagaaaaagcaacaggccaaacgattgttacaccagaatttcgcaaaattaagcgcgttgctggtgttagcgttttaccagttgcatttttcttttcaggtggcgctacgcttacactttatattcgtgcattagcggatgtagtgaaggccgaactgaatgataaagtaattgttctatctggcgattttagtgatgactataagccaacatttgaaaacgccgtaagttgtgttgctaaacttatccgtgaagcacaatctaaaatccaagaacaaaataagcgtgaaaaagttagcttaccgccgcgccgtacttctgtagatcagaaaattaaagaagtcgaagaacaagagcaaaagcttgatgaggatttagctaagcaaatagctcaccgtgaccagctgaaagaacaaattgaacatgctaagcaacaacttggtataagttcggaggctggtcaatccgaactgggaaagcctgaatttgatagtgcgattccaatcaaatcagttacagcaaatatcacacgtggtaaagctgcaatgaacaaagccattatggaaaaaaccacagtgcatagagctatgtatcgtaatgatttaggctgggtggattttgagtatggcagtgataaacagggtattaagcatattatcaagcgccgtatggaaagtgatggcatgacatatgatgaagttgtgcatatgcttgtggatactattgtgcaaacaatcgctcaaggtagtacacaacggcgtacagaacgtggattatctacaagaataaatattgtatttaattcgcatgaagcgtcattgattaagcgagaaggtagtaatgcatggctgcttacagcttttgaagtgcattaa

SEQ ID NO: 66010 - DNA, 1122 bp, Acinetobacter baumannii; identical to SEQ ID NO: 50761

SEQ ID NO: 66011 - DNA, 255 bp, Acinetobacter baumannii; identical to SEQ ID NO: 44740

SEQ ID NO: 66012 - DNA, 537 bp, Acinetobacter baumannii; identical to SEQ ID NO: 49176

SEQ ID NO: 66013 - DNA, 663 bp, Acinetobacter baumannii
atgagtaaaacgcctcgttatttagaaacgccacctgactggacaccagaagaacaaccgactttacctggttcgccagcagcgattgcgcattctgtacctaagcgatttctttatttttttattggtctgtttgtcgctatttcagcaagcttaagtaatggtttcattacggcaaatttgcccttaatccaaggtgagtatggcctgacaccttctgaagccgcttggcttcctgctgcttatgtaatggccaatgtcagttcgaatctgattttgtttaaagctaggcaacaatatggtctgagagtcttttcagaaataggacttgttatttttattgccgtgctggttttgcacatttttgtgcatacctatgaaatggccttgttcgctcgggttgtagcaggtttagctggcgcaccacttagctctttaggtatgtattacaccatgcaagcttttaaaaaagccgacatggcaaaaggtatatatattgcctttggttttcagcagttaggtgtaccgctcgcctggattatttccccttttcttgtgagtacagacagttggtctgttctttacacctttgaactcggcttagcactttgttgtttagcaatggtggtttctttgaaattaccacgtagcttacgaatctag

SEQ ID NO: 66014 - DNA, 222 bp, Acinetobacter baumannii
atgagtgagtttaaagtcggggataaaattacaactctcgcatgtagagatattttgacagttactgcaattggcagtggtcactttcttaaggctaagggctttaattgccatggtatgaaggatggagagtgcagtgtccttgattttcaagtaaagcatgccaccactaaagaactaatagtgggtcaccgtattgattgccaatcaaaggatgtttga

SEQ ID NO: 66015 - DNA, 354 bp, Acinetobacter baumannii
atgagcgaaggatataagacactgccagaggtcattgaggttctggaatgtagaaagaaaagagatctcagtatatttgaacatgggttcttgcatggctgtgattatgcgtatgagcaccagcaagagaatgtggaggatgcaaacgcgaaagcgcaaatgtgccgagacgaaaagaatcatgcaattaatcgatggtcagcagtttgtaatgaacgtgacgagctgcaaaagcggataaacaaagctaaagaaattgcagatgaattaatgcaaagcattgaaaattacaaattgggtgagttgttggagaaaatacttaaaggtgatttagatgaagtcagtaaatcttaa

SEQ ID NO: 66016 - DNA, 300 bp, Acinetobacter baumannii
atgaagtcagtaaatcttaaatttcaacgaggtgatagagtttatgtggatttcaaatcatctaacaggatggaaactgatggaactcatatttttggtgaaggccagattgatagggtagatgaagataatgattttctaattggaaggctggacaaggggggatattttggttgtccatcttcagatgtaaaaccaattaatgagccttgtatacatgggtacgatgttgcttgcttattatgtggttttggacaatctgaaacgaatggtgtaaggatctggcatacccaacgatag

SEQ ID NO: 66017 - DNA, 780 bp, Acinetobacter baumannii
atgactttagaaatatgtaagctttgcggagaagaaaaagagctacaacgctctcatgtaatcggtaaagctgtttttagtaaaattttaagagaagatgctgttgggtacgcaatcaatatctcaataggaaacaatcgtattaggaaaagttctgatacatgggatacgaaattattatgtcgcgattgtgaacagttatttaatcgaaaatttgaagactattcctatcatgttttaagaaaagaacaaaaagatataataactaaggaaggaccgcacggtatttatttcagtaaaataaacacttatagagtcattctctatttattatcaatctattggcgagcgggatattcaacccattcagcttattcaaatgttgtaatcaatgaaggtataagtagtcacttaaaagaagtgttcaaggatgaggctaacttaaacatgagagccttcagtgttagagttagattgttaaaagacgaatctggtggttttgctccagaaagtttaaagcgaataattataaatccatataatagaattaaagataaaggttttgttttatgcatgattttcgaaggatatttttttgaactattttttaatgctagtacttttaaggaaagactagcaccgggttttttaaatagagctagagattcattttttgtaccctatgtagatttatttgatattccacaagctgtacaagcattagctaagggccttaaaattcatgatgaaacaccagatgaagaaaaaattaaaatataa

SEQ ID NO: 66018 - DNA, 798 bp, Acinetobacter baumannii
atgaaagtaaatcgtatcgtatgctggtttagctgcggtgcggcctctgctgtagctaccaagattatgcttcagcaagcctctaagctctacccagatgcaccagtagtcatagctaatagccctattattgaagagcatttcgataatgaaagattttttagtgaatgtcagcaatggtttggtcaagaaatcattaaactttataaccctcaatatcctgaaggtaaaaattcaatttatgaagttttccgaagaaggaattttttaaagggaccaaatggcgcaccctgcacaactcagttaaagcggattccgcgcggttctttccaagaatatggagacttacacatattcggatatgacttaacagaaattgcgcgagctgaagagtttgaagaaaaaaacccaaccattaaaacttacttccctttaattgaagcagaacttaccaaagcagactgcttagcaatgcttcaagatgcaaatattgaactaccagcaatgtataagcttggctatttaaataacaattgcattggttgcgtgaaaggtggtgctgggtactggaacaaaattcgcaaagacttcccagaagtttttactcgcatggcaaaagttgaaagagaaataggccattcaattttaaaaaacgatgatggcccagtttttcttgatgaattaaaaccgaatgttggtcgctataaagatgaacctgatattgattgttcatttagttgtgtcatcgcaaaagaagacaatgactggtgtgcagtaaagtttaaggatgcagtatga

SEQ ID NO: 66019 - DNA, 351 bp, Acinetobacter baumannii
atgagtgcaactaaattaattcaaaaagtcggacttggatgtgcaaaagctcaagttggtctcattttagagcttagccaaaagcatgaaatggatttacaaaatgttgaaacttttggaatttgtgtggatgtttttgagcttaaacagttcgttgagtcactggaaatcattaatgatttagatggtattaaaggtgctaaagacacattgtatacgttggtccagctgggctgggatgagtttgagcatcgttatatagataactggttttgtacaaaaatacgattagagcaagctattgctgattgtgaatcaatatacagaagcggtgaatctcatgccaactag

SEQ ID NO: 66020 - DNA, 171 bp, Acinetobacter baumannii
atgaaatacaaaatcggtgatcgagtttattggctaaacaccaaaatgaaattaaccatttcccgaatacatcctttcattgaaaagtactcatgtgtttgtgatgaaggtcataaatggaattggttttatgcagatgaactgaagccaattgtgaggattggcaaatga

SEQ ID NO: 66021 - DNA, 732 bp, Acinetobacter baumannii
atgaaatctaattcaaccagcagaaaacgctcaaaaaaatacaatccaaacaagctaacaccagcgcaagttcaagctaaacagagaatggctgaattgcgtagagaagctgctcaagaatatgaattcagcatgagttttgtttcgattgatattcgagattttcttgaaaagaaaaagattgaagaggcagagttactcgagcgtttccctaatcgtttaaccattccatatcacttcagtatcgctgcttatgattatcaagatttggcaattgtccaagttcttgaacatgatgaagagtgtgatcaatggaatgttgagctcactattaccatgtcagatagaacagatgaatatgaaggacaacttaaagtaatccagccatttactgcaccgaaaatgaattatttcgagttttcagaaggaaaagaagattgttatgttgatttgggtgaagggttacgtagaaaaggctggaaaggtttaaatgcagaaatattaagggctttagagcagaacaaaaatatcccagacggttttgggattgatttgatagaggtaaaactaagtacttcatcaaaatttaaaagtgtttctgcatatagagaattcttaagtgttgctgaatgggtaaacagaggcgtagctgaggagaaattacgccagctttggattgccgatcaaattattggtaacggtaaatctattggttttggggacgtagcatga

SEQ ID NO: 66022 - DNA, 525 bp, Acinetobacter baumannii
gtgaacgcatttgttgatatgaaaaaatcggaatacgcattagttgcttactcaaacgttgcagctaaatcaaaagagcgtaaagctttagaaaaagcagtgaaaaaatggttgaaacatccaggtaataaaattcaaccagttcaatctaagcagtcagaatctatggctcatggaaatcagcgagcttataaacgcatgggttgccgctgtgaagtttgtgttacttgggccatttcatcaggttttgtaaaaacgaagccgaagtctgaaataaaacgtggtccagatgagcgtcaattgcgtatacaggcacaaaaagagggtttagataggtttgctcaggtatttaaagaagattggcaattactagcatttgagatcggttatgcaattacagcatttcaacttgaaagggtttatcaaggtaagtctgaaattgatcaatatttcacatggaagtatgtgaaaaaagttgctgatcaattagttgctgaaaagttaaaagttaatgggggaatgtga

SEQ ID NO: 66023 - DNA, 303 bp, Acinetobacter baumannii
atgaaaatatatatgacagaagaagatgtattgaacgaaatcgctggtggtgatgttaatgctaatgacttactgaacgaagctaaccctaactttgaaaagcgctttaagacgttaaccaaaggattggaaaatctcatgaaggatattcgtaaaagctttccagatgcaaattactacagtgctaatgacgggattttactgatgcttggagattcacatagtgcgagtggatctccccaacaagaccttgtggccgctgatggtggaatggatgggattcttagcgggggtgacttctaa

SEQ ID NO: 66024 - DNA, 705 bp, Acinetobacter baumannii
atgaccattagttcaaatgtacaaaaatatcttgaaaagcttgagaaaagttttaaagttttttctcaatgtcacacacttaaagaccaactttttgattatggttggtatccaattaaatttgtcagtagattcgaaaaagattcaaatgagactattgacgaatttatggaaaggttgatattaaagaaatatgatcaaatcaaagaatattgttttgagttatttcctttacgtaaagaggttatggaagtagcatttaaattgtatgaagctgaaaactatatagcatgcataccgctttttctgactcaaaccgatggtatagcgagagattacggaacaaagggaatgttctcaggtagaagtaatgttgaacctaataaaagtaaattcattccatatgtgaatcaaatagccaatcaagatttatcaaaagcaatatttattaggttttttcatagcgaaaaatttattggttctaaaagctacgaagaattaccaatttcaattcatactgataatacaaccccgaatgataattattcaatgaatagacatggtattttacatggacttattgaatatcaaaattacggtacaaagttgaacgctttaagagctatatgtttcatggtttatacgataaatattggtgaagatgttaagtttatttttaaaagtaacaacgatatagatcattaa

SEQ ID NO: 66025 - DNA, 411 bp, Acinetobacter baumannii
atgcgtctttacggctatttagatatggaaattgaacgattcaaaaatcaatttcaaaaacaaccaaatttatattttattagagaagatatgcttgaaaccttacttgtagagaaggaagcatacgcaaattcaactgtagtatatttcaataatgaaactgggttttatcattataaatcaacatatttaatacctgttgttgatcaatttttaaaacaatgtgttatatcatttgaagatttagataattataactttagggggggacataaccctagagaatggccacataaaataaaaattctaagcagtacagaagattatgtttcagtgccggtatctgtattaaaaacatttgaagaacattatgaaaagctgaaattgctattaggtaattttaaaaattga

SEQ ID NO: 66026 - DNA, 570 bp, Acinetobacter baumannii
atgacttcaatgtcgaacactacccaaaagcactttattgttgagcagtttcctttaccgacttgggtcagtgatgaaaaaggcttaattttatactgcaatacggagtgtacaaaatactggcgcgatacttctcctccattgtttcaacaatggctagatttcgtgtaccctgccgatttagaagaagttaaaaacaaatggttagatgcgatacggttccgatcaagaattgaatttaaatgccgtcttttgcataaaacccattattatcgatggtgtaaaatttctattcaattgtcgaaataccatgaatcttctcaagaaaatgaatggtttattagttttctagatattgaccaagatatacaagagcagcaaagcttacgaaaagatatcgatatacaaaatcaaatgctcgatatcagtgtcgattgtattaaggttttaaatacagatggcactgtatctcatatgaataaatcaggatgccttgcattaggtatacctgtagatgaaaaaaaattcggtatgcgatggttagatcttttaccccccccatattcgtaa

SEQ ID NO: 66027 - DNA, 1122 bp, Acinetobacter baumannii; identical to SEQ ID NO: 50761

SEQ ID NO: 66028 - DNA, 603 bp, Acinetobacter baumannii; identical to SEQ ID NO: 45120

SEQ ID NO: 66029 - DNA, 528 bp, Acinetobacter baumannii
atgcctaatatttcaggcatgatcgatagaattagcgatcaatttgctactgatgaattacttcaaaatcctgttgtcgatattacccgtaagaatcctcctcaaattggggaaataaacacggaagagttggcttatttaagagatttagtgctagctcaattgaaaaattcaacagtacttgatgctgccctcatgtcttacatgagcgagcctaaatatccagacaatattccagaaccagatgaaatagaggttgaagacctaaatgctattttgtcagaagggtatgagctgctactcgaacctgcttcgcgtctactttatacagaacaaaatggcattttaaagttttggggtaatggagaagaattaccgattgtggaatcttttgccacccaactcaaatcgattgccgatgggaaaagcattcctttcaatagtgagcttaacaatacagatattttagaaaacattgttcaattattgaataattcaattcttatgttgttacctcctgcagagtaa

SEQ ID NO: 66030 - DNA, 234 bp, Acinetobacter baumannii
atgtataaattcatgagaattacttttttaattatgagcacgattacttgttcagttacttttgctggtatagataaatgctcaaatttgccaaatcaatcggctttaaatacttgctcatcaaatgttttgaattctgcaaatcagaaaattaattccgtttatgcgaggctcaaagagcttggattcaatacaaagaaaaagattgccaatttcaatcttcacctgttttaa

SEQ ID NO: 66031 - DNA, 393 bp, Acinetobacter baumannii; identical to SEQ ID NO: 45786

SEQ ID NO: 66032 - DNA, 363 bp, Acinetobacter baumannii
atggggtcacgtttaccaaatcactttgaaattcaaaattctattgtggaggaggagttaaaaaaactagaaatcttggctcaaaaaccaataacacaagatgagatggagtggtttgaaaactataaaaagagtattgtagatattcaaccagattatatgaaacagaatggattggataatgttgcaatttctagaatagtgaaacttaataagtttttaaaagcattacgcttacttactattggttttaaatataaacattattacgattatcagtttggtaatccatttatggtccccctgagtcttcaacttctgtattggcgccggaatatacaaatgaatactcgaatattataa

SEQ ID NO: 66033 - DNA, 603 bp, Acinetobacter baumannii
ttggttaaagtttttgaagatattgggcaggtgtttatttaccgtggagttcaggtcaattctggtgaaattactatccagaccacggggaaaatcactggtaactttggtcttgtaggtagctcgtttactcgtcagcaaactaaccctgtagtgaatccggtggcagcctcaactcgtccgctggtgagtatgccgaacgtggaaaacttgcttattaatggtcaatcaattcaaggtaaggcttgtctacagtctttgactatttctatcaataacaaccttgaagcgatccgttgtattggttcaggtaaatacacacctgagttctacattgaaaagatgatggatatcgaagcaaatgcttcattcatgttctcttcaactgcggcagggtggattgatgccattaaaacccgagatgtgtttacattgacctttgatattaaagacagcaaaggcagtaaatactcgtttaacttccctcaattagaagtcatggaagcaaatcacccagatggtggtggtgacgacatcattactgtagacatcaactttgcccaagtgcgtaccagtccaacgattgtacgtgctcttgtgtaa

SEQ ID NO: 66034 - DNA, 603 bp, Acinetobacter baumannii
ttggtaaaagtctttgaagatattggtcaagtctttatttatcgtggtattcaagtgaatacaggtgaaatgacgatccagaccacaggcaaaatcactggtaactttggtttagtaggtagctcatttacgcgacagcaggttaatcctgttacaaatcctattccagcatcgactcgccctctggtgagtatgccaaatgttgaaaagctacttattaatggtcaatcaattcagggtaaagcttgtctgcagacacttaccatcaactttagtaataatctggaagcgatccgttgtatcggttctggtaagtacacgcctgagttttacttagagaaaatgatggatattggcgtaaatgctaatttcatgttttcagcaacatctgcttcttggattgatgctattaaaacccgtgatgtatttacattgaccttcgatattacagataccaaaggcagtaagtactcgtttaacttcccgcaacttgaagttaaggaagcaaatcaccctgatggtggtggcgatgacattattacaatagatatcaattttgcccaagtgcgtaccagtccaacgattgtacgtgctcttgtgtaa

SEQ ID NO: 66035 - DNA, 717 bp, Acinetobacter baumannii; identical to SEQ ID NO: 59066

SEQ ID NO: 66036 - DNA, 1200 bp, Acinetobacter baumannii
atgataaaaacatttctttatggtgaagatgactcactgccgttattgctcaagagtcttctcaaactacgtcatggacagatcacttttcagggcgcgtggaatgggacggtcggtgaagtttcagacttacatgctgtgattgaagttcacaatcctttattgatggatctcattttaaaaaatggtgttttgggagcagcagaaggctacatccgtggtgactggagcagcgagcaccttgtcgagttgattcagatcttggcacgtaatcgagctgtattggaccaaatcaaccagaatgttattgctcaagcgagccagttttttcttaaagcgtggtatcaaaatcgaaagaactctataagtggtagccgtaaaaatattgccgagcactacgacttaagcaacgacttttttaaattatttttagatccatctttaatgtattcgagcgccgtttttgaaaatgaaaacatgactctcgaagaagcatctgatttaaaaaaagagatcatttgtaaaaagttagatttaaaaccactagatcatttagttgaaattggaagtggatggggtggttttgccatttatgcagctcaacattatggctgtagagtaaccaccattaccatttcacaagctcaatatgatgaagccgttactcgtgtaaatgaagctggcttggcgcatcgaattgatgtgcaacttgaagactaccgtttgctcgaaggcaagttcgataagctggtttcaattgaaatggttgaggcagttggtgcgcaatatttatcgacatactttgatcaatgtaaagcactcttaaaaccgaaaggcttggcatttattcaagccattattattgaagatttccgatataaaaaagcattaaatacagttgattatattaagcgctatattttcccaggtagttttatccctagcgtgagtgtgttgactcaaaccgcctctgagagtggtttaaggttaaagcatttaaatgatattggtttaagttatgcgcacacacttcatcactggcgagcgcggtttttagcagcgcgggaacaagtattggctctaggttttgatgaaaacttcattcgcatgtgggatttttatttatgttattgcgaaggtggttttaaagaaggcgtgataagcaatgttcacttgttgtttgaaagtaccagttactaa

SEQ ID NO: 66037 - DNA, 486 bp, Acinetobacter baumannii; identical to SEQ ID NO: 52858

SEQ ID NO: 66038 - DNA, 927 bp, Acinetobacter baumannii; identical to SEQ ID NO: 59193

SEQ ID NO: 66039 - DNA, 507 bp, Acinetobacter baumannii; identical to SEQ ID NO: 57035

SEQ ID NO: 66040 - DNA, 708 bp, Acinetobacter baumannii
atgatttgcttgtacggtacagtggtacagtcacctgcagcaaatacaccttttacattggtttcgttgcggtcattcacaatgatctctccacggttggttagctcaacttcactatcttttaagaagtcagtgtttggaagtaaaccaatctgtacaaagatccctgcaagctctaccacatgctcttcatcagtcgcacggtctttatatttaagaccggttacttgtgaaccgtcacccaatacttctgtgcttaatgcattcataatcacagtggtgtttggcaagctgtttaacttgttttgcaagacttggtcagcacgaagtttagtgtcgaactcaaccagagttacatgctcaacaatacctgcaaggtcaatcgccgcttcaacacctgagttaccgccaccaatcacggcaacacgtttgcctttgaacaatggaccatcacagtgtggacagtacgctacaccacgggtacggtattcagcttcacccggtacattcatttctctccaacgtgcccctgttgaaaggatcacagttttcgattcaagttttgcaccgttttcaagttcaacttcaaccaagccatttgctgtttggtctgcacccgtgattttgctgacacgttgcaggttcatgatatctacatcgtattcacgaacatgtgcttccatctcggcagcaaacttaggaccttga

SEQ ID NO: 66041 - DNA, 882 bp, Acinetobacter baumannii
  misc_feature (17)..(44): n is a, c, g, or t
atgacatgtcttcaatnnnnnnnnnnnnnnnnnnnnnnnnnnnngggtatggatcatgacatgtcttcaatgaaaggtatggatcatgacatgtcttcaatgaaaggtatggaccatgacatgtcttcgatgaaaggtatggatcatgacatgtcttcgatgaaaggtatggatcatgacatgtcttcaatgaaaggtatggatcatgacatgtcttcaatgaaaggtatggaccatgacatgtcttcgatgaaaggtatggaccatgacatgtcttcaatgaaaggtatggatcatgacatgtcttcaaaaacaatgagctcttctggatcagatgaagtggtttacggatgggcgaatgcctcaaccccagctggactaaaagcacttcaatatagtgatctacaatctttaacccctcaaaaagatacccgtgctccagaacgtgaaattgaaatccgcttaggtggaaatatggagcgctatatttggacaattaatggtaagaagtttaatgaaactgaaccatttaaagtgaaatatggtgagcgtatacgcttgaaatttgttaacgatagtatgatggctcatccgatgcatttacacggcatgtttatgcaactggaaaatggccaagatccaagtaatatgccgaataaacatacggttattgttccaccaggtaagacagttacaactttattaacggctgatgagttaggtgaatgggctattcattgccatttgctctatcacatgtctgctggaatgatgaataaacttattgtggcaaatgtcgatagtaatagtactgattcgaaagatgttgttgctcaacctaatactaatgataagggggtaaatcaacatgcgcaccactaa

SEQ ID NO: 66042 - DNA, 435 bp, Acinetobacter baumannii
ttgaaagatcatgaaattatgagcacgaagaccaaaccgttgatcatcacggcaattgttatagtcgcaattgttgcatttatcgtatggcaaaataaaaaagacaataatacaagtgcttcagttcgtgacaacaaacctgttgtgattgcttatcaaactggggttgacccaagcaaagtggcgcaggccaatggagactatgaaaaacatagtcaacgtactattcaatggaaaaaatttgatgcgggttcagatgtagttaatgcacttgcttcaggtgatgtcgtacttggtaatattggttcaagcccacttgctgctgcggcaagccgtaatttaccgattgaggtattcttaattacttcaaaacttggtgcatctgaagcactcgtagtgagtaataaatcaggcattaaaaccctcaagatttaa

SEQ ID NO: 66043 - DNA, 2025 bp, Acinetobacter baumannii
atgtcgttatatccacatttattaaaaccattagatttaggttttacgacattaaaaaatcgcgtattgatggggtctatgcatgttggtctagaagaagcgcctggtggttatgagcgtatggcagctttttatgcagaacgtgctaaaggtgatgttgggctcattgttactggcggtattgcacctaatcaggcaggtttaacctttgctcatgcttctaagttagatagcacagaagaagccgaaaagcataaagtcattaccgaagctgtacatgctgctggcgggaagattgcattacaaatattacatacgggccgatattcttatcagccagagattgttgcgccttcggcaattcaggcacctattaatcccattaagcctaaggcaatgacttctgctgaggttcaacaaacgattgatgattttgcaaactgtgcgaagcttgctcaatacgctggatatgacggcgttgagattatgggttcagaaggttatttaattaatgagtttattgcagccagaacaaaccatcgtgatgatgaatggggtggtagctatgaaaaccgtattcgttttcctgttgagattgtaaaacgtacacgtgaaatagtgggtgaaaactttattattatttaccgattatcgatgcttgatctggttgaaggtggttctactttagaagaagttattcaacttgcgaaagcgattgaaaaagctggggctacgatcattaatacgggtattggctggcatgaagctcgtataccaacaattgcgaccaaagttccaagagctgcatttacttgggtcactgaaaaattaaaaggtgaagtttcagttccattaattacatcaaaccgtattaatacaccagaaatggctgaacatgtattagcgtcgggtcatgcggatatggtttcaatggcacgtccaatgcttgcagatcctgagtttgttttaaaagcaagtgaaggccgtagtgatgaaattaatacgtgtattggctgtaaccaagcttgtctcgaccacattttctctatgaaaattgcaacatgtttggttaatcctcgagcatgttatgaaacagaactaatctttaaagaagcacaaaatcagaaaaatattgctgtcattggggccgggccagcaggtttaagttttgctgtatatgcggcagatcgtggacaccaagttaaaatctttgaagcaagtcatcaaattggtggtcagtttaatatcgctaaaactgtgccaggtaaagaagagttctacgaaacattacgttatttcaatcgtcaaattgaattacgcccaaacattgaacttgtattaaaccatccagccacttatgaagagttaagtcaatcagactttgatgaaatcgtagtagcaactggtgtaacacctcgtcaattacaatttgaaggtattgatcatccaaaagtgttgagctacttacaggtgcttaaagagcgtgtaccagtaggtcagcgtgttgccattattggtgcgggtggtattggttttgatacggctgagtacctaacccatgaaggtgaaagtggcagtttaaatccagaaaaattttatgaagagtggggtattgatactcactatgaacatgttggtggtttaaagcagccaaaagttgaagcttctgaacgagaaatctatttgttgcagcgtaaagcttcctcagtaggcgcggggctgggtaaaacgactggttggattcaccgtaccgggcttaagaacagaaacgtgaaaatgttagcaggtgtgcaatacgacaaagtagatgatcaagggcttcatattactgttgatggcaaaccaacagtgcttgaggttgataatgttgtgatttgcgcgggccaagaatcatttactgcgatgtatgaccaattaaaagcagatggtaaaaatgttcatttgattggtggtgctaaagaagcaggtgagttggatgctaaacgtgctattcgtcaaggtgctgaactagcagcggtactttaa

SEQ ID NO: 66044 - DNA, 1329 bp, Acinetobacter baumannii
atggttaatcgtcttagttttcgtaatttgcgtattgataattttaagttaatcacctggctacagatcttcattatagccattacgcctaacttcattttctttcaatctgctaatgcaactactgttgcaagtgaggggtggaacgttacaaagcgtttaattcaaggtgctacaacgttttatgacggtactaaaaatcttgttttaaatggtaaaaactatgctgctactggtgctgctgctattacacctacggctgcacaagtcagtaaaatgattgtcagaactggtgctgttttagctgttgatttagcaattaaagctttaatcggcgcagtaggttatacgatggaccctgcaaataatcgtgttatttatcgtgtacctcctgatccaaattcaccgaatcttcaatacgcatggcattggactaatatcggttattattcgactcctactgaagcagcagttgcatatatggcttatcacaattcaactgcttcatcatcaaagcaggcagcttcttatcagattaaagatactattagtgataaatctaaaacagttaacctttttgattcttcgggtgctttggtcggactcgctacaattcagtggcttttaaatcctaattatgacccgaaagcaccaccacaagaaaatgaagaaaaatatttaccgtatgatgccgtagcttctcaaatcatgtctgatgcggttgcagataaagccgaaggtaaagcatacgtttcatctgttgccgatactgcacttgaggatgaagaaagacaaattgttcctgcaaatgacatggttcaacaattaaattcatcacaagcaattccgacctctaatactgctactggttcagcaactccaacaactggtacaggaactggtactggcgatccaactactcaacctggtccaactgatattaccttgaatttcccagttttttgcaattgggcgccaactgtctgccaagctgcccaggttgctattaatttccctggaactgttgcgaattactggaaagaacttaaggattggatgaatgattcggcctcagatacatcagaaacaaaaccagaaataaaagaattagaactaaatttcgatgatggtagcagaataaatttcgatcaaacttgcccacaaccacaacctatacaagtcacgtttatgggggttactcaggatgcaagtttttcttttgaacccttatgtaacttcatgatcatgattagaccttttgtcattggatccgcttatttaattggggcttacatagttatgggtttatcacgggggaatagtgagtaa

SEQ ID NO: 66045 - DNA, 183 bp, Acinetobacter baumannii
atgttaaatacaattttatttagtattattttgggaatattcacttccatattctcaatttttcttacagaaaaaataaccaatgtattttttaagaaaaaagaattttctgaaaattatataggatacttctcggcctattttataatttttttcatgtttgcttttcgaaaaggtacttaa

SEQ ID NO: 66046 - DNA, 351 bp, Acinetobacter baumannii
atggcaaataaaaaacttttaatctgtgctgcaattgcggctggactattgttaaccgcatgcgttaaaaaagagacaccgaaagaagaagagcaagacaaggttgaaactgctgtttcagaacctcaaccacagaagcctgcaaaatttgaatctttagttgctgaacaacctaaatctgagacaccaaaagtagaacctaaaccagaaaaaaaacctgagcctaaagctgaacctaaaccggaaaaagctcagtcaaaaccagctgctaaggcaactgagcctgcgaacacagaagatgatgccgttgctgctgctattgctgctgcaacaccagcacttaagaactaa

SEQ ID NO: 66047 - DNA, 945 bp, Acinetobacter baumannii
gtgcaagccaataccgatactttatggtcatatacttataatgatagcgggttgctgaataatatctctgctacaagtctggaaaagtgtgtcctcaatgttgattatggttacgataaattgaaccgagttaataagctttcggacaaatgtggatcagtttataacgctacaattgaccgttatggtacaggtttgatgagtactgttgagttagatcaagcacgttatcaatatagttataataatgatgacattactaaagttaatatcacttcaaaaagctcgacagtagcaccagctatctatacatataactatgtaaataacacttctcgattagcaagcgtaagtggctcaacttatagctttacttatgatgcgatgggtaatgtaacaaatgatggtgtgcgtactctaacttatgataattatagtcgcctcaataagaatggtaatgagacctatctttataatgctgatggactaagagtccgtgctgtaagggatgatggtttaacagattatatttatgatcttgatggtaatttattatatgacataaattataaatctggttatagccgagcttatgtctatgtagcaggtaagctggtagcgactttagaacgctatcctgatgccaataaaggttttgactttgttaatgattttgaagctgccgaattaggattaacagatctattaggtagctatacagacactgataatgatggattacctgattatttagaacgttttattggatctgatcctaacaatcctgatacagatggagatggacacaaagatggttatgagtatcgcttattaggtgcgaaaggggtattgagctcttcagttaagccagatgttgctgatcctaatgaaaatcttgcagcatggatgactccaatattagccttgattctggaagatgactaa

SEQ ID NO: 66048 - DNA, 642 bp, Acinetobacter baumannii
  misc_feature (613)..(622): n is a, c, g, or t
gtgacatattgctatcagtcctgtggaggaaaaactggtgcaattgtacaaacaacagatagctttggtacaacagaatctaatctattagcagcaggagattttagtgctgatttaaaaacactggttgcacgtaaaggtacagatggatcagtctttcagacaacaactgaatttgaaaacgcacttttaaaaccaaaagttgctgtatcgggtagttctacacaaagttatacatataactctaatacaactttagcaacagaaaaagataatagtattagtgggcaaaagacatttaaatatgatgatactggccgaattacttcaattacccatccagatagttcagtagaaacgatcaaatattttcaattaaaggacctcatcgcgtcccggacatggcgagaagttgagacaacttatagttattctcttgctgggcgtttaaaaacaacgactaatgcaaatattagtgaagcatttgatcttgatacatatggccgtgttataagtcatacacaaaaaatcaatgccaatgataccaataattcatatgtcgtaagatatggctataatcaattaaaccaagttacttcaattcaatatcctnnnnnnnnnnaaatcggtaaatttatctaa

SEQ ID NO: 66049 - DNA, 1182 bp, Acinetobacter baumannii
atgaatatattttatggggtaaatgcccctgttacaagcccgaatagggttcaaaatccaagttcccttggtatacagacgaaatctcctgccatccttacgccacaagggtttcagagggttcacgattacctccttcaagatcaagcaagaaagctccttcctaaagaacgtgtttctaaatgtcgtcgttttaagatagataaaacaaaacctcgtacagtcatgtacaacgaaaaccgttgtaaggctcattatggaaatgtgcaaatttgcggttctatctggtcatgtcctgtatgtgctaaacacatcaccgaacaaagacgaaatgaattaaaaacaggtttagaaaaatggaaaaccgttcataaaggctctgtttacctccttacgctcacttttagccattcacaagatcaatccctaaaaatgctcttagaggggcagaaaaaggcatacaagcgattctttgagggtcgtaaggtcgtatctatttttaaaaagttgggtattgaatacaaaattaagggtcaggaagtcacatacggtcaaaatggttggcatccccataatcacgttttgcttttagcttcacatcacgatctatattttaaaaattacgcttctgaattagcagaacaatggattaatgcctgtgttaaatcaggtcttaatgctccatcaatgaaacatggattagatttacgcaatgggtactacgctgaacaatacgttgctaaatggggtcttgaggatgaagtaactaagggacatattaaaaagggtcgtaatggcagctatacaccttttgatcttttgcagttatcaatctctgaggaaattgttcacggacgttcttcaggaaaattattccaagaattcgctattgctatgaaaggcggtcgtcaattggtttgggctagaggtcttaaatctctacttgaaattgatgataagtcagacgaggaattagcagaagaaacagacaagacttcaatccctcttacacctgttgaggatctcgtctttagtctgctttgtacatatcaaaaacgtcatgaatacctggaagcaattagcagggattatgaaaacggatgttttggaaatggtgaagccgataaacttataaatgatttggttcaagcagaaattaggagattggaaaatgcttattga

SEQ ID NO: 66050 - DNA, 246 bp, Acinetobacter baumannii
atgcttattgagaaagttgttttacttaatgctgaaaaaactaaacaaggttatacagcagaggtcgagctggagacagcagacggttttggtttttgtgggccaattgaatttgataaagattggaattacagcttaggctttttaaataccttcgttaataccgatgaagatcgtcattttgtgaatgaagttctctccagtgaggattttaaaaatgatgttatgagttacatcccttcataa

SEQ ID NO: 66051 - DNA, 1182 bp, Acinetobacter baumannii
atgaatatattttatggggtaaatgcccctgttacaagcccgaatagggttcaaaatccaagttcccttggtatacagacgaaatctcctgccatccttacgccacaagggtttcagagggttcacgattacctccttcaagatcaagcaagaaagctccttcctaaagaacgtgtttctaaatgtcgtcgttttaagatagataaaacaaaacctcgtacagtcatgtacaacgaaaaccgttgtaaggctcattatggaaatgtgcaaatttgcggttctatctggtcatgtcctgtatgtgctaaacacatcaccgaacaaagacgaaatgaattaaaaacaggtttagaaaaatggaaaaccgttcataaaggctctgtttacctccttacgctcacttttagccattcacaagatcaatccctaaaaatgctcttagaggggcagaaaaaggcatacaagcgattctttgagggtcgtaaggtcgtatctatttttaaaaagttgggtattgaatacaaaattaagggtcaggaagtcacatacggtcaaaatggttggcatccccataatcacgttttgcttttagcttcacatcacgatctatattttaaaaattacgcttctgaattagcagaacaatggattaatgcctgtgttaaatcaggtcttaatgctccatcaatgaaacatggattagatttacgcaatgggtactacgctgaacaatacgttgctaaatggggtcttgaggatgaagtaactaagggacatattaaaaagggtcgtaatggcagctatacaccttttgatcttttgcagttatcaatctctgaggaaattgttcacggacgttcttcaggaaaattattccaagaattcgctattgctatgaaaggcggtcgtcaattggtttgggctagaggtcttaaatctctacttgaaattgatgataagtcagacgaggaattagcagaagaaacagacaagacttcaatcactcttacacctgttgaggatctcgtctttagtctgctttgtacatatcaaaaacgtcatgaatacctggaagcaattagcagggattatgaaaacggatgttttggaaatggtgaagccgataaacttataaatgatttggttcaagcagaaattaggagattggaaaatgcttattga

SEQ ID NO: 66052 - DNA, 246 bp, Acinetobacter baumannii; identical to SEQ ID NO: 66050

SEQ ID NO: 66053 - DNA, 1929 bp, Acinetobacter baumannii
atgtgtataagagacagtattaatattggccaaacaaaaaatattgtagtagatccgaaggtaatcgcaaaaattgatattaatccagaaaaaattgcttcaataacaagagatggtaatagtgcggttatccatctaaaagatgggactgaaattgttttagagaacttttttattagtgaaaatccacaaattcttttaaatgaggggcagacttattgggctgctaatttagctgaagatgctacaggacagaccactgttaattatttagaattaaaagagataccaaaatatatagatgcttcatcttctgtacctatctggtcttgggtggttagtgctttagctggtgcaggaacagttgcattattatcccagcaagacgccaaagataaaatacctccggaaccaggtaaattgtctttccaaaatcttttagattcaggggagttaacacaagatcagatcacgaatgataacaagtttaatttaaaactcagcggacaggaaaagggaagtagcgtaacgtatttaatctctaccgatgaaggtaaaacctggcaagagacgacattaaatcaaaaagatttagctgacggtatttatctttataaagctgtagtgacagacgctgctggcaatacttcggaaacggctgtacaaaaagtagttgtggatactaccgcgccgcaagcaggtgaactgactttatctgacttgagtgatacaggtatttcagtaacagatcagatcacgcaagataaaaacttcaatttaaagcttgaaggacaggaaagcggcagccgagtaacatatttagtttctaccgatgaaggaaaaacttggcaggaaaccacgatagcccaaaaagatttaactgatggtgtttacaaatataaagctgtagtgacagacgctgccggcaatacctcggaaacggctgtacaaaaagtggttgtggatactaccacaccgcaagcaggtaaactcactttatctgatttgaatgatacaggtgtttcagcaacagatcagattacgcaagataatagttttactttaaagctagctcaaccgattgtgattggggaacaagccgctttactagaccactatgaagtttcaaaagatgaaggaaaaacttggcaagagacaacagctgatcaaaaagatttagctgatggtatttaccaatataaagctatagtgacagaccttgcaggcaatatctcagaatctgctatacaaaaagttgttgtagataattccttaaatgttgaatcaaccacagtgattgtaaagccgattactgaagacaatacaataagtctagttgaaaaagatcaagttatttctataagacttgaaatagctaatttacccacagatttaaatagctcactgacatcagtaaatacgacattaggcaatgttacttataattttcattttgatgaagtcacgcaagaatgggttactgaaattccagcagagtttctttggtcagtagagccgcaaaccaatatatcaattgagattagtcttactgatcaagctggtaatacagccattatcaaacatacccaaaattataatgtggatcatactccgaattcaccaaccctagattcactgactttcaacaatatagatggagctatcatttcaggtagtgcatataaaggaagtaaggtcgatatctacaataaaaatggtgattggcttgcaagtacaataactaatgaagaaggtaaatttactttacaagatctttcaattaactcaaatcaagaagtttacgcagtcgctacttataatggttatagcagtgaaaattcatcaattgggttagttactgaagttccagctattagtattacacgaattagtccagaaggcgtgattagtggttatgcgactgcgtaa

SEQ ID NO: 66054 - DNA, 726 bp, Acinetobacter baumannii
atgaagcgtttttatgagacaactcgagttcaggctatttttaaaaaactatctgtttttcacaaaataaaaggcctagaagttacatacggtcagaatggttggcatccccatcatcatgtacttcttttagctgaacatcatgatttacgttttaaagattacacttctgaattaacggagttatggattaaagcctgtattaaatcagggttaaatgctccatcgatgcgccacggtttagatcttcgaaatggctcttatgcagatcaatatgtatctaagtggggccttgaagatgaactttcgaaagggcatgtgaaaaagggtcgcaatggtggttttactccttttgatcttttaaatttttctattgaagataatgaaatttatggaaaaaaaccttctaaacttttccaagaatttgccatttctatgaagggtgctcgccaactagtttggtctcgaggtcttaaaaaacttttaggtattgaagaaaaaagtgacgaggaacttgcagtagaaactgacaaagcttcgattactttgaatcgtgttgaagatctcgtttttgaacttttatgtcgttatcaattgcgtcatcaatatcttgaagcaattaaacatgattatgagactggctcttttggttctggattagcagatcaacttattgagcaagtagtgaattatgaaattaaacaaatgcagcaggtattttcgtga

SEQ ID NO: 66055 - DNA, 225 bp, Acinetobacter baumannii
gtgattgaagcaatttatatttccataggtaagattcatcgaaatgtacctaaactaatttgggataacatggccacagaaatgcgccaaaaatttaattgtgatgtgatcttcaatgttgctgaagctgaagatacgactatgcgtatggatggtgatttaacttttgatgaaatgtttcaacctcaagaaatatttagtaagtacatggaaccaatgcattaa

SEQ ID NO: 66056 - DNA, 339 bp, Acinetobacter baumannii
atgaatatattttatggggtaaatgcccctgttacaagcccgaatagggttcaaaatccaagttcccttggtatacagacgaaatctcctgccatccttacgccacaagggtttcagagggttcacgattacctccttcaagatcaagcaagaaagctccttcctaaagaacgtgtttctaaatgtcgtcgttttaagatagataaaacaaaacctcgtacagtcatgtacaacgaaaaccgttgtaaggctcattatggaaatgtgcaaatttgcggttctatctggtcatgtcctgtatgtgctaaacacatcaccgaacaaagacgaaatgaataa

SEQ ID NO: 66057 - DNA, 921 bp, Acinetobacter baumannii
gtgcaaatttgcggttctatctggtcatgtcctgtttgtgccaagcaaatcacacagaaaagacgtaatgaattaggtaagggcatagagtcgtggaaaacggctcataatggctctgtatatctccttacgcttacttttagccattcacctgaccaatcccttaaaagtaatttagagggccttaaacgcgcaatgaagcgtttttatgagacaactcgagttcaggctatttttaaaaaactatctgtttttcacaaaataaaaggcctagaagttacatacggtcagaatggttggcatccccatcatcatgtacttcttttagctgaacatcatgatttacgttttaaagattacacttctgaattaacggagttatggattaaagcctgtattaaatcagggttaaatgctccatcgatgcgccacggtttagatcttcgaaatggctcttatgcagatcaatatgtatctaagtggggccttgaagatgaactttcgaaagggcatgtgaaaaagggtcgcaatggtggttttactccttttgatcttttaaatttttctattgaagataatgaaatttatggaaaaaaaccttctaaacttttccaagaatttgccatttctatgaagggtgctcgccaactagtttggtctcgaggtcttaaaaaacttttaggtattgaagaaaaaagtgacgaggaacttgcagtagaaactgacaaagcttcgattactttgaatcgtgttgaagatctcgtttttgaacttttatgtcgttatcaattgcgtcatcaatatcttgaagcaattaaacatgattatgagactggctcttttggttctggattagcagatcaacttattgagcaagtagtgaattatgaaattaaacaaatgcagcaggtattttcgtga

SEQ ID NO: 66058 - DNA, 225 bp, Acinetobacter baumannii; identical to SEQ ID NO: 66055

SEQ ID NO: 66059 - DNA, 471 bp, Acinetobacter baumannii
atggggtactacgctgaacaatacgttgctaaatggggtcttgaggatgaagtaactaagggacatattaaaaagggtcgtaatgacagctatacaccttttgatcttttgcagttatcaatctctgaggaaattgttcacggacgttcttcaggaaaattattccaagaattcgctattgctatgaaaggcggtcgtcaattggtttgggctagaggtcttaaatctctacttgaaattgatgataagtcagacgaggaattagcagaagaaacagacaagacttcaatcactcttacacctgttgaggatctcgtctttagtctgctttgtacatatcaaaaacgtcatgaatacctggaagcaattagcagggattatgaaaacggatgttttggaaatggtgaagccgataaacttataaatgatttggttcaagcagaaattaggagattggaaaatgcttattga

SEQ ID NO: 66060 - DNA, 246 bp, Acinetobacter baumannii; identical to SEQ ID NO: 66050

SEQ ID NO: 66061 - DNA, 642 bp, Acinetobacter baumannii
atgatcgaaaaagaattcaaagttaaacactatattgcgcttggtctgctttttattgccattatcatttcaggtattcaaccacttgagtttgaggcttatttgcttcatcaagctggcactgtttttatggtgattctgctttttattattttcaaaaaaattggactcgatttcttaagttttactttttatctactgtttttattaatccatattattggtgctcactatctctactcctacgttccatacaatgactggatacaacaggtgttccatttcaacctagatcaatatatgggctggtcccgcaatatgtatgatcgtttagttcatcttgcctatggtgttttgctctatcctcttatttatcgtgtattccaagtatggttacccactgcacgtcctttttctttattcttacttgtagtccagtttgtgatggcgtctagtgtcttttatgaactgatcgaatgggcaattgcaatcgggctatcacctgaacaagctgaaaattataatgggcaacaaggtgatatgtgggatgcacataaagacatgttactcgctacaattggcgcaatcctctatgggctaatcgctcttctcacaacaccaaaaaatcaaacaataaattaa

SEQ ID NO: 66062 - DNA, 399 bp, Acinetobacter baumannii
atgtacaagttaaagctaaatcctcagaccagcggctatggcgtaacaccgggtgatgatgtgaaacgtcagcagatggacggcggtcgtggtcgctattacatcgatgtgaaacgtaacagccacattgttgatgtgaactggaacttaagtaaaaccgatttcaataaaatgatggctttctggcgggtctaccagaacaaaccagcctcattttatgcggatttggtgattgatcagggaacacgtcagcaatatctatgcaatttcattccaaactcgttcaagaccaatgaagtcaacggcaacttatatcgtgtgaacgcgcagctcgaagttgttcaaaaccagcctaacctgaatgccgatatagcattgattaaggattgggaggtctaa

SEQ ID NO: 66063 - DNA, 246 bp, Acinetobacter baumannii
atgcttattgagaaagttgttttacttaatgctgaaaaaactaaacaaggttatacagcagaggtcgagctggagacagcagacggttttggtttttgtgggccaattgaatttgataaagattggaattacagcttaggctttttaaataccttcgttaatacctatgaagatcgtcattttgtgaatgaagttctctccagtgaggattttaaaaatgatgttatgagttacatcccttcataa

SEQ ID NO: 66064 - DNA, 225 bp, Acinetobacter baumannii; identical to SEQ ID NO: 66055

SEQ ID NO: 66065 - DNA, 399 bp, Acinetobacter baumannii; identical to SEQ ID NO: 46160

SEQ ID NO: 66066 - DNA, 156 bp, Acinetobacter baumannii
atggccacagaaatgcgccaaaaatttaattgtgatgtgatcttcaatgttgctgaagctgaagatacgactatgcgtatggatggtgatttaacttttgatgaaatgtttcaacctcaagaaatatttagtaagtacatggaaccaatgcattaa

SEQ ID NO: 66067 - DNA, 162 bp, Acinetobacter baumannii; identical to SEQ ID NO: 59209

SEQ ID NO: 66068 - DNA, 156 bp, Acinetobacter baumannii; identical to SEQ ID NO: 66066

SEQ ID NO: 66069 - DNA, 228 bp, Acinetobacter baumannii
atgaaacatggattagatttacgcaatgggtactacgctgaacaatacgttgctaaatggggtcttgaggatgaagtaactaagggacatattaaaaagggtcgtaatggcagctatacaccttttgatcttttgcagttatcaatctctgaggaaattgttcacggacgttcttcaggaaaattattccaagaattcgctattgctatgaaaggcggtcgtcaatag

SEQ ID NO: 66070 - DNA, 486 bp, Acinetobacter baumannii
atgaatcgagaggttcacgtccggttctgcgaggggctaagggtgaaattcccttggtctactcacccctatatccgtactaagcaaggttggctgtatttgtgtgtgatgctggatctattcagccgtcgtatcgtcggttggcaaatcagccatcgaatagaccgtcaattggtgtgtgatgcgtttcattatgcaatggctcgtcaggggtatccaatgggtgtcatggtgcattcggaccaaggctcacagtactgtagtcgtgattttaggacgctattattgacgaataactgcgttcaaagtatgtcacgcaggggaaactgttgggataatgcagtgaccgaaagcttctttcatacattgaaaggtcatgtggtccatggcagtgtgtttgccactcgaaaagaagcgaatactgtcttgtttgactatattgagatttattacaatcgggtcagaaggcattccgcaaacggctag

SEQ ID NO: 66071 - DNA, 795 bp, Acinetobacter baumannii
atgcgtgcactcaagaaacactgcgaaatcccatggattcttctatacgtagaacgctggttaaaagcacccatgcaagacatagatggccatcttttagaaaggaatcgtggcacaccgcaaggtggtgttgtaagtcctttgttggcaaatttatttatgcattatgcttttgatatgtggattaccaagaatcttacgagtgtaagattctgccgctatgcggatgacggagtgattcattgccggagtttatctcaagccaaacttgttttacaaaagattggtgcacgatttcgtgaatgtgggctcgaattgcatccagataagacaaagattgtttattgccaagatattaatcgtcgcaaagcatatcccgatgttcaatttacttttctcggatacacgtttaggccccgtaaggctgtagacaaatatcaaagggtttatgtgaatttttctccggcggtcagtcgtgatgcacttaaggcaatgcggcagactatccggagatggcatctacatttgatgtgtgagcgtgaattaactgatctatcagcaatatttaatccaattcttctaggctggcaacaatactatggtcgtttccatagttcagcgatgtcagtgatttggagacacatgaatgcatatcttatacgctggatgaggcgtaagtataaaaatttagcccgtcataaaagacgagctaaatatgccttagggcggcttgcacgtgattttccaaatgcctttgtgcattggaaaatgggatgtttaccaccggttggataa

SEQ ID NO: 66072 - DNA, 447 bp, Acinetobacter baumannii
atgaccaaaccatttaacattcctaaagcgttaatttgggaggcattcaaaaaagtcaaagagaatggtggcgcctcaggcgtcgaccatgaatctattgagcaattcgaaaaccatttaaaaggtaacctgtataagctatggaatcgactttgttcaggcagttattttccaccgccaatcaagggtgtgccgattccaaagaaatcaggtggcgtacgtatgttgggtattccgacagtagcggatcgagtagcacagacggctgtcaaactcttgttggagccacagattgatcctctatttcatccaaactcttatggctatcgtccagggcgttctgcccatgatgcgatagctatggtgaggcgacgaagttgggagtatgactgggttgtggagtttgatatcaagggtctctttgataacatcgatcatgatcactga

SEQ ID NO: 66073 - DNA, 153 bp, Acinetobacter baumannii
atgctaagccaggggatgatcgttcccccactaccgaataaacctgcatttattgccttatcctgttctggaccattagatcctactcctactgacatattaacggttcaaattactttaccccactcaaaagcagaaattggcttgaaatag

SEQ ID NO: 66074 - DNA, 843 bp, Acinetobacter baumannii
atgacgattcaaactgttaatcttggttcagcaccgactggcgcaggcggtgatacatttcgttcaactggcgcaaaaatgaatgaaaactttacaaataacacccatgctgcaagccgtttggttgggactcaagccggcaatgtaatggaagttggggcgtttgggattggaacaacaggtggctcaagtacattctattcaaatattaatattagtaatattccagccggtttttattcagtttcccctacagctacaggatcgccaggaataaatgggggtgggaacctgttcgcttttagtagtgcaaattatcaagtccaacttcataagcaaaatcttgaaaaccaattaagtatacgatttggaacgggtccagattcgtttactggctggggaaatatcttaattagtggaattaatacaacaacagactcgaacggtttcattaagtcagcatcacccgttgttaaattgtttgcagataaaattgaacctaacgatgaagctgctgagcagaacattacttttgaaaagctcgatgtagggcactacttgctaaaaggaacgtcaggttttgcaacggaaggttggtatatcgaaacgccaaaagatgctaacgggaacattctttttgctgtgatttatcagcagttagaaaataaagatattgaaatcaaaacttttaaaaagaagtttgatgttgagtctgcttcaattattgctgatttggataatccagttgatatttcaacgggtcgctggatcgatattcgcttgcaagaaattcctaaaccagtacccgaaatgccagtggtgacagaaaatgaccctgaatag

SEQ ID NO: 66075 - DNA, 426 bp, Acinetobacter baumannii
atgggctggacaagcaaaccgagtgccttcactaaaacgattgaagccgatctaaccaaaaagcaaaaagatattgtgattgatgccttaggtggagtggtgatgtctagtgccgtagacacgggagctgtaagagcaaacaaccgtattggcataggcagtattgatggtaaggctgacaagaatgatgtggatgagggcggacaaagaactttaaatagtgagctaagtaaattagttcggttaaaaccattccaaactgtctatatatcaaatagcctcccttatgcatatgttctcaactatggactttatcccaaaaatccaaaggtcgaaacaggtaaaacagaaaacggctacagtcgccaagatcctacaggattttacgagacaacatttacatatatatctgaaaaatatagataa

SEQ ID NO: 66076 - DNA, 243 bp, Acinetobacter baumannii
atgaaagtaaaagatttaataagtgaacttcaaaaactagatcaaaatatggaagtgtacttcttaacagaagatgaggaagtcactaaaggcaaaaagcttgtagaggtttttggatttaaggatgttcacacttctagtgtaacttcgaaaagaaatccagatgctagttttgagtttacgtttttcccagaagaaaatgggagagatgttgcatttataaattttacaaaagacatttaa

SEQ ID NO: 66077 - DNA, 198 bp, Acinetobacter baumannii
atgagtaagaagaaagcaaagcccttacatgaggtcagttggctcacgatgggtaaaacaaaagagtacgaagaactgaaggctgatattcagcatgtctgtaaagacgttcaaggttttatcaaagaaattgcagtaaacgatattgtgcaaacttttttaaagcatggatatgtggttgttaaaaagaaagattag

SEQ ID NO: 66078 - DNA, 372 bp, Acinetobacter baumannii
atgataaacaataattatgtccctcaatggtatgaaaccccattccagcacattaaatacaccctcgtaagaaaccaagaccaattagacatactttttgacactgtgaaagccccttataaatttcttgaagggggagcggatgcacgagtcaactttcaggaaggatatgcggttgtacaaattggagattgctgtaaatgggatttaatacaaatccatggcttattgctacatgaagctgtacatatttggcaagaagtagctttagtaatgggcgaagaaaacccaagcattgagtttgaagcttattcaattcaagcgattgcccaagatttatttgaaatgttcgaagcaagcacaacaagatga

SEQ ID NO: 66079 - DNA, 1071 bp, Acinetobacter baumannii
atggtcacagaaacacagttagttgtgcctggtacaaatgttctaagaagagctggcgcaacactaataagcgagtctgcaactcaagcagagcagtcagaagcatatgatgttttaaataaatggagagcgcttcactcttaccctattgatgtatttcaaaaaaatcttagaagtaaatgctctcaactgaagtttagggatttcactgtagctcaaagattaaagcgaatgccttcaatcatatctaagttgcaaagaaacccaaaaatgaatttggcaagaatgcaagatataggcggcgtcagagtaattttaccaactatacaggatgttcgacgcctgcatgcagagcttttgagtcaaaacaataggtttaaccacgtcccagttattccttgtcatgattatattgaaagcccaaaaaatgatgggtatagaagcatacatcaagtattcacatataaaagccgagatcattctggtttagatggcttgaagatagaacttcagatcagaacggcattacagcattcttgggcaacagcggtagaaactttaggtgtaattgaaaatgcatcaattaaatcaggttttggcagtgaggatattaaaaagtttctaaagctgagtagtgcgcttttttcaattaaagaaggcactcctgtaattgctgaatatgccacatcaacacctcaagaattggcagcacaagccaaagaactagagactaggcttcaaatattcacaaaacttaaggggcttcagatatctgcaaagcatattgagtcaacctcaaaaagccagcatgcgtatcatcttttgattttgaaaaaagaagaaggtggctggatggtgaacgtaatgccattcactaaggcacaagaggaattagctagatctgtttatgccttgatggagaaacaagaaaagagagaagcggaagtagatgttgtattagtttctgttggtgacatgaaatctattaaaaaagcttatccaaactattttctcgacacaaatcagtttattaaagaaatgcatctagcatttaaaaggtatctagattaa

SEQ ID NO: 66080 - DNA, 351 bp, Acinetobacter baumannii
atgaaaccagaacaatttattcgtgagttcggggttgagaaggcgagagaggtggttaagggtgcgcctgatggtcacaaaggatacaacggtgttattaaccaatacacaagaggggtttggtttagtagggatgtgatgctttccgacctcaagcgtcttgtggagtcggttgacttaatcgagaagcttggcggctatggtaagtgcaaattttacatgactggaatgaagcttaataaatgtgattctgtcaaatgccctaaaactggactgattgtttcacgtgctgctctggaaatagccataaatgactatcgagaatcaatatacggaggcggggatgagtaa

SEQ ID NO: 66081 - DNA, 237 bp, Acinetobacter baumannii
atggataacttccgcgaaattattgataaatcagtagaagaaagtcgtgttcagatcgctcacacagcgggtcatcttgctgttgctcatcaatcatttgcaaatgactatcttcttaatgtcgctaatcaaactttattcatgcttggcaccacgcttactgctgaagaatttgagacggaaattgatggcttgagaaagcatttggttgagtctctgagaggtactaactcatga

SEQ ID NO: 66082 - DNA, 150 bp, Acinetobacter baumannii
atgactccagaattacccggaacttatattaatttattagctgagatcgttaagcgcagaggtatctcttgtgagcagtttttagagggtagtggagtaacgccggaacaattaaaaaaccgtattggtatgttgagtttaataccttaa

SEQ ID NO: 66083 - DNA, 465 bp, Acinetobacter baumannii
atgaaaacattaatgactaacttagaaactttaggcttcacaaaagaagctggcttaaatggcttatcaaatggcgatatttcagtaagccttcactggtcaggcgaagaagctgttgttgctattaatggaaaacaagttttcaaatcaggaaatgaagctgaaatcattgaattcgttaaagcacacttgccaaaaaaagaaacaattgaagtttcagaagttgaatataacgatgatttaaacggttttgttgttgagttaaaagatggtcgtattgttcaagttcaattcgaacgcgaaacaaatcgtttagatgctgattttggaacttactatgcagtaattgatcgtgaaaatgattatggtcttgatctttcagataaagaagaagctcagttctatgagtggatgctttcaagcatagatattcaaaataaagttaaagaactcaatgcagaataa

SEQ ID NO: 66084 - DNA, 618 bp, Acinetobacter baumannii
atgatcaatcagattgaattgcttgaaaagctaggaattgctgcatttggtaatgcatggaaagcatctttggccgatgcattgccagtcgctcgaccaacaataactgactggatgactggaaagaagcctattccagttggggtttggggagatattcaaaagataattgaatcgcgtttgatgggattgcaaggggctttgcttgaaattaaagaacagcgtcacttgattattattgaagaaatgaaacgtaaaggtaaggcttatattcaagatgaattttctgcatatctgtatgctatgtcagatgatgaaattatgaagctgctttcagcatataagaaagaatatgctcgattgtcagcagaatatccaaacgacatatttgctgatcttttagtaattaaagatgctatagacttcaatatttgtatacgcgatatgaatggaagtcttgatcttggtttagcggaagactgtgcattgtcttattttaaaaatatgaagttagctaaagagtttgatctggatgagctatttatggtggaaagagtaaaagaaattgagaataattttgctcaaaatgtgcaattatccagattattgagcaaataa

SEQ ID NO: 66085 - DNA, 504 bp, Acinetobacter baumannii
gtgtttttagccgagtttaatcaagccccaccagaacaactcaagactttgttaaaaaactgtgtccacattcaagcatgggccgaaaaaatcatctcaaatcgtccctattcaacaaaagcatctcttttggaatatgcagaacagttaagtcaaatgtggtcatggcaagagatactagcggctttagcaacccacccaaaaattggtgaacgccaagctaaaaaacaactcaatgcaaaagagcaagatttttcatctaaagaacaagctggcatttctttagatgaactaacacaacaagctctgcttcaaggtaatcttgattatgaacaaaagtttggctttatttttttaattaaagcggcaggcctcagtagcgatgaaattttaaaaaagctacatgaacgactacaaaacgacttagctatcgaaaaagtaattgtacatgagcaacttgcagcgattgctctattacgtctatctcaggaaatacaagcatga

SEQ ID NO: 66086 - DNA, 2250 bp, Acinetobacter baumannii
atgcgtattccacaatttaatcgacaagtttctgacaaaagcgttccaaatgtacaagtcaacgggggcatgtcagcaggcgaagcggcaagcctagttggtaataaaaccgatagtttagttggtgcacttaattcaggtttgaacgcgtaccaagcataccaagatgaagcagaccgcgtacgtgtaattgatgcccaaaataagctcgctgaattaaaactccatttgcaaaataatgatgtcgatgggtacggcaacaaaaaaggggtagatgttgtaagttttgatgatggcaatggagcagggtttgtagattactatacaaaagcctatcaagacggtattggtcaaattgcaaatactttaggcaatagtcgtcaacgtgccttgtttaaagaaatgtctgaacgtgacgcggtgcagttcaaaggctcattacaaaattactttgtacgtgaaaatgatgtttatcagcaaagtgtttactcatcttcagcagatcgttttattcgagaaataaacgagaaccctggtgacttcactaagattgatgaaagccgtgctaatcttaaagcttcattaggtaaattaatgaatcttgaaggaaaggcagcgactgaagcagaaaacatttatcttaaaaatgtctcagtggcccacattacaaacattagcgcctttgtggaaaatggtgatttaaaagcagcacttgcctataaaaataaatataaagacgagatttcattagcagatagctttaaggtagatcaacgcattcatcaaaaacttgaagatcagcaagtcgaatctttagttaataaggccacaaccggaacacaagagggcagcaacccagccttaaatgcaccgcctcaagcttctgcggcaattgctaaagagttaaaagcattatcacctgagcaaatgaaaagcatccgatacaatgatcagcgtttggatgtttacactgtgcatgctgcaaaagaaaaaggcatggagtgggcagcgccattattacttggcattcgcttagcaggtgagaaatctgataacagtgcagtttcacgtaggggtgctaaatctgttatgcaattcatgccacaaacttggggagaatacagcaaaggtggtaaaagagatattaacaatccggctgacactatcgatgccgctttagaattcgtagattggattagtaagaaatataaaactaaagacccaatggttattgcagcttactacaacggtggtggcaatgcggccacggcagtgttaaaaggacaacaaccgccaaaagccgaaactcaaaattatcttaaacgcattgataaatggttatctgatgatatggggccatatagcaaacagcccgcaaaaacacgtcaacaagcttatgatgaaatttggaacagtaacgtccctgtagagacaaaacaaaaagctttgtctttaactgaacgttattttaatggtcaggataaagttaaaaaagatcgtcaagaccaagaatatagcaatctttataatggaataatttcaggtaaattcacctttgagcaaatacctgcgggtagtattacggctttagaaccaagtcaaattaatagtttgaaatcggtgagcaaagcaacttacaacaaagacattaaaacagacccgataacccttagtatgattacccttaatcaagaggaacttttcaaaggcaaaccacaatctgttctacatcaatttgctgataagttgtcgccaaaagattatgaagaagtcactaaaatgtatgcgaatgtgaatgctcttaaaggctctaaaaatgagaaaaagacattcattcttgacaataatactgtggctttggcagtcaagccgtatctaaatatcattgggataacaagcactactgataaaaagcagcttgagcactacaatgctgttaaaacagatttaatgcaaacgttaaaagaagctgaagcaaaaaacggtgggaatttaacttgggaacaagtaaaccgagttgttttgaaaaacataaacaatcaggtaaaagttactacatcaagacctttctttgacgataaagttgagtacaaccgggtttactctcaagttaagagcaagggtgatattactgactcaatgaaaacaaaaattgataatatatttagaaagcagggtagaaacccaaacaatgttacggatgctgaatatattaacgcttattattcaattatgagaaggggttactaa

SEQ ID NO: 66087 - DNA, 3036 bp, Acinetobacter baumannii
atgacagttcctgtttccgaccgcttgagccaactgtatgttggcaatggtgttaatacccgctttgattttatattccgtatttttcaacaagaggatgaaaacggcgtaacaatccgagtaaaaacaggaacggaatttgaagagcttgataaatctttatatcaagtaattttaaatccggatgatatggggggttatgtactttttaatgttgccccgactaatcaaacatatttttatattgcagggcaaacacctgtagatcagctactagacataacaaattatgataacttttatcctgatgcaattgaaaaagctttagataagctaacagccattttgcaagaatggaatcatttactagatgcagaaaagcaatcgcgtatccttgcagatatttattacgatgacttagcgaaacttcgtgaagatgatatcaagatatatttattatcggtaatcaatcagcatatcgatgactttaatgactataaggcgtacattgaggctaaactacaagaggccattaaaaacggaaccgtaagcgcgttagcaatcgtgaccgtagaatgcgtagaggacctaccgcaagtagggcgttggaatggaagaactgtatatgtgaagtctttttaccgtgggttaatgggaactacagtaccttataaggggggagggacttttatatttgacggggcaagaataagtgaaaatgatggcggtgtttgcataaatgggtgggtaagacagctagagaatagagtcttaaacccatatatgttcggcgcttacggtgatcttcaattcactagcaatgaagtgcttgcatatcaaactggacacgatgatacagaagcatttaagaaaatgctgaatatgaataagtacgttatttttacaaatattagtaaagctgtatcttctaataagtacagtacatacacttttgaaattccccacgctgcgtattatataaaagggactttgccgattcgtgcttttacaaaaatagaggggaataattcaactatattttttgatccagacgagccgattgatctttttcaaacgccgcgttctgagatgcaagaagcatatcaaattagtacgggatggaatacacaaacaatcccgatgtgtgaatttagtaatttaattattgttggtaatgttactcgcacatctacaacacacgcacaaaaatgttttgatgcagcaaatgcgtataaatggagatggtcaaatattttaattgaacgatttcataacggtatctcgatttatccacttgatacaagtgcttggacaggtgggaatagaattggaaacttctatgaaaacgtgcttgataacgtcactattaatgaatgtgtgcaacacttttttaatggcggtaacgttacacaagcaactaacctgacccttgcaggcggttatgttgtaggaaaagattttgtaaataaatttgattatttcttaattaattacggagctggttttagctgcaatggctttaatattgctccagctgatgatcagcatcttgcaaaagctcttatctatgatgcatgtcagggttcatactactcgggcggctatacggagtggtttaatactttctttgagttagacatgcctgcgcgaatgggtggctttaaatatgatgcaagccacacttttaaatatcctgaacatatcatgtttaaatttaaagatggggtattttctaaatacatttatgagacatctacgcgaacaataccaaacaagtttgaaaacgggcgtctatataacaattatttaaatcatactggatttggattcggtgctagttctgaattaatcactaacttctttaaatatgtgccgcaatatgactttaaatatggtctgtatggtgtttctggcttatcaaatgaccttgtttatgatgttaagcgctttgagttggttgatacaggatttacaacccggtacggaatcagattaattaacccaaccgccaattcaatagatttaacattgccactcaacaatcagtcggtaatggcgaaagttgtatttctatatagaccaattaaaaacttcgcacatgagaattttaaatccaatgtgcttggctttaatgggactaatgctcgtatttcaacagccgaaatcatggttgattacggcaatgactggaaattagccgtacttgaagttacaagtgaacagacacgcacaggtaatatagtaattacattgcccgctgattcgcaggttgagattgagcatgttggcgcatatgcaaatggttttcctttcatgccatcttacaaagaatatcaaccgcttgtgaataattctctagttgaaaatgcaactgatgttgatagcggtggtacatttgcaaaaggcgacatattaagagcaattgcaagtataaatgaaggggctattgttggtgctgtaagtgattatgttgtattaacgcaaggagcgtactcaagtcgtcatgttggtgttgggtctgtagcattgccttcaggagcaaatacaataaatgtggctggtacagatacacttaaacgtctaggtattggggcatatgttgaattacaacagagttctataaaaaataagtatttagttgttggtaggaactttagcaacggagaatttgactatactttaaaatttagcggcgaaacaacaatcacagtgggtagtgttctttttgatacaaactatatgcaacagccgacttttagggcattgcagtatttccagaataattatatttctcgaaagttaagctatgcaggagtatctatccccgcaaatagtatcgtttccaaaaatatagtattaagtggtgtaacgatggcagataccgctctcgcagcaacttcaccttctctcggcacatcttcaagaatttgggcagaagtcacagcgctagaccaaattactgtttatcatcagaatcttactggttcaaatataacaacaccagctgatatgattattaatattaaagttgtttaa

SEQ ID NO: 66088 - DNA, 543 bp, Acinetobacter baumannii
atgtctgttatttttgtatttttaatttcatatattctaagaatatgttttgaattttatattgatccccgtgctgcgctaagtttttacgttgggtatgtagcgttagaaataaagaacgataaaattataaattttattaaatctaaaaccttttcggttatctctttattatttttagtatctgcattttttattactgcctacaatttttattatatttatttaatatttgcatgttcttttatctttatagcagccgcaaatggcaatgatatgtttgggctgcttatgaatgaacaaatccaaaaactaggcgaaattagttacagtatttatttgacgcatggcgttttactattctttctaatgaaagttgcagatacttttatggattttggcactaaaggaagcgtatcttttatgctcatacatttcttcttaacttttactgtttctgtattcacatatacttatgtagagcaatggtttaacaggcctcattttagaagcctgttgttatcgaagtttaaacaactttaa

SEQ ID NO: 66089 - DNA, 420 bp, Acinetobacter baumannii
atgagtatgagttttttagaagctttaaataaagctggttgcattgataaacaaattactgaaagtgatgatcgctttgataaagtaaatgctgcggctgaaaagtttgcaaatgatatggagccaaatctcttaattgatggatttcattctttaattaaagagtctttttttgagacaaatgtggcaatgcaatccgcatattctacattgaaagagtattggataaatgttggttttatttatcctgatgaaaagccccatagattacttacagcaatggttctatatgcatgtgtgaaacttgcagaaaagaataatagctatgcatctatgttggcattaaacatagttgatatttggccatatttatctgttcataaccctcatataattctaagtagaaagtgtagaaattaa

SEQ ID NO: 66090 - DNA, 1320 bp, Acinetobacter baumannii
gtgattttgttatatgatttagtatttcatgcaatacaattattaaatatgactgatgtacttattatttgtgccttacgcgatgaatacaatgccttactaaaaacactaggtggtgaaacctcttggaaagaagaggttgttgatggatggactgttgctaaagcaactatagcaagtgcatcaggcactttatctctaatggctacttggcaaaactttatgggccgagagcaagcaattgctgcaaccacctctttactacaacaagaaaaaaatagaataaagtgcatctgtatgacgggtatttgtgcaggaagaagaggaaaagttcatcttggtgacgttatatttgccgataggttatggtcatatgatgctggtaaatcagtcgttattggaggtgtcgaaagttttcaaggagatcaactccaatttagacctaatcctaaaattttacagagaatgcaaagctttaagcttgaagaagaaaaatggttagaatttagaccccaatactcattagactatcaagaaagatggcttattttacagctatttgaaggaatccaaccatctgataatgaaatatttaagacgtattgtcctagcttctctgaagtaattaaacgtttaaaaaagcgtaactggattacaccacagggatttaatttaactgatgtaggtttaaaggaagcagcaacattaaaagaggaatatctttttggtctccccaatgatcctgatttttcactccatattgcacctatggcaactggaagtactgtgaaagaagatgagaacatattcaattacttagctgatcgagatatgcgtaaagtcttagggatagatatggaggcaagtggattagcagccttaggcgaaatattagatattcctatcataatttccaaagctgtttcagattacggtgatacttttaaagatgatacgtatagacattttgcatcgcgagccgcagctgaatgcttgatcaaacttttaataaattgttctgatttaattctaggcaatcaagaaataaatgaacttattcctggagtttctgccttatctaataaaggtctaattaatgagttatcaactttatattatgatgtaaatagtataagaagtatttgggttaaatcaggcggtaaaccttcagatatttctaatatctcaaatatttctgacctctggtttgagttgatacataaagcaactaatggggcaaatgttactattgatgatttaattaaaaatattttagtagattttcctaaaaataaatctcttagcaaatatgtaaattaa

SEQ ID NO: 66091 - DNA, 411 bp, Acinetobacter baumannii
atgaaagctctaaggtttcttcgaatactaccttttacggccctcgctttagccagtatttgggctgctaatcgggcgcctgatggtcgtcgtcctccgcagatggacttcaccgttacgtttgaaacaatcaccaatgcgcttaccaaggttccgcacatagcgtccatggttatgctgtttattcttgcagtactcgcaactggctattctcgcacttggcttgctgccatactgacatttcttgtgggagtgagctgggaactcgttcagaccaccgtaattggccacaatcctcgtgttgttgacctgtttcccaacctcgttggcattatccttgcctggatcatcgtatcggtatcattttttctatggcgctcattccgttcccgctttccaacctatcgttga

SEQ ID NO: 66092 - DNA, 195 bp, Acinetobacter baumannii
atgcagcaattaatgattatggtcacagaagttggaaagcttgagcattcgtgtaatttgcttgctgaggtaaacaaaggcggtaaagtcctaaaggtttttgactacaacggtaatcaattaccaatcaacattgatggaaccgtgacatttaatagacgccgttgggaattaccatctaaagttgagctttag

SEQ ID NO: 66093 - DNA, 192 bp, Acinetobacter baumannii; identical to SEQ ID NO: 64811

SEQ ID NO: 66094 - DNA, 183 bp, Acinetobacter baumannii; identical to SEQ ID NO: 64810

SEQ ID NO: 66095 - DNA, 270 bp, Acinetobacter baumannii
atggctgaaattaaatttaatattaatcatcacatccgttttaagccaacacaattcggcaaagatcactatcgaaaaaaaagtgaagcaatatacagtggattagacttaaaaacttctgatattccattggatctaaagattgataaagatggttttgcttcactccaaatgcatgagtttatgtattactttggcgatgctgcttatgtgggcgggaaaagttttatagaaaagtgtgaaatttttctgaataccgaacaaatttaa

SEQ ID NO: 66096 - DNA, 693 bp, Acinetobacter baumannii
atggaaaagaagcaaattcacccaacaatgcaacgtgtttatcaagtcacaaaattaactggttctgagttggcagccgctttagataaatcacctcaaattatctataactgggaaaatcgtggaatttccaaaatcggtgcctttaatatttctactaagtttaaaattgatcttgggtggattcttacggggactggctccccatacattgatagtgttagaaatgaaacaattccaactactgtaaagcgcggaggatgggttcctgtgaagtcctactctagaatgggaatggatggctattacactgaaatgggttacttgggtaacggtggtgatggttatgtaccttctcttacagccggtccaaatgcttatgcagtaaagggtacgggtgattctatgtatcccgcaatacgaaatggttggtatgtggtttgcgaccccgatgcaacaccaacacccactgagtttgttgaggttcagttgaaagacggacgtagaactatcaaggaatttataggtatagttaatgatgtattgcatcttttagccgtgaatggcgaatcaagaatgacaattgagatggaagatgttgaggcgatagttgctgttacagacattgttccaccaagcaaacatgttaatgaatatccagtgattgcaatgcagaatatttacttagattaa

SEQ ID NO: 66097 - DNA, 14823 bp, Acinetobacter baumannii
atgaataagaaccgttatcgtattatttttagccatgctcgcggtatgtttattgctgttgctgaaattgtaaaaagtaaaactaagcaagcagggcaaagtcagggacaagtgggaacagattcgactatagattcggttctacctattcattataaaaaactaaatccacttaattttgctgtaattggttgtttgggagcattggtaattagcttaccaatgagcagtgtggctgaaactcagattattgccgataaaggtgcgcctacatcgcagcaaccgactattttaaatagcgcaaatggaacaactcaggtcaatattcagacaccaagtgcgggtggagtttcgcggaatacctatacacaatttgatgttggtcaagaaggtgccattttaaataattcacgaaataacacccaaactcagttaggaggctgggtacaaggtaacccatggcttgcaaaaggcgaagccaaagttattttgaatgaagtgaatagtaataatccaagtcaactcaaaggctatattgaagttgccggaaaacaagcacaagttgttattgcgaatccatctggtttgatctgtgatggctgtggtgtgattaacgcagaccgttttactttaaccacgggtcaagcggtaatgaaccaaggttatcttgaatcattccgagttcgtgaaggtcaggttacgattgaaggtaaaggcttaaacggaagtttaaccccttatacggatatttatgcgcgtgctttaaaagtaaatgcaggcttgtatgcaaatgaactcaatacggtccttggacaaaatgatattcaagtcaaagaccaagttgctcctcaaatcacggcaacgacagcagctacaaccacacctcagccaaattttgctttagatgtaggccaactgggtgggatgtatgccggaaaaatctttttggtgggaacagagcagggactaggtgtacgtaacgcaggtacgataaatagtactcaaagtacgcttacgctaaatgcaaatggtgatttgatcaataatggtaacttgatcgcgaataaagatcaggtacagctgaaagctcagaatatccagaatacaggtaatatcagtagcgcaacttcacaaattttagttgagagccaaaatttaaataactctggtctaatcagtagtgcagatgagttacatctccaaaatcagagtactattaccaatagtggtacgttaaatgctgctcgaatagcgattaattctaaaaatctaaaaaatagtggctctatcgaacaaacaggcatacaaggacttgatttaaagtcgggttcaatgacaaaccttggcggtaaaatcggaattgctaaaagtaatactggtggcggtactgggggatctacagggggaagtgttccgacagttccaacagatccatctaaagatggtggaagtttaggtgttgtaactccagtagatacaactccaaaaacttacgatacaggttttatccatgtgtcagatgtactcaataatgaccaaggtgcaattgttgccaatggtggtgtagatctagacagccaaaatggtttagataatcaaggtggtcagcttaatttaggtactatcaatattaaagggaatagctttaataatgaccaaggtcagcttactgttaaaagtgccaatatccaaacctcaagttttactaaccaacaaggccagcttgcttccaatagtaccctcaatattcaaactcagtctgctaacaataaagacggaaaaatccagtcaattggacagcttgatttagctgtaacgggtgaattgaataatgttgatggacaaattgctagtggagcaaatatcaatgttactgcaagtgatttgaagaaccagtcaggtgttgtgtattcagaaaaccaagctgtaaatattaaagcgaataaagcgattgataatactgaggggctcattcaggctaaaaccaatttaaatctgaatagccaatctcttaataatacatcaggacaaattgttgcagaccaaattaaacagaaacatgtgacggttaataacaatcagggatctatcgcagctcagcaaaatttaaacagtactgcccagcagtttgataatactcaaggtcagattcacgctaaatcaataaagttacagcatgatcaacttaaaaacacgggtagtgtttatgctgatcaggatttaacagttacagggcaaaatattcagaatgctggtactttgggggctggaaaaaatgtccagattagcagttcaactttagaacatagtgtaggtggattgattgctgcgggcctagatcgtgaaggtaaattaggtgatgctggtgatgtgactattcgttcagatcaagtcggtttacatgggcaaaccttagctggcggtaatttaaaagtacaagcgcaaagcaatattgatgcggcaaaaggtcaattgcaggcacaaaatattgagctagatagtgtgacaggcaacatctctacgcaggctggaagcgtagttgcccagaatcaacttaaactgactagccagaatttgattaataatcagcaaggcctattgagtagtcaggacctcatccttacagcaaaacagctagataatagtcaaggtaaaattcagcatacgggcaataatgaatttaccctagattttgtgaacggtttaaataacaaagcaggtgaaattagcagtaatgcatcttcaattaacctgaacacgtctgctctgaataatgaaactggaaagattatccatgcagggaatcagcaactgaatatcactgccgatcaattgcaaggtgcacaaggccagattctcagtaatggacagctattattgaagggtggacaagttgtattagatggagcgactacttcggcgaatcagatcaatatctctgcggatagtttgagtcatcaaaaaggtcaaatggttcagcgcggtacattaaaaccgcttaccttagcgattaaagatcaattgaataaccaattaggttttattcagagccgatcgggtttacagctaaaaacaactacgcttaataatcagggtggtcagttaagttctgctcttaattatgatgtacaacttgatgtggcagccttactcgataatagtcaatcaggcaaaatttacgcaggtcagaatggcgttattcaagctggttctattgataatagtttaagtggactcatttctgcacaaaatgcattaactctgaccagcttgggaatcattaataaccagtctggtaaaattgtggcgaatcaagatgtcactcttacttctaatggcctagacaatagcagtggacaaattggtagtagccaaggcattgtagcgattagtgcaggatctggtgtagttaataatacttctggaactctacaagctgaaaaagatttaactgtaactgctgaccagattaataaccaatctggtcttatgaacagccaaagttcacttagtttaagtagtcgtaaagatgttaataatacatctggacaaatcattgctaaacaagatgtaactacacacagtcaaggtttgaccaataattcaggacagattggtagcgttcaaggcaatgtctcattagatgctggtttaggcgatttgaataatcaagcaggtaaaatacttgctgctcaagatctgactttaagcgctcaaaatttagataatcagtctggtcttatctctgctcaaaaaaaattggcattaaaagttcagaaattaaacaaccttaaaggtcaaattcaaagtggcgatgccatagaaattatggggcaaagtctgaataaccaaggtggttcaattgagacaaatgctgatcttactttaaatatcaaaggtgcattagataacagtcagtcaggcaaattgacgggcaacactacaaaaattacagcaggctcaataaataatagtaataaaggccaaattaatgctatagataccttaactgttttatcgcaacaagcaattaataaccaaactggggtaatggccgcgaatcagaacgtttctattcaaagtcagggcttggataatacgtcggggcaaattggtagtgttcagggttcattaaccattgatgctcaaaaagaaaaattattaaatacttcgggttcgcttcaagcaggaacgagtcttaaaatcacgagtggtgacttgaataatgattcgggcactattcttgcgcttaccgataatacaattacaagcacaggtgacgtcagcaataaagctggaaaaattgcatcgaatgctcacactacagttacaactcagaatttaactaatcaggctggaacgattcagtcaggtagtggttcagctttagatctggtgattaatggggcattagataatagtcaagcaggccaattactaagtggtgcgagtttaaacctgcaagtaaattctttagataatagccagcaagggcaaatcagtgcacaagatgcactaaatatcattagtgctgggcttatcaataaccaagcaggtactttggttgcaaaccaaaatgtaactttgagcagtgaaggtttaaataataatcaggggcagattggcagtattcaaggcggattagctattgatgctggggatcaggctctcaccaaccagtctggtatattacaggcaaaatctgatgtgactatcaaagctttatcgattgatagtactgaaggacaaatcatttcacaggctaaagttgatgtacaaagccagaaagaagtgaacaatcagcaaggcctcatctctgccgatcagggtattcaggtaaatagccaagggctgaataataatctaggaaatatcagcagtgcgcagggcaatatcgttctgaatgcaggccaaggtgtattgagtaatcaaacaggtaaagtcattgcaggtcaggctttgcaactcagcgcgggtcaggtggacaatagccagacaggacagttgaacagtcaaacgactttagatatccaggccacaaaagatattaataaccaaagcggtattattgctgcaaaccagcaagtcaatttgaatagccagggactcaataacaatcaaggtcaaattgtcagcctcaatgatgcattgacagtgaatagtggttctggtgttctggataatcaatcgggcactttgcaggctaaaggggatattcagctgaatgctgaacaggtgaatagccaatcgggtttaatcagttcagaagctggaattgatctgcaagtaaatcagctggtggataatagctctggacagattattgccaataatgcggtacaaatacaaagtcagggacttaagaacaatcagggtcagatcgcgagtgtgaatgatgtactgaacattaatagtggttcaggaacacttgaaaatcaggctggtttgttacaggcccaaggtgatattcaattaacagctgatcgcctattgaatcaatccggtctaatcaatacacaaggcaagttgtcggcacagatcaatcaggatattgataacagtgcgggtcagattgttgccaatcaagctgtacagttaaatagtcagggtttaaacaataatgcaggtcaagttggcagtgttgccggtcatgttatcttagatgcgggttcaggtgatttaagtaatcagtcaggaaaaataatctccgctcaagatttaacattaaatgctcaacatgtagataaccagtcaggtcttatctctgctcaacaacaattggtattgaatacacaaggattaaataaccttaaagggcagattatctcgggaacgaatctcacattcgttggacaagacttgaataatcagggtggtttattacaaaccaatgctgaccttgaccttaatttaagtggtgtactggataatagtttagctggacagctctatagtggcggtcagactacaatcaaagccgcttctgtagacaatagtgctcaagggcagatcaatagccaaggtgacttaaatattacaactgcacaagacatcaataatacagagggtgtgattgttgcaacaaaacagatgcagttgaagagccaagggttagagaatactgccggtcaaattggaacagagcaaggcgatctactgattgagacaggtgatttggctttaaataatggtacaggtgcgatccagtctggggaatcactcagtcttgatgttaatggtctcaccaatagcggagtgatcagcgctttagaccagttgactgtaaatagtcagggtgatgttaataacgatcatggacaaattttatcgaataaacagcttcagttgactggccaaaatttgagtaatcagacagggattattcaaagtggtgaacaatcgaatctgattttagacatcaatggtattttgaataatcaagctgggcaaattcacggcggtgcaaatacccagattcatgccaactcaatcaataacagtcagcaagggcagatcagtgctcaagatgcattgaatattattagtgcgggtttggttgataaccaagctggtcaaatgattgccaatcagaatgtaacattgaccagtcaaggcttaaataataatcaggggcaaatcggcagcattcaaggcagtctaacggttgatgctggaaatcaggcattgagtaatcagtctggtaccttacaggcaaaatctgatgtcagtgttaaagcattgtcaatagacaatactgcggggcaaattaatactcaggggaatatcaatttacttagccagcaaagtatcaataacacgcaaggtgtaattgttggcgatcaaagtatcaatatcaacagtcaaggtttgaataacaaccaaggtcagattggtacacaaggggatttaacagttcaggctggtactcaggtcttgcagaatcagacaggtttattacaagctggacagaaccttaacatcagtgcagcagcaattgataacttattgtctggacagattaatgcgcaaggcagtgccatattacaaagcacaggtcttgtgaataatgaaaccggtacaattacagccaatcaggatattacattaacgagtcagggcctaaataatacacaaggtcaaattggcagtgttgtaggtagcctcaatttagacagtggtcaacagattctcaataaccagtctggttcattactttctggtcatcaaatcaatattcatgcggcaggtttgaacaatacccaaggtcagattgttgcacagcaagttctggatattgatgctgagttgcaagcgttaaacaaccagcaaggcttaatcagttcagatactgtcaatattacgtctggattgttaaataatgatcaaggcttgatccagtcgaatagtgccatgatgattgatactcaaggccaaagcctgatcaacaccaatagcggtacacaaggtggtttactcagccaaggcaatcttagcctgaaaaatgttggtctgttggataacaaacttggctatcttgcgagtggtcaaaatttaggtttaagtgcaaatcaagtacaaaacagtggtggtactttacttgcagcccaaaatttaaaattacagggcattggtcaaaatcagttgttaaataaccagtcaggtcaaatcctgtcgatgggagatatgcaactgtctgttgagcatatcaataatcaggggaaacttgcatccaccgatgctgacagccatatcatggcaacaggtcagctggatattcaaactcagcaactcgataaccaaaatactttagtagctgatacagttcagggtattgatgctggaaatctgaacctgaatgctgcgattgtaaataatcagtcgggtgcaatccgtagtagccaaaacagtcaattgaatattagccagcaactcaataaccaatctggtgaaatcagtgcagtgaagcaattaggtattcaaggtgaccagcttgcgatgaataacctgaatgggcaattacttgctggtgaaaatctgaatatcaatgcgaaatcattgacaggtgatggcaaggtgttaagtctagggaatgctgatatccagcttaaagacagttatcaacacaatgcaactgcgcaactgcaagccaatcaaaacctgagcctaaccagtgctggtgacatcaataacgatggcactattaatgcgggcaatcagttacaactcagtgcagtgaatatcagtaatagtaacaacgctaaaatagagagtcatgatacccagcttatagctcagcagcagattaataatacagggttgatcaatggtgatttgactactttgactgccgatacggtgaataaccaaggtacgggtcgtatttatggaacagacttggcgattagtactaacactttaaataacttacctgatgccaatggcactgcaccggtgattgcatcacgtggtgacatgaacttaggtgttaatgttctgaataatctggcgaatacgcaggattatgacagtcaggcattgatctttagtgctggaaatttatatttgggtggtgctttagatgagaatcgtaaagccacaggtcaagcgactgtcattaataatgaaagtgcaacgattgaatcactgggcgatatgcgcctttcaactcaaacgattaataatattaataagaattttagtactcatgaggtggaggtttcacgtcaagaggggctaaataagtattttgatggtgtttgggccaactttgatgggactgtatttagatacatgcatcctggtgaggactccagtagctatgattacgatgaagttattactgaaactcaggttctaacttctgcacctgcaaaaattatcgctggtggtaatatggatttatcaggttcacaagtgattaatgataaaagtcagatttttgcgggcggaaatttaacgaatacgggcggaacgattacaaacacagaagttcttggtaatcgagaaacgaatgtaagtggttggcaacatctctatgaaaagcgtagtggaaaagatttctttggagattatcaatttagttttagttcagtagaaacgatcaaattgcctgtaagtcaaacgatagagcattatccgcttaaccaaacgaaccaagatattactagggtatctaataataccagtagcaataacataacatcagcacaaaccaatacaactaatgtcaatggtttaaaaggaacagatcaaaccacagatgttggacaggctggaacatcacaaggacagaatttatcagtgagtgattctggtcagactgcacaaggtactgatgctcaaacgacttcacaaaaccctgatatttctcagactacacaaaataatgatgtgactgtgagtacatcacaagttgatgtagcagatgctcaaaaggcacaagggcaagatttagtttctgcacagccaaatgctgttcagtcagacatacaagtttctaatctcaatcaagatactgctaatactcaggctaaaaacaatacgacacaagtttcagttttggagcaattgcaaggtcaaacggcagaacaggtgtctgaggcatcgacaacggatcaagcaaatgcaccagaccaagctggaacaggcgagcagcttgaaatccgtacgatcaacaatagccagtttaaagttgcaaataatgccttataccgtgtgggtgctgacagcaaagctggctatttaatcgaaactgattcaagttttaccaattataaccaatggctctcttcagactacatgttagatgcattagggttagacccagcgttacaacaaaaacgtctgggtgatggtttttatgagcagcgtatggttcaagaccagattgctaatttaactggttatcgcttccttgaaggctatggttcggatgaagaacaatataaagctttgatgaataacggtgtcacttatgccaaacaatatggcttacgtccgggcattgctttaaccccagcacagatcgcacaactcaccagtgatattgtgtggttagttgaaaaagatgtcacattaccagatggaactcaaaccaaggctttagcaccacaggtgtatgtcaaagctcgtgcgggtgacttaaaaggagatggaacattactttcagggaatagcatcaaatttaatctggatggtgatttactcaatacagcaacaattgctggacgtgaggccgtgcagattaccgcagataatgtcaacaacctgatgggacgtattcaagggaatgcggttgatatcaccagtaaaaaagacctgaataatattggtgggtcaattcaagctaaagataccatggccatgaatgtcggtgggaatcttaatgtcacatcaaccacacgtaccactgattcacaagtcggtgggttcagtgcaagtacaactggtttggatcgggttgcaggtctatatgttggtgatattcaagccggggccgtcgatttgaataaagcgacatttgtattgaatgttgcgggtaatagtgtattaaaaggcgctgaaattaataacagcaatggtgcaaccttaatcaatacacaaggtaatgttgatatcggtgctgtgcagattggtaagcaagaacaactgaatcttgatgcaaaaaataactataagatcgcgcaacaacaagatattggtagtcagatttctagtgcaggtacacttgcgattcaaggcaaaaacattacagggaaagcggttcagttttctagtcaaattggtaatgttgaattattagctgaaaatgatatccaactcgaaaatggtttaactcagagtacagcatctagtcagtttgcctacaagagttcatttggtggtaaaaaatcatcaacttataatgcccatgaaacggtttcgcaggcaaaccaaattaatgccggtcaaaatgtaattctgaatagccaacaaggcaatattaccgcgatagacctaaaagcaacggcggggaataatattcagatacaagcagagcaaggcaatgttcaactattatctgctttaaatgaaaagagtgaaagttcgacatcatcaaaaaagaatgctgctacctataacaatcgacaatctggttatatcgatcaagaagttgcgcaaacgaccttaaaagcgggcaatacggttgatgttaatgctgctaagaatattgagcttcaagccaatgatgtacaagctgggcaaagtatttacgttggaaatacccagatgcaacgtcaggcagatggaacattaaaagctgctgatggttccgtgatgcctgaaaatgtgaccttatctaccttagaaactcacgaccaacagtgggatgagcagcaaaaagggtaccgaggtattgctaaagaacttgtaaaaggtcttgctgtggggatgtcaggtttagaggctttggctccaggacttaaacttgataagaaaattactgtgggtgaatcaaataatcaaagaacagaacagattcgtcaaacaggtacgagtttaaatgcagcaaatattgcggttggttcatctggacaaacaacattaactagcgcagatctgacggcgaaaaatgttgcattatcaggtcaaaaagtgacattaaatgctgcggaagagcaaaatatcgaaagcagtagtcatagcactgaaactatagaaggcctaggggttaagctgaataaggacagtattcgtttaggcggttttgtttctgaaaaagataaaaatactttaacggtgactgaaacgactcataaggctggtagcattaatacagataacttgagtattaatgggggtaaaggcgttgatattctaggacagaatatcaaggcaacaggcgataccacgatagaccatggtcgaggagagctcaatattggtggctatgaaaataaaaccaccacagaagaaaaaacaaaaaatgaaaaaacgagtgtagaagttggagtacgtaatgcctatttagatgctgcactcgcagtgggtgcggtgaaagatgcggcttcagcactgaaagatgccaaagatgcttatagtcaggcccagcgtgattatgcagcaggtaaactcaccaaagaagcattggatgacagtaaagcaaatgttgcgatggctacagcaaacttagccagcgcacaaattgcagtgggtgcttcagccgccgcggcagcagccagttccgcgacttatggttttaccattggtgcgaatggtgaacgtatagaaaccacaaccaataacaaccagactcagggacattggcaaggaagtaatttagagctgaataatctgaccctgaaatctgaaggccaaaataccaatattcagggtagtcgtttaacagctacgggcacaacgactttcaatggaactaaagatttaaatgtaacggcaggtacagaacatagtacccaagagagcagtagtaaaactaacagtcaaagtattagttatagttcaggtggtggtggaagtgcttcaattggcaaacaaaccagtcaatcacaaagtgaaagcctcacccatgtgaacagtgaggttgcattaaaccgtacagaaggtcagttgaataaactcaatattcagggtggtgaagtttccattgctgatcggggtaacttacaggtcaaccaaatccatgtagaaagtttacaagatacggcgaaaagtagtaacagtagtaaaggcggcagtattggagctggttttggttcaagtggaatcagtaatgttagtgctagctataaccaaagtaagggcagtagtggcagtgcgtgggtcaataacacgagtaagttgcttataggtgacaaagaccacgatgctaatctagatgcaatgggagttaaacaggttacgaatattggtggtgtgattgccaatgcgaccaagaatgcagatggtacgttaactgactataaaggcctaaattatagcggtgcgcttgagctgaaagatattcaagaccataactataacagtagccgtggatttaatgtctctacaacgattggtaagactactcaagaaaaagatggtcaaaaatctaaatatccgaatggcagtaccacgcttggattacaaagcaatggacaggaaactgagcagcttactaaagcgacgatggggcaaggtacagttaaaaacacaactgaactgaccaatcgtgacattaacactactcaagagattacccgcgatcaaaccacaggaatgttaaatggtagtttcacggtggatcatcgcttgttgagtgaaagtggaagagcggagattgttcagcagcagaaagatttgccagagaacttccgtcaaagtgctgagaatttagtacaagccttacctgataatgcttataaacaacgtgcattaaaatcactaaataatattcaggcaggattggctaataaccctgaaatgttggcgaaaggtggtgatgaggtttatgaagggtataaagagtttatacgccaaggtggagaacctgaacagtatgaagctttattaaataaagaagttttaccacttgcgaaagaattaaataatacggctaaacaaactttggatgagatccaaaaacagattgctgaagaatatcaggttagtgatgatacagcccgttcgattgtccgtgaggttttaacagccgttagccagcaagatggggccaatacgaatactacagatgagacaggcacacttaatccgaatcaaccttataaaggaacgtttgaattaccaaccatcgtagttacagcaaaaggtgatgccgtattaattcagggatcacaaagcgatgaagcgagtattgcgggtgagaatgtagttaaagtcattgatggaagtaatttagcaattaaactcttcgatcagagtgcggcggtaagttataaagtaaatgatgcgatagagaaaacaggcattgaccccgcaacagcagggttagccttgtctttagcctttggtgggccgattggattagctagagatttaataaccgataccttagtaggagagccgctagcacagggtagtgatgtactgaagaacgaagttacggcggttgtgagagatacgagctatgacaccgtttctggctatacttcaaatagtacaaaacaacaactatcaggtctgactgatccagcatcgcaaacagccttacaagtttctgaacagctacaacgtactaaagatggtgttggcttcttggctagtgtagttttaggggctggtggtattgcgaagacagctaagattgatggcaatgaggttgaggttagtacggctggaattggatcaagaggtgagttaactaaaccatatgacccagtacaaactcgtaatgatctagaagtggtacatggtagtgagaatgtcaaatcaacgacagttccaccatataatgcaaaaaatgttaaacttgcaggacaaaggcatcctgtcactggtgtagtatttgataacaaaggttatccagtatttgatgatatagctagatatgacactaatttaataaataaaggttatagtaacttaagctataccaaacaaatggagttagcatcgaaagacttatggaatgcaattcagcgaggagaagtaaatagtagccaattctcttcttcacaattgagacaaatacagagtggaagttcgaaaatagatgattatacttggcatcatcatcaggacaatggacgtatgcaattagtccctgagtgggaacattctaaaactgggcatattggtggtgatgcaatgcaaggtggtaaataa

SEQ ID NO: 66098 - DNA, 720 bp, Acinetobacter baumannii; identical to SEQ ID NO: 55444

SEQ ID NO: 66099 - DNA, 2007 bp, Acinetobacter baumannii
atgtcaattaatggtttctctagctttgatcccttagacgctaaacagattcaaagtactgaagtagcagccttggcacagaaaagagagttgaaaaatattttaggtagttatgtaggatggtttgatcctttttgtgagttaatacaaaattctttagattcgatagaaaaaaagttagaaacagctcctgttgaatatagacctagtttgtatataacgcttaatctacaagataattctttgattgtgacagataatggtttaggcctagatgaaccacgctttactcagtttttatgtccaaatatctcttttaaaacaccaggaaaaaaaaatcgaggacataaaggtgtaggggcaacatatatagcttatgggtttaatgatgtgcaagtatcgacaaaaacaaactctttcaaagctattggtcgaatgcaaggagcaagacgttggctggatgatgaaagtccagcgggtaatcctcaaatgtattcagaccatgaagctggatacttggatcctgactttgaagagtttgatacaggtgtatctatttatctgaaatttgataagcagacccatcctagtgatttaaattattatcaaacaaaaaaacctgaacaatggctcaaaatattaaaagttaaaacaggtataggtgctttttttgaaaataaaaaaataaatatcagaataagtataatagataaaactggtaataggtctttccaagactttcaaggggtggaatatttatggccagaaaatgaggttgtaaagaaggttagattacgcgatatattaactaagcaagatgaattatatgacaaagggaaggatataaaaaaagatcttccttcaaaattaaaaaatgctgagattctatatgatttctgggatacaaatgaattgctgagtttgtcagataataaaagactaggtatttcttttagtgaggatgaaatttatttaataaaaaaatatgaagtaaatgttcatgcttcatatgtttatacagtaaaaatttgggataatatctgtaagaaagtagattatagaaagaattcaaaattactttacggtggtgttcaaatttctgcaaataatatgccccagggtaatttaattcagattcctttaaatagaaatattggaaggcaaaatcaacttcattgtgtggtccatttcaataattgttcggccgatttaggacgaaaaggatttaataatgaaattagcgagcttgcaaaagagttatcaaagaaaatagcagatggcccttttttaagatttaaatttgctctacaagtgaatacaggtaattcaattagtgatctggaaagtcagcaaaaaatagctgactggaaagcggaaatggcgagacatgaggagtctatgccattaattttagagaacgagaacttttttttacctcaacgtaaaatttctattacttctgttcctacaagagaacaagatgtaattgctttatttaatcaaatgatagctggaggagttatacgtggattaagaataatgtccactaatgaaagaactagttatgatggtttatatcgaataattattgaagagcctattgatcatcatctttatgatgaaaacaaaaatccactaggtatttctgagtacgctattcctaatgaattacctttacttatggaaccaaggattttagaatataagtttaatatggatgcattatttgaagatatctcaaatggtaataaaaactcaaatgatttagatcttttaatagtgtgggagtcgggttctaattacgaagaacattataaaattacatctttattagatccggataatcttaacttaaggcagtatcatggtgttacacacatagcaacaaataccaatactgatcagagagagtttgacattattatattaagtgaacttatcaagtttttaaataatccaagattagaacttgagaatcaactcaataaatatgaaagtaatttttaa

SEQ ID NO: 66100 - DNA, 183 bp, Acinetobacter baumannii; identical to SEQ ID NO: 56568

SEQ ID NO: 66101 - DNA, 1170 bp, Acinetobacter baumannii
atgacagagttagtcaaattagcaactgttacagaaacaattatgggacaggctccttcaagccatgattgtaataaagatggcacaggaactccttttgtgaaagcaggagaatttggtttatctagacctgtgataaaggaatggacaactaaccctttaaaatttgctaagtatgacgatgttctattatgcgtggtaggagcaacttgtgggaaaattaataaaggttttgatggagcaataggccgatcagtggctgccgtaagagccaaacctgaatttatagataaagattatttatattattttctacaaacttggtctttacgtttaagagcaatgtcacaaggtgcagctcaaacggttatcacaagagatatgattgggaatttagaaatctatctcccaccacttgaagaacaacgccgaattgcctctattttagatcaagcggatgagctacgccaaaaacgtcagcaagcgattgaaaagttagatcagcttttacaagccacctttattgatatgtttggcgatcctgtcagtaatcctaaaggatgggaggtaaaaaaactttccgaactatcaataaaaattcatagtggtaatacgcctaaaggtggatctgaaaattatgtagatcaaggtatcattttcttaagaagtcaaaatgtttggaaaaacaaagtgattctcgatgatgttgcctatattgatgctgaaactcactctaaaatgatgaaaagtagtgttaaacatgaagatttgttaatgacaaaaacaggtcgaattaacactgaaaacagtagtttaggtcgtgctgcgatttatttgggtgaggatgatagtgccaatatcaatggtcacgtatacttaattcgtattaaagacggtttcaacaaatactttattttaagaatccttacactgcctgattattatgaatatattcgttcagtatgcgttggtggaattgataaacggcagttgaataaagagcatatagagaattttccaatcattcagcctcctatggaactgcaaaacaagttttcaaatattgttcaggtaattgagagccaaaaacctaaattacttgaacaattagatttagctgaaaatttatttaaaacattacaacagaaagcatttaacggcactttataa

SEQ ID NO: 66102 - DNA, 234 bp, Acinetobacter baumannii
atgaaaattcaaagtatagaagatgaaagggagatagctgccacagcagctaaggtactgcaagaaagatttattgaggctgcacgcaccgaaacagtactgtatgtaaagaatgatgctgtatggagtaaggctccaaatggtgatcccatcttaattaaacaattgtctgggcggaaccccgatctcgctaaaaaatttgcaagtagaggaacttacaaaattaaaaaatga

SEQ ID NO: 66103 - DNA, 213 bp, Acinetobacter baumannii
atgttagaattatctattgagattggtcaattaatacgcaaaaaaagaaaagagaaaaaaattacacaagaagctttagcgttacagtgtggtattgaccgtagttatcttggtcgtattgaacgtggagaggtcaatattacagttttaaagctttatgaaatcgctcatattcttaaagttgaaccttatcatttactacctaaagattaa

SEQ ID NO: 66104 - DNA, 384 bp, Acinetobacter baumannii
atgtggaaaatatataaagaagaaagttctgatcttggatttgctattgggtgtctattttcagaagcaattaatttaaatgagtttaggcaatgggttgagctttgtattaacgatttaaatcaagatgaaataccactttatatgtttgatcttttagatttcgaagactcattagcgaagattcatttagttattggatttgtgccaagctctggactatcaaaaacagaaaaaatagcgttagaaggtatttcttatttaagaggagtagatattttcgaccctatttctacccgagaaaaatcgattgaatgcttaaagaaaaatcctcatatatcagaaaaatttaagcgattttttccttttataaatttcatttaa

SEQ ID NO: 66105 - DNA, 702 bp, Acinetobacter baumannii
atgtgtataagagacagtaataatgcaacacttaaacattatgctatgaatacgcggcatagctatagaatttatgaagatgatcctcttgagagtatgaatcattatattgcacaattatgttctgatttgattcagtataaattttgtaacaattattcaagttactcaatatatgaaaattataaaggtaaactgattagtattaaacttaatgatttcaaggctatagcaaaaaaaataaggtgtcaaaatgatactgatacgatttgtgaaataattgaagagatgattagaaaaattaaatataaaggtgactatgaaaattatatcttagcagcaagaaatattttgaatgatgagtttctattgaaaaaatataaaccaaataataagaatgaattacaaataatgtcaatccataagtcaaaaggtttagagtttaaagctgttatccatctaggtttagaagcatgggtattccctagaatgactcgacgacacggtcaatggattttacaagatttagatggggacaaaaatttacattatgtcgcgatcacaagagctgaaaaattatgctatttagtaaacatgtctataagagtgaattcacaatttgaggaaaggactgcggaaaagtctgagttcttatgcatcgaaaaactaaacaagcatattgttgatctaggagttatgtag

SEQ ID NO: 66106 - DNA, 1326 bp, Acinetobacter baumannii
atgattgagctttattttgagaccgatagtgcaaaattaccacctttatcagatcgattattacctgttttgatgtttgggaagtctgctgtttctggcaaatacaatagtattggtggagcagcactaattgaatttagaagacttcaagaggaagcggatgaaacagcttttgatttaatgatgctttcattagcagtaacggctgctgatacttttgtagagagagatagtcgagcagaagatgcatggtgtcgtcaatttaagataaatcttccaatgttaaatccgattctttggaataagcaaaaaacactcttaaaggaaactttacattttctaagcggagacttgtgggattttgaatttagacaaagtgactttcaaatccctgaaatgatgaaaggtatcaaagcacgaaaaattttcataaataagcatgattctgtttgcttattttcaggaggtttggatagtacaattggtgcgatagatttgcagtttcaaggaaaaaaatcagttttagtcagtcatgcctacccaaaagatagacaaaagcaagatggtgtgtaccacaagcttcgacttagtaatgctagatttcaagttgtagcaaatcctcggaaagttaaagaaattccagcagatgttcaaatgagaacgcgcagttttaactttattgcctttggagctttaatcgctactgctttgagtaaaaaccattattcaaataagataataccgctttacattcccgagaatggcctcatttctattaaccctccacttactcctaggcgaataggttcattaagtacgcgaacaacacatccatactttctaaaaaaattaaatgaactattttcaagtatagatttaccagtagagttattaaatccttatcagttcaagaccaaaggagaaatgatgctcgaatgtaaagatcaaaagttattgaaaaaggttgctactgatacagtatcctgtgggaaatggaagaggtcaggagtgcaatgtggtaagtgcttaccgtgtttgattaggcgtgcctcatttaatgcatcccaatttaaagatttaactgattatcaatactctgttttaagtgatgtgattaaacgagataagcagagggatgacctaatgtctatggttatggcgatcagcaaaattaaaaatactggaaacacaaatttgtgggtagcaaaatctggatttttgccaatagagcctaaggaacgtaagcaaatcattgatactgttttaagagggtttacggaagtagagcagtatctaaaaaaagagaatttaggtgtaaacatttaa

SEQ ID NO: 66107 - DNA, 282 bp, Acinetobacter baumannii
atgcttaagttttttgcacttttgaccgagtggcttttaaaaaactcggttcaaaaggtcttgtctggtgcgggtttatcgattgtttcttacttaacagtagtaactgcaatacgtgttgcattcgataaattaattaattctgtttatagcgtgtctgctgatcttcttaacttcatggggatatgtggaattgattacgcattaagcggttatgtctctgtttcgatttttttgttgatgcttaaaaagggcaatttaaatattaggaaaagctcatga

SEQ ID NO: 66108 - DNA, 492 bp, Acinetobacter baumannii
ttgactctccgacaaacccggtacggttcagaccctgtaggcactggcaaaactgatactgtcccaagtattacttataacaacacaacaattacaaataattcaacgactactaacaatacgactaatgaaacaacaactactacgggtacgtctgaagtaaagattcctgcattctgtgaatgggcatctgttgtctgcaagtggattggatggactcaagaagcacctgaattgaaggatgagaaactcgaaattaaggacgaaaaccttgaaagttatgaccgttccgactatgtaaagtttggtcaaacatgtcctttttctgctcaaaattattcacttgatcttggtgtcggctcaatgaattttgatgccgatgcaactattttttgtgtttacggtgaaatggcacgtccttacatcattggccttagtcatttgggttgtcttttttaccttctttttgcccttagaaatgggggtgtttga

SEQ ID NO: 66109 - DNA, 3015 bp, Acinetobacter baumannii
atgtcttcaaatagctttgaacaacatcaacttttccaagaagaaataatatttgatcaatttctctatacttattgggataaacatagtcgtcttggtcaaatccaagaattagcattacctgaaagaaaaaatactttcgccatctgttatcaagataaaagtacatatactttaaaaagtttaagtacaaatcttttatttaaggccaccttgaaaagaaatcaaggaatactaaaagttgaaaaaaatctacttattccattatttgaatttattactacatcctctgcaattaatatcaatgcaattaatgaaaatggagaaagattaagagcagctcaaattggtgctctatactcattaatagcacattggactctatctaaagagcctgcaacggtagtcttacctacaggcactggaaaaacggagactatgctattaacaacattagtcgaccaatctaaaagaacattagtaattgttcctactattgaattaaaagaacaactctttcaaaaatttagtagttggggaatccttaaagatctaggtgtgatacctcaaaattttcgaaatcctaaaattattgctttaaaagagactattaaatctgaagaagaagttaaatatttattaaatgcagaagttattatttctactccagctcttttagcaagaagcccatctgctataaaacataaattaaaaaacttttttagtcatgtatattttgatgaagcccatcatgtaacagcaaaagaatgggatatgctaaaacaattattctcagcttcaaaaattgtccaatttactgctacgccttatcgattagatagacaaccgattcaaggaaaagttgtttacaattatcctttatcacaagctcttaatgataaatgtttttctaaaatttcattaatctcagtagatgaacgtcatccaagtaaaaaagattatgaaatagctcatactgctattaatcaattatataaagatcgccaaagaggtttttataaccataaagtcatggttagagcagagactagagaaaaagcagaagacttactaagcaaatatcgtatgtggtttcctgaagaaaaaataactcttgttcattctaaagtttcagggaaaaaacaaataattgaatctattaaaaatcatgagtttgatattgttatatgcgtcgatatgttaaaggaaggttttgactatccgaatttcaaaatagcagcagttcatggtatgcataaatctatttcggtcttgctacaatttattggacgttttacacgcacgaaagacaatcttggtgatgcatcatttattgtgaattttgcagaagaaaaactcacaatggaattagagagtcttttccaagaaggaactgggtgggaaaacgtaattagccaaattgcagataccagaaaagaacaagctgcctccttactcgcctttttacaggaatgtaagcctttatccggttttgattctcctgatatagatttaaatcctaaaatcgtttttccggccctaagctttgtatgtttccacgcccaaaaagtagattggtataaatttagagaggcttttaatacaaaatactattctctttctcagccatttattaatgaagtggaaaatgttttttactttacgactcaatgtagagataaagtgaaatgggctaaatcagatcatattaaagatcaaatttggggtttagtcgttcttcatttcgataaatcaaaaaaattattgtatttaggttattcagataaattacttgatatagataatttagtacaaatcatttcactgggaactgcaaagaaaatagataaagatgatgttttcaaatcttttaatgatatcaaacgcctaagtatagttcatgcaggtgtgttcaaacctgctaatcacttgcatcgatattcaagattcagtggtgctgatgtcacaattgaattgagtaagattagagaaggtagtaaatgtaagaaatctgattttgtaggtataggttatcgtaatggaaaacctataagtattggagcttcagccaaaggaaaaatttggagtcctgcgaaaattgcagatttaaaagaatggaaagaatggtgtattcaaattggagctttaataactgatccgaatattaattcagatcaaattcttgaagactctgctaaaaagcaagatatcgttgaatttcctgaaaacatcaaaattttagccgctgattgggccgaagaattgtatgaaaaaattcatcgaattacgctcaagactgaccaacatgaatactgtctttatgaaactaaacttatcataaaaaatgtgagttctaaaaagattgatctcgctataaaaacagaaatagaaactttagacttttcaatagagctgacaggtggtgaaaatggttttaatattcaaaatctagataatgaaaaaatttgtatttcaaatttaaaaagagaagatatttctttaaagaaattctttgaaaactatccgccaacattatttctatcaaatagtgacacaattagtggctgtattcataccatttacaatactcaacctacttatagaattccttccgatcaaatccatattctagattgggaaaatgtacattttcctcatgaatcaatgtataagaatggggttataagagaaaattctgtccaagaatacataatgaaaaaatatgttaatgaaaatgcagatatagtgttcaatgatgataattcaggtgaagttgcagatgttgtagccatctattcaactgaagaagaaattatctttaaagtcacccactgtaaatactctaagcaagaatctggttcacgcctatcagatctttatgaagtgtgtggacaagtaatcgtatctcttagatataaatggaaaccagaagatctaattagccacttaaaaagaagaaataaaacgggtgtattagcaggtaaacgtttttataaaggtaatgagagcctgtaa

SEQ ID NO: 66110 - DNA, 330 bp, Acinetobacter baumannii
atgcgtttaacttctttgttattaggcatggcctttgctttttctaattttcaggctaatgctaatcttgcgactcccctacacacccaagttcagcaaaaaaatgttcaacatttgatatataaaattgctgaagttgaccctcgttttggtttaagtcaagagcaattaatccagattacacagcaagctgctgatatttggaaagaaggtacaggtaaaaattactttacttatgacccaaatgcaaagttagaaattcgtcttgtatacgatgacagccaaaatcgttcagcagagcgtcaaaaaatcgcttctcagttcaaataa

SEQ ID NO: 66111 - DNA, 1446 bp, Acinetobacter baumannii
atggctattaatgatgatttatattggtataaaaatgttttaagaagaacaatttcaacaacaatccgcttttacttatctctctcaattatcctctcaccaataattctaatgtctgaagctaacgccaccgatgatggggattggtggcttcaacgtgaaattaagctacaacagaaccgtgaagattatgcaagacgtgtctatgggcgttctgctagatcatttcttgagactgatcctgtaactgctaaaaccagaacagtaactaaaattgccattgctgaagcaacgcctaccgcttcaaaggtgggtggaacaatgctaaaacgtatcgctttttatgctaagaatccaggcgttcaaatggttggcgtaatggctgtaactcagttaatcgaagctattggctgggtaatggaagatggtacttatatcaagaaaaagcctgctgatccagtttcgcctgatcctaaaaactatcaatatgcttttaaaatctacatacacaatttgatctgttatacatcttcgaattgtaaatcggctttggagccaattgctgctgaaaatggatggactgttaatagctgtacttcaaaacctaatactgaaggtatgcctattatgtcatgtgctttgtcgcgttcaggtgattcaacatctcaaactttcgataccattaaaaaccctttatatgatcccaaagcaccacagcctgaggatcaaaagattcctcttacacctgaattgttaggggctgctatgttaggtgagggttatcatgatcctgttaaccctgcgttagatagttctgttaataacggtctaatggattcttcagttgcttctgcttatgaacatgatcctacaggtattggtgatgatctggctcaggagatggataataaacttaaaaatgctcctttgactccagatgggcagcctgcgccattcggcgatcctcgatataaaacacctcctacagcagacgcaccgaataagaatgaccgtggttggactaatgatggtgatgctgctgatggtaaaacagaacctatcaaagacccagatggaaatccaactggtggacaatcaatttctatccaatttcctgttttctgtgaatgggcttttacggtctgtaaatggtatgacgactggaaaaaaacagatgaatggatgaaagaagatccagaacaaaaagaccctgaaaaagttgaatttgatgaagatgtatcggcaggtactgtaactcttacgggttcggatgcttgtccaaaagactctgttcaattcactttaatgggtcagacttatactcttgaattaccttatcaacctgtttgtgatgctcttactttctttaagcctgctgtgttggctgttggtgctattacttcagcttttatcgttgcgggtattaatgttaagggggaggattaa

SEQ ID NO: 66112 - DNA, 1740 bp, Acinetobacter baumannii; identical to SEQ ID NO: 50300

SEQ ID NO: 66113 - DNA, 1176 bp, Acinetobacter baumannii
atgacaattcaaactgttaatcttggttcagcaccgactggcgcaggtggcgatacattccgttcaactggcgcaaaaataaatgaaaactttacgaataacgcccatgcagctagtcgatatgttgggactgctgctggtaatgtgatggaagttggtgcttttgggttggggggtacaattctcgcaggagcctcccctttaagcagcctaagggggcagagtaatagaattttatggcaagtaacagcagcaaatatgtctaatgctggagactatcctagcagtacgcctcaatcaatactaaacctttcggctggcggttcgaatgatcaccatattcagctttctttgggagctgacgctcaaatgtaccttcgagcggtgcagtggggaagtgacatttacacgccctgggcaagtttcagaaccagtagaaatacagcaatcgattcaaacggctttattaaagctgcttcaccgatcgtaaaactatttgcagataaaattgaacctaacgatgaagctgctgagcagactattacttttgagaaagtagatgttggtcattatcttgttaaaggctcatctggttttgctaaagaaggatggtggattgaaattccgactgacacacatggcaacaagatttgcgctgttgaatatcaaactttagagaatggtgatcttgaaattaaaactttcaagaaaaagctaaatgaagatggtgacattgttgctaatcttgatgcaccaatcgatattccaaacaatgcaaacggtgagccgcgctggattgatattcgtttaaacagtatcaagaagacaatcgttagaaaagtgccgcgcactgaaaagcagccacgaatggttcagcaaatcaaatattcaatgcagccaacctttatgacccgtttaactgaactcattgatgatgaaggtagagttgtaatggtggacggaaaaccattccagaaaaaagaaacttatcttgttactgattctgctggaatggcaacactcacaaaacagcctgtaattaatgaaaatggtgaaccagtattcgaatgggtgcaagcagttgatagcgaaggtaatcccgtttttgacgatgttcaagttgtggacaaagatggaaatccaatctatgacgaggtgacttatgaccctgaatag

SEQ ID NO: 66114 - DNA, 795 bp, Acinetobacter baumannii
atgaccctgaatagtgatttccagaaactatatgtagatggattaatccatttgtatgaactagatgccagcagcttaggtgctggcatcttgcgttttcacgggcatatttcttttcaagactgggagaaaatctactcttcaattggtaccgaaggtttaattggtgccgactctggcagcattggaaagatttttgataccggtgatcaaaaagtttggaaccgaaatattatctggcaaggtcaagtttttgaaccaatggcactcgaagtaagtggccttgaaatgagttcaactggtaaagcttcagcgccaactttaacaatggcaaacaacattaacggcattcaacatgctgtttctgcttattgtctgcaatttaaagattttgcaggtgcaaagctgaaagttattactactttggctaaatatctagatgctgaaaacttcacttctggtaacccaacggcatcgaacgagtctaaagaacaaacttggtttatagagcaaaagacatcggaaaatgcccagcaggttacttttgagctttcaaacccgattgattttgaaggtttgaaaattccagtccgccaaattacttcttattgtagttgggaatatcgcggggaagagtgtggttacaccggagctgcaatgtttactgagaaagatgagccaaccgacaaccctgctttagatcgttgctcgtacagattgtctggttgtgaatgtcgatttagtaaaaacaagcctttaccttttggcgggtttccagcttcaagcatgttgtga

SEQ ID NO: 66115 - DNA, 597 bp, Acinetobacter baumannii
atgaatactaaatcttttaacccgcaaagatttgaggataaacaaagtgcatcagataccaaaaaagatagtaaaacgaatggtaaaacggctaatcagaagactgacgaacagaatcttttattagatcagcagtgttctaaacagtatggtttaaccattgagcaatgtgcagatttacgcgatcctacaaaaagaaatgctgaattattggcaaaagaaaagaatgatatgcaaagtattgtgcttcaatacaaccccaacaagccttatgatattgatgctagtcaagtcagttatgagattacgtcaaagcctgtgtttagtggttgtatgaagcagaatggacgttatgtagcatatacccagcaaggtacaattttgcatgatgtgtctcaatcagattgcagacgactcttaaaacatgcaggtgatcgaccttttaattattttgctcaaccacgtaatgaacctatgaatacagaagctttgagaaaggattctgttgagcaggtaccacaacgtcagcaaccgattcaatatgctgaaaactacatacaaagaggtcttgaacgtgacccaaattgggatttataa

SEQ ID NO: 66116 - DNA, 243 bp, Acinetobacter baumannii
atgacaaaacaagtttttgaatatttagaagaaaaagcaagccaagtgatagatacttctttattgcctttggattgtttaaaaaatctaaatgagttgtctggtgcaattgatgttttagtgaaatgtggttacttgaccgataaagaaagtattaataaagcgtttgatattttagagcaagtcaccacctttgcggataattctttacctaatggactggtagaatatgacaaaacatga

SEQ ID NO: 66117 - DNA, 399 bp, Acinetobacter baumannii
gtggatatccgccaagtttcacttgcatttgaacagtctggccgtattcagaaacttttagttcaagagggcgataaagttcaagcaggtcaagtactggcgactcttaataccaatgcattacaaattcaggcaaagcaagctcaagcacaacttaaagctcaacaagaggcaattattaaacaagaggttggagctcgccctgaagaaatcacccaagcaaaagctcaacttgcgtctgcccaagctgagcttgataaaaccaataaaaacttgcaacgcttacaaattttggtaagtagtaccgatggtcgagcaattagccaacaagaactcgactatgccaaaagtaatcaacatagtgctggggcagcggtccgtgaaagacaagccaattaa

SEQ ID NO: 66118 - DNA, 957 bp, Acinetobacter baumannii
gtgtataaatgtaataatccagaatgtggtatcgcagatggtataagctgtgaaaaaggtcatcttcatatgactgattgtgaagattttattaaacctgaggaaaccgatgaacaattagtcgaggatacatctaaatctgcatataaagttttttggagtggaacacatctaggttttaaaggtctacaaaaattatccgatgttcggaaacctttaattattggtatcgtaggtccagcagaagcaggtaaatctacaattctactctcactatatttacagattttaagtggtaaaaaattaaaatttggagatttttgggcaagttatactcttgaatcatgggaggccctagcaaaaaactctagattcgcctctcccttatcctcaccagactttcctcctcgaacaccaaggggagatgcgagaacaccaggttttttacatctatcttttagagatgaaaacgatggaattcgagatgttatatttatagatgctccaggggaatggttcaatcaatgggcaactaatcctaatttagctcaaggtgcaaattgggtaataactcattctgacttactcattataacttctgattcagaaaaactttcacacaaagatgctaaaatccgtggaagcaccagaaatgatatctcaagtatttttgatcgattaaaagactatcgttatgcaaaacatattgctttagtttggactaaagcggaagaaaacaataatatcccgaaaactattcgtgatttaattactcgtaatcttaattcaatcaacttctgctcaacgtctaatcattcttgttcaataacacaaccagatgaaatgtttactataattaatgaattaatttcaaatatttcagtagaacataaagaaatcactgatcatattattggtaattctatatttgagtcttttagaggaaaccatggataa

SEQ ID NO: 66119 - DNA, 204 bp, Acinetobacter baumannii
atgctccctaaaacaacattttacagacagatttcagaattatgtgaatgcggtttttctaaagcgtatttacagaacttgcatgacaacaagtcatcaaatgtcattcctttcatgaagctcgtagaaatcgacttttcacaacaattgccagactggtatgaaccgccagtttcgcaatttaactatttaaaacttgcatag

SEQ ID NO: 66120 - DNA, 1005 bp, Acinetobacter baumannii
atgaaaaaaagattggggatagtaagtgcagtcatttgctgtgctatggggacaacacacgcggggcaaaacgtatgtgtattcgatttattgggtaaatcaggtgaatcctacaaaatgatggaagaatgggctcttgcggcaaaaagttggcaagcggacattacattaattccatttcaagatgaagctctagtagatcgtaggctgcgtgagggtaaatgcgatgcagcttatatgacttcaatgcgagcacgaaactacaataaatttgcaggctcgattgatgcgattgggggcgtgacaagtaatgctattgctcaaaaggcaattagttacgttttagatcaacgtaataaacatcgcatgctaaccacacaaaatagaacaaactatgaggtggttggaattgtccagattggactagcatacttatttgtaagagatagaaacctcaactcaattgagaaagtacgtgggactaagtttgctattttgcaatatgacgcagcccagaaaattatggttgaaagtgtaggtgcccagcctattccttctgagattaccgattttgtgaaaaagtttaatagtggccaagtcgaggcaattgctgcacctgcttatgcttataaaccgttagaaattggtaagggaattggagcaaatggagccatgtttacttttcctgtggtgaacgtcacaggggatttaattgcaagaagtgataagtttccggccaattttggaatgaagtctcgtgaatggtttattaaacagttgccacagaacttcgcaatggtaaaacggttagaaaccggtattcctcctaaaattaaattaaatttttcagccgaagataagttgaaatatcagaaaatattacgtgaaggtcgccttggcttaacaaaacaaggtgtatatgacgcgacaatgatgagtgtactcaagcgcgcacgatgcaccattgaacggacaaattttgaatgtacgcttacaggagagtag

SEQ ID NO: 66121 - DNA, 783 bp, Acinetobacter baumannii
atgacatatactcaggaagaaaaacgtagcaggatacgtgggattgtaggcgcagcctctggtaatttagtcgaatggtttgatttttatatttatgcagtatttgctgcttactttactcaagctttaaccgcgccagatatggatagcacaaccaagtctatttatgtttggggggtgtttgccgcaagcttctttatgcgtccgattggaagctggctatttggtcgtattgcagatcgacatggccgaaagaagtcgatggtcatatcaatctgtttgatggctttaagctcctttttatttgcagctttgcctacttatgatcaagtcggtttatttgccccttttctgttactccttgttcgtttacttcaaggcttatcagtgggtggtgaatatggcgccgttgccacttatatgagtgaattaggcttaaaaggtcagcgtggtttttactcatctttccaatatgtcaccctctctggtggtcaattgcttgcaagcttactgggcgttattttgttgacgttcttaagtgaacaacaattacatgatggcggctggcgtattccgtttgttattggtggtatcgcagcaatcttatctttgcttgcacgtagtcgtttagaagaaacgctttctcatcaagacagcgaacgaaaagagtctggcagcttaagagaactctttaaaaagcactggaaaacctttttattggtggttggatacacttctgccggttcattaagggactgttctaaattttgtgtaagtacttaa

SEQ ID NO: 66122 - DNA, 318 bp, Acinetobacter baumannii
atgacaaaattaaaatatacccctgaaatcagagaaagagcggttcaattattgattgaatctgaaaaagattatccatcgaattgggctgcaatcacagctattgctcctaaaatcggttgtactcctgaaacattgcgtgtttggtatttaaagcatctggatcaactaaatcctgccaaagtacaacagatatctgaccaagaaaaaatgaagcaaatggaacgtgaaattaaagaattaaaacgtgccaatgaaattctacgcaaagcagccgcttttttcgcccaggcggagctcgaccgcccacacaaataa

SEQ ID NO: 66123 - DNA, 318 bp, Acinetobacter baumannii
atgacaaaattaaaatatacccctgaaatcagagaaagagcggttcaattattgattgaatctgaaaaagattatccttctacttgggctgcaatcacagcaattgcgcctaagatcggttgtactcctgaaacattgcgtgtttggtatttaaagcatctggatcaactaaatcctgccaaagtacaacagatatctgaccaagaaaaaatgaagcaaatggaacgtgaaattaaagaattaaaacgtgccaatgaaattctacgcaaagcagccgcttttttcgcccaggcggagctcgaccgcccacacaaataa

SEQ ID NO: 66124 - DNA, 123 bp, Acinetobacter baumannii
atgcaaaacttagttttcccatcaggattgtctgttcagagagcaaaaaaacgtgccaaagaacttgtcaaaagtgaacaagctgtatatcacactcaaaatctgccacccatttcactttaa

SEQ ID NO: 66125 - DNA, 336 bp, Acinetobacter baumannii
atgttgccatcaatagtaaatagtttagatacagaatggccaacattagcatatgtaacaatgttttttcctgtagctggtttgttttcatctttaggtttagtaataggaagtcaaaactataattcaggggctttttttgcttatacattaaatagctctttatttgacaatggttttggtttggggtggtctgtttttttagatttgtatattttaagtgggcgcaactatttattattaagttttttttcttttatatttgggttgattttctgttatttaatagaaaaatccaagaaaaatttaatttttttgtatattttatccgaatag

SEQ ID NO: 66126 - DNA, 276 bp, Acinetobacter baumannii; identical to SEQ ID NO: 50336

SEQ ID NO: 66127 - DNA, 642 bp, Acinetobacter baumannii
gtgggctcggagatgtgtataagagacagttctaaaatctataacagtagttttttcgatagtgttagtttaccaagtgcgccaaatgatgctggaatatcaattggttgtgcattttggggtgcagttaaacttaaagatcaagttaacaaagttacaacggataggcttggcatcaaatatgaactagatatagatattttaaataaagagcataaaaatttcatttcattcaaaaaaacgaatacccatgaagtagcaaaattaatattcgatgggaaaatatttgctcgttgttcaggtcgctcagagtttggcccaagagcacttggtggacgaagtatattggcctctccactattggatagtacaaaaaacaaattaaacaaaataaagaagagacagtcatggagaccagttgcacctattattctaaaagaagaaataggaaatatctttcacggtcccttaaatagctcttggatgacgttctcatataatatatctgatagtaatctaagaaaaatgccagctttagaacatccagataatacgacaagatgccaaacgctagattatgaagatgatccttggtctgtctcttatacacatctgacgctgccgacgaagaggatagtgtag

SEQ ID NO: 66128 - DNA, 237 bp, Acinetobacter baumannii
atgacaattatcacattgcttgatgttgagacgaagaagaaggtgatagttcggtccgtaatagacccaatagcaagaatagacaaaaaagggaatatacaaattattcaaattcataaatggctatatgatgaatctggagatttcgttgatgaagacttatatgaggcactcaacaatggagaagttggaatatacataactttgcagggctttgttgcacaaacctatctctaa

SEQ ID NO: 66129 - DNA, 432 bp, Acinetobacter baumannii
atgtggcaaaaacttaaacgtagtttatttctacaagtcctctgcgctctctttctcggtattgcagtaggacttgcttttcatgatttctccctagctttaaaacctcttggtgatggttttatttccctcattaaaatgttgattgctccaattgtattctgtgtagtggtactgggaatctatggtgcaaacgacattaaaaaaatgggcaaagtcggtgcaaaaacgattctttattttgaagtggtcacgagtattgctttaattttgggaattattgttgcttatgtctttaaaccgggcgtcggtatgaatatcgatattactcatttagatgctaaagatttaagtacctataccgaacgtgctcatgacatgcataggctttgttgcacaaacctatctctaaaggcttattccacaatataa

SEQ ID NO: 66130 - DNA, 222 bp, Acinetobacter baumannii; identical to SEQ ID NO: 56679

SEQ ID NO: 66131 - DNA, 342 bp, Acinetobacter baumannii; identical to SEQ ID NO: 42366

SEQ ID NO: 66132 - DNA, 414 bp, Acinetobacter baumannii
atgagtatcaagaaattagttaatcaaaaaaaattagacgattacgtcatctttttaggagagattaaaaaaccaagctcatattattcagtcttcgatgttttagttttaagtagtgataccgagggtttgccgactgtaatattagaagcaatagcctctaaatgccccgtgatatcaacagattgtggtggagtgaaggagatttttcctgttccttatgattatttagtcccctgtaaggatacaaataaactgagtgaaagaattaataatttacttaacttagacctgattagtataaacaaaatcgttgaattaaattatgacaatttatgtgagaagtttctattagatgacactgcaatgcactggctaaagttatataaagaggttgtaaatgcaccaaaatag

SEQ ID NO: 66133 - DNA, 330 bp, Acinetobacter baumannii
gtgaaaaagtacattatgacttttctgcttgctttattgattgctgtagttttctacataagtgcaaatttaattgattttaatctaattgaatatgcaacgggtttcgtctttggattgtcattcaccctcatttttaaaaaacaatctaagagttctaaagctgcagagctactaaacaaacatgtaaaagaatgggcagttcgtgaaagtaggcgggcaggtttattcgctccagatcaagatacgaatgatctagaaagttgcaaaaaacgttttaaagatagtccggttagtatgaaagttgagtggtcaaaaaaagatgagtaa

SEQ ID NO: 66134 - DNA, 225 bp, Acinetobacter baumannii
atgaatgcacttactgctgctcaccgtagcttaccgcttaactgttatatccgtgtcaccaacaaagacaatggcaaaagcgtagtggtaaaagtaaacgatcgtggtcctttccatggtaatcgtgtgcttgatttatcatacggtgcagctaaacgccttggtattaccaatgctggtactgctaaagtaagtattgagcgtgtagacggtcctacttcataa

SEQ ID NO: 66135 - DNA, 534 bp, Acinetobacter baumannii
atgcttaaaaagaatgttttattagttttaggtgcaggtgggcatggtaaatctgttgcagaagctgctctcttgtcgggcaaatggaaaaaagtggtatttgctgatgacagttggccacaaaaaacagatatagcgggctttccgattgtcacgaatataaatagtatcccagatatactatcagatatttctgctgcaattcctgctgtaggaaataaccaactcagacaaaaatggttccaactattagaaaatttatcgatacctattgctaaagttgttcatccatctgccatcataagccctaatgctgaaattggtgatggagtaactattatggctggttgtgtagtgggatttgatgtgaaagtaggagatggagcaattataaacatggctgcgtcaatcgatcatgatactcatattggtgtatttgctcatcttagtgtaggtgttaaagttgtagggaataagaaaatagaccccttatcatttctaccagctggtagtgtggttactcattcaatgtag

SEQ ID NO: 66136 - DNA, 189 bp, Acinetobacter baumannii
gtgacgagtgtaactcgttttaatgaaggggttgattttcaatatatttctattcctacgactatttcacaagcacctttatctggaattgaagataaatctgtaagtactggtgggggcggcagtataggaggaggatttttattaagtttattttccttaattgcattgcgccgtttaaagtcataa

SEQ ID NO: 66137 - DNA, 270 bp, Acinetobacter baumannii; identical to SEQ ID NO: 28148

SEQ ID NO: 66138 - DNA, 282 bp, Acinetobacter baumannii; identical to SEQ ID NO: 28147

SEQ ID NO: 66139 - DNA, 225 bp, Acinetobacter baumannii
atgcgaatttttggttatgcgcgggtctcaaccagccagcagtccctcgatattcagatcagagcgctcaaagatgcaggggtaaaagctaaccgcatctttaccgacaaggcatccggcagttcaacagatcgggaagggctggatttgctgaggatgaaggtggaggaaggggcactgttgcaaatagtcggtggtgataaacttatcatccccttttgctga

SEQ ID NO: 66140 - DNA, 534 bp, Acinetobacter baumannii; identical to SEQ ID NO: 50934

SEQ ID NO: 66141 - DNA, 381 bp, Acinetobacter baumannii
ttggctcactctgcaacaggtattgatattcatccaggtgcacaaatcggtaaaggatttttcattgatcatggtacgggtgtggtgattggtgagacttgtgtgattggggaacgcgttcgtatttatcaggccgtgacccttggagcaaaacgctttgaaaccaatgatgatggtggtttgaaaaaagactatatacgccatccgattgttgaagatgatgtcgtgatctatgcaggtgccactattttaggccgtattaccattggccgagggtcaattattggggggaatgtttggctaacccatagtgttgctgcaggtagccagattttacagtcaccgaatgagtcttatcaaaaaaatcatattgctggttaa

SEQ ID NO: 66142 - DNA, 2031 bp, Acinetobacter baumannii
atgacaagttacgccaatttattaaaaccattacatttgggcttcacaaccattaaaaaccgtgtggtcatgggatctatgcatacggggcttgaagaccgcttttttaactacccaaaactggcagcttattttgaagagcgtgccaaaggtggagttggtttgattgtgactggcggtatttctccgaaccgtcaaggatggttggctccggctggcggaaccatgaatagtttatttgatattccgcagcaccgtttggtgactcatgccgtccataaacatggttcaaaaattttgatgcaaattttgcatgcaggacgctatggttaccagccatttgtagtgtcttcgagtgcaataaaatcaccaatttcaccatttaaaccacgtcaactttctgaaaaaaatattctcagtaccattgaagattatgcacagtgtgccgacattgccaaaaaggcaggctacgacggcgttgaaattatggggtcggaaggatatctgattaaccagtttttaagtcgccatgtaaaccagcgtacagaccgttggggtggtgaaattgaaaaccgtatgcgtttcccggttgaaattgtcaaagcgatccgcgcaaaagttggcgaaaaatttattatctgtttccgtttatcgctgcttgaccttgtgcatgacggtaacaccatgcaagaagtggttacggttgcgaaagctttagaaaaagcgggtgtcactttattaaatacgggtattggctggcatgaagcacgtgtgccgactattgtcacctcggtccctcgtgcagcgtttgtcgattatacggctcatgtaaaacaacatatttcaattccggtaattgcgtctaaccgtattaatatgcctgaaactgctgaagagattttggcaactggcaaagcagatatgattcaaatggctcgccctttattggcggatgctttttgggtaaataaaactgcgaccaatcgtgtagatgaaattaatacgtgtattgcctgtaaccaagcatgtttagatcatgcatttaaaaataagcgtgtatcttgtttagtaaacccacgtgcaggccatgaaactgaattggtttatttaaaaaccaaacaaccaaagcgtatcgccgttgtaggtggtggtgtagccggtatgtctgctgcaactgttgctgcaagtcgtggtcatgcagtgaccctgtttgaagccaatgcagatgtaggtggtcaatttaactttgcaaaggttgtgccgggtaaagaagaatttcacgaaacgattcgctactttaaagtacaacttcaaaaaactggggtagatgttcgtttaaatactcgtgttaatcgtgaacaacttgaacgtgaaggttttgatgaggtgattgtggcgactggagtcgtgccgcgtgcattaaagattgaaggaagtaattcacctcaagttctttcttatgctcaagttttacagggcgctgaagttggacgaaaagttgcagtgattggggcaggtggtattggtttcgatgtctcagaatttttacttaaaccaccacatcaaccacagcctcaacctttagccgagtggcaacgtgagtggggtgtagacccagatccaaattatgtttcggaaggtggtatgcaaccaccagtagttgagccagcaataagagaaatttatttactgcaacgtaaaacaaccccactcggtattggtcttggcaagacttcggggtgggtacatcgtgctcagcttaaaaagcacggtgtacgcatgcttcgtggcgtgcaatataaagcagttaccgatgaagggctttggattgagcataatggtcaggaccagcttttacgtgtagataccgttgtagtgtgtgcggggcaagagtcggtaaaagacttgatgccaaaagaaggggagtcgactatagcgaactaccatattattggtggtgcaaagctcgcagcagagctagatgcgaagcgtgcgattaaagaaggagcagaattggctgcccaactgtaa

SEQ ID NO: 66143 - DNA, 717 bp, Acinetobacter baumannii; identical to SEQ ID NO: 59066

SEQ ID NO: 66144 - DNA, 717 bp, Acinetobacter baumannii; identical to SEQ ID NO: 59066

SEQ ID NO: 66145 - DNA, 1293 bp, Acinetobacter baumannii; identical to SEQ ID NO: 49215

SEQ ID NO: 66146 - DNA, 204 bp, Acinetobacter baumannii
atggcagtaacagtacgtttaaatgacaaagagcaagaatctcttagaaagaagtgcgtagaactcaataaaattctgatcaataaaaatctacagccgattaaggatagtgagctagtgcatataatccttgatcaagctatcgataacgttgaaatatcagcaaacggaaaagttgttgttaggaactctaaagacctctaa

SEQ ID NO: 66147 - DNA, 729 bp, Acinetobacter baumannii
atgaaacgcttttttgagggtcgtaaagctgaagctcttatggctcgattaggtaaacgctttcatatcacaaactatgaagtgacttttggtaaaaacggttggcatcctcatcatcatattttggttttttcagacaaagaattatcaatttcagaattttcagctcttagaaatgaattagcagaacattggattaattgctgtcgcctttcaaaattaccacttcctaacatgcaacatggtttagaccttgcagatggcacttatgccgatcagtacattgggaaatggggcgttgagcatgaaatgactaagggccatatcaaaaaaggtaaagagggtggtttaactccctttgatcttctccagttgtcttttgaagatgaattagtttttggacgtaaaccaagtcaattatttaaagaatatgcagccgcttttaaaggtgctcgtcaattgatgtggtctagaggtttaaaagacgtttttgggcttcgtgatgtgtctgacgatgaaatcatggacaaggtcacagaggatgcaattaagctcaatgaagttgaggatctagtctttagattattggttaaatataaaaaatatgtggaattccttattgcagttgaggaagaacaaaaaggcgtagctggtgctgtagatcagctcgtcgatgaacttgtaaggcaagaaatagaactaatcgaaaataggttaaaagcgagttaa

SEQ ID NO: 66148 - DNA, 408 bp, Acinetobacter baumannii
atgaaagatatgaacgattttattgaagtgaacaaagatattttcgatattgaagaacacagaataaaaatgaatgttcccccacaagctgaattttatgggtttactcttgtgaatcctaaaaacaatcagtttgtgtctaagttaattgttggtcaagaatgtactgctatttttatgacacctaaacaaatgaaaaaatcatttattcaggatgtctttttatgcccaattttagaacttactcttaatttgtctttattccctgaacaaattttattgcctttagctgtttatgcttatcaagatgatgaagatacaagatttatctttgcaggatttgatgacgatgaattaaagaaaatgattgtaggcacaagtccaagaaatagatcaatgtattcatga

SEQ ID NO: 66149 - DNA, 999 bp, Acinetobacter baumannii
atgacactgcggctgcatgagtacgtggagaaggaatccttcaaccacccctacacctttgtggcggcacagaccggcctggacgagaagacggtgcgcgacatcttcaacgcccgcgccgagttcctggggcgctggcaccgcttcgagacgccccgcatcctgggcattgacgagctatacctgaacaagcgctaccgctgcattctgaccaacattgaggagcgaaccctgctcgacctgctggccacccgccgacaggacgtggtgaccaactacctgatgaagctgaaagaccggcagaaggtcgagatcgtcagcatggacatgtggaacccctaccgggcagcggtcaaggctgtgctgccccaggcccgtatcgtggtcgataagttccatgtggtgcgcatggccaacgatgccctagagagagtgcgcaaggacctcagaaaggagctgaaaccgtcccagagccggactctcaagggagaccggaaaatcctgctgaaacgcgctcacgaagtctcagaccgggagcgcctcatcatggagacctggacaggcgcgttcccgcaactgctggccgcctacgagcacaaggagcgcttctacggcatctgggacgccaccacacggctccaggcagaagccgccctggacgagtggatagccaccatcccgaagggccaaaaggaagtctggagcgatctggtcagggcagtgggaaactggcgcgaagagaccatgacctacttcgagacggacatgcccgtcaccaacgcttacacagagtccatcaaccgactggccaaggacaagaaccgtgaagggcgcggttactccttcgaggtgatgcgggcacgaatgctctacaccacgaagcacaagaagaaggcaccgactgcgaaggtctctcctttctacaagaaaaccatcggttacggactgccggacttcgcagaggaactcaactacggagtcgatctatcaaccatctga

SEQ ID NO: 66150 - DNA, 399 bp, Acinetobacter baumannii
atgaaaaatcgcgagcaagcaattgcatttttcaatttgtttactgatctggagtgcgaaaaggtagcaattgagaatccaattggatgcatgagcaaaatctatcaaaagccttcacaagtaattcatccctacatgtttggtgatcctgagcgtaaagctacatgcttatggttaaagggattaccagctttacaagcaaccaatgtggttgagccaaatattgtgaagtacaaaaacggcaaagggacggatagtccttggcatttagacacgttaaagctgccagcagaagaacgcagaaaagcgagaagcttaacttttcaaggcattgcagatgctatggcaatgcaatggggtggagacgtgcgtcatttaggtttgagggaagcggtatga

SEQ ID NO: 66151 - DNA, 657 bp, Acinetobacter baumannii; identical to SEQ ID NO: 53041

SEQ ID NO: 66152 - DNA, 477 bp, Acinetobacter baumannii
atgcatgtaaacctgtggggtgttattcatggttgtcatgcatttgtgccaaagttcaaaaaactaggttacggtgcaatcattaatgtggcttctgccgcgtcgtataccgcagcaccagaaatgagtgtctacaatgtaacgaaagcgggtgttttagcattatccgaaaccctttcagccgagcttcgcaaattcaatattaaagtcaatgtactttgcccgactttggtgccaaccaatatcattaaaaatggtcgtattccggggcgttattccaagcttgcagaccatgcactcatgaactatgccatgacgaccagcgatgcagttgcaactttaacattgaatcgattagatcgtgggcagctctacaccacgccacagatcgacgccaaattattctggcttatgaaaaggacatctccaacgctatatgcaaagttccttgggctttcgtatcagttatttaaataa

SEQ ID NO: 66153 - DNA, 519 bp, Acinetobacter baumannii
atggcgggtattgaacattttacggcgggacttgccgaatacatgatgaagcatgaaaagaatttctattataccgacgatgccaaaagtcgtgccttatggatgtggcatatgcttgaagaatctgagcataaagatattgcctatgatgtatatcaattactcaatggtagctacccactacgagcttctggcttcttcttagcattcttcactattttaggtctaattcctgcgactaccttgtttattccggttttaagaaaaccgcaggaaatgttgactagaaaattctggaaagacgcgcgccgtggtgtaggacttatttttggtccaaaagatggtgtatttggtagcaccattggccagattttcgattatttacgtcctgacttccacccaaatgaccatgacacgaccgaatatctggagtactacaaagacaaattactcaaagaaggcggcgcgattgcaccttactttgtgaaggaatttaccccacctgtacgcttgtcttaa

SEQ ID NO: 66154 - DNA, 480 bp, Acinetobacter baumannii
atgatgaaacacgaaaagaatttctactattcagatgatgccaaaagtcgtgccttatggatgtggcatatgcttgaagaatctgagcataaagatattgcttatgacgtctatcaggttttaaacggtaattatccgttacgggcaacgggctttttaatggctttcattaccattttagggcttattccaacagcaactttatttgtacctctactgcgtaagccaaaagaactgttgaccagaaaattctggaaagatgcacgtcgtggcgtcaacttaatttttagtccaaaagatggcgtatttggtagcaccattggtcagatttttgattacttacgtccagacttccatccaaatgatcatgacacgaccgaatatctggagtactacaaaaagaaattacttaacgagggcggtgcaattgcgccttactttgtgaaggaatttacaccaccagttcgcgcagtttcataa

SEQ ID NO: 66155 - DNA, 432 bp, Acinetobacter baumannii; identical to SEQ ID NO: 59035

SEQ ID NO: 66156 - DNA, 300 bp, Acinetobacter baumannii
atgatccagaatatccatgataataaagcaggtgcagcattagatcgtaaaacatcttctgctaatcctattgtgaaactagaagcgacagatacatttgcacctatcgttaccgtaggagcaacttatgattttaatccgaacttgtttgctgtaggctcagtttcttattcgaaaatgaatagcgaagcaaaaatttacgtgactgatcaaaatacaggtaaagaattaattcaggcaaatagcaaaattgatattgacccgcttattacttatttaggtgtgggttaccgattctaa

SEQ ID NO: 66157 - DNA, 399 bp, Acinetobacter baumannii; identical to SEQ ID NO: 66150

SEQ ID NO: 66158 - DNA, 354 bp, Acinetobacter baumannii
atgactgcctataacgtaacgaaagctggtgttcgtgcgttgtctgaaacactttcggctgagcttcgtaaattcaacattaaagtcaatgtgctctgcccgaccttggtgccaaccaatatcattaaaaatggtcgtattccgggccgttattccaagcttgcagaccatgcactcatgaactatgccatgacgaccagcgatgcagttgcaactttaacattgaatcgattagatcgtgggcagctctacaccacgccacagatcgacgccaaattattctggcttatgaaaaggacatctccaacgctatatgcaaagttccttgggctttcgtatcagttatttaaataa

SEQ ID NO: 66159 - DNA, 366 bp, Acinetobacter baumannii
atgaaaaagattggtttactcatgatgtgtaatttgttgattctgagtgcttgtacaccaaatacaaatccacccacacctcaagcgaacagtccgatacaagctgttttactcgatcaacctaatcttttaaataatgccagtaatttaagtatttcacagcaaatgaatgctttagaagatccttctaatgctcaagttactattttgcagacagagccgagtgaggatgctgtttcgaaaacacgtactgagtatttattaaaaaaagatcagactgtttggaaaatcgtgaataaaaaacaaagttatcaatgtacaaaaggcgaggaagcagcagactttcaagttaatccttgtccttaa

SEQ ID NO: 66160 - DNA, 381 bp, Acinetobacter baumannii
ttgaaccctaatgtacaaaaacctgtaaatgaattgctatcaggtataaataatatctttttaattcaaccccaagattatttgccatttgtatatttaatgaatcgtagttatctcatcttaactgattctggtggtattcaagaagaggctccttctcttggaaagcctgttttggtcatgcgtgatactactgagcgaccagaagctgttgaggcaggcactgtacgtttagttggtactgatgtgagcacaattgaaaaatcagtatcagagttattggaaaatacctcactatataatgctatggctgctgcacataatccttacggcgacggcacttcttgtcagcaaattattgctttcttaagaagaagttaa

SEQ ID NO: 66161 - DNA, 171 bp, Acinetobacter baumannii
atgctagaagaatatgtccctgtacttgagcaggctattaatgctttggagcagattcaggcaaataaagaaaatgcttcaaatattgcaaagcagtttgctagtgagatgctattagatggtaaccaaaagctaggacaaatagcttctgaggttaagaaccttaaataa

SEQ ID NO: 66162 - DNA, 324 bp, Acinetobacter baumannii
atgaataattcacaacatccaattatgacagttacaggcatccgtaaggctgctggagactttacagacgataaaggtaaaacaatcgagttttcaaacacggttgtaactgtgctgcaagaatattcagatcgtgagaaagaacaaggcgcaatcggttttaaatcgactgactacaagattaaaggcgctcagttctttaatgattacatgcatcaggaattaccgagcaaagctaaattgatctttgattgggatttcacaggtagagcgcctaaagctgtattggtagctttggactttgatggtgtggaagcagcttaa

SEQ ID NO: 66163 - DNA, 246 bp, Acinetobacter baumannii
atgaataattcacaacatccaattatgacagttacaggcatccgtaaggctgctggagactttacagacgataaaggtaaaacaatcgagttttcaaacacggttgtaactgtgctgcaagaatattcagatcgtgagaaagaacaaggcgcaatcggttttaaatcgactgactacaagattaaaggcgctctacctgtgaaatcccaatcaaagatcaatttagctttgctcggtaattcctga

SEQ ID NO: 66164 - DNA, 2487 bp, Acinetobacter baumannii
atggcaattcttactcctgaaaagtttgaaaacttgaatcgggatattgaggatacggggaaagcaattaatatcattgggattattacccctcgatatggtgaacctttcaaatctttgccgcttgtaagtaaagaagctgagaatcgaggtggatatatttcagcccctacattaacggcattgcaagcaattgttcctagttacaactatcaacttgcacgtgatgatagtaccggtaatgaatatcgctggaaccctgctgcaactcccacacctcaatgggaaccaacaggacgtaattatttaaaagatgcggtagattattcaaatcaatttagtgcattaacgaaaaatgcaacggtgttttatcctttttcgagcaccaagcgaaataatgtgaatgctagtagtgtttccgcatcacatgaagcttacttgaaaccgtatattttaaatattacggtgaatggtgctgatccaaataaatattatcgtattcagcagattagcactcccacaaatccgacggtgcctaatcgttgggtttttgaagttctaaatcgaacaaattttgattcctcagaaactgtagaaaaaactattccagttgttttcccaattgtgaaaaatatggggattcaaactttcaatgttgttgatggtgatgtcactatcattgtgacggtcgatacaagtaaagttccgactagtaatttttattctgttgcttcgactgatagttcatatacatacattattgatccgagtcgttatattttttcagcatttaaaaaatctgatgcggtcagttatgttgattcgtttagtacactgacaaagaactcaactgttttattcccgtttagtacattaaaacggaataacgtgaatgaaagcactgtaggttcacacgacaatattttacgtaacttcatccttgatgttcgagtgatgaatgctgatcccaataaatattatcgcttgcaacagatgagtagccccgatcaagcgacgaacccgaaccgctggatatttgaagaacttagccgctctaattttgatacaacagagacaaaaggtaaggcgattacagcagttttaccaattgtgaaaaatacggggattaagagcttttttgtaaaagatggtgatctcggtatttcagttacagtagatactaataaaacgccttctaatagcttttattcagttgcatcaacagataactcatacacatatatttttgatccaagtgtgtattcttatgctgccgtaactagctcagacattaatgcggtgaatgcacgtatcaatgcatttagtaagccgatgcagcttaaaaacttacttaatggtttacgtaatccaatccaagatgtgaatatcatatttgcacctgccgactctattacttatggagtgggtgcaacagataatggagcaggtcccaatcctccccatggacctgcaacaacagaaacttatgtgaacatttttcggaattatctaggcacagctttttgcaccagtgaacgttttgatgacactatcttggaaacaggtgaagcgtattttacaagcgaaggtacgagtgttttaagtgctgagcttgcgaactacacatttaagaatagtcttacaggtaaagtatttacactaactgaaatgcaggccttaattggtgtaaatccaagttcaccaacgggtactttccttgatattaaaagtccttcagtcgctggagcagtgacagatatggaatttaactttaatggaaatgcattcacaatcaattacgcaagactcggaaacggaagtgctactgaatcaaatattgatgtttttgtagatgatgttctgcactctagttttaatgtgtatacgacatcaccagcgtttgatggatctacaacaatcagtggattgccagatggttctaagaagattcgcattgccaatcgacttagtaattcaacaatctatgcgcgattggtttcaatcacagcgacacgtaaagtttcggtaatcaatgaagggatttcaggcacaaactctaagcaatggcttgataataactggattccagacaaaattagcaccaaagctaattatgttttcatgatgattggtactaacgatcggcacactacgcagaagatagggacatttaaaaatcaatatcttcagttgattgaccgtattactgcaaagaatccaaaagcacaaatcattatcatgtcaccgcctgccgtgactcaaaatgaagatcctaatacgacggtatataaatttaggattgcagatctgaattatgcattaagtcagatcgcagaacttcgcggactctcttttattagtctttttgaggcaacatcaaagctcaaagctaaaggtgaaaactatttgtttgatcaaatacatccaaatgattatggctatggagtgattgctgaatacatcattaatcaaattttgagtgcttaa

SEQ ID NO: 66165 - DNA, 2925 bp, Acinetobacter baumannii
atgtttattaaaagtattttatcttcgattactagtattatcccacttcctgaaaatagtaacacaagcagtaatttaggtaacggctctggtgacggcctacttaatggaatatcttccggaaatggtgaacacaactatggtattggcaatggtattgccgatgacgcaagcattaccgccccaattaccattcccctcaacctctctggtaactcaattactctcataggcaattcatcttcaagttcggtgaatagctctccaaccaccacttcaaataacgttaatgacaacgatgtaacaaataatggtaacggctctaccattggtagcggtacaggcaatggctctggtgacgggcttttaaatggcgccgcttctggtaatggtgaacacaactatggaatcggtaatggtattgccgatgacgcaagcattactgccccactttcaattccaattaaccttgcgggtaactctattaccctaattggtgactcatcttctagttcggtcaacaactctgcaaccaatacatcaaataccgtgaatgataacgacaccacctataacggcaatggctcaggtggtggtaatggttcgggcgatggcttgttaaatggaattggctctggcaatggcgagcaaaactacggtatcggaaatgggattgcggatgacgcaagtattacagccccaattacgcttcctattaacttgtctggtaactcaattactctaattggcaattcatctgcaagttctgttaattcctcgccaactacaacgtcaaatactgtgaatgacaacgacaccacctataacggtaatggtactggtgatagcggcgtgagcgctctgggcggttctggcaatggttcaggtgatggcgcaggtaatggtatcgcttctggcaatggtgaacataactatggtattggcaatggtaacggcgacgatgttgatattactgctccgattaccggcgttctaaacatttcagggaactcatttactctcattggtaattcttcatcaagttctgtcaataccgcaccaacaaccacatcaaatacagtgaacgacaatgacaccattgataatggtaatagcggcggcacaggtagtggttcaggcaatggctctggtgatggtttacttaatggcgctgcttctggcaatggcgagcataactacggcattggcaacggaaatggtgatgatgtagatattaccgcaccaattacaggtgtttttaatttctctggtaactctttctcaatcattggcaattcatcttctagttcaattaatactgctccaactacaacgaccaatacagttaatgacaatgacgtaactgataatggaaatgatggaggcggacttgttggtggaagttctggaaatggctctggtgacggactgttaaacggcgctgcttctggcaatggcgaacacaactacggtattggtaacggaaacggtgatgatgcagatttcaccttccctcttactggtgtacttaacttttccggcaactcgctttcaggctttggcagttcatctagtgactcggtaaatgtagcaccaaccacagcaaccaataccgtcaatgataatgacaccattgataatgccaatacaggcggccttggtgacggttcgggcaatggctctggcgatggtcttttaaatggtgcagcgtctggtaatggcgagcataactatggcattggtaacggaaacggtgacgatgcagactttacgcttccatttactggcggtttaaatattctgggcaatgctttatcaggtatcggcggttcttcgaccgactctattaatatttcaccaacaactacttcaaacacagtcaatgacaatgacactaccaacaacggcaacacttcaggtggtgtgattggttctggcgactcaggcaacggctctggtgatggcttattaaatggcatctcatcaggtaacggtgaacataattatggcattggcaacggtaatggcgatgatgttgacgttgttgcccctatcactacaccacttaatgtattaggcaactctttctcatttattggtggtgaaggtacaggcgatatcttaggtccgattactggcattattggtggtattggcggtgatggagatatcctaagtccaattactggcattatcggtggtattggtggtgatggagatatcctaagcccgattactggcattatcggtagcattggcggcatcgggggtgatctgggcgataacccacttacaggtattattcaaagcggtattgacgttctacaaaatttagaaagcctaaaaacaggtttgattaatacaggtattgatacgattgccggaacaattattggtgttttccctgatgcagagcaccctgtcggtgattttgcagatcttggaaaactacttttcgagacttcacgtgatagtgttaacggcacgcttgaagctatttctgaccttgcaggcgctgaccttgagggggcaagtggctcgattactggtgtaattgatacccttattaccaatggttcaacggcatctaccattattcagcatattgtaggtgatgacctagtcactgaaaacggtggcctcttgggttcaatcaccacgattattggtggtgttgacagcggcgacggtggtttactgggtggcctagatggcttaattagcattaactatggcgactcagacaatagtaattctatagatgtagaagatattttaggaaatatcctcggctcggttggttcaaatcaaggtattgctgttggtgaacctgatccaacgggcggtagtttgattcatacgatttcacttaacacagtaaatcagttaactgaccaacttttacatgctttaccgactgtctaa

SEQ ID NO: 66166 - DNA, 384 bp, Acinetobacter baumannii
atgcagcaatggcttcgtagttccaaatttttattaatattcttaccaatttggctatttgttttgtcttggattagacctttatctgtaccagacgaaggtcgctacggagatattagccgtactatgttcgaatctggagactggttaactccacgaatcgatggtttacctttcatgcataaacctcctttactacattggttaagttctatgtttatggagctttttggcgtgcatgtatgggtgttacgtttagtacccgttttagccgctacactcatgctaatcggtctatttttattcgtaaaaaagcatatttcagaaagcgttgcacaacttaccgttattattttagctactaacctgctttttttttggtag

SEQ ID NO: 66167 - DNA, 324 bp, Acinetobacter baumannii
atggatttaagaattggattttctaaggcagaacaaagtgacttgaccaactacaaaggcgaggaactacttgttcattcagtcgtgatttttgatgaagaattaagtgatgaagatgaaatccatattgttcatcaatgggaaagtacctttacacctcaatggagagatcgtgatatagcagaagcaacaaagaaagctcaagctattattaagtcaattttagaaaatggcgatagtgatgaaattagttatcgcttagagccaagcactgtaatcattggcgatcagtatgaaaatgactgcaaggtttatgaagtttaa

SEQ ID NO: 66168 - DNA, 237 bp, Acinetobacter baumannii
atgaagtttaatagtaatctaaataagctttttgtagattttgagaataagtatggaaataaagttgatcttaaaaaacgtattacagactcattaattcagcaggaagagtcttataaacaaagcattagtcaattgtatagtgagactaactgtcagttccaaaaattaattagagtggctatatcaaaattcaatgtgttactactcaaatttcacagtaataaattagagtag

SEQ ID NO: 66169 - DNA, 927 bp, Acinetobacter baumannii; identical to SEQ ID NO: 59193

SEQ ID NO: 66170 - DNA, 1548 bp, Acinetobacter baumannii
atgtccagccagagttcagccgaaggtctacaatttccgattcacgcctcgatcaaaaagcaaagcacgtctcttacaggccaagagattttgtcagaagctttatctattgtagataataaaactgctcaacagattttggctgaaaaaaattggcgaaaaaattatcctatttactttaaggcacttgttaagcacggaattactaacagcaataatccaattaccattgcaaaacagggattgcataaggctcatcatctttttgattattaccgcgatggtaaacactatcttttaaaagatgctctacacatccccacttctacacctttaaatacagtaaaatttaaaggcgaaagtgaagctgcaccagaatggtatgttccatataaaggccaaaaactgagcgggcaaagcttacttgaccaaattcaaaaatgggaaaatgcaggtattattgaaccaagccatgctaaggctttacgtgaagctgctgctcatcctgaatggtttgatttatctgaccgtacgatggtgttatttggtgcagcctcagaagcaggaccattaccttggctagcaaaatggaaagcgaatattgttgcaatagatttaccaaacccacgagtttgggggaaaattctaaatacaatccagcaaggaaacgcaacgcttattgcaccaagtattgaaaaagttgactcgtcggcaaaagcttcagcattgagagataaattgggtgccaatttattaacccaaataccagaaattgcccagtggttagttcaatttcctcaaaaattagacttggctgctattgcttatttagacggagaaaaacatgtccgtgtttctatggcaatggacagtattatgcaatatgtgagtgaacataaacctgataccagcttaatgtttatgtgtacgccaaccgatgtttatgcagtacctaaagaagttgcagaagctgctcaagagaaatttaaatctcgttcacaactacaaaaaatggctgtgaaaggtgtttctacactctcactcaaacgttttttccaagcaccttatcaagatttgattactagcgaaaatggcaaaacttatggtattgcagactgtttggtagttgaacaaggaccaaactatgctttggcaaaacgtattcaacaatggcgtgcgacacttgcccgtcatcaaggtcaacgtgtaagtattaatattgcaccatctaccacaactcattcggtcacaaagaatccgctccttaaagcggcttttaatggcgcagaactttttgatgtagaagcatttagtccagaaaccacgaatgcgattatggctgcgctatggattcatgacttaagaaatgattcttctgtcgcaaaccctgaaaccgtactcgaccaccctctagagttgatgatggagggtgctaaccatggcggtttatggcgtgtggcttatttggcacgtacagctcttccttttgcagccatctatggctttgcagccgagaaacttccatttaggaaattttctaaaaaataa

SEQ ID NO: 66171 - DNA, 405 bp, Acinetobacter baumannii; identical to SEQ ID NO: 65570

SEQ ID NO: 66172 - DNA, 585 bp, Acinetobacter baumannii
atggcaaagattaagactcgtgctcgtactctagatatgttagggcgtcagcaaattgctggtattcctacagcattaagtgagttatttaaaaatgctcatgatgcttatgcggataatgtagaagtagattacataagaaaaaaaaatttactaatccttagggataacggattaggcatgactcgtgcagagtttgaagatcgttggctcacgataggcacagatagtaaatttgaagatgaagatgctatcgaaaaacctgcaattgatataaataaagataaacgtcctgtcatgggggaaaaagggattggccgtttagcaatagcagcgattggtcctcaagtattagtgatgacaagatctaaaagagacaatgaattaggtgaacttgtcgtcagtttcattaattggagtttgttttctttagcgggtctagatttatcagatattgatattccaatattaacaaaacaacatggtgaaaatgcaacttttgaggatgttgaatctcttaaacatcaagcaatagaaaatgtaaaacatctatcaaacaagattctgtctcttatacacatctga

SEQ ID NO: 66173 - DNA, 426 bp, Acinetobacter baumannii; identical to SEQ ID NO: 61441

SEQ ID NO: 66174 - DNA, 537 bp, Acinetobacter baumannii
atgaaaaaatttatttttattgtggctagttctctttttaatattgcagcagcacaagcagctgatggtacgatcactattaatggtttagtaactgataatacgtgtacgattgatactggtgataaaaatctcactgtaaatttaccaacagtatcatctcaatctttgaaaaatgcgggcgatgttgctggtcgtacaccttttcaaatcaatttaacgaattgtgcttcagttggtaaagtcgcgacttattttgaaccaggcgcaacagttgattttaatactggtcgactattgaaccaagctacctctggtgcagctgccaatgtcaacatccaattattgggtagcaacaatgcagtaattcctgtaattgcgaaaggtgcttctggtgcacaagataactcacaatgggtaaatgtttctgctggggggaatgccgatcttaattattatgctgaatattatgcaactggagcatctacagcaggtactgtaacgtcacaagttatctcatctattatttattattga

SEQ ID NO: 66175 - DNA, 1779 bp, Acinetobacter baumannii; identical to SEQ ID NO: 56457

SEQ ID NO: 66176 - DNA, 765 bp, Acinetobacter baumannii
atgccttttacaatctcccatgcagttatcgcccctccacttgctaaattgagccgaaacacgttgcccattgccgccttagcaattggcagtatgacgcccgatctttaccgcttatttacaatgcaatcaggtatgctgactcatcaatggaaggggcttttctaccctaaccttgcattagggctattattctctgccatttggtatttactttaccgacctgtgctttaccgtttttttggtatccaacacgatttaaaactagattcttttagacttttttttagcttttttattggaatcataattgctctactcattggtatagcaacacatctcatttgggatgggcttacccactcagactttagaacttttatatttcaagactttttatcgcaaactgttcacttgtttggccgcccttatccattgcatcgccttcttcaactcggttcttctgctctggcattaccttttttaggctggatgagtattcagtactatcagcgccataaacagcattggaaagtaaattataaaattaaaatttttgcttggtgtttatttgctttatctacacttttaggcttattttcattttgggactatgcccgttatattccccatgaggtttggcattctgatacctattattttactggccgctctattaatgagtttatgcaaggttggttaagtacgtttagtttaggatgtctattattcttatttttagatcgacaacaaagaatgggctaa

SEQ ID NO: 66177 - DNA, 2058 bp, Acinetobacter baumannii
atgttgttctataaaaatattttgaccttatccattttggctgccatatccatacctgtatttgcagcagaaaatgaaaatgttgagaagttagaaactatccgcatcaaggcacacccacttgagcaaacttcaaaagattttgcagtcgcagatactgtagttgaccaaaagcatttgactgaaggggctgccactattggggatgcgctcaatagtgaggtggggatttatgcgaatcagtttggggctggttcaagtcgcccagtgattcgtggccaagatgggccacgtgttaaagttcttcaaaattcatctgaaaatgtggatgtctcaactttgtctcctgatcatgctgtaacagtagatccagttcttgcaaaacaagttgaagtgattcgtggaccctctactttattgtttggtgcgggaactgttggtggtttagtcaacgttattgataacaagatccctacacaaatgcctgaaaatggttatgaaggacaagttggcttacgttacaacactggaagtgatgaaaagctggcgagtgctggggtaactgtagggttgggaagccaagttgcattacgtgttgaggggttaacacgtgatgcgaataactatattgcaccaaactatattcatgaaggtgaaaaagagcgccgtgtagacaatacctttgcacaaggtgattcagtgaacgtggggttgtcttggatttatgatcgcggttatacgggtatttcgtatagtaaccgtcgagaccagtatggtttaccggggcatagccatgaatatgagacctgtcatattcatgatctaagtttacattgtggagaccatgaccatgaagggcatagtgatgaagaagctcatgaccacgagcatgaacatggcggtccatggattgacttaaagtctgagcgttatgattttaaaaccgagttaaacgatccatttgcaggcttccaaaagttacgtgcccaagcgagctatacagattatcagcatgatgaaattgaagaagggacaatcgcgactcgattccaaaacaaaggttatgatgggcgtattgagttagtacataatcctattgctgattgggaaggggtaattggtacccagttaggccaacaaaaactaaatttaactggtgaagaagcatttatggcaccgaccactaccaaaaagtggagtgtttttgctttagaacacaaacaatggaaggatgttcattttgaactttctgctcgtgcagatcagcaagaaatcgatgtagatgataactctaaacaagattttgacggttctgctttttcttatgctggtgctgccaactgggagtttgcgccaaattataagctttcatttgtagcatcacaccaagagcggctacctcttgctcaagagttatatgcaaatggtgcccattttgcgaccaatacttatgagttaggaaatgatcaactcggtaaggaaaaatcaaataatgttgagttaggtttgcattttgatcatgacaaacttgattatcatcttcatgtttaccataactggtttgatgactacatctatgcgcaaactcttgaccgttataaagacttccgtttagttcaatacactcaagataaagctcgtttctatggtgcagagggtgaaattggttatcaaattacgccaatatacaagatcagtgcttttggcgattacgtgcgcggtaagattgatgccgagggcaatgctccacgtattccggctggtcgtttaggtactaaagttgatgcagattttggtgatggttttagtggttctgctgagtactatcatgtctttaatcaagataagattgcggcttatgaaaccgaaacagaaggctacaacatgctcaatttaggggtagcatactctggacaatatggtgcaaaaacagattatcgcgtttatttaaaagcgaataacttgttagatgacacggtttatcaacatgcgtcgttcttatcaaatatcccgcaagttggacgtaactttaccgtcggtgtagattttagtttctaa

SEQ ID NO: 66178 - DNA, 447 bp, Acinetobacter baumannii
gtgtctgaaatcagttttgaacgtcttcatcaatttttctgcaaagttccaagtgtacaagaagcccgtatcatggctcatggagcagatggcgaacacgcttggtggtttaagttcagtattgatgtagaacaccctctcgcatggcaaaccgttcaagaactcgggcatgttttaaattacctgtcgacgaatgagcgtttacctactttattctttcctgtatctccaccaccttacatgaatggtgaagcaaaagattttttatcatgggttattcagtgtaatcaccctgagttttctccagatgtggtttgtgattggcttgaagcgcgtttgccgaatcctgtagatgatgagtcgcagtggaaaattaagacggatttgagtgaaatagagaagttagatgataaggctttggatcaattgattccgcctacgccttaa

SEQ ID NO: 66179 - DNA, 384 bp, Acinetobacter baumannii
atgaaaaagcctattgttctcgtactttcaacattaatgttgggtatgtcggcaactgcgatggccgattcaaatcatcgttgggataactatcacggtaaagaccataatcgctatgaacagcgtcatgattatcgttatgaccaccgcaatgatcatagagctcctgtttggtcacactctgagcgtggcaaccattatggccgatatgtagcctttaagcgcggtgatcgtattcctgtggaataccgtaatagccgttattatgtctcagactggcgtgcacatcgcttatatgcaccaccacgtggataccactgggtgaagactcctaaccaatacttattggttgactcgaaacatcacatttatcgagttcgttaa

SEQ ID NO: 66180 - DNA, 483 bp, Acinetobacter baumannii
atgcctgatcccaaaaagtttgaaagaacccttgatcggtttggacattatgctgttgaggcttttcattatttagccttatttattataggctgtatgattgcttggtctgctgctcataccgtttttgaaattctgaccgtcaaaaaatatgcatcaatcgatgacatcttattgttatttatttacctagaacttggggcaatggttggaatttactttaaaaccaatcatatgcctgtacgttttcttatttatgtcgccattacagccctaacacgtttacttatttctgatatccaacatgaccataaagccgaccttgatcaagtcattattactggctcaattcttattttagctctctctattttagttgtccgttttgcttcttggcactacccatctgttatgaaagaaaaacattcaaaaacacctacttcgttaaaaacgccccaaccgcaagatgacgagttggcataa

SEQ ID NO: 66181 - DNA, 711 bp, Acinetobacter baumannii; identical to SEQ ID NO: 45684

SEQ ID NO: 66182 - DNA, 897 bp, Acinetobacter baumannii; identical to SEQ ID NO: 45683

SEQ ID NO: 66183 - DNA, 1782 bp, Acinetobacter baumannii
atgccaatttacaatgctcctttagctgatatgaaattcatcttaaatgatgtatttaaagcagaacaattttggcaggctaatgagaaactcgctcatgtagatgctgcaacagctgaagcaattttagaagaaatggctaaatttgctcagaacgtgactcatccattaaaccgtactggtgatgaagaaggcgctcgctacgaaaacggcgaagtctttactcctgctggctttaaagatgcatttcgtcaatatgcagaaggtggttggattggcttaggtgcagatgaagaatggggcggtcaaggcatgccaaaaatgcttaccgttcttgccgatgaaatgttattcgcgacaaatccatctttcatgctttacccgcttctttcagtgggtgcaggtatggctttaagcagctacgcatctcaagaacaaaaagaaacgtatttacctaagatttattcaggtgaatggtcaggtaccatgtgtttgactgaaccacatgccggtactgacttaggtattatcaaaactaaagccgagcgcaatgaagatggtacttataacattacaggtactaaaatcttcatcactggcggtgacaacgatttagcagaaaacatcattcacttggtacttgctaaaactccagatgctcctgctggttcacgtggtatctcgctatttattgtaccgaaataccttgtaaatgaagacggttctttaggtgaccgtaaccatgttggtccaggctctattgaacataagatggggatcaaagcatctgcaacttgtgtgatgaactttgacggtgcgaaaggttacctcgttggtaaagaaaacgaaggccttgctgccatgttcgtgatgatgaactacgaacgtttatcaatgggtattcaaggtttaggtgcttctgaatttgcttatcaaaatgctgctcaatacgcgactgaccgtttacaaggtcgtagtgcagctggtgttcagtcaccaagcaaacccgctgatagcattttagtccacggcgatgtacgtcgtatgttgttaaatgtacgtgcaaacaacgaagcttctcgtgcctttgcagtttatgtaggccagcagctcgatatcactaaattctcaactgatgcagaagccgtgaaaaaagccaatgaccgtgttgcgcttttaaccccaattgcaaaagcttacctcacagatacagccttccaagcaactttagatgctcaaatggtatttggtggtcacggttatattcgtgaatggggtatggagcaatgtatccgtgatcttcgtattgctcaaatctacgaaggaactaacggcgttcaatctcaagatttaattggtcgtaaaaccattaaatgtggcggtgcattcattgctgaatacatcactgaaattcgtgactttgcaaatgacttagacactgatttgaacttcattaaagatgcaactttagatgctgcaactgaaatcgaagcaatcactcagtttattattgagcaagctgcagagaacgtagagtttccgaactctgctgctgttgattacttacatgcagtgggtctactcagcttctcttatatgtttgcaaaaattgctgccgctgctaaagataaatctggtgatttctaccaaaacaaacttgcattggctcaatactttgttgaacgtatcttgccggatattgatgcgcgtattgctaaaatcaaagctggttctgacttaattatgggctttagtgaagattactttacaaaccaagcgtaa

SEQ ID NO: 66184 - DNA, 1803 bp, Acinetobacter baumannii
atgccacaatacaaagcgcccttacgtgatatgcaattcgttttgcatgaattattaaatgctgaagaacactatgcaaaattacctgactttcaaggtaacgtaagccgtgaattggttgatcaatatttagaagctgcggcagacttctgtgaaaatgaactttctcctttaaaccaagttggcgaccgtgaaggttgtacttggaatgatggtgttgtaactacaccaacaggctttaaagaagcttatcaaaaatacatcgaacttggcttcccgtctttatcagcagaagaacaatacggtggtcaaggtttacctaactctttaggtatcgcaatttcagaaatggtaggtagctctaactgggcatggggtatgtaccctggtttgtctcacggtgcagtacgtacattagaacatcacggttctgaagagcaaaaaaatacttacttaccaaaccttgtttcaggtgtttggacaggtacgatgtgtttaactgaatctcatgcaggttcagacttaggtattatccgtactaaagcagaaccaaatgcagatggtagctatgcaatctctggcgagaaaatctttatttctgctggtgaacacgacatggctgaaaacattatccatatcgttcttgctcgtctaccaggcgcaccaaaagggactaaagggatttcgttatttatcgttcctaagttcaacgtcaatgcagacggaactctaggcgaacgtaatgccgtacgttgtggttcaattgaacacaaaatgggtattcacggtaacgcgacttgtgtcattaactttgaccaagcaaaaggttatttaattggccctgaaaaccgtggtttgaactgtatgttcacctttatgaacacagcacgtattggtactgcggttcaaggtttatctgcatcagagtcttctttccaaggtgctttaacttacgcgaaagaacgtttagctatgcgttcactttctggtcctaaagctccagaaaaagaagcagatccaattatcgttcaccctgccgttcgtaacatgcttttaactcaaaaagcatttgctgaaggtggtcgtgcacttgtttacttacttgctcaatatgcagatatcgttgaaaaaggcgaaactgaagaagagcgtaagtttgctgacaacatcttgtctttattgactccaattgcaaaagcattcttaactgaaacaggttctgaatctgctaagcacggtgttcaagtgttcggtggtcatggcttcatttctgagcatggcatggagcaaatcgtacgtgatacacgtattgcttgtttgtatgaaggtacaactgaaattcaggcacttgatttgttaggccgtaaagttttacaaactcaaggtgcaatgcttcgtgatttcactaagattgttcacaagtttgtagaagcaaataaagacaatgctgccatgaaagaatttgttgagccacttgctgcgctgaacaaagaatggggcgacctcactatgcaaatcggtatgcgtgcaatgcaaaatccggatgaagtgggtgcagcggctgtagattacctctacttctctggttacgttactttagcttatctatgggctcgtatggcgcttgtagcacaagagaaattagctgcgggtacaaccgatgttgatttctacaatgcgaaagtaactactgctcgcttctacttcaagaaaattttaccgcgtgtacgctctcatgtagacgttatcgcaggtggtttagacccattgatggcattagatgctgaacatttcgctttctaa

SEQ ID NO: 66185 - DNA, 381 bp, Acinetobacter baumannii; identical to SEQ ID NO: 63187

SEQ ID NO: 66186 - DNA, 1557 bp, Acinetobacter baumannii
atgcaaaagaactttgccaaatatgtagccgatgttgaaatgcaaaagctagatcggctcattactaatctgggaaatgtatataccgtttatcatgattgggggaatgcgattcaggcgcaaatcttacaaattgaaggaacggcagcaccagatgattatgaccgtctttcccagtggtggttacggcgccaatatgatattgccattcagcagcattctttcgatgaacacactctcattaatatttctccagatgcgggaacggtaaataaaaactctatttttagtgatgaagaactacgtacacttgagcaaaacttaccttcggaatatcaaccatttgaaggtttaagattcccgctaagtgcaaaccagtttcgtccaagcgatgataaaaacaaatcaaaaaaaggaagcctcaaagacattgagacgcaaaatggtaagaagcgttttattgctttaccagaccggctgggcttaagttctcgtttatctttatatgatgccaaacaccagttcgtagtgggtgaaccgccgtcttcggatcagatgtcttatcgcccgattatggtcaatagtcaggtcgtaggttatttaggtctaaaaccagttttagataaagaagatgcattaagtattaatttcttcagtaatcaaaagcgctatttacttttaatttatgccttaacattactgtcgagtttagttgcagcacttttaatggcaacttattttaaaaagccaattcagcgtctattaaatgcaacaaatgagttaacaaaaggtaattatcaacaccaagttgtgattaaacgaaatgatgagttaggtgatttatctactcaattaaatcatttagctgaaattttacatcagcatgaagaatcacgacgtcaatgggttgcagatacctctcatgaattgaaaactccattggctgttttgcaagcgcagattgaagcgatgcaagacggtatccgaaaggcaacacctgaacatcttgatgccatgatgcgacaagtttcgagtttaaagaaattgacacaagatttggcagacttggctcaggctgatgctcaacaacttaaatgttatttgagttcggttaatccttgggaagttatactgcaagaagtcgaaaatttcagacctaaactcgaacaagcagggttagaaattgaggtggaaggtgaaggtgctactttattgttagaccgcgatcgatttaaacaaattatagttaatttgattggtaatagtattcgctataccgaaacaggtggaaagattcatattcatacaagtcaaacgcctcaggagtggactttatatgttgatgacagtccatttggtttaagtgatgagcaattatcacgtttaggtgaacgtttttatcgtgtcgatgattcgcgtacgcgtagtacaggtggaacaggactaggcttagctttatcttgtaaaattgcgcaggcgcttggtggtacactcagttttgaacactcaccattaggtggtttacgttgtgtactgacctttaaaaagcagagttaa

SEQ ID NO: 66187 - DNA, 687 bp, Acinetobacter baumannii
atgaaacatattatgttggttgaggatgaagtcgagttagcgcatctggtgcgtgattatcttgaggctgctggattcgaagtaagcatgtttcatgatggtcaggatgcttacacgagctttcaacaacgtaaacctaatttaatgattctggacttaatggttccaagaatggatggtttaacgatttgccgtaaggtacgtgaacagtcagatttaccgattattatggtgacggcacgtactgaagaaattgatcgtgtcttgggcctaaacatgggggcagatgattatgtgtgcaaaccttttagtccaaaagaactggttgctcgtgtgcaggccgttttacgtcgtttagaacgtaaggctgagccagagcaaaatgattctttccgtattgataaagcacagcaaagaatttggtatcaacaaaaatctttaagtttaacgccaacagaatttcgcctacttgagttatttttagaacatgtggggcaagtttattcacgtgcacaattattagatcatattaatccggacagctttgatgttgccgaccgagttattgatagccatattaaaaacttgcgtcgaaaaatcacggaagtggccgaaactggtaaccgtcatgagtggattcaagctgtttatggagtaggttaccgcttcgaatatccagaagaataa

SEQ ID NO: 66188 - DNA, 1443 bp, Acinetobacter baumannii
atgcaatttaatccgctttattcatcgctcaatcctaagctttttcatatccagcaaccctctccgcttcgcggtgcaaaggctggacactttaatttagctttagccgaagagttacaatggacagatgaagaaaaacaggcttgggttgaaatttgcagtggtcagcgtaccttctcggaattcccgcctttggctatggtgtatgcaggccatcagtttgggcaatgggccggtcaactaggcgacggacgtggcttactcattgcgcagattcttaataaaaaaggccaaaccatagatttacatttaaaaggtgcaggccccacgccctattcgcgtatgggagatgggcgagcagttttacgctctgttattcgtgaatatttagcaggacatgctttaaatgctttaggggttgcttctagtcacgcagtaggttttacaagctccactcaaggtgtacagcgtgaaaagctagaacctggcgcaatgttacttagaacatctgaatgtcatatccgtttaggccattttgaatggatcaatcaatatgcacctgagctattggccgagttcactcaaaaatgcattgaatggcactatccagaatgccaacaagaagagcaacctattttagcttttgctaaagctgtgattagaaatacagccattatgatcgccaaatggcagctggtcggttttgctcatggtgtgatgaataccgataacttaaatattacgggttctacactcgattttggtccatacggttttatggaacgtttccgaccaaattggattaacaaccattccgattaccaagggcgttacacctatcaaaaccaaccgagtattgcgcactggaacttatggacttggttaaataatctcattccacttgccgaacctgagcataaagagcagttcaaagaagcgttggccgcttgtttagaagaatttgagccgacttttattgagcattacaccactgggttgtgtcaaaaaatggggcttcctcattttcataaagacagtactgaatgcggcttaagctttttgcgtattctgcaagcggagcagctcgattacacccaaagcttcattcgccttcaaaataaagaatacaaagccttacgtgatgactgccttgatattcgacaatttgatgcattccttacgcagtatcaaaacatccgtgaatatcaagatattgatgagcttgatgcaaacatgcagcaggtaaatccaatttatatcttacgtaaccatatggcacagcgagctattgaggcagcggagcgagatgattttagtgaggttgaccgcttatttaagctactcaaccatccctatacaaagcaatcagatttggaaaaaccggaagatttaggtccgttaccaagcgatgtacctgatgtcgcggtgagctgttcttcttaa

SEQ ID NO: 66189 - DNA, 1173 bp, Acinetobacter baumannii
atgacttccgccccactcaaggccccaattaactggaccgctagcattaccttaattggtttaccaattcttgctgcaatcataatcccgatttatgcgtattattatgattttagtgtaagcgcatgggtaagcttattttttcttttagctttaagtagcatggggattactgctggttaccatcgtctttgggcacatcgtgcttatgaagcgtcgttaccacttaaaattcttttaatgattggcggcacatttgctgtacaaaacagtattctgttttgggcatctggtcaccgtacccatcaccgtcatgtcgacgatgtagatgaagatccatattcaattgaacgtggcttttggtatgcccatatgggttggatgatccgcgatcattctccatctgaaccagattttaaaaatgcaccagacttactcaatgacaaactggtgatgttccaacataaatactacgccttgatggtcgtagcggttcacgttggtattttaggtttggttggctgggcaactggcgatttatggggtgttgtacttcttggtggtctattacgtttaatcattagccatcaagttacattcttcatcaactcactttgccacatgttcggtaaacgcccttataccgatgaaaactcagcacgcgataacttctggttagcgattgcaacttggggtgagggttaccacaactatcaccatattttccagtacgactatcgtaatggtgtgaaatggtggcaatatgatccaacaaaatggctaatctggacatgctctaagattggtttagcaaagaacctacgtcgtattccaagctttaatattaaaaaagcagaattggcaatgaagtttaaatatgctgaacaagacttggctatttatggtcatgatgtaaatgccgacattagtcaaatgaagcaacgtattgctcaagagtatgaagcatttacacatactttaaatgactgggcgaaactcaaagaacaagagttacaagcaaagaaagcagcaatggctgaaaagattcacaaaatggatcacaagttaaaagttgatttccaattgcttgaacatcgtttgagtcatcaccgtgagtgtttagaaactttaatgcgtaacattaaaaagaacacaaacgtcgtaccagactaa

SEQ ID NO: 66190 - DNA, 531 bp, Acinetobacter baumannii
atgaaaatacagcgattgagaaaaaagaatagcattgatattgcaaggaaattgccattgaaatgtcttttcatcgcaatcagccttgtattggcagcatgtcaaagcacgccgcaacaaaataatcacaaaggccaagtaaaaccaacacatcgtgtacaaacgccagttgtgaaaaagaaagtaagtcctgatggtattcaagatatagattggcaaattacccagataaatggtcataaggcaaaattctttaaccagtggccgactctttcattgaactctacagtcaaaacagtaactggtcatacaggatgtaatcgtgtttttggtcgatacacttttgatttcagccaaaagaaacttgatatggaagttaacgcaggtcattcgagttgtgatggcgcgttggctcaagaagcagaattggtcgattctttacaacgtattaaacgcttccagttggtaggtaataccttatatctacttgatcaaagcggtcagcgtttgattcaggccgagaaaaaataa

SEQ ID NO: 66191 - DNA, 714 bp, Acinetobacter baumannii
atgcgcattattggtcatcgtggtgcacgccgagaagctcctgaaaatacattaggtggttttcagcacattaaaaatttaggtattcgtggtgtcgaatttgatattcgtcagctgcaagatcaagagttggtcgtcattcatgatgataattttttgcgcacggcaggtgtcgaccaaattgtagagcaatcaacattggctcaagcattatcatttgatcatcgtcaaaattggcctaactggccaacctctgaaccaacccctactcttacaggcgttttaaatttacttgataactttgatcatattgaagttgaagttaaagctgtaagagatatggcattagcagaaaagttaattcaaaagcttgagactgagttacaaggtttcgagaaagtcgtgaccatcacaagttttgatcttcaaattctaaccgctttacgtgatatcaactctcaatttaaacgcggattattagttgaacttccggttggagcaacggcgattgaacttgctcatcaatatgggtgctgtcatattggctggcatgatcaacttgcaacagatgaaatgattcaattgtcgcatcaagctggtttgaacattagtgtctggacagtgaacgatgtagaaagagcagaaagactacgggatttagatattcagggcttaattacagatattccaaccacaatgcttgaagctctttaa

SEQ ID NO: 66192 - DNA, 579 bp, Acinetobacter baumannii
atgggacaccgtttaagcaaaatctatacacgcacaggcgattcaggtaccacaggtttaggcgatggctctcgtgttgctaaagatgatctaagaattgcggcacttggtgatgttgatgaactaaacgccattattggggtacttcgtgctcaaatcacagatagccaagtggctaataaagctgattgggacaaaagcttgagtctgattcaacactggctttttgacttaggcggcgaagtttgtattccaaattacaatttgcttcagcccgtttgtattgaatttcttgaaaaagaaattgaccgtatgaatgaagatttgcctatgctaaaagaatttattctgccatctggttctttatcttgcagttatgcccatcaagcccgtgccgtttgtcgtcgtgcagagcgatcgctcatgtcagtacaaactcgcgatcaaaatattcaagccactgcccttcaacttttaaatcgtctatctgactggttatttgtcgcatcgcgtgctttacagcgtgctgaaggcggacaagaagtcctttggcaaaaaaatattaatgagatgatttaa

SEQ ID NO: 66193 - DNA, 1872 bp, Acinetobacter baumannii; identical to SEQ ID NO: 45682

SEQ ID NO: 66194 - DNA, 660 bp, Acinetobacter baumannii
atgagccaatcaaaccaaaaacgtacacgagcaaaaatctgtggaattactcgcaagcaagatgttcaggcagtagttgtagcgggagcagatgcgataggctttgttttttttcctccgagtccaagaaatgtaacagttgaacaggcagaagaattagcaaaactcgttccgccttatgtacaaatggtgggtttgtttgtaaacgcgagtgttactgaaattcaggatatacttgattgtgttcccctagatgtattacaactacatggcgatgaaactccagaacaatgtcaggaaatagcgcgtcattgtaaacgtcgctggtataaagcgattcaggttaaacctgatctggatgtaattgctgaaattcaaaaatatcaggcagctggtgccagtgctgtattgctcgatgcatggcatcctgagcttaaagggggcacaggacatcagtttgactggtctaaattcccgaaacttgatattccattaatcttggcaggtggtttaacccctgacaatgtcattgacgctattcatactaccggtgcttttgcagtagatgtgagcggaggcgtagagtccgcaaaaggtataaaagaccaacaactcattgaacgatttatgcaaggagtccaacgtggatcagcaaaataa

SEQ ID NO: 66195 - DNA, 1230 bp, Acinetobacter baumannii
gtggatcagcaaaataatgtgattgactatacccaattcccagatgcaaatgggcatttcggtatccatggcggacgttttgtgtcagaaactttaatggcggcattagaagatttggaaaatctctattcccgcatgaaaaatgatgaacagtttttggcagaattcgaccgtgatctcgcctactatgtaggtcgtcctagtccactttattatgctgagcgatggtcaaaagagttaggtggtgcgcaaatttaccttaaacgtgaagacttgaaccatacaggctcacacaaggtaaacaacacgattggtcaggcactacttgcaaagctttctggtaaaaaacgtattattgccgaaactggtgcaggccagcatggggtagcaacagcaacaattgcagcacgtttaggtcttgaatgtgttgtttatatgggtgctgaagacgttaagcgtcaagcgatgaacgtttaccgtatgcgtttgttaggtgcaacagttgtgcctgtgcaaagtggctctaaaacattaaaagatgccatgaacgaagcgatgcgtgactgggtaaccaacgttgatacaacatattatgtcattggtacagttgcaggtccgcatccttatcctcaacttgttcgtgacttccaatcaattattggtcgtgaagcgcgtaaacagattttggaacaagcaggtcgcttaccagatgcattagttgcttgtgtaggtggtggttcaaatgcaatgggcttgttttatccgttcttaaacgatgccagtgtaaaaatgtatggggttgaagctgctggttttggtattgaaactggtaaacactctgcgcctttaaatgcgggtcatgtgggtgtattacatggtaaccgtacttatttaatgagtgatgaacagggccagattattgagacacacagtatctcggcgggccttgattatccgggtgttggtcctgaacatagtttcttgaaagatatgaagcgtgtagagtacgtgccgattaatgatacagaggctcttcaaggtttccgtgacttaaccaaaatcgaagggattattcctgcgcttgaaagctcgcacgcgatggcgtatgtctctaagcttgcaccgacgatgtctaaagatcagattattattgcgactgtttcaggccgtggcgataaagacttaatgacagttgcacgcattgatggcgtagaaatggtcgagatgtaa

SEQ ID NO: 66196 - DNA, 513 bp, Acinetobacter baumannii
atgccaagcttgtttatggtgatgttgggcgggcgtcatgcacgtgctaatacagaagttcatgatgtggtcatggctgtaggagatactttggaagaagtttatcctcaacttaaacaagcttggtttggtgaggctcaaggattacatattgatgcttgggctaagctctcaggagttagttctcaaggacagaactatcaaattcattttacagatgctgctccacaaccagatgatttaaagttatatttaattaatctaggtggatataatgcaagtgaattcggtgaacttcatcgttatgagtttgtggtggcacccaacacggtagttgccaaacaattaggtaaacaatttatagatcggcagtggcaaaaagcacatacagaccgggtcattgatattgatgactgtttagcgatagattgcgtggcaggccgttatattcatttaataaaaggcgattttgctgcaacaatttgggaaaatacatatttgactgtgggatag

SEQ ID NO: 66197 - DNA, 996 bp, Acinetobacter baumannii
atggatttaattcaagaaaatggacagcctcgttatgggcgttttgaatctgtaccgtccaccattcatgtccaacgttatatttataaaactccttatggcaaagtcctaaaaggctggcgcaaacaattaaaatataagaaatttaaattttgtggcattcaacataaacattatagtattggtctggcaattgcagatattggctgggtcggacacggttttttctatatctatgaccatgaaacagggcaagtcattgagtggaatgctattcagccgttaggtcacaagacgtatcttgatgaacagcctttgtttaatcaaagttatttttctaaatcgccttatcagtttgatattcagcatgccaatggtgtgcgatacattcgggtaactaaatatggggaaatttgtctgagcgcccgtattttctgcgccggaacagatattttaagcttgtgtacaccaacaggtatcaatggttggacctatacccaaaagcagaccactttggctgtagagggaatgttcattaataagcaaaatcaagttgtacaatttgatgaaaagacatttgcttcacttgatgatacttgcggatttttacgtcctgaaacagcttggttctggctctcatgtaacttctgggatgaacaggggcgtcgtattgggttaaatctggcctctggtgttaatgaaagctttggtaatgaaaactgcctatggattaacggagttttatttccgctcacagacgttttatttgaaaaagtaaatgatgaactttggcaaattagttctctaaatcaaaaacttaatctacaagtgcatattgggtggtgccgatatgaaaatataaacttaagaatgattggcagtcagttcaatcaatggcaagctaaaattagcggcacgattgagcatcagccaacagatataatcaattgcaaagaacaatacggtttactagaacaacattatgcgaaatggtaa

SEQ ID NO: 66198 - DNA, 876 bp, Acinetobacter baumannii
atgaacgcacatgtttcttatcaggtcgaaccagtagttcgtaaagatctcgattttcatttaaacgaagcacctcgcttttggtttaacaatgacccttttttaactcgtatgtttgatgcactcagcttaacctttccagatggagagcgttacttcattgaatgtgtgcgtatgttccgcgataaaattgatgatcctgaactacaaaaacgagttgcggattttattaaacaagaagctcaacacggtattgcacatgacaaaatgaatcagctcatgaaagagcaaggcatgcctgttgaccagttcacgaccacccttaaaaagattttccgctttgaactaacaaaacgttcaccacaatataatattgccatgaccgctgccgctgaacatttaacagcgttaatggcagaaaccttttatagccataaaaaaactttagaaaacgcttatccttatgttcgagcactgtttgcttggcatgccattgaagagatggaacaccgcgatgttgcctttgatgtcatgaaacaggtgggagaagttccagagtcaacacgtcgctttgtgcttgttttaacaaccgtactcatgttcggttttacgctttaccgtaccaatatcatgttgaaatgtgatggcttcagtccaagagaaagacttttgatgaaccttaaaggtttaccttggttctttggcaaaaatggcacattaacagctatgaaaaaacaatatatggattggtttaaaaaagattttcatccaagccagcatcctgttattcgtcagtatcctgtttggattgaaactttggaaaaaacaaatgaccctattgcagcgggtgaagcattttggcaagcaggtttataa

SEQ ID NO: 66199 - DNA, 804 bp, Acinetobacter baumannii
atgtcacgtcttgccacccgttttgaaaagctgcagtcccaacaacgtaaagcgcttgtatcttatgtcatggcgggtgatccacagccacaagtaacggtgccgttacttcataaaatggttgcggcaggagtagacgtcattgagcttggtttaccattttcagacccgatggctgatggtccggtaattgcacttgctgctgaacgcgcacttgcggctgggacgaacaccttagatgcgctgaacatggtaaaagagtttcgtgagcaggatcaggaaacacctgtagttttaatgggttatcttaatcctgttgaagtgattggttacgagaagtttgtttcttatgcgaaacaatgtggtgtagatggcttattacttgtggacttaccaccggaagagtcaaaagaatttggtgcaatcttgaaacaacatgatatggaccagattttcttacttgcaccaacttcaactgatcaacgtattcaacacgtagcgaatcaggcaagcgggtttatctactatgtttcactcaaaggtgtaacaggtgcagcgactttggatacttctgaagcggctgcacgtattgaaaaaatcaaaggtatgactaacgttccagttggcgttggtttcggaattagtgatgctgcttcagcgaaagccatgggtagtgttgcagatgccgtgattgtaggtagtgctttcgttaaatcttttgcaacgttggcagctgatgaagctgttgaacagacggtgaataaagtcaaggagcttcgagcagcgctcgatgagttagtatga

SEQ ID NO: 66200 - DNA, 897 bp, Acinetobacter baumannii
atgaatcaagaagtgaaatcagggaaagttcttagcccttcgacgccatggacacagcgtccagttccaggtattgaagttgcagatgagcaacagactctcaaagcaacatttactgagccaactattgagtgccctgaatgtcatgctttagtgacacgtacagcaatatcttttaatgcgtatgtatgtccacagtgtgacgaacacttacgaatgaaagctcgcgatcgcttaaactggttcttcgacaatgttgtggctgaattaggtcaagagtttagcgcgaaagacccattaaagtttgttgatagcaaaccatatccagaccgtatgcgtgaagcgcaaactaaaactggtgaaacggaagctttaattgccatgcaaggtaacttaaatggcgtagatatgattgcatgtgcttttgagtttgactttatgggcggctcaatgggtactgtagtaggtgaccgttttgttaaggcagctgaacttgcaattgaaaaacgtcagccattaatctgctttgcagcttctggtggtgcacgtatgcaagaaggtatgttgtcacttatgcaaatggcgcgtacttctgctgcaattcaaaaattaaaagatgcaggcttaccttatatcgtggtgttaacacatccggtatatggcggtgtaacagcttctttagcaatgttgggtgatatccatattgcagaacctaaagcaatgattggctttgccggtaaacgtgtgattgaacaaactgtacgtgaaacactagaagagccgttccagcgtgcagaatatctgcttgatcatggtgtggtcgatcagattgttcatcgtcatgctttacgtgatactgtatctcgtcttgtatcaaaattgatgaacttaccttga

SEQ ID NO: 66201 - DNA, 1287 bp, Acinetobacter baumannii
ttgaaacaacaagctccactttcaacagactctttagatacatggctcaattattggagccatgttcacgttacagggatcgatcttggtctggaacgtgttattcccgtagcagaaaaattaggcatgactaaacccaatgccaaagtttttactgttgctggaacaaacgggaaaggttcaaccacaacaacgcttgcgtctatattaaaagcacaagggtacaaagttgggttgtatcaatcaccgcatatctatcgttttaacgagcgagtcaaattaggtggagttgaagttgatgaccaaagcctgattgatgcttttgtacaagttgatcaggctcgtcgcgagtgtgatttaagcctatctttttttgaagcaaccactttggctgcttttgttatttttaaacagcaacaatgcgatgtatgggttcttgaagtcggtttaggtgggcgtcttgatgttgtcaacgtaattgaccctaatatcgccgtgattaccaatattggcctcgaccatacagattggttaggcgataccatcgaaaaaattgcttttgaaaaagcaggtattatccgacctcatattcctgttatttttgcaggtgagcaatctttgcctcaagcgattcaagataaggcaaatagctcacaagccacgctatacgcgattaatagagattatttttataaactcgccgatgatggaaaacattggtattttgcaagtgaaggaaccactttaaggttgccgcttggtacacttgcaatcgagaatattgcaggagcagttgcggccgtattaaatagcggacttgaaatctcgcaactagcgctagaggagggcattacaaatgcccgcttggctggacgcttcgaagtgcgcgaagttaatggaaaaaccattatttttgatgccggacacaatcctcatggtgttgaatttttgttaaagcaattgcgaaatttcttagaatacaataaacagtacacagaagttgtcgcagtattttcaatgctggcagataaagatataaaatcagtagtcgatttgttgaaacctactgttttacattggaaaattgctgagttgaatgtgccgcgtgctgcaccgattcagcaattgaatgacgccctgcaaggccagacaatacaacaatttggcaatatcaaagaggcttttaaatcagcgcttgagcaaacaaataacaatcagctgattttagcctgtggttcgtttcatactttagaagcgatttgggagtatttggaagaatgtcaatga

SEQ ID NO: 66202 - DNA, 1071 bp, Acinetobacter baumannii
atgtcaatgaataacaaacaacgctggatgggtggcgttgttttattaggtggtggtgttttattggcagcattacttctaaaaggaaatgaagaaataaaacaggtagatgttcaaccccaaacgtcaacatcaccgaaattacaagctaaaccaaagcaatcagcacaagaagggcagatggtacagctacagccacttgcagttgatgttgaaacagaaaaacgtcttcttgaagaacagcgccgttctcgtgaaaaagctgtagcagaacaagaggctcgtgctgccgaattcttggcaatgcaacaacaagcagaagcggatgcagctcgtaaagctgctgctgaatatgccgcgattaatgctcgccgagctgctgcacaagaaagttccgataatattcctcctgaagtcgcgggtagtgagaataaggcaaaaggacagcaaactgatacaaaaaagtcagtagatctggctaaagcggatgcagataaaaaagctgctgaagcgaaacgcttagctgaggcggataagaaagcggctgaggcaaaacgtcaggcagaagcagacaagaaagcagcagaggctaaacgccaagcagaagcagataagaaagcagctgaggcaaaacgtcaggcagaagcggataagaaagcagcagaggcgaagcgccaagcagaagcggacaaaaaggctgctgaagctaaacgtcaagcagaagcagataagaaagcagctgaagcgaaacgtaaggcagaggccgagaaaaaagctgaagcagagaaagcacgtgagttgcttgaaaatggtgataaaaaatggatggtacaggttgcattggctgctaaccaagcaaatgcagatgctgtagtctctaaattacgtgcaaaaggctataaggtcacgacgagtccaaccagtaaaggtatccgtattatggttggtcctgcaaaagatagagatacggcagatactacacgtaagaaaattacttctgacgccagtttaaatatgaagtcagcttgggtgattgactgggtgcctttagatcagcgtaagtcagattaa

SEQ ID NO: 66203 - DNA, 579 bp, Acinetobacter baumannii
atgaaaaaattttcgctcattgcatttgcggtctgtttaagccttcaagggtgtatgcaacacgaaagtattgcccatgagcacagacctcacgattggggaaccttagtttctcaaactcataatttttatcaaattagcaatgatgttttccggagtgaacagcccgatgcagcaatgattcccgaattaaaacaccatcaaattgggactattattaacttaagagccaaagcatcagatgatttagtctttaaaaatgaaaactttaatcttgttcatattccgattaatacatgggcaattgatcgacaagatttattagaagttatgcagcaaatccaacttgccaagcaaaataatcaacgtgttttactacattgctatcatggttcagaccgtacaggggccagcgtcgccatgtatcgaattatttttgaaaactgggcaattgatgatgcagtgaaagaaatgaaacaagggggttatggttatcatattatttggaagaatattgaccgtttatttacccctgaaaatgtaaaatggattcaacagcaactgtcgaatccatcttaa

SEQ ID NO: 66204 - DNA, 903 bp, Acinetobacter baumannii
atggcttttttttacattaatgaatacacatggtttttactgttgagatcagttataacttcccaagagtttgtgcaaaaaacaaaaatcatgatccataaaattcatcatttaaaatgcggcagtatgtgccctgtatgtgcacctttatttgggcagaaaggctggaaagctgaaattgtttgtcattgtcttttggtagaaactgatcgaggccttgtactgattgataccggatttggcctacaagattatctacacatgcaacagcgccttggttctttagtcaaacggttggggaaaattgaaccgaatcttgagttcagtgctatccaacaaattcagaaactgggtttccatcctaaagatgtgcagcacatttttgtgactcacctcgactttgaccatgcaggcggaatttcagactttcctcacgccactgtccatgtgctagctactgaatacaatgctgcgcaactacctaattttaaaggtaagcttcgttatagaactaatcaatataaacaacatcggtactggaactttgttgagtatcaacaaggtgaaaaatggtttaaccttgaaaaagtaaaaggtttccccctatttcaagatgaaattttaatggtgccattattgggccattctgctggacattgtggtattgcgataaaacaacaaaatcaatggttattattttgtggagatgcttactactcacacctagagctaaatccagcaaataaattaagatctcttagccttctagaaaagacatttgcagaagataatgaaaagcgtcttattaacctaaaaaaattacagcatctggctcaacatgagccaacgattgagatcatttgtgcacatgacccccatgagcttcggcggtaccaaacatga

SEQ ID NO: 66205 - DNA, 642 bp, Acinetobacter baumannii
atgacattacgattaggcgacacagcccctgattttcaacaagaatcaagcgaaggcactattaatttttatgattttctaggtgatagttggggcattttattttcacacccagccgactatacgccagtatgtacaactgaattgggttatacagcaaaactaaaagatgaatttgaaaaacgtaatgttaaagcaattgctttatctgtagatgatgttgagtcgcacaaaggctggattaatgacattaatgaaactcaaaatacaacagtcaattttccaattattgctgacaaagaccgcaaagtatctgagctatacggttttattcatcccaatgccagtgaaacccttactgttcgttctttagtgattattgacccaaataaaaaagttcgtttaatcatcacctaccctgcttcgactggtcgtaattttaatgaagtcttacgtgttgttgactcattacaattaaccgataagcataaagtggctacaccagcaaactggcaacaaggtgaagatgtggtcattgtcccttctttaaaagatgaagaggaaattaaacaacgcttccctaaaggttatactgcggtgaaaccttatttacgccttacgccacagcctgagcaagattaa

SEQ ID NO: 66206 - DNA, 2724 bp, Acinetobacter baumannii
atgttggcaagtctgatcggaggtatcttcggtacaaaaaatgagcgtgaactcaaacgcatgcgcaaaattgttgagcaaatcaatgcgctcgagccgacgatatcagctttaagcgatgcagacttatctgcaaaaactccagaattcaaacaacgttataacaatggcgaaagtttagataagttactccctgaggcgtttgcagtttgtcgtgaggcagcaaaacgtgtaatgggcatgcgccactacgatgtccagttaattggtggtattaccttacatgaaggcaaaattgccgaaatgcgtaccggtgaaggtaaaacccttatgggtactttagcgtgttacttaaatgcattaagtggtgaaggcgttcatgtcattactgtaaacgattatttggcacaacgtgatgctgagttaaaccgccctttatttgaatttttaggtctaagcattggtacaatttattcaatgcaagaaccagcagaaaaagcagctgcttatctagctgatattacctatggtaccaataacgaatttggttttgactacttgcgtgacaacatggtgttttctttagcagagaagaaacaacgtggtttgcactatgccattatcgatgaagtcgactcaatcttgattgatgaggcgcgtacgccattaattatttctggtcaaagtgaagattcttcacacctctatactgccatcaatactattccaccaaaattacgcccgcaaaaagaagaaaaagttgccgatggcggacatttctggattgatgaaaagcagcgttcagttgaaatgactgaaattggttatgaaactgtagaacaagaacttattcaaatgggtttgttagcggaaggcgaaagcttatattcagctacaaatctaaacctcgttcaccatgtttctgcggctattcgtgcgcacttcctattccaacgcgacgttcactatattattcatgacggtgaagtcgttattgttgatgagcatactggccgtaccatgccgggccgtcgttggtcagaaggcttacaccaagcagttgaagcgaaagaaggtttggctattcaacctgaaaaccagactttagcaacaactactttccagaactatttccgtctttataaaaagctttcaggtatgacaggtactgccgatactgaagctgcggaaatgaaagaaatttatggtctggacgtcgttattattccgacacaccgacctatgattcgtaatgaccagaacgatttaatctacttaaaccgtaatggtaaatataacgcgattattcaagaaattatgaatattcgtcagcagggtgttgcaccaatccttattggtacggcaacgattgaagccagtgaaattctatcgtctaaattgaagcaagctggtattcatcatgaagttttgaacgcaaaacaacatgagcgtgaagcagacattattgctcaggcaggtagcccgaatgcagtaacaatcgcaacaaacatggccggtcgtggtacagatattatcctagggggtaactggaaagcgaaacttgccaaacttgaaaatcctacccctgaagatgaagcgcgtctaaaagcgcaatgggaacaggaccatgaagatgtattgcaagcaggtggcttacacattattggttctgaacgccatgaatcacgccgtattgacaaccagttacgtggtcgtgcgggccgtcagggtgaccctggtgtttctcgtttctatttatctcttgaagatgacctcatgcgtattttcgcaggcgatcgtgtcgttgccatgatgcgtgcaatggggcttaaagaagatgaagcgattgaacacaaaatggtaagccgttctatcgaaaacgcgcagcgtaaagttgaagcacgtaacttcgatattcgtaaaaacttacttaaatatgatgatgtgaataatgaacaacgtaagatcatttattcacaacgcgacgaaatcttagctgaaaatactttacaagaatacgttgaagaaatgcatcgtgaagtaatgcaggcgatgattgctaactttattccaccagagtcaatccatgaccaatgggatgtggaaggcttagaaaatgctttacgtattgatttgggtattgagctaccagttcaagaatggctagaacaagatcgacgtcttgatgaagaaggcttggttgaacgcatcagtgatgaagtaattgcgcgttatcgtcagcgccgtgcacaaatgggtgatgaatcggcagcaatgcttgagcgtcatttcgttttaaattctcttgatcgccattggaaagatcatttggctgcaatggattatttgcgtcaaggtatccacttacgtggctatgcgcaaaaaaatcctgagcaggaatataagaaagaagcatttaacttattcgtgaacatgctgggtgtaattaaaactgatgttgtaactgatctgtctcgcgtacatatcccaacaccagaagagcttgcagaaatggaagctcaacagcagcaacaagcagaagcaatgaagctttcttttgaacatgatgatgtggatggattaacaggtgaagtgaccgcttctcaagaagcacttaatgattcagctactgaacaacaaacgttccctgtacctgaaagtcgtaatgctccatgtccatgtggttctggtttgaaatataaacagtgtcacggcaaaatttaa

SEQ ID NO: 66207 - DNA, 444 bp, Acinetobacter baumannii
atgaaaaaagtattacaacctttatttttaactgttcttgctgtgccaagttttgttttcgcagcagaaacagcttcagcccctcaaaccacaacggttgataaagtacttgcggcaaaaggcccaacttcggctcaggctgtagtgaaacaagaaaatacgacggtgattagccctcgtacaggtattcgttacacattgggtaatacgggtaatcgcccaatcattttacaaactgctgcgatcgctccagcaaactctgcaaatattaaccgtattgttgcaagtaacccagctctatctccaaagagccaagaaaaagcaaaagttgcattaattggtgaagctgctgttgctggtgcggcagcagttgcagcgagtaatgtaactgctccggctgtaccaaacagtgttacacctgcaaatcctgcatcattgaactaa

SEQ ID NO: 66208 - DNA, 1311 bp, Acinetobacter baumannii
atggagtcaacctctgcgactgctgctcctgtagtagccaccaattcgaaaacacgggttttgtttgcaagtttagtcggtacaaccattgagttcttcgacttttatatctatgcaactgctgccgttatcatttttccacatctatttttccctgccagtagtggtagtgccgcagtcttacaatcacttgcaacttttgcaatcgcctttattgcccgtcctatcggtgcagcactatttgggcatttaggagatcgtataggtcgtaaagcaacattggtggcagcattactcactatgggtatctcaactgtatgtattggcttattaccaacctatgctcagattggaattgtcgcaccgttattgctcgccttatgtcgtttaggacaaggcttaggcttaggtggtgaatggagtggtgctgttttacttgctacagaaaatgcacctgaaggcaaacgtgcatggtatggcatgttccctcaacttggcgcacctatcggttttattttagcaactggttcatttttacttctaagtgctgctattcctgagcaagcattcatgcaatggggctggcgtattccttttattgcaagtgctgtcttggttattgttggcttatacatccgtttaaaacttcatgagacccctgctttccagaaggttttagataagcaaaaagaagttaatattccatttaaagaagtggtgacaaaacacacgggcaaacttattctcggtacaattgcagcaatctgtaccttcgttgtgttttatttaactacagtattcgcacttaactggggaacaaccaaactaggctatgcgcgtggtgagttcttagaacttcaattgtttgcaaccctttgctttgcagcctttatccctctttctgccatttttgcagaaaaatttggccgtaaagctacttctattggtgtatgtattgctgctgcaattttcggactgtttttctctagtatgttagagtctggaaacacactcattgtgtttttgttcttgtgtactggcttatcaattatgggcttgacctatggtccaattggtactgtcctttcagaaattttcccaacctcagtacgttatacgggttcagctttaacgtttaacttggctggtatttttggtgcttcttttgcaccgcttattgcaactaaacttgctgaaacatatggtttatatgcagttggttattatcttacagcagcatcacttttatcattaattgcgtttttattaatacgcgaaacaaaaaatgtagatgtaaataatcagatttaa

SEQ ID NO: 66209 - DNA, 630 bp, Acinetobacter baumannii
gtgttagaaacctacgacccaaaagaagaactttttaatgcctacagccatggcgctggtgtggttatggcagtaattgcctctgtctttttaattataaaaggatcttatctttccactgcccagtggataggtttatgggtatatgcttttagcttaattctcgtgtttactagttcgactctctatcattttgcacaaacacaaaatttacgttactggtataaaaaactcgatcacacggctatttattatttaattgctggaacatataccccgttcttaagcattgctatacctacacaaaaagctcatattttacttattgcgctctggagcattgctgcaattggtacacttttcaagttagtttttattcaccgttttcagaaaatttcgctacttgcttatgttcttatgggttggcttgccgtttttgtaatggatgatatgcgaacttatttaagcaaagatactttgatgttattgattactggaggtttagcttacaccgttggagcattgttttacgcgttaaaaaaggtaagatatacccatgcgatatggcatatttttgtgcttttaggtgcaggtgcacactttcttgctatctattggtacgttgtttag

SEQ ID NO: 66210 - DNA, 411 bp, Acinetobacter baumannii
atgagtcaccattttttaggtatatcagtgtcggttttctcctttgagcaagaacagcaattctttcatgaaatcaaacaaatgcttaatcagcagacttttgaacgtttgattttgagccaatataaaggagagttgacacagctggaaaaaattactttccgtgttgtggagctacatggaaaaaaacaactttccgcgctatatcatcataccacccaagatgtgactaaaaattattcattcgaagatggcttagaacagattgcagtgctgattacgcaatgcaaacaagcgaatttatttgccactcatcaagaaatccagcttaaaaaaaataagaaaaaagccatgcttaatatgggtaaaaaaacacagcgtgactactgctccaactgtacaagcgcatga

SEQ ID NO: 66211 - DNA, 861 bp, Acinetobacter baumannii
gtgactactgctccaactgtacaagcgcatgatcgtgagaaacagcgttatgtacagcagggtagtgcatttttaaaagagcttggcattaccgatgagaaagctcaaatcattccaagcatggctcgtaaatggaagcagattaataaatttatcgaaatttttgcgagcgcatatgagcagattgatgctgagcaaaaagagttaaatattgtcgattttggttcaggaaaagggtatttaacttttgctttgtatgattatttacaagaacaacaaaaggttccgctcattacgggtgtagagctgcgccgtaatttagtggaattttgccagaacgttgcagacaaagtacattttaatcatttagacttttttgaaggtgacgttcgtagttatcagccggaaaagctggacgtgatgattgctttacatgcatgtgatattgcgactgatttcgctatccatacgggaattcgtttaaatgcttcaatgattatgtgtgcgccgtgctgtcacaaagagttgcgtccacaactacatagccctgaagttttacaaccaatgctacagtttggtattcatgcgggacaacaagccgagatgttgaccgataccttacgtgctttacttttaaaagcatatggctatgaaactaaagtttttgagtttgtatcgcttgaacacaccagcaaaaataaaatgattttggcgactaaacgcaaaaacgtgacacaacctgatgccaagattatggctcaaattcaagcattgaaagaaatgtatggaattaaaaaacagacattggaattgttattacaagatcagctgccgatcgaaaatattggctgcaaatgctag

SEQ ID NO: 66212 - DNA, 420 bp, Acinetobacter baumannii
atgtataaagttatagcgggtagttggacgcagtttgaggaagatgcaaaatacatccgtgaacaagtctttattcaagagcaaggcattgagcccaaagatgaatgggatgatttcgacagcactgctgtgcactttatggtgtatgacaaagagcagcctatcgctacagcacgtttgttgccacagcatagcgtagggcgtgttgctgttttaatgctttatcgaaagcagggtataggtaaaattctaatgcagcatattattgaatatgcgcgccaacataaattgccttatttaaagctttccgcgcaaacctatgtaacagctttttatgaagctctaggttttaaagtgcagggtgaggtttaccaagattgtggtattccacatattgatatgactttagcgttaagttga

SEQ ID NO: 66213 - DNA, 861 bp, Acinetobacter baumannii
atgacagatttttctcgcaatgcactggttgtagaaggtggaggcatgcgtggtgcctttaccagtggtgtacttgatgcttttctacaacaacggttcaacccttttgatttatatgtgggcgtatcttctggttcgaccaatgtagctaactacctggcaggccaacagggtcgcacgttaaccttctatattgatcattcactacgtcctgaatttatcgattacaaacgcttctttaaaggtggtgatttactcgatttaaaatggatgtgggaaattggcgagcaagagcacccgcttgaccagcaacgtctttttgcgagcaaccctgatttttatatggtactcacccatgctaaaacagggcaagccgaatatctccgtgccggcaaagacaacctgttaaatgcacttcgtgcgtctagctcaattccggttttaacccgtcatccggtcgatattatgggtgaaccctattttgatggtggcgttgcagatgccctacctgtccgctggacagcccagcaaagtggtgtcaaaaagctattagttttacgcactcgtccgaaaaactactttaaagcaagtagtcgaggcgaccaattccttgcgaaatatgcttttaaacaccattacggttttgcaaatagtttgcgtaaccgctgtgcccgttataatgcttcagttgaatttgttcgtagcagtaaccctgaacagcaaattttagaggtatgtccaccgcctcttaaaaatatggcagggcgtttaacgacaaatccgaaaaagcttcgttacagttatgaagttggtttggaaacaggcttacaagccatcgaaaactggaatgcgatgaagtaa

SEQ ID NO: 66214 - DNA, 255 bp, Acinetobacter baumannii
atgtccgataaaaattcttccgaatcagcaattttaggctggaaatttgttctaatcgtcggtgttttaagtgcgatcttccttggctttttctatttagcaatgagtaatgagcctgactatatgccaggagcacagcgcaaagctcaacagcatgaaatgcagcaaaaagctgagaaatcaacagatcagcaaactcagcatgacaatatgcctgaaatggacatgcaagaacatcagcattcacatcagtaa

SEQ ID NO: 66215 - DNA, 2136 bp, Acinetobacter baumannii; identical to SEQ ID NO: 45680

SEQ ID NO: 66216 - DNA, 1206 bp, Acinetobacter baumannii
atgagcgaggcttatattattgacgccattcgcacaccacgcggaaaaggaaaaaaagacggctctctttacgaagtaaaaccaatcacattactcaccactctattaaacgaattacagcaacgccatcaactcgatacaactaaagtagatgatattgttctgggctgcgtgacaccaattggtgatcagggcggtgatattgccaaaacagcagcgattgcagcgggctggaatgatgatgttgcaggtgtgcaaattaaccgcttttgtgcttcaggtttagaagcggtcaacatggcagccatgaaagttcgttctggttgggaagatttagtggttgctggtggcgttgaatcaatgtcacgtatcccaatgggttctgatggcggaccgtgggcgttagatccggaaaccaaccttaaatcatcttttgttccacaaggtgtcggcgctgacctcattgcaaccttagatggctatagccgagaagatgttgataattttgccgtaaagtcacaacaaaaagcagcggcagctcaagcaaatggttatttcgatcaatcagttgtgccagtcaaagatcacgcaggtattgtgattttagaaaaagatgaatttattaaaggcaataccacacttgaagggttagcaaagctcaacccaagttttgaaatgatgggacaaatgggctttgatgctgttgccctgcaaaaatatccagaagcacaaaaagtaaatcatgttcatcatgctggtaactcatcaggtattgtcgatggagcagctcttgttttactggcttcagaaaaagcagtgaaagaacaaaacttaaaaccacgcgctaaagttttggcaactgccctagtcggtactgatccaaccattatgctgactggccctgcgcctgctgcacgcaaagccttggaaaaagctggtttaacaattgatgatattgacctatttgaagtcaacgaagcatttgcagctgtcgtaatgcgttttataaatgaactcaatgtgcctgctgaaaaagtcaacgtaaatggcggtgcgattgctttaggtcatcccttaggggcaactggtgccatgattttgggtacattacttgatgagcttgaacgtcaaaataaaaaacgcggtttagcaacgctctgtgtcggcggtggtatgggtattgccaccattattgaacgtgtataa

SEQ ID NO: 66217 - DNA, 1011 bp, Acinetobacter baumannii
atgagtcgcgatacgattagcatccacttcgtgaatgcggctttgacaggcgtaaagcgccttggcatggatgtcgagacgttactttcacatgtgggtatcgaagcggaactattacgtcaacctaaagctcgaatctcaccagaacaatatacccgttttataaaaatgttatggatggtcacacaagacgaacacgttggtttcgatgtacaaccgcgtcgtttgggcacttttgccattatgtgtcagttgattattcatgcaaaaaccttgggccaagcccttgaactttcatctcaattttacaaattatttggtgatgaatggtcagtaacgctggagcgtgacaaacatgaagcacgtttagtacctctcattccaaaaacattagatcccgatcatttcattactgaaagtatgctcatgatctggcatggattggcatcatggctgattgaacgtcgcttaccattagaacgtgttcattttagctatccacgtcctgcacatgcagatgaatatgacgcgttattctttgcgcctgttatgcaattcgacgcaccgcgtaccgaaataacctttgcggctgattatcttgacttaccaattcgccaagatgaaaaaacattagaagaattcttaaaagcagcccctgctcagcttttagtaaaattcaaaaataccaattcgttgacttcacgtattcgtgaagtactcaaaagccaaattggtgaagaaatgccaacgctcaatgacgttgcatcaatgttgtatttatctccacaaactttacgccgccgcctagctgccgaaggtaaaagctatcagggcgtgaaagacgctttacgccgagatgctgcgattcatttattactcaatcctgagttaacacttgaagatgttgctcagcaagttggttttagtgaaaccagtacattccaccgtgcatttaaaaagtggactggtgttactcccggtctatatcgccagctccatggttaccattaa

SEQ ID NO: 66218 - DNA, 1119 bp, Acinetobacter baumannii; identical to SEQ ID NO: 62999

SEQ ID NO: 66219 - DNA, 1254 bp, Acinetobacter baumannii
atgaaaacgcataaatctttgatggtttcctgtttatccgttttatcaattactctttttgttcagcatgcacaagctgctgctgcatttgacccaaatggttcttggatgttgggtgattggaacgggcaacgtacagcgttgcaagcacaaggttatgatttttcttttggatataccggtgaatatgccggtattttagattccaaacaaacatctacacacggtagtgcttatacagggcaacttgctttaggttctcatttggacctaggtaaaattttagggtggcaagatacagaagctcaaatcacattaacttatcgtgatgggcaatcgctttctgaacattctccagcattggctgggcaccaaagttctgttcaagaagtgtggggccgtgaacaaacttggcgtttaacagatttatggatcaagaaaaaattccttgatcagaagttagatgttaaagtgggccgttttggcgagggtgaagactttaatagttttgactgtgatttccagaacttggcactttgtggttcacaagtgggtaactgggtaggcgatcagtggtataactggccagttagccaatgggcaatgcgtgtcaaatataacttgcaacctgatttatatacacaagtgggtgtatatgaatataaccctgaaaacttggaacgtggcaaaggcttcaacctaagtacagatggttctcacggtgcaattattccagcagaagtagtttggtcacctaaattaggtgtgcaaagcatgcctggtgaataccgtttaggttattactatagtactgccgatgccaaagaaattgcagattcaactaaaacatctcataagcagggtgtttgggtaactgcaaaacagaaattattccagccagctgatcaaactgaccgtggtttaacagggtttgtgaacctgactttccacgactcagataccaacaaagttgataacatgcaaaatataggcttagtctataaaggtttgctcaatcaacgtcctcaagatgagttggcacttggtgttgctcgtatccatatcaatgatgattggaacgatgttcaagccaaagaatacgacaccgaatataataccgagctttactatggtattcatgccactaactggctaactattcgtccaaatgtgcaatatgttcgtcatgttggtgcattaaaaaatggtgataacacttgggtaggcggtattaagttctcaactgcattctaa

SEQ ID NO: 66220 - DNA, 2406 bp, Acinetobacter baumannii
atgaatcaaccttcttcaagatcaggtttaacgacttttaccgtaattattattgggttattggcgttattcctgctaattggaggtatttggctcgctacactaggcggttcaatttactatattgtagctggagtcttacttctcattgttgcatggcaactctacaagcgcgcttctgctgctttgtgggtttatgccgcattaatgctaggtactattatctggagtgtctgggaagttggaacagacttttgggcgcttgcaccacgtttagatattttaggtattcttggtttatggttattggttccggctgtaactcgtggaatcaacaaccttggatcaagtaaagttgccttatcttcaactttagcaattgcaatcgtgttgatggtttattctatcttcaatgatccgcaagaaattaatggtgaaatcaagacacctcaaccagaaactgctcaagccgttccgggtgttgcagagagcgactggcctgcttatggtcgtactcaagctggtgaacgttattctccattgaaacagattaatgaccagaacgtaaaagatctgaaagttgcctggacattccgtactggtgatttcaaaacagataatgactctggcgaaacaaccaatcaggttacaccaattaaaattggtaataacatgtttatctgtacggctcaccagcagttaattgcgattgacccagctacaggtaaagaaaaatggcgttttgatccgaagcttaaaacggataaatcgttccagcatttaacttgtcgtggtgtaatgtattacgatgcaaacaacacaactgaatttgcgacaagcttacaaactaaaaagtcgacttcaactcaatgtccacgtaaagtctttgttccagtcaatgacggacgtttagttgctgtaaatgctgacacaggtaaagcatgtactgactttggtcaaaatggtgaagtgaatttacaagaattcatgccatatgcttatccaggtggttataacccaacatctccaggtgttgttactggttcaacagtggttattgccggttcggttaccgacaactattcaaataaagagccatcaggtgttatccgtggatatgacgtaaacactggtaagcttctttgggtatttgatactggtgcagcagatccaaatgcaatgccaggtgaaggtacaacctttgttcataactcaccaaatgcttgggcacctttagcatacgatgccaaacttgatatcgtttatgttccaacaggtgtaggtactccagatatctggggtggtgaccgtaccgagttgaaagaacgttatgcgaactctatgttagcgattaacgcttcaacaggtaaattgatttggaacttccagacaacccatcacgatttatgggatatggacgtaccgtcacaaccatctttggcagatattaaagacaaatctggtaaaactgttccagcaatttatgtcttgaccaaaacaggtaatgcctttgttcttgatcgtcgtaatggtcagccaattgttcctgtaactgagaaaccagttccacaaacagttaaacgcggaccacagactaaaggtgagcattattcaaaaactcagccattctctgatttgaatttggcaccacaagataaattaactgataaagatatgtggggtgccactatgcttgatcagcttatgtgtcgtgtgtcattcaaacgcctcaattacgatggcatttatacgccgccatctgaaaacggtactttagttttccctggtaacttaggtgtgttcgaatggggcggtatgtcagttaaccctgaccgtcaagttgctgtaatgaacccgattggtctgccattcgtgagtcgtttaattcctgctgatccaaaccgtgcgcaaactgcaaaaggtgcgggaactgagcagggtgtacagccaatgtatggcgtgccttatggtgttgaaatcagtgcattcttatctccacttggtttaccttgtaaacaacctgcttggggatatgttgctggcgtagatttgaaaactcatgaagtcgtttggaaaaaacgtattggtacaattcgtgacagtttaccgaacttgttccagttaccagctgtaaaaattggtgttcctggtttaggtggttctatttctaccgcaggtaatgtcatgtttgttggtgcaactcaagataactacatccgtgcgtttaacgtaacgaatggtgagaaactttgggaagcgcgtttaccagcaggtggacaagcaacaccaatgacttatgaaattaatggtaaacaatatgttgtaattatggccggtggtcatggttcatttggtacaaaaatgggcgactatttagtggcttatgcattaccagataacaaataa

SEQ ID NO: 66221 - DNA, 1644 bp, Acinetobacter baumannii
atgtatttatataccgatttcgatcagcagctgattaatcaacgagttgctcagttccgcgatcagacagagcgctatttagcgggcaaactttctgaagatgaataccgcccattacgtttgcaaaatggtttatatgtgcaacgttatgcaccaatgctacgtattgctgtgccgtatggcttaatgaactcaaaacaattacgtaaaattgctgaagtatcaactcaatatgaccgtggctatgcacacgtatctacgcgtcaaaatattcagctaaactggcctgcacttgaagatgtgccagaaattttagctgaactcgcaactgtacaaatgcatgccattcaaaccagtggtaactgtattcgtaacacgactactgaccagtatgcaggtgtagttgctggtgaaattgctgatccacgcccaacatgtgaattgattcgtcagtggagtacattccacccagaatttgcattcttaccacgtaaatttaaaattgccgtttctgcacttgaagaaaaagaccgtgcagcaacagcattccacgatattggtgtgtatatcgtgcgtaatgaagcaggcgagatgggctacaaaatcatggtgggtggtggtttaggccgtactccgattattggtagtgtcattcgtgagtttttaccacgtgaagatttaattgcttatttagaggcagttttacgtgtttataacttacatggccgtcgtgataataaatataaagcgcgtatcaaaatcttggttaaagcattaacgcctgaagtatttgcacagaaagttgaagctgaatttgaacacacacgtgaaacattaaaaattcagccagaaatcttgaaaaaattagatgaagagttcactccgtttgattatcaagatttagaagatgaagactttacagctttatttgctgagcatccaaaattcaaacaatggttcaatatcaatacgcatgcgcataaagtaaagggctatcgtattgttacgatttctttaaaacgtgcaggtatcgcaccgggcgatatgaccactgaagaaatgaacttcattgcagatctcgctgataaatatacgtttggtgaacttcgtacgactcacgaacaaaacattgctttggcagatgtacctcaaaaagatttgttcgatgtatggcaagcgcttgaacaacacaacatggctcgtgcgcatatcggctttattaccgatattattagctgcccgggtggtgatttctgttcacttgcaaatgcgaaatcaattcctattgctgaagcgattacacgccgttttgaagatttagataaagtttatgatcttggtcatttagacttaaatatttctggctgtatgaatgcttgtggccaccaccacgtggggaacatcggtattttaggtgtagataaaaaaggcgctgagttctatcaaattaccttaggtggtaattcagaccatgatgcttccattggtgacatcttagggccatcatttgcagcagaagccgtgcctgatgtcattgaagaagtattaaatacgtatcttgatttacgtactgaaggtgagcgtttcgttgatacatatcgccgtgtaggaattcaaccatttaaggagcgtgcatatgcttaa

SEQ ID NO: 66222 - DNA, 486 bp, Acinetobacter baumannii
atgcttaatacagctctacctgtgctttataaagatggcacgattgcagataatacttatcaaatcattgctgaagatggtgtgattcctcaaggtgacgttgttttaacaacagcacagctcgatcaactggcgaacactcaaggtaaaaaagctttgtatgtgactgtaaatgattcaccagaagatcatacattcccacttagtgaacttgatgcaatcttcattgagttcgcaggtttcggagatgggcgaggttattcattcgctgcattattacgtcgccaaggtttccaaggtgaactacgtgcaacaggtgatgtatttaaggatgtcttaaattatttaaaacgttcaggttttgatagttttgtcatcaaagaaggtaaagatgtgcaagaagctgctgctggtttgcaagactttactcatccttatcaagcctcaacagctgtgccaaaagcaagttatcaaactggtgcttaa

SEQ ID NO: 66223 - DNA, 354 bp, Acinetobacter baumannii
atgttcgctttaatttcaaaaataaatcctggcacttggtggttaatattcgctattgcaacggatgtactttcaaccttttattcagctaaaggcaatggattagttaataaaactgctcagggaattgctctagttttgtatattatctcttttgcatgcgctgctattgctttgaaatatatgcaagctggaattttatatgtgttgtggtctggggtgggggtattggcgaccgcttttctcgcaaagatttttcttgggcaaaatattgatgtcgcaggatggattgggattggttttattacagtcggcttaatgattattgcgcaatactctaatatcgatgtttaa

SEQ ID NO: 66224 - DNA, 444 bp, Acinetobacter baumannii
atgcaactcaatcactatctcaattttcaaggccaggcagagcaagcttttaatttttataaatcagtattcggcggtgaatttgccatgctgagccgctatagcgatatgccgcctcatgacggtgtcacgttatcggaagctcaaaaaaatttagtgcttcatgtttccctgccgattaacgaatacactgtactcatggcatcagatgtcattgatcaattctgtacaccaaatagtgtatttactcagggcaataatcattacattgcaattaaccttgaaaaagatgagcaagaaaaggcaaagcaactttttgatgcattatctgtaaatggcaaaattgaaatgccactagaaaaaacgttctggggcgctttatacggtgcttttactgatcaatttggtgtcaaatggatggttaactgccagttagatacttaa

SEQ ID NO: 66225 - DNA, 1176 bp, Acinetobacter baumannii
atgactgacatcgtaattgttaatggtgctcgtactgctatgggtggttttcaaggatcactatcaggactaactgctcctgaattaggagcagtaacaattaaagaagcaatcgcacgagcaggtttacagcctacagatgtcgaagaagtcattatgggttgcgtactaccagcgggtttaaagcaaggccctgctcgtcaagccatgcgtaaagcaggtttacctgattcaacaggagctgtgacaattaataagctttgtggttcaggtatgaaggcggtaatgcaagcggctgatatgattaaagcaggaagtgctgaaattgtagttgccggtggtatggagtcgatgaccaatgcgccttatgtcttacccaaagcacgtgcgggataccgtatgggccacggtgaaattaaagaccatatgttctttgatggcttagaagatgctgaaactggacgtttaatgggttcatttgctcaagatatggcaaatacacgtggttatactcgtgagcaaatggatgactttgcaattcgttctttaaaacgtgctcaaactgcgattactgaaggctatttcaaagatgaaattgtacctgttactgtttctacccgtaaaggtgatgtcattgtcgatcaggatgaacaacccttaaatgccaagattgataaaatcccatcccttaaaccagcttttgcaaaagacggtaccattactgctgcaaacgcgagttcaatttctgatggtgcttctgcactagttttaacatcgagtgaagttgcagcacagcgcggcttacaaccacttgcaaaaatcatagccactgcgtcaaattctcaacatccttcagaatttacaattgctcctgttggcgctattgaaaaagtacttaaaaaagcaggttggaatgctcaggacgttgacctttgggaaattaatgaagcttttgctatggtaacgatgtgtccaattgatgatttcaaacttgatccagaaaaagtcaatattcatggtggagcatgtgcacttggtcatcctgtaggatcgacaggctctcgtattattcttacgcttattcatgcgcttaaacgtactggtggtaaaaagggtgtcgctgctctttgcatcggcggtggggaagcaacagctgttgccatcgaaattctttaa

SEQ ID NO: 66226 - DNA, 516 bp, Acinetobacter baumannii
atgtttaaatctcctggttttactatagttgagctcactataacactcgtaattcttgtgattatgtcagttatagccattcctttataccatcaatttatggcatctgtagaactaaaaaatacgccgcgtatactcacaattcatatacaaaaagccaaatatgacgcaattattaggcataagaatgttgttctttgtccaagttctgatcaattggtctgcaatacgaattgggataaccgcgtaatcagctttgtagataataaccataatctacagcatgatttaaatgaagagttattaacctctatagatcttaaccatcactacggttctatgaaattacaacgttttggaaaaaaacaaaatagtattatttttcaaggtagttctggactacccatcgagtcgaatggcagttttatctattgttcttatgaccagcttaaaaactttaaattaattcttagcaaaatgggccatgtgcgcttagaagaacttaaaaattgttag

SEQ ID NO: 66227 - DNA, 1071 bp, Acinetobacter baumannii
atgaaattgagtcgtattgcacttgctactatgcttgttgctgctccattagctgctgctaatgctggcgtaacagttactccattactgcttggttacactttccaagacagccaacacaacaatggcggtaaagatggtaacttaactaattcacctgagttacaagacgatttattcgttggtgcagctcttggtatcgagttaactccatggttaggtttcgaagctgaatataaccaagttaaaggcgacgtagacggcgcttctgctggtgctgaatataaacaaaaacaaatcaacggtaacttctatgttacttctgatttaattactaaaaactacgacagcaaaatcaagccgtacgtattattaggtgctggtcactataaatatgactttgatggcgtaaatcgtggtacacgtggtacttctgaagaaggtactttaggtaacgctggtgttggtgctttctggcgcttaaacgacgctttatctcttcgtactgaagctcgtgctacttataatgctgatgaagagttctggaactatacagctcttgctggcttaaacgtagttcttggtggtcacttgaagcctgctgctcctgtagtagaagttgctccagttgaaccaactccagttgctccacaaccacaagagttaactgaagaccttaacatggaacttcgtgtgttctttgatactaacaaatcaaacatcaaagaccaatacaagccagaaatcgctaaagttgctgaaaaattatctgaataccctaacgctactgcacgtatcgaaggtcacacagataacactggtccacgtaagttgaacgaacgtttatctttagctcgtgctaactctgttaaatcagctcttgtaaacgaatacaacgttgacgcttctcgtttgtctactcaaggtttcgcttgggatcaaccgattgctgacaacaaaactaaagaaggtcgtgctatgaaccgtcgtgtattcgcgacaatcactggtagccgtactgtagtagttcaacctggtcaagaagcggcagctcctgcagcagctcaataa

SEQ ID NO: 66228 - DNA, 159 bp, Acinetobacter baumannii; identical to SEQ ID NO: 42394

SEQ ID NO: 66229 - DNA, 1206 bp, Acinetobacter baumannii
atgggcatacaaaagatattaaacgaagaggcacaatatggtgtccccgttaaaattttcactcaagacatagatagtgaaagtattgaacaactcaagaaaatggcacaactgcaatttatatattctcatattgctgttatgcctgatgtgcatgttggaaaaggtgcaactgtaggcagcgtcattcctactaaacatgccattattccagctgcagtaggtgtagatattggctgcggaatgaatgctattcgtttgagcctgaaagcttcacaacttccaaataacttaagtcgcttgcgggacgccattgaacggaaagtgccggttggatttgctttgcataaacaagtcaaagcgaaagcttctagcattattccacttgaaaaacgcttagaacctattattaaaaagcatccgggtcttgtccgaatgcttcgtcagtttgaggcaacatggcaaaaacagttgggcactttaggcggcggtaatcactttatagagttatgtattgatgaaaatcaagatgtatgggtgatgctccattcgggcagccgaggtcttggtaacgtcataggtacttattttattgagttagccaagaaagaggcacaacatcgctttgggcacgtgcctgataaagatttaagttattttgctgaaggctcacaaagctttaatgattatgtagaagcagtagagtgggctcaagaatatgcttttgaaaatcgtaaagaaatgatgcgattaatattagaagcaattcgccctcttctaccttcttttcaaatgacgaaagaagcaatcaattgtcaccataactatgtgagtcaagaaacacactttggtgaaaacctttttgttacaagaaaaggggcaattcgagcaggtttagatgagttaggaattattccaggttctatgggagcacgctcgtatattgttaaaggtaaagcaaaccctgaatctttttgttcctgttctcatggagctggccgcaaaatgagccgaagcaaagcaaaagttctttttaatcagcaggacttgattgaacaaacacaagggattgaatgccgtaaagacagtggtgtagtcgatgaaattccaagtgcctataaagatattgatgaggttatagccaatcaggcagatctcattgaagtcgttcatactcttaaacaagttttatgtattaaaggttaa

SEQ ID NO: 66230 - DNA, 1461 bp, Acinetobacter baumannii
atgagcgaaacacatgctcctgaaaaactccagcgtaagcttggggctcgtcatctgaatatgatcgccattggtggttccattggtacaggtcttttccttgcttctgggtcaaccattgcaaatgcaggtccaggtggggcgttactcgcctactccctcattggtattatgatttacttcttaatgaccagtttaggtgaacttgcgacacacacaccaacatcaggtgctttctttacctatggaagtcgctatgtcgaagagggttttggtttcgctctaggctggaactactggtacaactgggcaattacggttgcgtttgaactcgttgccgtacagtttattatgaaattctggttcccagatgttcccggattctattggagcgccctctttctcgtcattatctttatgattaatgcgatgaccgtaaaaggatttggtgaaagtgaattctggttctccatggttaaagtaattgccattgttgcctttattattattggtatcgccatgattattaagattatgttgacaccaggagtagcaacttttggcaactggacttataaagaggcaccattcgtaggtggtttacaagccatgattggggtagccatgattgccgggttctcatttcagggaaccgagatggtgggtgttgcagcgggtgaatcaaaagatccgaagaagacgattccgcttgcaattaaacagattttctggcgaattttattattctatatcttgtgtattttcattatcggcacccttattgcctatgatgatccaaacttattacaagcagcagcaacagaaaatattgctctttctcctttcaccttactttatgaaaaagtaggttttgcttttgctgcaagtttaatgaatgcagttattttgactgctattttgtcggcaggtaactcgggcatgtactcttctacccgtatgttatttgatatggcgcaacaaggccgtgcaccaaaatggtttgcaaaactcgataatcgtggtgttccaatgaatgcgttatatgcaactacattcattgctgcattctgcttcttaacgacttttatcggagaaaagcaagtctttaactggctcctcaatatgtcaggaatgtgtggtttcattgtctggttaggtattgcaatttcgcattatcgtttccgtaaaggttatattgctcaaggttataaattagaagatcttgcataccgcgctaagtttttcccattcgcaccttggtttgcctttatcctctgttctgtcattattttaggacaaaactaccaagcggttttaggcggtaaaattgactggattggcttactttctacttatatcagcttgcctttatttttagtaatctggcttggatacaaatggaaaaataaaactaaattaattccttacgatcaaatggatgtaaaaccagagcaagattaa

SEQ ID NO: 66231 - DNA, 1014 bp, Acinetobacter baumannii
atggaccctagaagtgaagtgatattaagacaacatgactatttaaaaggtagggtcttgttaattaatgcaccgaatgacgccctagtcagtcaattacccactgagattgatgcatcagtctggacgtggaattatgctgactatcagggttttttaaatgcaggcgcaacagctcatttctcggttgagtttccattacaagaatttgatcaggctataatttttgttccaaaatcaaaagagcttttaaactatatattgcatgtagtgatgagccatctgaaaattgaccaatcagtttttttagtaggtgaaaaaaaaggtggtgttgagagagcggcaaaacaactacaaagctttggcaaaatacttaaacttgatagtgcccgacattgtcagttatggcatttaaaaattgagaaaactgaaaagatcaaacctcttgaaagctggttaaaaacctatactgttcaagtaaatgagcaagaacttaccatttgtgccctacccggcgttttcagccaaactcatctagatgtcggaactgccgttttactcccttatctaaatcaggtgaaatcaggtagaattgccgacttcgggtgtggagctggaattatcagttgctatttggcaaaagcaaattcaagtaatattatccatgccctagatattgatgccttcgctttacagtcaacggaaatgacttttagtcgaaatggaataggttcagaccagttgagattgcagcctgttacaggaattgcagacgccccaacagaacttgatgccattgtcagtaatcctcccttccatcagggtattcataccaactatgatgcaagtgaaggactctgccagaacgctaaaaaacatttaaaggcatcaggcgagctatggattgtagcgaaccgttttttaaactatccgatcttaattgagaagcactttggtcagtgtgagattaaaactgatcttcaaggctttaaggtgttatatgcctgtgcataa

SEQ ID NO: 66232 - DNA, 1359 bp, Acinetobacter baumannii
atgtccaatcaaccatcacaagaccgtcttgacctcgtttatgggctagatgaccgaccaaaaccgttcgtggcttttttggcagcctttcaacatttgcttgcaattattgtcccgattgttactcccgggcttctaatttgcttagcattaggcgttccacgaaatgaaaccaatatgattttatcaatgtctttggtcatttcaggaatcgcgactttcttacaatgtaaaaaagttggtccgtttggtgcaggcttacttattgttcaaggtacaagttttaactttattggcccgattatcggtattggcagtgcaatggttgctgcaggtacaccagtcaatcaagttatggctgctatttttggtgttgtgattgcaggttcatttattgaaatgggcgtatcacaaattctcccatgggtaaaaaagctaattactccccttgtgacaggtattgtggtactcctgattggtctaacgctcattaaagaaggtttgattagtatgggcggtggttatcaagccatgcaggaccatacttttgccagtgctgataaccttataatgtcgtgtacggttcttgctattattattgtcctaaaccgtattcgtattgtctggattaaaagttcagctattttaattgctttagtgattggctacattcttgccggctttatgggatatctagacttctctggtctaaaagatgcgcccgtgattcaaattccgacaccgatgcattttggcttaagcttctcatggggcttatttattccaatggcatttatttatttggttacgtctttagaagcaattggtgacgtaacggcaaccagtaaactatcaaaccaacctgtagatggtcctcagtggatgcaacgtattaagggtggtgtgttagtaaatggtgcaaattcactacttgctggcctattcaatactttcccaagctccgtgtttgcccaaaataatggtgttatccaattaactggcgtagcaagtcgttatgtaggaatctggattgctgctttactcattttattaggtctattccctgctgtagctggtgtaatacaagctgttccacaagccgtattaggtggagcagtcatggtaatgttcggcgccgttgctgcctcaggtattaatatactttcatcaattcatttagatcgccgtgcccttttaattattgcgatttcacttgcattaggtttgggtgttgctcaggtgccacaaattttggagcatctgccagaattatttaaaaatatttttagttccggcgtagcaacaggtggtattgcagcattaattttaaatgttgtactcccagaaacacataaataa

SEQ ID NO: 66233 - DNA, 1836 bp, Acinetobacter baumannii
atgtcagatatcaaaaatctccgtaatatcgcaattattgcgcacgtcgaccacgggaaaaccacacttgtcgataaactacttcagcaatcaggtgctctcggtgaccgagcaggcgagattgagcgtgtcatggactcgaatgcgcttgaaagtgaacgtggtattaccatcttagcgaaaaacaccgctattacttggttagacaaacgtaccgatacaacttaccgtatcaacatcgtggataccccgggacacgccgacttcggtggtgaagtagaacgtgtaatgtcgatggttgactgcgtactacttcttgttgactcacaagaaggcccaatgccacaaactcgctttgtgactcaaaaagcctttgctcgtggtttaaaaccaatcgtgattatcaacaaagttgacaagccaagtgctcgtccagactgggtaatcgatcaagtatttgatttgtttgataaccttggcgcaactgatgagcaacttgatttcccaatcgtttatgcatcaggtttacgtggtgtagcgggtcctgctcctgaagagcttgcagaagacatgactccgttgttcgaaacgattgtagacatcgttgagccaccagctgttgatgttgatggtccattccaaatgcagatttcatcacttgactataacagcttcgtaggtgttatcggtgttggtcgtattcaacgtggttctgtaaaactaaatactcctgttactgtaattgacaaagaaggcaatacacgtaacggtcgtatcttaaaaatcatgggttaccatggtttagagcgtattgatgttgattctgcatctgcgggcgatatcgtatgtattactggtattgatgctcttaacatttctgacacgatttgtgatccgaaaaacgttgaagcattaccacctttatctgtagatgaacctacagtgtctatgactttccaagtaaacaactctccgtttgctggtaaagaaggtaaattcgtaacttcacgtaacattcgtgagcgtcttgaccgcgaattaattcacaacgtagctttacgtgttgaagatactgacagtccagaccgtttcaaagtatctggccgtggtgaacttcacctttcagttttaattgaaaacatgcgtcgtgaaggcttcgaattaggtgtatcacgtccgcaagtaatcattaaagaaattgatggtgaaaaacaagaaccttacgaaaacgtaacgtttgacgttgaagagcagcaccaaggcgctgtaatggaacaaatgggtcaccgtaaaggcgaaatgaccaatatggaagttgacggtaagggccgtatccgtattgaagcaactgttccttcacgtggtttaattggtttccgttctgaattcttaaccatgacctctggtactggtattatgacttcaagcttctctcactatggtcctcttaaacaaggtactgttgcgaagcgtcaaaacggtgtgttgatttctatggttcaaggtacatgcttgggctatgcattattcagcttacaagaccgcggtcgtttattcgctaagccacagttagaagtttacgaaggtatgatcgtaggtattaactctcgttcagacgatatggttgtaaacccaactaaagcgaaacagttaactaacgttcgtgcgtctggtactgatgatgctttaactttaacacctgcaattgaattcacgcttgaacaagctcttgaatttattgaagatgacgagttagtagaagttactccaaaatcaattcgtatccgtaagcgttacttgactgaaaatgaacgtaaacgtaaccgtgataaataa

SEQ ID NO: 66234 - DNA, 432 bp, Acinetobacter baumannii
atgagtattattcaagaatttaaagaatttgccattaaaggcaatatgatggatttagccattggtgtaattattggtggtgcttttggcaaaatcgtagactcgttagtaaaagatatcatcatgccacttatcactgtaattactggtggtggtgttgatttctcgcagaaatttatcgtgttaggtgcaaaccctaataacttacaatctctagatgccttacaaaaagcaggtatcaatgtattaacttatggtaacttcctgaccattttaattaacttcctgattttggcttgggttgtgttcttaatggtgaaattattaaacaaacttcgccgtgataagaatgagccagaagctccagctgcaactccagaagacatccaattattacgtgaaattcgtgatgagttgaaaaaacaagcttaa

SEQ ID NO: 66235 - DNA, 462 bp, Acinetobacter baumannii
gtgtaccgttttttattacatagcattttatactggactagagatattgataaacttgctaaatcacagttaagtttagctaagcagatagaacaaggacataaattaatgaatcagctttttgtatatggaactttatgccctaataaagcaaatgctcatattttagagcagattggtggtaactggacaaaagcgagtgtacgaggagtgattcatattttagattggggaccagacaaaggcttaaaggccttagaattagatccagaagcagattgggtagaaggctatttgtttagcacagaaaagttagcagaaaactggcaaatgttagatgattttgaaggctttcaataccaacgcgtgacagcagatataaaattagaatcgggtgagtatgttaaagcctggacatatcaaatcaatatgcaggctaaagctccccacaattacaagtaa

SEQ ID NO: 66236 - DNA, 291 bp, Acinetobacter baumannii; identical to SEQ ID NO: 50900

SEQ ID NO: 66237 - DNA, 825 bp, Acinetobacter baumannii; identical to SEQ ID NO: 50901

SEQ ID NO: 66238 - DNA, 567 bp, Acinetobacter baumannii; identical to SEQ ID NO: 48645

SEQ ID NO: 66239 - DNA, 2130 bp, Acinetobacter baumannii
atgtccttattacgcttagaccgacttcattactgtattttgatgagtatgggctgtatttctagcccacttgtttgggcagaagacttaaattcagacgttgcccaattgccaactttacatgtggaagcgacacgtactgacaccggttatttacaaacaccagcttcggttttccgaatcgaggcacctcaagtggatagttcttcacaagtaaatttaactgaagttgtgaagggcataccgagtttacagattcgtaaccgtgaaaattatgcgcaagatctacagctatctatgcgtggttttggtgcacgttctacgtttggtgtacgtggtattcgtctttatgtggatggtatccctgcaacaatgccagatgggcagggccaaacatctaatatcgacttaagcagtttagatcatgttgaagttctaacagggcctttttcttcactttatggaaattcatcaggcgggactattttaacttctactaaagaagggcaagggaaagactcaattgagctgagttattcgggtggtagccatgataaaagccgagcaggacttgtgctgcaaggtggagcaaagggtgcgaatgaaccaagctatattattagctcatcatactttgataccgacggttaccgcgaacatagcggtgcagaaaaagtactaaataatgcaaagctcagctggaatcttgatgatggtagtaaaatcaactgggtaaccaactatgtaaaaatccacgccgatgatccgcagggtctaacgcatgatcagtggaatgcaaatccaaagcaacaagttccatttttaaagcaatttaatgttcgtaaagatattgaacaaacccaaacgggcgtgacatggtctaagccgattaatgacaaaaatgaactctatgccatggcatatttaggcaatcgtcaagtcacacaatatcaatctattcctaagtccacccaagatgcgagcataaaccatgccggtggagtcattgattttgaacgtaattattatggcgctgatttccgttggacgggtaaagagttacttccaaataccacgctaagtgtcggtgtggcacttgatgcaatggatgaagatcgtaaaggttttgaaaactttaatttagtaaatggtcaaccttcttatggtgtcaaaggtaatttacgtcgtgatgaagacaatactttatggaatatcgatccatatttacaagcttcatggcagttcttacctacatggcgtttagacacgggtgttcgctatagcaatgtccactacaaatctgaagataactatttaagtaatggtgatgatagtggtaagacggattacgataaagttttaccgtcggtcgctttaagttggcaaattttacctgaacttatggcctatgtaagttatgccaaaggttttgaaacaccaacttttactgaaatggcatatcgacctgatggtcaaagtggttttaattttgatttaacagcttcaacaagcgatacctatgaaacaggtttaaagtcacaaaaccaattaggtgattttactttggcggttttccagactaaaactaaagatgacattgtttcggccggtaactcaaatggccgatcaacgttccgtaatgcagataaaaccttacgtgaaggtgtagaatttgcatggaataaaaagttatggcgagacttaatagcgaccgcaagctactcgtatttagatgcaacctttgatgctgacattccagcgttaggaaatattgctcagatttcctcaggaaatgccataccgggtattgccaaaaaccaagcttatgcctctttggcatggcagccatcgcacggtctatatggtggtgtagatgtacagtatatggacaaagtatacgtgaatgataccaacagtgacgcagcaccgagctacagtgtaacctcagcaaatgttggttatgcatgggtaatgggcgattggaaagtcaatagctttgctcgtgtagataacctctttgataaaaaatatgtaggttcagtgattgtaaatgacggtaatagccgctatttcgaacctgctgatggacgtaactggagtgcaggtttacgtgtaattaaacaattctag

SEQ ID NO: 66240 - DNA, 1110 bp, Acinetobacter baumannii; identical to SEQ ID NO: 45760

SEQ ID NO: 66241 - DNA, 924 bp, Acinetobacter baumannii
gtggtttttcaggtaattttaccaattttgattttattattgatggggtactgtagtgtcctcattaaactggtaacacctgaacaaattaaggctctgagtgcatttgttattaaaatttctttacctgcttttttaatccaatctttagccaataaaaacttacaagatatttggcacccagcttattttattgcttatggtggcggctctttaatcttgttttttttggcttttatcctttaccgcaagtattttaaaaatagcctaacacatagtgcagtcatatcgatgggcgcttctatgtcaaatacaggttttatgggtacagcgattctaaccatgctaatggggagtcatgctgcaatctatatatctttaaccttaattatcgaaaatttattaatagttgctttaatgctcattttggcagaagcgggtttgcatcaacagcaacggcttttgcctttactgaaaaaaacattcatgaatttacttaaaaaccctgtaattattgcaattttagttgggatgagctgcattttgctagatattcatctgccttcaaaacttggacaagccttagaacttttaggaagaacagcttcgcctctagcattatttgctattggtggcagcttggttggtattggtattaccgccgtgaatttccaaagtatattgttggctggatttaatgtcatccttatgcctgttgtgatttttgggctgttccttttactgccaaacgtgagccaagagatgttatatgctggcactttacttgctgcgctgccaatgccgatcgcttttggtatttttgggcaagcctacggtttaaatgaaagagcattaacccccttaatgattagtaccattattggctttatgggtgtgagtgggcttattgccttgtggtggtaa

SEQ ID NO: 66242 - DNA, 825 bp, Acinetobacter baumannii; identical to SEQ ID NO: 45759

SEQ ID NO: 66243 - DNA, 711 bp, Acinetobacter baumannii; identical to SEQ ID NO: 64690

SEQ ID NO: 66244 - DNA, 315 bp, Acinetobacter baumannii
atgtcccaagcagtagatatcattttctatgatggcatagtgtctaaaccataccgtgctcagatttcagctcaatctaaaactgaagttctgattcgatatggtgagcaattagaacaacagcgtcattatcaatatactgatatgaaattgattggtgctctgggacagttacatccagtaattgaattagatgatgatgcacgaattgaatttcatggtgcattacctgaatggtttaattattcaactaaaaagattcaacattcgatttggaaatttgaacgttctccaagtcttatttttttagtttaa

SEQ ID NO: 66245 - DNA, 903 bp, Acinetobacter baumannii
atggaaaatagtcaaccttctgattatgcaaaatatgtatacgaattagagttactgaactcaccgttatttcatattacaagcaagaagcgactagctattttattatgttcatctattaaagaactgaaccatattgttcgttcaaaaaatcagatgtatcaatattttaatgaaaataagactgatgatagtggaaacattattaaagtccgccctattcaaaatcctcatgatagattgaagcagatccattccagaattgggaaatttttgggtaacttgaaagctcctgattatttacattcaaaacgttctaaatctgcaatttcgaatgcaaaagcgcatgtcggtcttaaggggcatacgctaaatattgatattactgatttttatccttctacttctaaggctaaagtgcaatctttttttggatatactcttcaatacccaactgatattgctaaatatatatctgaagtctgcactgtaaataattgccttcctacaggtagcccattaagttcagcattagctttctgggctaataaatccatgtttgatgaaatttatagaatggctaaaagtcgctctataactatgactgtttatgttgacgatatttcgtttacaggaaaggccgtcaatcaaaactttctaaataaaattattcaaataatagagaaatatcagcataatattaaacaagaaaaaattaaattttttcctgaaaatagcattaaattcgtcactggggtggcaatagtaaatggtagtttacaacctgctcataggcatttccgagatattagacagcttaaaaaaattgataataatatccaagcagctctacgattaataggaaaaaataattatataaaacaaatcattaaccatgtctaa

SEQ ID NO: 66246 - DNA, 156 bp, Acinetobacter baumannii
atgaaatatttaagtaacgttcagcagccatctaaagttgagaataaggctaataaacccaagcctccaaaaggttggaagtggattaaacttattctagtagtgttgcggtttattctaaaacacatccttcaagaggacgatttaggaaactaa

SEQ ID NO: 66247 - DNA, 162 bp, Acinetobacter baumannii
atggtaactaaagcagtagttatccgtcgtggaaaaccacgaaaagttgttgccaaacctttaaatagtgagaagcaagctagtttctttagagcggtaggtatgctaacagctagaggtaatgagaaattattaaattctactcatgaaactcaagcataa

SEQ ID NO: 66248 - DNA, 498 bp, Acinetobacter baumannii
atgatttatgtagagatttctgaagaattagaaaatgatgctgaagaaatgggaatcagcaatgaattaaattttattgctgatcaatttcttatatacaagcaagctagccgaaacagagaacatcctgctccatctagaaatgttcaagaaagagatcaacctgcatctgaatattttggaagagatagatttgataagttttcaaaaaatgctcaaaaagaagaaattcagcatgtacatttgagacaagaagatagtatttgggaagatgaagaaggatatggctatgctcagtggcactgtaccagtgacagttatttagtttattcttactttaagtataaaaatgatcattattattatcttatagagttttttggtgaatctgctcattctttatatgaaaaaaagactgagaaatttattcaatgtgcaaaagattttagattcaagaaattaaaagaattagagaataataacgataaactaaggtaa

SEQ ID NO: 66249 - DNA, 3555 bp, Acinetobacter baumannii
atgttcaaaacaaatatacacgattttttgttaaatctaggctacacaactaacaatttaccgtttcagtttgtaccagagaagcaatatcgctttcctagtatggggaaaagtgccaaaaaccgtgcagcgtcaattgttttgaaagccaatggcacgtatttaatttatgaccattcatgcggtgcgagctatgtcttcaatgctgaacggacttcagacaaaagcaagcaagatccagccgagcttgaaaagctacatattgaattagaaaagcagcgtaaagctgaaaaacaaaagaaaataattcaattccaaatcaaagcaagtgaagctcaacagatatggaataaagccaaaccgtgctcggcgcatccctatatggcattggctggtatcaagccgataaatgcaaggactctatcaatcgttaagacgtcagatggtcagacgttcattaatccgctcattattccgttatttgatgttcgtacgcatgaacttataaaccttcaattcatcacagccgatggaacaaaacgcccgctatctggtgctcagagcaaaaactattattttgtgattgaaggtacagagccaaccatatttgttgaaggctacaaagatgcttgcaatgtgttccacgcaactggtagacgagttatagcatgtatttcggctgggaaattcaaagaagtttatcccgtacttggaaagctttgcgatgtaatcattgctgataatgacaatattctgaaagcagatccggacgataaaacccgcaaagtcgtattgtctgagcaagttgtaaagggtcgtggtactggtcacagagtagcgtatgaactgaaagcgaagttctatcttgcacctaaattgggttctgatgctggcagtatgacgcatgaagaaattagaaatttactgcaacaaaaactgacttcagacattccagcttatgatgtttggacgcagttaaaagacgagccttgcgctattgaaacaaaacttttgaccgatgctttgagcaccgaagataatagccataaatgcgctgtattagcttatcagtacatcatgcgcaacttggtgcatgttccatataagaaaaatttaatcgaacttcgaaacgaaatagaaccgttctgtgtgcatcgtgttcatcctgtcactttagacaatattattctctatgctcacaacagaattgagttcatgcagacgcttggtttggatgctgtcactattcgggaccgaaaaaatcacaacttgattaaattggattctttggaccatttcagcccgaactataaaggtgtgtatttggtgaaagcgccaacaggatcaggaaaaacgcaaaaagtaggacgtccgttccgcgattggtgcggtcagaatgggcatccatttttaaccattgcacatttgcgaagcctaatccgtgaaatggcgtcacgcttggacacggcacattatgaggatgagaaaaaaagcatcattgaagcgcgcaaaattggtttggatgctgctttaagtcaatccatcggatctctggctgtatgcctgccaagtctagccaatcagctatttaagcctttcataaaggactgtcagcacatttttattgatgagatcagccaattaattgaaaccttcaacagcgacaagttattcaataaaaccgacattgaatacgtttataacttgctgaaggtcatcattaaaaatgcagagtgcatcattgttgcagatgccaacattaactcaaaaacattggattttatcgagtcgtgccgaccaaacgagcaattcactatcgttgaagtagaacccaaagacgaaagtaagacagtgtacctgtataacagttttgctgaattacagagttttatgctgcaacgtgtcatggtcgaaaatcaaaatttatggattacgtgcgattccaaaagtcatgtgcaggcacttcacgccattctcagagatttggatgttaaaagcattgcgattgtcggaaatgaaaacattaaaaaagaaacagcggaatttcttagcgatcctgaaaccgagtcactaaaatatcaggttgtaatctctacaagtgcgatcgcttctggtgtatccattcagcatgagcaattcattcacgacaatggaaaagggtattttgactgcgttgttggattttttactgggtcgagtattcaaccgactgacgcatatcaaatgatcggccgtgtgcgttacgctactgacttccacatttttgccgatcaaagcaaacgctatactatgaatgtgttggacattctacaagggaaacagcaagcgagtattctggaagggaaaaaagcaaaaatcacggagttttcactatttaaaactgaacttgaaaatatccgtgaaacccgtcgttctaatttcgcaaataacttgatatggatacttgaaagcaagctattcaacattaagcgagtgcaaaaattcgatgcttcagaacatactgaattttttaaacatactaaaaaagcagtcaaagaagccaagcgagagctgatcaaaactgcatacaagatcaatgatgaaactgcatccagacttcagcgcaaagagtttttatctgaagctgaagccaacgcgctgcaagcatacaaaatgcggtctaagctcggtcttgattacgttacagaattaactgatgaacactttgatattgatataggtcaattgatacgattcagtgcttttatgggtcgatataagccaagtaacgataagagtaaggatttagcgattagacgctaccatgaggcgatggggaaagcatacaagctggcatttgatggcgtggagctacaacccaatgcggtgtttactgaaacaagtgcgaaggcactgcttcaacagattgcaaaatacaaacttgtacttgcgtcgattggtgcaattccgactcgttttggtgtgcagtcgtggaaaccttccgaatatgcagtgcgagatttgaacgaagttttgaagcatataggagttaaatccaaatatgttagaaatccattcaagccgcgtttgaaaagaaaattaagtgttgagatgcccaataatctatatataagaatagagccatctcaacagataatggatgaatacgcttataaaattgatcctgataattatttgctgatgcagcaactctgcgagtctgtcttgaagtcagcgaccaaacaggttgagcatgaaaacgtgcagcaacttgctgaagctgttaaacgtcctgatttcgtttcatcggatgatgtaaagattgatattcagtcagtaacactggttactcatgcaactgagcagcagcttgcgatccagccaagcaatgatgtcgtattcattgatgtgatgaaagaactgatgcgctcggacttaactcttgctgatttttatcgcttgaaagattacgcagagtatttaccgaaactgcacgtttctgctgacagtgctcaacaggtatcagagttggatttaatcaattcaatgatcagtagtagggcgtcgattttatag

SEQ ID NO: 66250 - DNA, 948 bp, Acinetobacter baumannii
atgaaaactgaactagtagttaaagataatgctcttattaatgcttcttataatttagagcttgcagaacaaagactaattttactttccattgtaaaagctcgggaaacagggcgagggattacttctgacagtcgtttagaggttcatgctagtgactatatgaagcagtttaacgtggagaaaagtgcagcttatgaagtattaaagagcgcatcagaaagtctctttaatcgttacttttcctataaggaacaaagacatgatggaacggaatttgtggttaaatcacgttgggtcagtcgtgtagcatatgctcccaatgtagctatattggaagtaacttttgcaccagatgttgtgccattaattactcgattagagcagcatttcactagctaccaactaaagcaagtttctcaacttacaagtaaatacgctattagattatatgagatgctgattgcatggcgtaatgtaggaaaatgttcttttgagctcatcaatttgagagatagcttagggattgcatctgatgagtataagcaaatggggcatttcaaaagtcgtgttctagacgcatcaattgctcaaattaatgagtacacagacatcaaagtgacttatgaacaacagaagaatggtcgaactattagtggattcaccttcaagttaaagcctaaacaagtacaacaagaaattaccatcctagatacaaaagcatcgttaattccttctgatctgactccaaaccaacgtgttacttttgctagtaaattatcaaaactccaagaattaggaggaaaagcagaacctggtgaggaagtagaggcatttgcaaaacgaattgagttatggctagaggatgaaaaaaaattgaagatgcttactccatttctctatcaagtaggatttaaaaaagctaaaccaaagaaagtatctcagtag

SEQ ID NO: 66251 - DNA, 237 bp, Acinetobacter baumannii
atgattaagaaaagagaattggcaaaaccttctcctgacatggaagccttcatcaatggtgctaatgaggagactaatcaaaaactagatccgaaagcacctagaaaatttaagacgcatacgattccaatgaacgaatatgagtatcagctattggctgagttagctgaaaaatatggtcaaacccataatggaattatcagatttgctctgaagaaacttagtgaagaaaattaa

SEQ ID NO: 66252 - DNA, 204 bp, Acinetobacter baumannii
atgaacctagaaattattttggtcggcattattgtgggtatcgctaattttgcttcacgcttcggaccatttttcgtaatacaaaaactacagggcaaccaacaaagacgcggctcaatctggttaaaaatcgctttaggaagtattggtatatctgctgtctcttatacacatctgacgctgccgacgatactccttgtgtag

SEQ ID NO: 66253 - DNA, 957 bp, Acinetobacter baumannii; identical to SEQ ID NO: 56988

SEQ ID NO: 66254 - DNA, 714 bp, Acinetobacter baumannii
atgtatggtcagagaaaaagaaaaataaagcaatataccgaattatttaataaaagtattgaagaggggtattacccatttagtgagaaaaataataatattaatatggaggaggtaactaatgaaattagaaataaaatagaattagcttctacagaaagctattttaaagaatttaaagataaagtaagagttgaagccatagttgatttttttatacaagaagctaagggcatagaaacaagagtaaaaggagaaatcaacaggttgtctaaaagtgctattattaatttgtcactaggaatgatgcttagtattggagggatattgtatctaggaaattttgttgtaaatgtacaaaattttggtagtattgaagaaatgattataaatacttttcctaaagccatttttgttttacttatagaagtttttgcgtattttttcttgaaattgtataaacaaagcttagatgatattaaatattatcaaaatgagttgactaatattgagtctaaaaatttagcagttcaaattgctaaacaatctaacaatcataaattaattactatatgtattgaaaaactcttaggtacagaaagaaactttattttagaaaaagaccaatcaacaatagaaatagaaaaagagcgtatcagttctaacaataccaataataccttacaggtactgaaagatattttaaaaaaataa

SEQ ID NO: 66255 - DNA, 255 bp, Acinetobacter baumannii
atggtcagaggcagcggtatacgagatattgctgaagttgagcgcatcagtatcggtaaagttttacgtactttaactgaatcaacctatgaaattcagcctcagcaaagtcattatgaatctctcgaagtagatgagttctggaattttgttggaaataaaaagaataaacaatggcttatttacgcctatcatcgagaaacaggtgaaattgttgcttatgtttggggtaaacgagatttagctacagtctaa

SEQ ID NO: 66256 - DNA, 369 bp, Acinetobacter baumannii
atgggcttacgtgacgaaattcaggcagatattgctgaagcatttaatgatgatttagcggacgccgttcatacctttacttgtgaacggatctcaaaaaccaattgggatcctaaaactgaaacttctgttgaggttaaggaaaactattctggctgtggtgttctgtttggctcatatagccaatatgagattcagacccttggagtactggccacggataaaaaggcgaccgtgcttcaaaatgaagtgtccatgacacctaaaattgatgatgaatggctaacagctttaggctcatttcgagttatccatattcaacaagatccagccagtacaatctggaaatgtcagcttcgaaaagtgtag

SEQ ID NO: 66257 - DNA, 660 bp, Acinetobacter baumannii
gtggaacaaccaagcacaattcatggaaatacattcaaattaggtaacgatactagcgttggtttagtgcttaaattccctagtaaaaattttttactacctgaaatttatggacagactagtaaaaattctttaccactgctagttaaaaattttaactacactagtaaaaattttttaccgctactagtaaaaatttttaacacacaaagtatcactatcaaaaacaactctcaaagtaataaaaaaataaataaaaaaagagagtctgtttctgaaaaacctaaaacagaaaaaccaaatgaatttaatccacgttcagttgaactacctgcatgtgtagatccagagctgtggaacaattttgttgatatgcgtatcagcatcaaaaaaccactttctgaaaacgcagtaaagctaatccttaaaaaacttatctcgtttggacctttggctaaccaatcactggaaaactcaattatcggaaattatcagggtgtatttgagcctcgccaaaatcaaattcaggaaaacccacaatctcataacgttcctgaagaaccgggttatttcactcaaatgtacgctgagagcaaccgttcaaacgtgattgacgttaccctggccagcaagattttggaggctattaatcatgaatga

SEQ ID NO: 66258 - DNA, 318 bp, Acinetobacter baumannii
atgacaaaaccaaaatatacccctgaaatccgagatagagcggttcaattattgattgaatccgaaaaagattatccatcgaattgggctgcaatcactgctattgctcccaagataggttgtactcctgaaacactgcgtgtttggtatttaaaacatctcgatcaacaaaatcctatcaaagtacaacaggcatcagatcaagaaaaaatgaagcagatggaacgtgaaatcaaagaattaaagcgtgccaatgaaattctacgtaaagcagctgcttttttcgcccaggcggagctcgaccgcccacacaaataa

SEQ ID NO: 66259 - DNA, 1587 bp, Acinetobacter baumannii
atgaaatctaatcaatggttgactctcggctcgcatcttattttaaaaaaatggtgtgatgcatctgaccgtaatttccaaaaacagtttaatgctttagagactacgcaacgtcaaattttgcattcgattttacagacctctactttggccaaagataaacaggttcaaaactatgagcagtttgtaaaagcttttcctgcaactcgctatagcgcttggcgagaagacattcagcgctaccgtgaacaaaagctttcactctctagcagtaaactggttcgtttccagccgaccagtggttcgagtgaacaaatcaagtttattccatataccaagttgtttttagatgaacttgaccatgcgattgcaccgtggatggcaagtttataccgtaagtgtccagagcttagctctggtacacactactggtcggtgtcgtggttgcctgaaagtcagcgtgaagttttaaaagataaaaatttaaatgatgacagtgcgctacttggtataggtaagcgaattttatccaagtttacccaagcggttccaagtaacgttgcatttgcggccaatgctgatgatgcactgtttgccaccatttgttatttggtcgcaaaccgtaacttagctatgatgtcggtatggagtccaacttttgcgctgcaattacttgaacgtttggagtctatgcaacaagacgtggttgaggttttgcaaagtggtaaatgggacagtcgtcaggcttccttaaaagaagtcactgcaccgcatagccctgaaagtgctcaagccttaattgcaagttcaaacggcgaacagatcgactttaaaaaactttggccaaagttaagtctagtatcgagttgggatactgcaggttcaaaagcgtgggccgaaaaattaaaagagaaattgcccaatgttcagtttgaaggcaaaggactatgggcgacggaaggtgtagtgaccattccctacaacgaccaatacccattggcttaccaaagtcacttctatgaatttgaatatttagaaggtgagaaacaaggtcaaatcgttccttcatggcaacttaaacaaggtgacgtggtgagcccactcattacttcgggtaatggcttactgcgttactgtctagatgactgcttaaaagtgactggctttttagagcaaattccgtgttttgagttccaaggccgtcgttttggtgtagatctggttggtgagaaactcgcacctgaaactgctcaacagttgttgtctcagttaaacgaaacggaatcgaaagcgatttctttactcgcaattgatacgcagcaacaggttaaaccattttattgcgtgctttttgaaggtgaaattcatcacagcattagcaatgaatatatcgacagtatcttacgtcaaaacttccattatgaacttgcacgaaacttggggcagctcgatcagcctcaaattcgccaagccaataatggctggaatgcgtacaagaaactagtcatgtttgatggcattatcgaaggcaatatcaagcctgagccactcaaaaaagtcaccctgaatagtttggaacaactatga

SEQ ID NO: 66260 - DNA, 186 bp, Acinetobacter baumannii; identical to SEQ ID NO: 54439

SEQ ID NO: 66261 - DNA, 678 bp, Acinetobacter baumannii
atgaagttatataaatttccaccccaggctaaagtggatcggttaattccgaaaaataagttttatgaacaaggaaaagccaataccaagatcgaacagctatttgttgatcaagtggaaaatatacggtgggcttacaagttggcttcatctacaattcacctccaagatcaggaagatttgaaggaaattcaaatctttcgagtgaaaagtcgggttaaagatttagatgtgtcaattctatctttcattgataagctcattctcactccaattatttttgaagttatttatcaagataaggtgaaagttgttgcaacctataagcgtttgaatcaagcagataaaactaaagctgtgataggccaatattatgcttctgattggttggaagaggcagatcgtgttgagttgcctttttacttaaagctggctgatctatatgaacatttcatcgcacagatattgccgattgaatcaagtaaagatcaggaaaacgatgatgtatctgtttcaattgaacttaaattgcaaaaagctcaacagcttgaaagcttgcaaaagcagcttgataagctgaaatccaagttgagaactgaaaaacagtttaatcgtaagattgaactcaataagcatattcatgcacttgaatctgatctaaacaaattagtgaattaa

SEQ ID NO: 66262 - DNA, 201 bp, Acinetobacter baumannii
atgttgaatgtgatgtatgcaaccaatcaacgaaactggggtttggaactttatccggcgcattgggggtatggctccaagcatgatggtgaaaaatgtttcttttatgccctggcgacattgaaaaaagagcgagtcgataagtttatgtttgatgaaaattttgacccttcaaccctagatgggtatgggttgaagtga

SEQ ID NO: 66263 - DNA, 6306 bp, Acinetobacter baumannii
atgggaaatgcagatttagttagagcaagtagagatggtgattattttcattatttatgggctgctagaaaagctcttcttcttttaaatccactatcaggattagacgttctaactattgaaggtcccagtaagtctgagtttcaaaaagaaattgaggagggtgaagaaattgtagatgtaggtgaatactatggatcaaacaagttttcagaagcctctaagattatttactctcaacttaaacatactactgtacacgaagatgatagttttaagccaagtgaactagagaaaactattagagggttttcaaaaagatatcgcaaatttttaacacttgaaaataaaaaagatgtcctggaaaaattagaatttcatttcatttctaatagatcaattagtgaagatttttacgaatcaattaaacaattgcaagaaactggacaagtcactaatcagcctaatcttaaaaagttagaacaatataccactctgaaaaaaggagatttagaagaatactctgatcttgaaaatggagttttagaacaaatttccacacttaaaggaaaagatttagcagattttattaagctggtaaaattcccatcacaagagcctaactatatagcacagagggagattcttgctcaagatattgcctactatctaccaggagatgatgttaatgctcctaatgaattaaaagaactaatccatcgcaaagcacttagtgaaaacaaagacacacctgaaattacacgatacgatgtactgcgggcacttaaaacaaatcctgatgatttattccctgtaaaaaacttaatcaaacagttagaaaataccgtagatagacctatcgtaagaacactaatagatactattaatgaatcatatagtcaaaaatttattattcaggctgaaggtggtgtaggtaaatcaatattaagtacacaaatacacaattatatcccttctggatcattgtcgattgtctatgactgctttggtaatggtgactacagacaatcttcatccgctagacatacacataaaatcgcattagttcaaattgcaaacgagttagctggattaggcttatgtcatccactcataccaacaaccaatgccagccctagcgagtatatgaaggcatttttgtttagattaaggcagatttctgaaaggttctctagtgaaaataagcagctattcatagttattgatgctgctgataattcccaaatggcagcagatgaatttgatgatggtcgttctttcataactgacctattgcaggaaacgttatccaagaatattaaaataattgctttagcgcgaccttatagagttgaactgttaatgcctaagcaagatattgaaattcttactttagaaggctttagtgaaaatgagacaaaacaacacctattaaactactattctgatgtttcaacacaagatgcaatggaatttcatcgacttactagtgggaatcctcgagttcaaagcattgctttagaacaaaatttaactttgcatgagattctttcatttttcggtggaacgcctaaaagcgtagaggacacaattaaggatttgttgaataaggcaatttccacttttaaagaacaaaactattccgaatcagcagaaattgatttactccttacttcaattgctattttacgtccattaattcccctgcatattttatctgacttaactaatatcagagctgatcaaataagaagtattatttctgatataggtggccatccaattcgtcttagtgacaataatattcaatttgttgatgagccaactgaatcttggttccgtgaaatttataagccaaaacatactagcttgctgaatgattttattcagaagctaaaacctctcgctgtaaagtctgtatatgccgcttctgtactaccccaaatcttgatggatgcaggtaactttgaggagttagttgagttatctttaaattctgaaatgttaccaacgaattccatcttagaaaaaagaaaggttgaattacaacgcctgcaatttgcaattaaagccggcctaaaacttggtaaatatacagaggttgctaaattatcattaaaagctggtggagaggttgccgcagaagttaggcaacatcaattacttgaagaaaatatagacctagttggtactacttttagtgacaatcaaattttagaattaatttctgaaaaagtattcaaaggtggttcatggcatggctcgaaatacattactgaggctaaacttctctcatatcgagacgattttcatggagaatcacgtagcaagcttcgtatagctaatgaatggttaattagttggttcaaacttccagaagatcaaaaacataatcaagaaatagaatataaagagattagtgattattttattaccttaattactttagagggagttgactatgcgattaattggcttcgaagatggcgtccaaaaagtataagttatgatgtagccaagttagcgacaaaagaattaatcagacatagaaaatttgagattatacagacgatattagataaatcaggtaataacatatttttaactttaggtgttatagagatacttaaattaaatcattgtgttattcattctgacaatttttcaagagttttaaaattattgagctatgacaaagtaaaacctggtattggtctaaccccaattctttgctttttagaagtgggttttaaacaacaactttgttcatctgccgaagcatataaaattttatcaaaatatctgcctattgaaataccatatgagattagagatcgttttgggcactcagatagagtaagttatatgaaagcttatgctttacataaagcatgggataataagacattagaactagttgatttagtagctgacagattaaaagatgaatttttaaaggactcggcttatagctcatcagaagaaattactacgctaaaacgagatgtagcagcagttttaccatggtacaaattgtatgctcggtcaagcacagagaagatttgcactaaggaacttgatcaactaattgaacaagcgaaatcagactccaagaaagctcaaggatactcttatcgggaatatggcaatcatctagaaaatgaaattgcaaaagtttggtttgatattttaattttaaataatcatcttaaccaagaaacatatccagagatagaaagtcattttcgggaaaaaatttatcccaatacacgtaatcatttcacgcttattttggctttacaagaaccatgtgaattagaagagtactgctatcaaaatatagaaaaaaacttaaaagctcttgagaatagtgatgatcatgcagaaacattggtgaatgactatatgtctattgctcaatcaattttccctctagatcaagaagaagctactgcaatattaaataaagcaattgaggtaagtagtaaactgggcgaagaaaatctacaacgatggaatgcattactttgctatggcgtaagagctggacaggagcaaaataatagaaaaccacagctatgctatcgttttagtcaatgtgctgaattaacttataaatatgttcatagagataaacattttccatgggattatacagttgatgcaatttatgatttagatcctaattcagcatttgctatttctagccgttggcgtgatcgtagatttggagatgaagatagaatattgggcaatttgctggacaagttacttaaagaacaacttttatcaccattgataccattggcttttaaagcgatgggagctatatatgacttagataatctattaagctctattaaatcattagctttaactgatgaactaaaaagaaaggttttacaaagcttctatatttattctgttgtacctaatccatcagaaaagcatattagtcgccttagagatttggtcgaggtatttcatataacagatcaaacaatccaagattttttcttagccctgagtaattcagaagtttatattcaagtagaagaagcacctcactcttcgacttacgaccaagaaaagtttgattgggatgtgttttttgaaaattatatagactcaaatcgaagtgtagactttgattcagcttataatgattttcagaaattggaaaataggtattggattaaaaaagctttttatgaacagctttttcaaaaaataagtccgtcacaagcaacatcattgatcaattggtggttcgataatcctagaaatgggatgtatgacttaaatgatcttttaaaagctataccatctcgttttaaaagtaggatgtcatttttagaagttttagatccgagagtaaaacaatttctgaaaacacattatgctgatttctatatagatacttacggaagtaatctgaaattacatgttttaagtgagttaacaggaaaacctaaaactgattatattcaatctctcttagatggagtaagcgaaagctctattaccttagaaagtgagaacttattcaaaatagctcatttgcttacacctatgattacaccaaatcaatcctgtgaggttttagaatatggtctaggcttactggaaggtgatttggggtcagatatcgctgatgggcaatggcgtgaggaattagcaccatcagagaatatactagaatctatctcaggttatgtttggtctagcctagcatctcctttcaatactgttaaatggcaagcggcacatactgttaagttactttgcgattttgagcaaaaagaattgttatctaatttaattaactttatcagtgttaaaagttacctaagtttttatgatcacaaatttgaattttatcaatactcggctactcaatggttgctgaatgctttatcaaaagtgtcatatagccctaataacttcttagctgaatatgttgaaacctttaagcagctagcagatccaaatcgaccgcatttgatgattagactactcgcttcaaaaattcttctaaatctatttaatttaaaacttataatcttaaacgaagaagaaattaaagcttatcagagcgtaggtaaatctaattttagtaaagtacagcgagatgctattgatcttttgaaatatacaaatatgaatcaagatgaaattgattcattcggtattgattttggtccttattggcttgatccattaggttcaatgtttgggttacaacctacacatatatactttgaaactacccaaacattaaaaaatgaaattggatttacagataagcgtaaagccaatgatgcacgtcataaattggaaatttatgattggaagcaaacgagtcatgatcatggttcaagtcctaaagttgaagatttagatttctatttgtcttaccatgcaatgatgatcacggcagataaactacttcaaacgcgtccattacttgaaagtgaatattcatggagagagtttgatgattggattaaacgacatgatttatcctctctcgaaccgtattggttaagtgattatagagatccatctcctcgaataacgacagaatggcccaaagaagatagaaaacaatctttgaactggtcttatagttgttcttccgttgattataatgatgctatttatcacagcgatttagaactttgtttatggggtgtatggtctgaagtacataactatgatcaagcaaaagacattcgtatccgctcaagtttagtgaatccaaaaacatctgaggctctttggagaagtttacaaagtgccgagtcaagctactcttatcatttacctagtgctaataatgaacagtttgaaattgatgaagataatttcaaattaaaaggatggattactgagatagaaattgatctatcaaattttgatgatgatttatggggggcttcattaagatatgagatgacccaaccatctaaagagattgttgctttaatgaacctatcctctgattcattaggaaaaaattggtttcatgaaaatgaaaaagttatgaatcttaaaatttgggggcagtttaaaaatgaacactatgagtactccaatggttataagctaaaagtagatagaaaatttattcttgaacttcttgagaaacttgatatggatatgattatttctgtagatattgatcgtagatataaatatggtagttatcaatcaaaacaagattcaaagagactagatgagtatttaccaagcagtaaaagaatttatttaatgaaaaagaatggagatatgtatgtctactga

SEQ ID NO: 66264 - DNA, 678 bp, Acinetobacter baumannii
atgtctactgaaaatctgatcggactagggaaaagactagtagaagaatttaagttagaggataaaaccgatacattatctcaatggatgcttcactatttagcagaattatttgaacgatataacgtacctatttctcctgaagaaaagcgtatagcagctttagaaataaaagatactattttcaagttatgggattttcgacatcaacagtcccattctcagagtagtttcaaaaatacagagtctttaatttcaacattaaagaaattgaatttagataatgatgatgttttctactcaggattaagggattttagaaatgcagaaaatactttagatcagagtaatcctgactattggtacaggtatgcactaaagttcgataaagcatcacgtttcttgataagaaattgtatactcaaaggttatgctatcactgaagctgataataaagaaattgctgatcttattaaagagtttgatacattagacttatatgagaatttattaagtcagttttataatgatcaatctagcgaagataaagaaattagaaatattaaaaataacatttctaaaatagaggagttgatggatgctttagctttgttaaaaaatgattatgaggaaaagctaaaattctatcctgaagctgtccaagttagacaagaatag

SEQ ID NO: 66265 - DNA, 414 bp, Acinetobacter baumannii
atgaagaagcctacatacaaaatctaccgcacaatcaattggcctgcatataaccgagctctcattaaccgtgggaatattgccatttggttcgatccaaaaacacaatggtatgcagaacctcaaggaaaacaaggtcgaagtcaaacctactccgacatagcgattcaatgctgtttgatgatcaaatctctctttagactcaatttacgcatggttactggttttgttcagagcttaattaaactttgcggattagattggacagcgccagactatacgacgctttgtagaagacaaaagtatattgatattcaaattagctaccagaaaagtcctgatgggttacactgcatattcctatttacttggacacagaaagtcaatagaagttggacacctattcttgtctaa

SEQ ID NO: 66266 - DNA, 753 bp, Acinetobacter baumannii
atgccttaccctctatttgaacttaagctgctagctgctcttgatcatgctcaatttgaagaggaaatttgggcatttgaaattgatggagacatttctacattattactgattgactatgcattagaacaattccatcaaaaaaaagttcaagctgatgaagtctatcgggttcctgaacaaaaaattaagaaaattggtgaacaaaatttaggtctagaaaaaaatgagtcatatacatttgccgagctcttacaattcttaatttttactcaggcaaatgatgttaaagatgccttaagcaatatgctgtttggttctattgaacaaatacaattgatcttgtctaaaagagcagaagattatcagttggctttaagagcacctaatcaattaaaaaatctatttttattggtaaaacacatttatagctatccagccgagctgaaaaaacttttctatattagaacattttcttttaaaaataaagtatatcaaccgattacgcctttgcttgctcatccggtactcaattcggttttatatatctcacatacctttagacagatttatatcacttattccgaacataaccggagcattggttttttctcttttctggatgatattcaccgtctggagcatttggttccttactaccattattttcaagaaaagcatgtcgaggcaaaaaaatattcttctcaaacaggtattatcaatattcttggagatacctatgatgtgtgctga

SEQ ID NO: 66267 - DNA, 1455 bp, Acinetobacter baumannii
atgattaataaattgaagaaaattatcagctatgctaagccatataaaccaagcccaattgagaaagaatttactcaactcaataagcaatattgggaaaatgaaaaaataactgtggcagagaatagttattgcttaatagaaggtcagattacttgtccagcaagtattatggataaagcaagaataggtaaagcaatacaagaggttacaggagcaaagcctgttgtatttttaagaggtttttatgaagaaggtaatgatgtagctcatatttataaatcctttaatatcaatgatttttatatgtggtggaaaggttttttaaatcctacaatcttcattcctgccttattcgcaacattaaaaacagttattttatataaagatggaagtaaattagctaatcttacacataagggtgtggagataggtgagcttatctatgatactcttattagatttaagccaaatacttatactattaatcaaatcaaatttacgcattatagattaatatttagagcattcttgaccttttataataatgaacacttgattagaaaatataaacctaagtatttagttacgagtcataatgtatatgctgaatttggaatgctgcctagacagttaaagaaagtaaataatagtaatgtgattttcttaaaagatatttatgcatataaatgctacaattcatctgtaaatataaaagaacacttccttaaaccttcgatagagctttttaatcaaaaattgtcatcacctgaatacttggaagaagctagagcttatgttgaaaatagatttaagggtaatattgaccaaatagatgttaaaaatgcatttttaaataaaaaaacttataacttagatgagttaaaagagatatttccaaaagtagataagaacaaaaaagtttttgttaaagctcaccctagttcatatatgtggaacgaaaagggagcagtagaagaactattagaaaagtatcaattagataatatctatattttaccaaataatttaaatacaaattcaattattaattttgcagattatattgtgacagcaaaagggacagctggtttagaatttagctgtcttggtataccggcgataacagctggtaaaggctattattatggttttggtattactgaggaaccagatactgtagaggaatactatagtatattagataatattactaaaattgataggctaaatagtgaaaccataaatagagcattagtattgctttatatggtggcacaaagtagacgtcattctaaaattttaccaaaaagtcatattatgcctggcgaaatttattcagaagtgtacttgggtaaatatcaggaaataataaataactttaaaaatggagaattattaaaagatgaattctatgatgaagtaaaaaaagatatggtaaatagccatgtttaa

SEQ ID NO: 66268 - DNA, 225 bp, Acinetobacter baumannii
atgattttgtatagaaataatattgtatttggggtttttctaagtattgtttttttgagtttaatatttttaataaatcttaaacttgattttgtaggatttacattttttataaacgttctttcttgtgtattttttttaactatctcgttaaaaaagaatattagtaccttattgtttttttatatctttaatttgttatttctgtctcttatacacatctga

SEQ ID NO: 66269 - DNA, 372 bp, Acinetobacter baumannii
atggattggcctaaagaaatagcaagaatggcttttgtaaaaaatgctttgcatgaagctgatactagaaaaatttggccttattacttaccggagttaggggcaacaatagataacattgtaaaaactgaagttatattaggtgaagaaattgacaaatcttatagggaatttcttttatatgcgaatggctggaaaggtttttatcaatatgtagatttgtttggcttgtcagatttaataggtggaaaaaatatgcaatatgctttagatctattagatatgattgatgaaaaatattttttaaaaaagggtttttgtagaaatgattggctttgttgcataaagcctttgaaggtaaagttttcctaa

SEQ ID NO: 66270 - DNA, 459 bp, Acinetobacter baumannii
ttgagtacaaaagcccaacgggaaattgcccataaattaaaagtgtttgctcatgctgaacaaaatggcaatgttgcattgacttgtcgatattttggtatttcacgagatactttttatcgttggaagaagaattataaatccaaaggagagataggattagtcaacagtaagccatgcccacagaaccctaaattacgcacccctgctgagatcgaagagaagattattcatttacgtcaacactatcattttggacagctacggatcagttggtatttatggcgttatcaccaaattaagatttcagcagctggcgtataccatgttttaaaacggcatggcatgaatcggttaccccaaaatcagcgtaaacgttctattcctactcctcaacgttatgaaaaacaagtaccagggcatcatgtgcaagttgatgtaaagtttctttttttttaa

SEQ ID NO: 66271 - DNA, 201 bp, Acinetobacter baumannii
atggtaactataagaaaaacaaaacaaaatagagctaaaaacacatttgaatctatagtcagtgcaggatttatatctgttatgaaaaacggcttggaccataccactgtacttaaagtgtgtgagatagcaggcgtaggatcgggaagcttttatgaatatttcaaaaataaagaagcactttttattgagatgcagtag

SEQ ID NO: 66272 - DNA, 192 bp, Acinetobacter baumannii
atgacagaatttaaaaaaatcatgcttgaagttaaacagctccaaacagagctaaatcacttaggttgttgcacaaccaaaggcctaacagaagaagagatcgctcacttagatgagcgattttttttggccatagcaaagcaatataaattaattgcacgtctcaacaataaaccagaaggcttcttataa

SEQ ID NO: 66273 - DNA, 225 bp, Acinetobacter baumannii
atgaatactatggattcgccttactttaattttgaaaagtttgcaaaaaggatatgtgcagaaaactttcctagggcaataagtcatctggaagaaactgttttaaactctgcagctcaagtagatgacaaaaaagtagatttcaaaaatcaaatgaagtgtgagggtgttttgaacacagatgccttcattattgatccaagagaaatatatgacagaatttaa

SEQ ID NO: 66274 - DNA, 186 bp, Acinetobacter baumannii
atgaccaaaacagaagcattggccttgttagagtgcggtgttactgagttagccaacaaattaagtattagtactcaagcaattagccagtggcctgaagaaaaaattcctttagcacgcgaatatcaaattcgagatttagccgaaggcaaagagccgttaaaaaacaaagttgctgttgactaa

SEQ ID NO: 66275 - DNA, 1197 bp, Acinetobacter baumannii
atgtctggtggagaaacagctcgtattgctgaaattgcagaacgattatctaatgaaatattctctttttttaaatggaaaacgttgccttctggtttaatgaaccaaaactttaattgcttaaaaaaagaggaacatgttgtattaaaagacaagcaaatattaagcttgagagcagaatatgaacaaattttaattacagcagagaaaaaaggagctctagaagaagagttaaagcaaataaaagaaaaacaagatattatattaaaagagctagctacaaagaaaaaagaagaactttcaaaaacacatccagtagatgcagtatttttctatactgatccctatacgaaagagaaagtttattttaactgcgatctaaaaagttataaacaaagctcaattacagctacttctattagatcaacattatcatccttatctcaaacaattcattgtgcaagagactcagaagaatggaatactaggtataattgtcagtttagtggtgaagttagaggattattattcttactaaatcatgatggaagatatacatcagatttaagagaattatttaagaaaaaagaagattcagaagaacaaagagtggttgtcgacaatttaaaaatccaaccaaatcaagtaattcatatcattgatccatctactatctgttatttggatactataaaaaaagatatagcatacctcacttcttgcaataagttccctcatccgcgctctgactggttttttttctatccagatctgaaaattagtagaccaattcctgacacatcaaatagcccagcaactattgaaatgatgcttggcccttttttaattatcaaatataaagagtttgaaaggaacgatggggatagcagagagaaagaaggttttttaatttattacaaactaccaggtgcaagtaaagaagaattcctattctttttagatacattgtcaagttatcaaatttttaagcataacattaatattaacattagaatgattaacaataatcccgacccgcaatctgaagaaaattttaataatgctattatgcattatattgaaaattggcaattaaatgaagaagcctcaagagtattcaaaaaaattgatttctcattggttgaaaacatttcaacaagatttctaactaaaccaattttataccgagagttataa

SEQ ID NO: 66276 - DNA, 1125 bp, Acinetobacter baumannii
atgagtaattctaaaaatattatttgccctgatgataaagatatttatacaactcttcaaagtagtaatattaataacagtattatggaagagttgtttttaaatcattttactttaacaagtaatcagggaaataaagaaaaaagagcgttaaggttttcacgctcaattctctcctacaacgattatatgactatcaaaagtgcgtttgataaagaaaaaagacgtaaagaaacaacaaaaggaattttgttaggaacgaatctgggattgtcagaagtccgtgatttattagatcaagaacaaaatgctttaaaagatttaaatcatacttcaaatataaaaattattccgcatggaaataaaataagcttaaagttagattatgtcgtttatgatttttcaaaaaatttatttaatggccaagaccacttatcaacagaaattattcttaatttcgaaaattctcaagtttttatagaatctaccaatgataaaattattgatagatggcaaagaaaaattgttgatattattgagaaaaatactgacaaaagttcatatgaagaaatagaaatttcattatttggtattcataatcaagaaaagaaacttaaattttattctgatttaatagagaatatattgggttttacatatgagaccgttgtggatgtatatgtaagcagaaagaaagaagatgaaagtccagaagaggatcaagaagataccccatctgaggacataaatcgatacataaaaaaagcatcctttaaaggatcaaggttattagactcagatactgttttacaacttctttcaaaacattatcatatttataggattatttggcagtcagttcattctgcaaggacaaatgagatatatcaatttgaggtaagatttaacaatcctgaagattgtactgattttgcttattctgttcatggtaaatttgtagatggagctaccaagatttctagtgtaacttttgaagaaactaaagcgataacttcaactatttttatgaaagctagagaacttatggatgaaatcaatacagaattagaaatacataatgatactagtgaagatcaatcttcagctgtaaataattccgagtga

SEQ ID NO: 66277 - DNA, 1314 bp, Acinetobacter baumannii
atgaagaaagatcaatcaaagcgtgcagcagcagctgcatttatgggtactacaatagaattttatgatttctatgtatatgccactgcagcagcgctgattctaggaactatattttttcctgaaaccgatccagtaacagggacgttagcatcattcgcgacacttgcagtgggtttcattgcaagaccaatggctggtgtaatttttggtcacttaggtgatcgattaggtcgaaaaaaaatgctgttattcactatggtacttatgggattagctaccacttgtattggtttaattccgagttaccaaagtataggtatttgggcacctattctccttattttctttagattcttacaaggaatttcagttggtggtgaatggggaggagcggtacttatggcaagtgagcatgccccaaaacataagaaaactttttttgcctcttttgcacaactaggtagtcctgcaggtttgattttatgtttactggtatttagagcagtaagtacattagacgaacaagaatttgcaagttggggatggagagttccattcttattaagttttcttttaatggcagtgggttttgttattcgctttggtattgaggaatcgcctgaatttactgaaagtaaagaaaaagcacagactttgaagcaacctgttaaagaattattgtcgaattatttgcctcatgttgtttttgcaggcctcacaatcacgattggtacagcgggtttctttttcacaaatacttttatgattacgtatgtcactcaatatttgggaataagtaagcaaacaattttagatgctttatttttagttacagtaattcaatttttgacaatgcctgtagccgcttggattgctgataaagttggtgcacaacgttttttaaccgttgctgctattttgtgtattttcgtcccttatcctatgtttatgttagtagaaacgaaaaatattattttaattacctgtggtattagtttagctgtagtaactctagctgcgttatatgcagtggcagcaggttttatggctaatatttttcctacgcaagttcgatattctggcatttcaatttcatatcaattcattgccgctattgctgccgggacaacgcctctcattggtactgtgttagctagcaattatgcaggacaatggatgcctctagcgattttctttagctttttatcatttttatcatttgttggtgtgattggcgtcaaaataattatgaataaaagttcaaaaaagttaattaatgatgattccatcgtcgttgaaaaatcaatctaa

SEQ ID NO: 66278 - DNA, 753 bp, Acinetobacter baumannii
atgaatcagatgagtaccattaattcaactgagtgggcagcacgttgtgaattagccgctttatatcgattaattgctttttataaaatgactgatttgattgatacacatatcagttatcggttagctcatgaacctaatcattttttaataaatcagtatggaattccatttgaaaaaatgaccgcatcgcatttagtaaaaatagatcatgatggcaatattgttgagacttatgatcaaggtaaacgagtaaatacagcagggttcgtaattcattcagcgatacaccgagcctcaccagatattaattgcgtaattcatacgcacactgcagatggtgttgctgtttcagcgcaaatacatggattgttaccgttatcacaacatgctttgaaattttatagacgcattggttatcacaattatgaaggaattgccttatctctagatgaacaaaaacgtttagttgaagatctaggacagcacagatgcatgatattgagaaatcatggcttattgtccacaggtgatactattccaagagcttttcatgaaatttattttttagagcgtgcttgtcaaattcaagttaaagcgctttcaagtactcagttaaattatgttgaaccacaagtttgtgaacatactgcacaacagtttaatcgggaagaagcagaacaaattattctagatgcttggcatgcagcactatctttaattgagcaacaaaaagctgagtactgttcatga

SEQ ID NO: 66279 - DNA, 924 bp, Acinetobacter baumannii
atgatagttatagcctcaacaaaaccttatgctgaaaaaatgttgattgatgcatttcagcaatatgctccatttgggagttattgcttagctggagatgtacagtccaaggatgcgactacagctgcttgttggtttcctgattttgatcaattaaatcaattacctcatttgaaattaattcattcaatgggggctggaattgagcatcttgatcttactaagattcaaccttctcatcagatatgccgtattgtagataaagatcataaatttgggatgttaagttatctcaaatggggagtcttatattatcaacgttactttgatcaatatttacaacaacaaaaaaaatgtctttggaaacaatttcctcaattaaccgaatccgccatccagattggagtaatgggacttggagaattaggagcatttgttgctgagaaattagcaaaagaaggatatcaggtttcaggatggtcaagatcaaaaaaaatattgagtgaagttcaatgtttttctggtatgggtgagtttgatacctttttaaaacaaagtcagatacttattaatctattaccactcacaaaagagacttgtggaattttatctaaagaaacttttgtaaaactgccccaaggtgctgcgattataaatagtgggcggggcgcacatcttcatattcaagatctaatcgattcaattaaatccaagcacattcgtggagctatccttgatgtgtttgaacatgagcctttaaaccatacaagcccattatggaaaattccagaaatagtgattacaccgcatattgcatcacatgctcctttagaaattgtagtcaaacaaatagtggaaaacgatcaacgaattaatcaaggtctacccctattgaattgtgtagatataacaagaggatattga

SEQ ID NO: 66280 - DNA, 1206 bp, Acinetobacter baumannii
atggacatggcaaaagttggagagacagaaaatggtggtaatactcgactagcgttaactgatcaggatgtggctggacgaaacttacttatcgaatgggcaagtgaattaaatttagttgtgaaatatgatgctattggcaatatgtttgtgcaaaaaagtgggattgatcaatctctgcaacctattgttatggggagccatttagatactcaacctaaagggggacgctttgatggtatatatggtgtgttagccggatttgaagtactccgatggttatgtgaaaccgagactcaaacttatcatcctattgaggttgcagtttggatgaatgaagagggggccagatttacacctgcaatgatgggatcagctgtattcacaggtaagttttctcttgaagaaactcttcagtctaaagacaagcaaggtattcgcgttggcgaagaattaatacgaactaaacaacaaggtgacttggatttacagcgagcttttgcagcttattacgaactgcatattgagcaaggacctattttagaaagtaatattaaacaaataggtgtagtaacaggcggtcaagctattatctggcttgatattgagactgaaggtaaagctgctcatgcaggtacaacgcctatgttgttacgtcaagatgccatgattggtactgctgaaatgataatagatttggagaagatggtacttcataaatttcctgaaggtttaattacatttggtgagatttctattccgaattcttcaagaaataccataccttcaaatattcagtggacgatagatttaagacatcctattgatgctgaaatgcaaaagatgaaggaagaagtattacaaattcttgaaggcttagcagctgatagaaatttaagtgttgatattaaagaacattggcatagcccagccatacagtttgacaaaaagtgtattcaaactgttttggattcagttgactcacttggatttagttatcaaaagattgtaagtggggcaggacatgatgctattaatttagcaaagcattgtcctactactatgatttttattccttgcgaaggaggactaagtcataacgaagcagaaaacattacatccttacaagctgaacaaggtgcaaatgtattgttgaatagcattttaaaatttgaccaacaattaaaactagcacaagtcagctaa

SEQ ID NO: 66281 - DNA, 1065 bp, Acinetobacter baumannii
atgaaattattttttcattcagaacaattaaagcatcgtcctgcaagttattattctagaggtaaaatgcgcgaacctcaggaaaaacctgaacgtatgtatgagcttttaaatacagttgaacgtttaaatttatctgtatttacagcgaaagattttggaacgaaaccattactcgaggttcatacactgggatatttggattttctacagaatgcttataaagaatggactgctttaccagaagattggggtgatgaagtactttctaatatctttgtacgtgaaaataatcgcgaaataggtattctcgctaaagccgcaaaatatttagctgatggtagtgctccaatagggaaagatacttggacatcagtttattggtctgcccaaacggcattatcatgtgctgaagctatagctaaagaaggcgaacaattggctattggattaactagacccgcgggtcatcatgcaagaaaagatggtgcaggcggtttctgttatgttaataatgctgccgtaattgctcagtatcttaaaaaatattattcacgtattgcgattattgataccgatatgcatcatgggcaaggcattcaagaaattttctatgatcgttcagatgtcctatatgtttcagtacacggcgatccaactaatttttatccagtagtggctgggttcgctgatgaatatggtgtaggtgagggttatggatacaataaaaactatccaatgcctcatggaagtagtgaaaatactttctttaagtttttagatgaagctattgacttcgttaagatttttcaacctgaagtagtcattcatgtaatgggctttgatgtttttgttgatgatccacaagcgaaatgtgcggtaagtacatctggttttcaaaatattgctgaaaaaattaaatcgattggagtaccaactattagtttaattgaagggggatactgtatcgaaaaattggatgaaaactttgaaagttttttaaaaggatttgatattcaatcttcttatactagaggagaaaaacaagaagttggcattatataa

SEQ ID NO: 66282 - DNA, 936 bp, Acinetobacter baumannii
atgagatcaagtatattgctggaaaagtgtaattggtccttgcttcgtatctttcgtgtgatagttcaagaaggaagcttgaataaagctgcaatcaaattatttttgactcagtcagcaattagtcaaagtttaaaaaaactagaagaacaaataggagaagtccttattattcgaactggaggtaagttttatctaacaccaataggagaaattgtatttgaagcaagtttgatgatttataatcaacttatggattatgaggaaaaattaaatacagaaaaaaatagtttatcaggaacaattaagcttttggttttaagtcgagtagaatcaaatcgttatgatcaactgctacatgattttcatcagaaatatccgttagttgattttcaggtggatgttttaaaaagtaaagaaattcaacaattattattacagaagattccagctcttggcattggaattacacaggcattccatcccaaattaaattatcatactttgataaaacagaaatatgctttgttttgtagtgataaacatccactttttcatgaaaatattcaatcaattgaagagattaaggggcacggttttatttcatttcaaagtgagcaattaaacaatcctttatcaaccttaagtgaactgagagaggaaattttaaagaataacaaactactagtaacaacaaataatattgatgaagtaatccgttttattcaaagtgggataggatttggtttactaccaagacatatgattgagaaaaggcacaattcaagcttgtttaaacagctccctccatttccttatgtttcaattattcctgtattacttacatggcataaagatagagaattatcattattagaacagtattttattaatgatttgagaagtattttctgcggtacgaatggtaaaaaataa

SEQ ID NO: 66283 - DNA, 585 bp, Acinetobacter baumannii
atgatggaattaattcttaagccattagaatatttatctataaaatgggctattaatgacctaaacgggaaaaatagaaagccaatttttgattggttttttcctatttttttctccattttagtaactttttttctttatttgacattagacttggactcaaaaaattttaaaattttctttgaatcaaaagggtttgaagtacttggtaatttcatactaacactaccaggtttcttatttgctgctttaactgcagtagtatcctttggtaataaagaacttgatattacacctaaagttaactcacctattaataaaatgggacatgaaatttcgcgcagaagatatctttctaatgccttctcatatcttacttttttaagcttagtattacttatagcaacagtttttataaattatgcttatagttcaaatatactagacttgggtatctctttttataaatttggttacatattaacctcattaatttattttacctttatattccagatgttattcattttaattattactttatattatattggagataaacttcaccaaccctctaattcctaa

SEQ ID NO: 66284 - DNA, 1068 bp, Acinetobacter baumannii
atgtcaacaaattcacgtaaagtagttcatgatatagcatgcgccttttatagaattagttttaaaaatgaaaagttaccgaaacaacctcgtggaaaattttctcatttttttagtgtagaacaagtctttgactttatagctaaacataatcataaagatttgactgtttcatcagtaaaaggacgatacgtttattcaataactgaaattaaaaaaaatgaaaatgcactattcttattaattgaaagatcagataaagaaagtgaagatgttagaatttttaatagaccacaagctacaactaaattagtacctttcgaagaaggagatgaattacaaaaattttttcatgtggtcatacacttagatcctaaaaataagaattcaggacttgtacttgttgaacaatatgcaggtggtacaggatatacttttggctatataatcaccaatattttacataatttacgcttgtcaaatattcaacctgatttttttaaagtaccatatgaaggtggaggtactaatgaagatggttctcctcggattgttgaatttgcaacaaaaactgaaatagataatgtgtgtggattatcacttattgatagagctgcacaaggaaatttacttagtattagtgcaattgaagagaagcaaaaaaaacaaattgaagatgatccacttcttgttattgcgaagaaggaagtgaaatatgtacccgatcctacaattttcttagatcaaaatggacaagagctagataagagttttttaagtgatacttttaatgcattattagataaaattaaaagagatgcttcgctaggccaagatttcttttatagaatccgttgcaaagagaaatcacgtataatgagcattgatattaaaggtgattttgttgagtctgatttcggagtaaaaatagagttcattgaaggttttgaacgtcaagcagtgacgcaaaccgtcgcttctgaccaaaaacttttcaacagaatgaatataatattagctcgtcacaaaggcttggagatattacctgatgatggaattaattcttaa

SEQ ID NO: 66285 - DNA, 471 bp, Acinetobacter baumannii
atgaaaatttttaaatattcatttgtaattctagctgtagtttcagtctctgcttataccatgagtgaccggcagtccacacagtttcaggtcaaaatgaaagtcaatgaaatttgtgatatcggcacaggttctacttctaatatagattttggtacaatttctcgtaatacccaaaatatccaggcaacgggaagtttaaatgtctcgtgtactaatggtacgccttataatatttcactaaatagtgatggcacactaaagaatacccaggatgcttccttgaagctttcatatcgactttatcaagatgcatctatgagcaaagaatggggaaacagctctgaaaatcgtttttcacaacacggtacaggacaaactcaaaatattactatttgggggaaagtgcctgatactaacgttcctgccggtcaatatatagatacagttactgctacgattacctattaa

SEQ ID NO: 66286 - DNA, 987 bp, Acinetobacter baumannii
atgtcaataactcatcaatttaaccgaatcaaagcttatggcctcatcaagcgtttagcttgtatgagcttattgtttttagcttatagcatatgctcttcatctgcttatgcagagagttgctgggtaagtggaggtaatttaagcctaggcacagcgaacattcaaggctcgatgacagcttctacggatattaccgtaacatgtaattcaaactggagtcagcccgtgacatataagatatgtatggtagttgatagtatagatccagcggctaaagatcctcgcacaatgattaactatgataactatcctgcttccttattaaattataacttatattatgatgtcgcacgaacacgcaagataccaaactcagacgctaaaaatacagctcagtgccagtctgttcaagtaggtgctaatacaggaagtccaagtacattggtcaaaatgtatggtcaagttcttgcaggacaaaatgtacctgccggctcctataaaaccaatagtacttccataaagctatactatgcttatcgctatggcttagaagtaccttcagatttagaagctctagctagtcaaaatagctcaactaacaatatagtcgtcaattctaactatgaaaatagctgtttgattttatctgcatcagatatagattttggttcagtggagctattgaataatactttatatcgttcagggactattcaattagcatgtccaatgggtaccaatatgaaggtaagtttaaataatggtctaaatccattgggctcacaaagacgtatgaaaaattctttaggaagttatattcaatacggtttatatcaggatccaagtcactcgaacatttggcaggcggatacttcatattctgtaacccaccagactatccctatttatgcgatggtcccatcgcaaagcattagcagtatagggaaatattccgataccattactgtgactttaacttattag

SEQ ID NO: 66287 - DNA, 2346 bp, Acinetobacter baumannii
ttgaatgttcgagcaagcaattttatacttgcaggaatgatgctggtcacagcaccgacaacatttgcagaacaatactcatccaatatagccagtgcgattcaacaggaattgtatttggatgtagaagtaaatcagtctgcacagattcaaattggtcattttttacaacaagatcagcaactctatattgatgtagcttccttaaaaaatttcgccattactaccgagatagaaccaatcataattgatcaggtatcctatatcgcacttgatcagattgaagggctaagctataaatatgacgacctcaatcaaaaaatctcaatccaagtacctattacactgttaagcagtcaacatcaatatggctatcagcatctgcctgctgcaaaagttaatccattgcatgaaaaaacaggtgtcttactcaattacactgcttttgctcagcagtatgagaatatattttctttaaatggttggaatgaatttcgtgtttttgggctatttggtggggtattcagcctttctggtaactaccaatatcaagataatgcctttataaatcatcatatactggatacatattgggaaaaagatatcccagaaaaattgcttagactacgtttaggtgatgcacaaagtaatgcactatcatggacacgctctactcgcttgagtggtcttagcttatcgaaaaatttcgctttacaaccctataccgtgacgactcccttaatgagttttaaaggccaggtagcattaccgtcacaagtggatctaataattaatggtattaagcagttttcagaaaatatagtacctgggcaatttgatattcaatcagtaccgagtattacaggtgcaggcaatgcacaaatggtcattacagatattaatggccaacagcaagtactgagtattcccttatatggtacaaataacctactcgcacaaggcttaaatgactggtcttttaatgtaggttatccaaagttaaattatgacttatcttcatttgattatgcacaagatcctgcatttagtgggagctatcgttatggaatatcaaataaacttactctggaaacacatactgaattgaccgatcaattgcaacaggtaggactaggcacactctatcaattaggcaaacgtgcaggacagcttaatctctcttatgcttatagtcgtacacctgagcaacatggacaattattaggcctaggttatagctggaactctacattaataagtttaaattataatggactacgacagtttggtgagtttaatgacattgccagcttgaatgatgcggcatttgccagtaaatcagaccaattttatataggttttaatactaaaattggtcagttgggaagtagctatatccagcaaaaatacacagagcaagagagtaagtttgtattgctgaactggtcttatatcttgccgcgacgtatgaacatgaatttaggttatagtcatgatttaattaataaaaaagatagttactatctatcacttaatatcccttgggcgcaacgcaactcagccacagcatcaatacagcgtagtcatgataaccaacagtttggtctcaatctaatgcatgcgctaaatcaagatcagggagggatgggatggcaagccatggccaatcgtacagatcaatactcacaatttcaggggcagatcgactatctcggtcgctatgggttagcacagttaaatgtgcaacatacagcatcagaccaacaaaataataccagcgcttttgcctcagtcaacggaggtttagttattctaaaagatgtgatactccccacacgtttgagtaacggttcatttgctattgtctcaacagataatattgctaacgtaccggtgcgtatggagaatcgtttgattggtaaaactaatcagaaaggatatttgctattggatcgtctaaatccatatcagcataatagtgtagcagttgataccctaaacctaccaataaatttaaaaatagaaacaacacagcaagatgttgtacctcgtcaggcaagtggtgtattcgttcgttttccaatgtatcaagtgaaatccgttcaattacaggcagtcgatgatcagggagagaatctagcagtgggtaaatctgtttgggatattcaaccatcaatacagcagcctcctaaaaccattgtagctcatgatggtattgtatatttagatgatgtgaaaaataataaattatatattggcgatgagcttaagcaatgccaagtgaatcttcctgaagtttccactcttgaaggttttagcgatttaggaagggtggtatgtcaataa

SEQ ID NO: 66288 - DNA, 750 bp, Acinetobacter baumannii
atgaaaaagccagccaaattctctcatgtattccacatttgtggtgcaggaatcttggcagctagtatttttataacacaggcgcatgctgccagtttgcaagttgcgcctattttattagaattttcaccgcaagaaaaagtcaaagaactttggttgaccaatacaggtaatgagagtattcgtgcacaagtacgagtgaacgcttggacacaaagcaatcaacaagatattttaacaaactccaaagatctaattgctagtcctatggtcattagcattcctgccggacaacggcaattggttcgattgatccgcaatactcaaatagcaaatacgactgaacaagcttatcgcctcatcgtggatgaattacctaactcccagactaatgtacaaagtggtctacaattgttactcaaatattccattcctgtttttttaaaagtatcggacattaatgatacagatcaaggcataacatccctgcaaggtatgagctttaaatataataagcaaacactaacaatcaacaatcagtctggtcattataagcgctttagtcagtttgcctacatggatgcgcaaggcaaaaaaataccaattcaaatgggattgatgggttatgtacttagtgggaaaagcatgcaatggaaaattccaaataatataaatgttacgcgtggtggaaagtttatagctgtagttaatatggatcttcgtgaacaaactctaccattatctccctaa

SEQ ID NO: 66289 - DNA, 471 bp, Acinetobacter baumannii
atgaaaaatcttatcactaccgcattattagcttcttctggattatttatagcaggacagacgaatgcttctactaaagctgcggatacaaccttccaagttaaaattgaagttgtatcaacatgtgcgatcagtgctacagatatcgattttggtcaagtaaatagtggtatcgcagcaacagataaaacaggtaatctaaatgtaacctgtaccagtcagacaccctacagcgttggtttatctagtagtggaaaaatgactcatacgactgaccctacgtctagcattgcttatcaattatttaaagcatccagtgatacagcagagtgggacaacgacaataatcgatattctgcaactggttcaggtagtgtacagactatcccggtagttgctaaattatctggctctacaaatgtacgcgctggtaactatgcagataccgtcacagccacagtaacttattaa

SEQ ID NO: 66290 - DNA, 471 bp, Acinetobacter baumannii
atgccaaagccagccacagattttcaatttagttcattgcgcaatgacaattattaccccgactgtgttctctatcacaaagaactatgtgataaacagcaacaagcctatgacagcaaaaaactatctctattaattgattacacaaagaaaaaggcagaaaacctagaaacctacatgagccgagcaagtcgaaaattgaataagtctgactataacaaaattgagcagatcatccaaaacgaccaacgcatgctgaaatatagacaatgtgaaaaaattttagagccacaaaattcccactttgaacagcaaagagagacataccaaacatgtttaaagcatttcgagaatatcaaaagtgatattgagcaaattaaaaacccgtcctctcaacataatgtttctcagaatagctatgaacctgaatacaaagcaaagccccaaaatgacttagattttaacttttag

SEQ ID NO: 66291 - DNA, 459 bp, Acinetobacter baumannii
gtgtcaacacaccctaaatttgaaccaaataaatttgggcctattgagagcaaagattttttagaaagtttagataattatgattttaaaagtataaaaacattacgagaatggattaatttcttaaataatttttctatgtttagaattcattctagaaatatttttaaattaaaaagagatatagattctaaaaataagaatagttacagtcctatttcgaaaagagatcaagccgataaggcgcggcaattaatttttaaaacattagccttaattcccgaagtagaacaaaaagaactgttaaaagttgaaaaagggaaaagaggtttaaaaaaagagatacgacttttaatctctgaagaagattataagaaattttttgactcgaatgaaaaaacttttgcaaaccgatggtctgaagttttacctgaaattaagcccgcattgctgaaataa

SEQ ID NO: 66292 - DNA, 177 bp, Acinetobacter baumannii
atgaataacaatgttggtgttgttgttttcctcttattgatgttagcatcagttttaatgataataattggaagtatagctttggatgctttagtaattatcattggagtattattaggaatgtgtgctttattagtaaaattagaatttaatctatacttgccttttgagaaatga

SEQ ID NO: 66293 - DNA, 1485 bp, Acinetobacter baumannii
atgcttgatgctatatccattgctcaaactgagtacttgcttgaaaaaacagaggcgagtcgcaaagagttagggcaatactttactggaagtgccattgcaaaattcatggcatcattagtaatacatagttcatcgctggaagaaataaaaattttagatgctggcagtggttttgggattttagcaatcgctgcatcacttaagtgcctagaaataggaattaaaaaagttcatgttgttatatatgaaattgatgtagagcttctagctcatttagaaagaaatttaaaagaagtaaaagccgtattcacagaggaacaggcttcttttagttatgaaatttttgctcaagattttgtcttaactcgaccagatttatttgataatcattttgatttagcaattatcaatccaccttactttaaatataattctaagaactctccatatgcagatgtgacttccgacctatttaaagggaatcctaatatatatgcatcttttatgggtgttgccagtgcatgtttaaagccaaatggacaaatgattgctattgttccaagaagttttacaaatggcttatattttaaaggatttcgtcattacttaaataaaaatttaaatctgaatcggctgcacatttttcattcacgaaatcaactttttaaagaacttgctgtattacaagaaaatattatctgtagttatataaaagctcctcaacaagaacaagtacaggtatctgcttctgaaggatatgatgactttgaccatttaaattttgagtgttattcctcgaagatgattattgatcaatctaatgatcaagaaattatacgaataccagaagatagagaagatgcaaaaattattgaatttattgaaaaccttgaatcaagctttgaagaaaatcaatattttatatctacaggcccagtcgttgagcataggacccaagaatacattgggtatgaagagttaacaccaactgttcctttgtggagaatgcacaatatcaaatgtctacaggcagtctggactgggggccataaaaaagatgagtactttaagctcaaagagggtagtgaaaaacatttaacacccaataaaagttactttttgcttaaaagatttagctctaaagatgagaagagaaggctagtaggtggggtatatattcctaatgataattcaccctatttagctttagaaaatcatgtaaattatgttggacataagattgataatctttcaaaagctgaagtttttggcttagcagtattttttaactcaactttacttgatcggtactttaggtgtctatcaggtaatacccaggttaatgctacggagattagattaataaaaatgcctagtcgccatctaatagagcaattaggtgaatcatttctagaattaaaccaacttaatccaagtcaagaaattatagataaaatcattagtgatattttaaaggcataa

SEQ ID NO: 66294 - DNA, 981 bp, Acinetobacter baumannii
atgaacagtgctgagcaaaaattagagcaagctaaagcattactagaagctttaggattaccccctgctcaatataataacagatctgcatgggtatttttggcattagcttctttaaagcctgaagatgattggtcacaagccaaagctcctcttttacctacggttgaaattatgcaattcattcgagaatattatggtcaagattataaacctaattctcgagaaaccattcgacgacaaactttacatcaattcgagcaggctcgaattgttgaccggaatcgggatgacccaactagagctaccaatagtaaagacaataattattcattaaatgaatctattttaaatattctgaaagtttatcctactggtgactggcaagaaaaaattaaggaatatcaaaaagatttacctaatttacaagccctttatagtagaattttggataaggaaaaaattccagtaaaattacccaatggtatagaaattaagctttcaccaggtaagcataatcagctacatgcggatattatccatgagttttgtccgagattcattggtgaaggtggagaagtactttatatcggagatacggctagtagtcgtgaagaaggcggaaagctcatggttttggagacatccaaactagttgagctaggcgtatcacctatgtcacatgataaattgccagatgttgtggtatatgacaaaaaaagaaaatggctgtttctaatagaggctgttactagccatggaccagtttcgccaaaaagatggttagagttggaggcagctctatcgacatgtacagtagggaaagtatatgtaacagcttttcctcatcgggcagaatttagaaaaaatgcagcagatattgcatgggaaactgaagtgtggattgcagataatccagaccacatgatccattttaatggtgatagattcttagggcctcatgaaaataagaatatataa

SEQ ID NO: 66295 - DNA, 654 bp, Acinetobacter baumannii
atgatagtattatcattgtactatttaagccaagtacaaatgatagaaatgacaacacgtatctacctcagagcatcaaccaaagatcaagacgcgcaaagagcactacaggttctgcaggatctaaaccagcaccttaacttgggtgaaaccattgtgtatgtagaaaactacagtggtacgaggttagaccgtcctgaattgaataagctactgtctgaggcaaatgatggagatgcactattagttgaaagtgtggatcgtctgtcacgtctaagccaggcagacttccaagaactcaaacgaagaatccaagagaaaggtttgcgactcatagtggcagatctaccgactacccatcaactgattcaaaccaatgacagtatcactagctctatcctggagctgatcaacaacatgctgattgacttattggctacgatggctcgcttggataacgagaagcgcatagagcgcattaagcaaggccttgagcgttctggatacaaaccaacaggtaagaagccaaatcagaccaagcataagcgcattaaagagctgctgacctcaaatacgatgaccaaagaggaagtagctaaagccgtcggctgtggggtagccactgtttatcgtgtagcaaagagtgctgattag

SEQ ID NO: 66296 - DNA, 1170 bp, Acinetobacter baumannii
atgagtgattgggctgaattacagctgagtgatatatgtaatctcatcagttcaaaaacttcaatgactaatgcttctttgggaaactatgtttcaacagaaaacatgatgccaaattttggaggattagttaaagcggaaaagttaccatcaggaaccatggttaacgcctttttaacagaagatgtattgttctccaatattagaacgtattttaagaaggtatggtctgcacagtttgaaggtaccgtttcagctgatgtcttagtttttagagctaagcaaatttgcgatcctaaatttttgtattacacgttgtgtgagcctgactttacagaatatacagttttgacttcccgaggcgctaaaatgcctcgtggtgataaagaggcaatactgtcatataaattaggtttaccaccactccctgaacagaaagccatcgcatcagtcctttcatcattagatgacaagattgacttactgcatcgtcagaacaagaccttggaagctatggctgaaacactgtttcgtcagtggtttattgaagaagcgaaagaggattgggaagagataataatatctaacttatttgaggttagggatggaacacacgattctccaaagcaaagttcaataggttatccattagtaacttcaaagcatattgggaatggaattttagatatcagcagttgttatctcatttctcaaagtgattacgataaagtaaacagcagaagtaaagtggataagcacgatattctattgtccatgatcggaactttaggacgtacatatctagaatttgaggatcagatttcttacgccataaaaaatatagggttatttaaaacgtctcaaagtcctatatggaggtattacatttacttatggctcatctctcctctaggtaaacaatttgtagatgagcataaaagtggtagtactcaagagtatttaagcttaggttcattaagaggaattcgattaagtcgtcctccaaacgaattattgcaagaatttaattcatgtgttgatagcttatttatgaaagcgcatcaaaacagaaagcaaatccaaacactcgaaaaactccgagacaccctgcttcccaaactgatgagtggtgaagtgagagtgcaatttaaacaagaatcagcagcttaa

SEQ ID NO: 66297 - DNA, 534 bp, Acinetobacter baumannii
atgaacaagaaaatcttagggtcagttgttgcgctcgtgatcgcaattgttggctatctctatgcttcaccttatttggtactgaacagcatcaagactgcagcacaaaatggcgagagtgaaaaagtctcgcaatacatcgactatccaagtgttcgtcagagcttcaaagaccaaataaatgccatgatgatgaaagagatggcaaaccaaaaagatgatggttttgcagcattaggcgcaatgcttgcctctaccatggcagacaagatgattgatgggattgtcactcctgaaggcatgaccttgatgctcaaaggcaagaacctgaaagatgcagaacaggattcccaagatacacaaactgctgaaacacaagaacaacctaagccagagtatgaagcaggctatacctcaatgaatgattttgaggtggtcattaaagatcaggatcagtccaaacaagtcaaagtactcatggctcgtgatggcttaagttggaagattcacaagatcgctgtgccgatggattaa

SEQ ID NO: 66298 - DNA, 477 bp, Acinetobacter baumannii
atgataaagcgcatgactcaaatgggatttggcttgattgctgtagttggctttgctgccactgtccaagcagcaccagctaaattcaaccatagcggtatacaaaaaggtaaagtcatagaaacttgttatcactctccttgttcagtcgccaagtttgtctcttacaaacaactgaacaagacagcgacagaatccaagattcaagtgaccttgctaggtgggagccgtgagtgggaagccaagaaaattgactggaacagatcgccacataaagtcactgtgaattgctcatacaaacgaccaacagttcagatcggctcacaaaagactctgattccactcaatgatggtttaggtgtaccaggtgttctaatggttgatgctgaactctacctctatgcttgtcataagtttgagggatctattgaagatgctgtgcagaagtatggctataacgtgcaggacgataaataa

SEQ ID NO: 66299 - DNA, 474 bp, Acinetobacter baumannii
atggaactactaactcattttcatgaatatttagaactatgcttaccatttttaaaagaaatctttataaatttaatagtgacttactctatcttttttgtctttttcaaactaaataacttaattaagacgaatactcaaaaaagtatattgtcatggttaaaagtctgcctgaacgaattcagagctatattagttttacctaatgatattaaagaaataaattttcctacgtgggcaaatagatggattaactatttttttggaacgacttggtttattggatcgttccttttcacacttttcggcctattgataacaattttaatgatgtacagcaaaaatacgctatctatacctaattccttactagcaataggtatttggtttatcttcatatgtggggctaggtttttctatgtagaaggcagaaaagcttttgctctagcaaaaagaaatcgcttaatgtcttaa

SEQ ID NO: 66300 - DNA, 168 bp, Acinetobacter baumannii
atgatgttcagtagctttcagatgccatctaaatggcaagcgattaagaaaaaactttttagtcgtaagttcttgtggggcttgattaagttgttaacttaccttgcacgagtgatcgtgaaagtattaggtggcgatgattttgatgacccttcgaactctgtttag

SEQ ID NO: 66301 - DNA, 303 bp, Acinetobacter baumannii
atgattaatgatgccttagttgctatacgcaagtatcacggcatatctcaaacagatttatctactcaattgggaatatcaaattcttatttatctgaaattgagaaaggtaaaaaaaaacctagtttagaacttcttgaaaaatattctaaacagttcgatatgcctctatcttctcttttatttttttcagaaaaactagatgacggccaacctttatcagtagcaactaaattcaggttagcttctgctaaaaaaattgttcgtcttatggaatggttatctgataatgacaaatcttag

SEQ ID NO: 66302 - DNA, 897 bp, Acinetobacter baumannii
atgacaaatcttagctatgttcctttaaactatgttgaaaaattttctctcgaggagagaaagcttttcaatataaaaagtaaaaaacatttagcttttgtattgaaagaagagcgttctcttctaaaagcaatttctaaaagtcctcatgagttctatcgatttgcgcctaaaaccattgagaaaaatggaaaaaagaaaacccgtaatattgaagaacctaattttattttaaagccgatacatagaaagattcatctactacttagtgaaattccaacaccagattatttattttcaaagaaaaagtcttcttgtgtacttaatgctaaagcacatgcgagttgccatggttcaacattaaatatagatctagagaactttttcccttcaacatctcgtatcagagttcaacaattttttggctattttttgcagtatccaagagatgtggcagatttcatggcagatatatgtactgtgaataatcatatcccaacagggagtccattaagcttgatgctagcattctggtctaataagccaatgtttgatgaattaaatagactagctgctagtcgtaaaataaaaatgacaatttatgtagatgatatttcatttacaggtgttgctgtaaatgacaaatttaaaaataaagtgagtgagatagttactaaatataatcatagtattaatgtggataaaattagattttttggagaaaaattaagatttatcaatggaatagcgataagtgagaatggtttaagacctagtaataaattatctaaagaaatacgatctcttaaaaatataagagatgtacaaaatgctaatacattagggggaaaaattatttatatgaattatattaaagccatagatttaactgcatag

SEQ ID NO: 66303 - DNA, 504 bp, Acinetobacter baumannii
atgtcagtaacattagcaattccatacgccgatatggcaaaacaggagatcaatgactttcgcgagaaatttgattgtggggaaccatcgctaaatgaatatttagtacatacgatggggcaacataataagaaagggattacaccctcgtttctacttccgtcaacagatcctttacacccgttaattgggtattactccctaactcatggtcaacttgactgttctggtctaacagaaagtacaaaaaagaagttaaaacttcccaatgttgttccaatcctgcgcttatcacgactggcgattgataagaatttcgcgaaacagggattcggtaagcttctaatggccgaagttttccaccgcgctcagatatcaaaaaagaatggtggttgtgtttttatcgttgtagatgctctgcacgaagaagccaaaagatactatgaagcatatggctttgaatctatggttaacaacccattacagctttacctaaaagtctga

SEQ ID NO: 66304 - DNA, 348 bp, Acinetobacter baumannii
gtgatcaataccaaattgcatgacaattcgagagaaagaatttcagcaagagttagccatgagatttatgcagttatatccaaagctgctgaagtcacagggcaaacaataaatagttttatggttcaatcagcgcttcaacaggcacaagatactattgataaacacaatatgcagtggatcaatgtgactgaagatcaggctggttggttacaagcaaaattagaagagcctgcaaccgtcaatccttatttacaggatgctcttcgtctatatgaggaaacagccaacaatgtcagtaacattagcaattccatacgccgatatggcaaaacaggagatcaatga

SEQ ID NO: 66305 - DNA, 168 bp, Acinetobacter baumannii
atggggcaagggatttaccttggtttattggttgagttctcgggtatcttcttaaatcttgccttatttatttgggcgggtatgttactcacgcaaacccgtgttatggacttgttcttaaatgtacttcgtccatggaacttggcgccggaaaccttaacttgttaa

SEQ ID NO: 66306 - DNA, 603 bp, Acinetobacter baumannii
atgcaaaaacaatttgctttaaaatacctaaataaagatttaagtaatatacaggtgttgcctttttatcctccgttaaatatggatattgtaaaacctttacgcaataaaagttcttttatttatgtaagtaatagtggacctcataaaaatcatgaaaatttaatacatgctttttgtgaggcctacgacattactaagttgggttctttaacgcttactgttccaaaacatgatgtcgttttgaataatctcattagtgaaaaagtagagctaggttaccctattttaaatgttggtttcatagatagagaacagttgagtcaactgtacttgtcatctgagtatttaatttttccatctttatctgaaagttttggcttagggcttgtagaaggaatagatgcaggttgtaaggtcattgtttcggacctaccttatgcctatgaagtgtgtaaaccttctttgactttcaatccttatactaaagaaagtatcaaaattgctataattcaggcaatgaatgagaagttaacaaattcggaaaaaactatttccaatgatattgatcgtttaattttacttttatcggataacatatga

SEQ ID NO: 66307 - DNA, 1137 bp, Acinetobacter baumannii
atgaagaaaatttttatttcaattgtatttggtactcgtccagagctcataaagttggctccggtaattttattagcaaaacaagatgcacgatttcaggtagaagttatttttacaggacaacatgatgaattagttcgagatgcgatagatttctttggggttgaaattgatcatcgtcttaaaattatgaatgctggacaaagcctgaatcagcttttaattcatggcttaacgcaacttgaaaatatctatacagatggacaaaaaagagatgcaattgttattcaaggtgatactacaaccgtgttagctgctgggctagttgcattttcaatgaagattcctgttgcccatgtcgaagcaggcttacgttcttatgatttagatcatccatttcctgaagaaggcaaccgccagttagtttctcgtattaccaaatggcattttgcccctacagaacaatcaaagcgtaacttgttaaatgagcagattccaccttcattgattacagtgacagggaatacggtagtcgatgctgtgtatttaggaaggaaactcatagctgaaaagacgggtttgaaaaatcaacttgagccttacggaattgaattaaaacaaaacgataaagttgtacttataactgctcaccgccgtgagaattttggcgaaggaattcagaatatttgtaatgctgttgagtatttagcaaaacagcatcctgatttacattttatttggcctgtacatttaaatcctgctgtacataatgtagtgcacgataaatttaaaagtcatgctcaaattcatcttgtgaagccactcgattatccaagtttattggccgttatcgaccgctccacctttattttaacggactctggtggtttacaagaagaaagcccatcatttaataagcctgtcttaattttaagagacacgactgaacgcccggaagtggtagaggtgggagcaggggtattggttggaacaaatcagcagaaaattattgaagaggctgagaaacttttaacggattcgcagcattaccaaaaaatggctcatgttgaaaatccgtttggtgatagacgtgctgcccagcgaatattagatgaaattgccagaacttataactag

SEQ ID NO: 66308 - DNA, 1257 bp, Acinetobacter baumannii
atggctccaattgatatcctgtttttatttggctttttaggtatttggattccacaagcattttgggcatggttaagctatcaagcgtggaagtattccaaaacggctgaaaaagagctgcaaaacttaccaataccagaaagatggccagtcttaagtgtcttgatccctgcttataatgaaggcgttgtgattgaggacactttgcatgccattgctcaacaggactatccggcagagtcttatgaagtcttactgatcaatgatggctctaaagacaacacccttgaaatcgcagaaaacctcgcaaaaatttatccgtgcataaaaattgtcaatgtacccaaaggtatgggtgggaaaggtaaatcaagaacgcttaataatggtcttccccatgccaaaggtgagttaattgttgtttatgatgccgatagtacccctgaacccgattgcgtccgattacttgcccaaaccttgttagccgataaaaagttagtggcggtaaatggcaaagtcagaactcgtaactggcaagatagtattttgactcgttttattgcgattgaattcatctttttccaatggatctttcaaggtggacgctggcaacgttttgaactatcaacattaatgggaacaaattatgtcatctggcgcgatgctctagagactttgggcggttttgatgaaaaatcgctagtcgatgatacagaaatgagtttccgaatttttatcggacaaaaacgaattaaatgggttccctatgcaatcggttggcaacaggaccctccttcgttaagcgtattcgttaaacagcgctctgttttggaaaaattaccctctcctatttgggttagtgtttatagtggtgaaagtgaacctaaaaactacgatttatgggttaaaagctggcttcctcaacaagcaggcgtttttttccaagatggtgtaggtgtcggagtaagaactcccgaacaagctagacgcattttagatcaacttgagcagacacttggaaaagataaaacggttattgttttagaagcatttcgaaccaagaaaaatggtcaatttcgtgcagcctatccttgggaaattatttctcaaattaaggcgtatgaagggaaaaaaatttatatttttgatggcccccactatatgggccgatggtccgtttatattgtcggtctatggtatcgactcgtttatggcagcacacccgccaccataaacgaaccagaaaactcaaaataa

SEQ ID NO: 66309 - DNA, 516 bp, Acinetobacter baumannii
atggctcaactctctttaactgaagtgtctaaacgctttaatgtgaaccgcaccacaatttatagggctgtgaacaatggcaagctgtcgcgtttggataatggcttgtttgatcttgctgaagtgatacgcgtctttggtgaaccgcctgcacctgtaaagcaatctattgagccgcctgccagtagtgcaaacgataaagaaattatttctatacttaaaagccaagttgaattattgacgaaacaacttgagcaaaaagattcccagattgaccacttgcaacggctacttgttgcacctgaaacgtccgcacaacgtcctgaagcaacaacatgcaacaataccgaaacgcccatagatcaagccatgaagcaaaatgaaacgtcacatgaagcaaatagcaacgttacaaagcaacatcatgcaacggtgcagaatgttgcacctgaagcaataaaaaaaccaactctcgttggtcgttttggtcgtggtcttagagcatttttgaagtaa

SEQ ID NO: 66310 - DNA, 561 bp, Acinetobacter baumannii
atggcgaatgttggttatatacgtgtcagcagttcagatcaaaatacatcgcgtcaattagacggtgtgcagcttgataaagtgttcactgaaaaagtaagcggtgctaacacagatcgagagcagcttcatgcaatgcttgattacgtgcgcgatggtgacacggtgcatgtgcatgaaatctcaagactagcgcgaagcctgattgatctaaatacattgatcagcgatctaaacaaaaaaggtgttacggttgtttttcatcaagaacgtatgacttttagcccagaccgtgaacaagacccgttgcaacagctcatgtttaatatgcttgcatcatttgcacagtttgaacgtcagatcatcaaacaaagacaagctgagggcatcgccaaagctaaagagagaggtgaatacatgggacgcaagaaaacaattgatgattctaaaatcattgaagcaatggaaaaagacggtgcgtcatttagaaaagttgctaaagaattgggtgtttcattatcaacagttcaaagagcaatgaagaaaaacggcacagcataa

SEQ ID NO: 66311 - DNA, 813 bp, Acinetobacter baumannii
atggctgatttgtctaaaaagacgcgttgcgattcgattcgtagaaatgttgttagaaaagagcgcgaattttttaagggttttctgatactaaaaaaagattttgaccgtagaaatctagaacaagttattcatattgcttcatggtgcagcaataacatgaaaacgcctagaatgatgcactttgccttagagattgaggatgaagttttatttaactccagaagattcacccagagtttaaaggagaaatttgcgagtcagatcaaggcatacaacaagattcgcgctttggacgagaaaagtcagaagcctataccacctatgcacatagtttttagtattgaatcaaaatacttaaaaccatccaatccagtaccgtacctgcatattcatgttctagtttttatagacacattgcacaatctttacagttcaaaggagctaaatatctgcatcactaaagcactttcaaaaatacacggactggagcaacttcactttaataaagatgaatctattttttataaagacaacagaaaaagaccacttggcttcttaaaactgcggaataataaaacttccatcaaagtcggtgagttcattgatttaaagtggcacgacttaaaaatcgaacttgatgatgcaatttgtagagcttcatatatttgcaagctagatcagaaagacctgctaccagatgaatttaagcgcggtaattcgttcggtcacaccagaccgccaaaaaacagcaatcaagactatgaacgacttaaaaacattccaattggcacacaactaggattcttctag

SEQ ID NO: 66312 - DNA, 936 bp, Acinetobacter baumannii
atgaccactgatctagttgtaaaagataattcattaataaatgcttcttataaccttgaagttgctgaacaaagattaatcctattggctattgttcaagcaagatcaacagggcaagggattacttctgacagcaagctaaatattaaggcatcggactattcagaacggtttaatgtgacaaatgaaacagcttatgaagccctaaagagtgccgtaaataacttgtttaatcgtcaattttcctttaaagaacaaacagatgaaaacaaggaaattgtcgttaaatcacgctgggttagcaggattgcttatattgatgccaaagggatgttacagataacttttgcccctgatgttgttcctctaattactcgactggaacagcacttcaccagctatcaattaaagcaggttcagcaattaacaagtaagtatgcaattcgattgtatgaaattctcattgcatggaaaaacattgggaaaacaccaattctggagatgagcgacttgcgttttaagctaggtattgaagattctgaatacaaaagaatgagtgattttaaggcccgtgttttggaaccagccatcaaacagattaacgagttcacagacattaaagcggaatacgtgcagcacaagtctggtcgaacaattacaggcttcgagttcaaatttaaattaaagaatcagtcacccaaagaaaagaaaatttcaaaagatcaaaacacgattgatatgttcaccagcatgacaccaaaacagattttgttatttgcgaagaagttggcttatgacgatcagttcggtggtcgtgttggtgaagtcggggagagtcgagaggatttagaaagaagattgatagatttacttgttgaaccaaaaaaccttgtgaagtgggcggatgatttaaaacgattgggatttactgtctaa

SEQ ID NO: 66313 - DNA, 2103 bp, Acinetobacter baumannii
atgaactattggcacatacaactacatccagactcaagattacacgttgataccctaaaagcgatacttatgaaaaaacaagttatcggtatgggtgaatattgggaagataaaaaaggaaatccagtggttgatcctaagctcttcaaagacgatatgaaaattgatgatgttgtaatggttcgtgatggaagtacgcccgtagcattagtaaaagtaaagggcgatgcttacatagaacacaatacagacgatgaatttgattggttcaaacttagaagacaaattgaaattcttggcttttacgaagaagatgagaaaaatcttcttgaccagattttaacagcttatggtaaaagccacatacaagcgcctggcactttaaccaattgtagcgggtctaatgctacaaataattttattgtagaatggtataagttaaggaatcacaaaagactaatggaaaatataaatctgtcagaagagcgacaaactcaaatcaaagcactttggaacaaatttaaaagtgaaacgaaagaggaagaaaagaaatttaacaatgacgaagttgagaaactaatttctgcatggaaatcatacaaggataaaattttaaatgacacattaagtttggatgactacacaaacattttaggaagttctacagcaacaatgcctggcggatatttgtgtaactttttagaacgaactacgagaattgttttaggttcttcaaagcctggcacagcatttaactttgaagtgaaattgaatgatgacaattctacttatcatatcaaaagtacaagcaaaccaaatgctagtcgccaagacgcagaaatttattttaataacaacataaaaggtttgttgaaaagtatcgtttcaaaaactgacccgttagaaaaaatacatttgattgaaaactcaaattacagtgctaagcaagttttaatgaaattggctgtattggataatttatcagactttctctacatctactctacacaatggttagaagaactatataacgagtttattgatagtgaggccgaaggaatctttagaaaaaaccatcaagtttgtcttgtagcaaagaaacttttagacgtaaatgaagaagacaaaaacgaacttgttttgctttcacgttttttatggcggtttgtaaattccaaagcgattgcagacacgaacaatcctaacgttattctttatggaccaccaggaacgggtaaaactttttctgtaaaaagtagtttagattttgtttgccaaggtgatacttcaagatatgagattttacaattccatccatcatttacttacgaagattttattgaaggtattaaaccaaaaggcgtttcaaaagatggaaatattcgctttgagttggtaaatggtatttttaaaaacttttgtatcaaagcaaaaaaataccctgagaaggatttttatttcgtcgtggacgaaataaaccgagcaaatctttcaatggtttttggcgaaactttatcgctattagaaaaagattatagacaagacactaaaaataaaaacctaattcgaacacaatactctgcactaattgaagatttgatcaaagaggacaataaatttaaagatttggcttatgagattgacaacaatgaagtgaagttcggagttcctaagaatgtattttttattggaatgatgaatgatgtcgataaaagtattgatgcttttgatttagcactccgtagacgttttaaatggataagaaaagattgtgattacgaagtaattgaagaggaaactcgtttcaaaggaaaagatcagttcaataatattggtcagtatgtcaaagcctgtgaaaaattgaatgactttatttctaaagacttgggtttaggaaaatcatatgaatttggtcattcattttttatgaagattagcgacattgctaaacgtaaagatattacaaataataatattgaaattttatttaacttgtatttgcgaccaacattgaaagaatatctaagagcagtgtttgcggaaagcgaattggaaagtagattagatgaagcgttgaatcagttcaaagaaacaatgaaataa

SEQ ID NO: 66314 - DNA, 1401 bp, Acinetobacter baumannii
atgaaaattagtattccagtcaatcataatttttacgaagaagccccaatttcagatttaggtaaagcttttggggtaaaaaaacagtcaagcataaaaaacttgcaagaaattttttcgtctgttcatgaattaaaacttggtacagaacaactaaagcaggtcaaagtatttcatttcaaaagcaaacgtatttttgagcaagatgaagaacgtctaattctaaaattatactcaaaagaaaaagcagaaaaagaatactttattcagactggtttgtatgctggggtgctttttcacaaaggttgtaaaattaatattacaataaaatatggtgacacttttctaaaacgaatgctcaacttcgtaaatgacatttacgttgacaacgagcaaatacaagcaaagaaagatgaaaccgaaaatcagttcttgtttattattgctcatttatttattcagtcattagaaaaagcagttgttttaggtttgccccaacaataccaaaaacagcaagagcgaagccaaaaagtaaggggaagtataaattttaatgattatttaaaaagagatattccatttcaagggaaactaacgacaactttcagagagcgaatgtatattcaagaaatcattgatgttttatatttggcattgaagaaattagaaagtgtctttggaaaagaaattcacagtcggttgcttggtttaagtcaatttttaaaacaacaatattctggtcgttttgcgagttacgaaacaatacaaagagctaaaacacaccaaactataaataatccaatgtatcgtggtttcaaaaaagttttggagtatgcagaaataattttgttgaacaaagacctaatgcccgataatgaaaagcaaaacttagcgacaacgggttatctgtttgacattgcagaattatacgaaatctatcttgaaaaacttttgagtagaaattttccggaatggcttgtaagcggacaagttgaaattccaatttaccaaaagcaattttatcgcaggtcaatatttcctgacttgataatgaaacacaggacaagcggaaaaattattgctcttgacgcaaaatttaagaaaatggaaatgcgaaataatgacattgataggtctgatttacaccaaatacattcttattcgggttattaccaaaataacttaattgcaagtgggttgatctatccgctatcaaaacaattagatattgataagtcttactctgacactttatacggtaacaacaataatgatgtgctatttatagtggatggaatttatgtttatgaaacacagacaatggatgatctaattgaaaatgaaaatatatttataaaacgaattacaggtttgatagataaacaagacgtaactaattga

SEQ ID NO: 66315 - DNA, 294 bp, Acinetobacter baumannii; identical to SEQ ID NO: 63964

SEQ ID NO: 66316 - DNA, 819 bp, Acinetobacter baumannii
atgaaggttttttttaggggtgtagaaggtgatgtttatgaagagggaaatgcaaatccagttttagctattttcgttatgctatctagattgctgcctgcctttattttaatgagatatatagtctttaagaagtattataaatcttttattatttttatttttgtgcttttgtgtgactttccaacaggaattgctagatttatggtggcctttgtttatttgcctctattattatgtattgttccaagtttaaaaagatctatccgtatttctttgtttattattttaggaatggtatttatatttccatttctaaatcagtttagatatttttcatttgatcaaaaaataagtttaattcctgatctaagttttttttctcaaggtcactttgatgcttatcagaattttatggaagttcttcgcttggatttcataacttatggatatcagttgctgggtgtttttttattttttattcctcgtagtttctggccagataagcctgtgggaagtggttatcaaatggctattgataataattatgcatttaataatatttcaatgccatttattgctgaaggatatattaattttggttacttcgggattttattatttgctggtgtcttaggtttttttatgagacaaattgatttgaaatttttaaaagattcttattcgggaagcttctcttattgtaaaggtgtttttctgtgtgctgctattttctttatgttgagaggagatctaatgtcatctttttcttttttagtgtcaggtataatagcatttttaattgcagaaaaaatttag

SEQ ID NO: 66317 - DNA, 618 bp, Acinetobacter baumannii
atgaaccataattgctcagcaattattggttttaatcataaatatacaaatgatgctatttactcaaaaacttttggaattaatgacttttatttaaatgacggagctaaaggcttacctttaggtaatattcaattgcttggtaaagtttctgggaaaatattaaaggctaatatgcctctaattccttctgtagctttgaattatttcagcaagcatagtatagatttctacgctatgagcgaggatcttccttcacccaacaatcgtgtttttgtcgagggagacaagatcaatttagtgtgggaaagaaataactgggaagcacatcaaaagttagttcgtaaattcagtaatattcttaaagaatgtggcttttatttagttcttaatcaaccatttgataagagaaccccttcacatcagtgcgggacaattcgaatggggaataaccctaaagattctcctcttaactcttactgccaatcatatgatcacgataatttatatgtagttgatgctagcttctttcctagctcagcggcagtcaatcctgcattgactattgctgctcaagccttaagggtatccaaccacatcctaaaatcatctttataa

SEQ ID NO: 66318 - DNA, 747 bp, Acinetobacter baumannii
atgcctcgtacaatgttgactgatcaacactggtctaagttagaaactattttccgtaattttcgtatttatctcaaacaaaatcttcgaaattttattgaagctattctttatagaatccgtacaggttgcccatggcgggatttaccccctgccttcggaaagccaaactccatattcaagaagttttctcggtggtcgaaagacaataagttattaaaaatatttaagttaatttcgtctgatgctgatctagagtgggtgtttattgatggtagtcatgtgagagctcatcagcatgctacaggaatcaaggatcaggcgatttcaaaaagtatcggtggaaacagttctaaaattcatttggcagttgattctcatgggaaccctgttcagtttctgatagaggatggcacgacccatgatgtaaaactggcaccaaaattagtcgacagcctagacctaaaagagacagaaattctctgtgccgataaaggttatgactctgaatccttgagagaacaaatagaaaaaacgggtactcaagccaatattcccaagaaatccaatacactttcaaataatgatcatatggattggtatttatataaaatcaggcatttagttgagaatgcctttgctcgattaaagcactttagaggaattgctacacgctacgacaagctaaagcaaagttatgaaaattctattgccttagcttgcatctttatttggctgtcattatga

SEQ ID NO: 66319 - DNA, 171 bp, Acinetobacter baumannii
atgactttatctaaaattttgtcagatcttggcgtaagaggacttgaaaatttaaatttagttgaaattttcaagatagaagctaatttgtatattgaacttcctttatataaaagtttagttgaatatgcaaaccctgcatatatccaggttggttcttttatacgatga

SEQ ID NO: 66320 - DNA, 189 bp, Acinetobacter baumannii
atggaacctcaacttcaaaaaacatataggagtaaaaaaaagtggtatgaaattattgcagatgaaatggaattaaatgaaaacattaattcagagattgtagaggagtgggagaaaataaagttatataataataatgtagagctttttccccaaaaaaatgttgatacttactttatggaggattaa

SEQ ID NO: 66321 - DNA, 258 bp, Acinetobacter baumannii
atgtcaacagcccctaattttacaacagatttaaaacaagctcttcaaaatgaagaaatagatgcagtctatatttcaagtgcaaattctttgcactttgaacaggctattgcggcactgaaagcaaaaaagcatgtaatgtgtgaaaagccaatggctcttaatatttctgatgcaaaagagatgatttcgcaggctgaaattaatggtgtaattttaggagtcaatggctttgttgcacaaagatttaaaagttaa

SEQ ID NO: 66322 - DNA, 246 bp, Acinetobacter baumannii; identical to SEQ ID NO: 59301

SEQ ID NO: 66323 - DNA, 318 bp, Acinetobacter baumannii
atgaaacgaacgcttttgtgctgtctgacattgttgagttgtccatttttatatgccgacgaagacacacagcttcgtcttaatcaaagcttggaccaaacgcttttacaagaacagcgacagtttcacgaacagggaaccattcgtagtaccgagcaattacctaaacttcaaattaatggacaagaatatagtgttgagcaaaatccgaatgatcttgccaaggcgttatatttggcagtcatgcaaaaacagtggctcaaagccacggtttatttagaacattataaaaatatgttggctacgatcgggctttaa

SEQ ID NO: 66324 - DNA, 207 bp, Acinetobacter baumannii
atgagcactactaataatcaagcaaatcaacgcaataatcagcagcaacaacaacagcaaaatgacaaccgtaatcaacagcaacacggtaaccaacagcaacaaaataaccagcaacaacagcaaaatgataaccgcggccaacaacaaggatctaatcaaaaagattctggccaacaaaactcaaataacaaccaacaacgttaa

SEQ ID NO: 66325 - DNA, 207 bp, Acinetobacter baumannii
atgaaaattacacctacccatgttagcttgagccaagatgaaatttatgacgcaattatgatgtacctcaatgaatcaggtattcacacgtctaaccgaattgacatcataggcgttctgccaagattaataaccgtgtctcgggttagagacgacagagtgtatctgcagtgcccattggacctaagggtaaaccaaaagttttga

SEQ ID NO: 66326 - DNA, 1377 bp, Acinetobacter baumannii
atgactgataatgcaactatcttgcagcatgtaccagtaggcaaaaaagttgggattgccttctccggtggtctagacacttcagctgctttattgtggatgaaacaaaaaggcgctgagccttatgcatacactgcaaacttaggccagccagatgaagacgactacgatgcaattccaaagaaagcagaacaatacggtgctgtaaaagctcgcttaattgactgccgcttacaattggcgcttgaaggtattgctgcaattcagtgtggtgcattccatatcagtacaggtggtgttccttatttcaatacgactccactcggtcgtgcagtaacaggtactatgctcgttactgcaatgaaagaagatgatgtaaacatctggggtgacggttcaacttataaaggtaacgatattgaacgtttctatcgttatggtttgttgaccaacccaaatcttaaaatttataagccttggttagatcaaaactttattgatgagcttggtggccgtgcagaaatgtcacagttcctcatcgacaacggttttgactacaaaatgtcaaaagaaaaagcgtactcaactgactcaaacatgttgggcgcaactcacgaagcaaaagatcttgaatacctaaatgcaggtatcaaaatcgttgacccaatcatgggcgttgctttctggaaagaagaagttgaaatcaaaccagaagaagtgactgtacgttttgaagaaggtgtacctgttgcattaaatggtcagcgttttgacaatccggttgagcttattcttgaagcaaaccgtattggtggtcgccatggtttaggtatgtctgaccaaatcgaaaaccgtattatcgaagcaaaatctcgtggtatttatgaagcaccgggtatggcccttcttcatattgcttacgagcgtttggttactggtattcacaacgaagatacgatcgaacaataccgcattaacggtttacgtttaggccgtttactttaccaaggccgttggttcgactctcaagcacttatgttgcgtgaaactgcacagcgttgggtagctaaagcaattactggtgaagtaacacttgaacttcgtcgtggtaatgactacaccatcatgaacactgaatctccaaacttaacgtacgaagctgaacgtttaacaatggaaaaaggtgattcaatgtttacgccaatggaccgtattggtcagttgactatgcgtaatctcgacattaccgatacacgtgcaaaactaggcatctatacagatgctggcttgctttcaatcggtcaaggttctgctgtacctcaattagacaataagaaaaaaaaatttcttataacgtccaaaaagccacctctatag

SEQ ID NO: 66327 - DNA, 663 bp, Acinetobacter baumannii; identical to SEQ ID NO: 63640

SEQ ID NO: 66328 - DNA, 213 bp, Acinetobacter baumannii
atgagtgaatttaattttatcaaagtgcggttaaagctctctatcggctttgcggttggtaatcatgaattagatgtgttgctaagtgaatacatctcagaggaagaatggaatgcgttaggtttctttgaaaagcaaagatttgttgaagaggagatcttaaatgaatgggctaatggatacattgaaaaaagcgccgaggtgttggagtga

SEQ ID NO: 66329 - DNA, 807 bp, Acinetobacter baumannii
atggataactacaaaatcaaagttaaagatgaagctgagagcaaagaggctcaggagttgttttttgagttgggttacagctggctttgttgtggaaaatactataaccgcattggcaactatacgtttattacggcctacccagatgaaatgttattaagaatgggctggggtggagatactgataaagaactcaccctccctcagcttcgagaccttgttgttttgaagcgtaatgatgttaatgacgccaattgggaaaccgaaggtggtgatcagatatttaaagactcaaatgacaagtcttatatctatcgctcagatggttgggatgaattgcaacgtcatgaaatgcgacaagcaatgtgggaaaagccaaaagcaattgcacaaccccaagacccagccttgattagcggtgcggatgcgttgcgggctttggctgatgggaaggatgttgatgttcatgaatctacttataagaacgaagtatggttcaacctaaaagacacaaagtttacacctgctgaaattctagcagagaaagtaagagataagccttacacgctaactttccgcctcaaaccccaaaccatcaagcttgaacttgagctgccgaagccttttgagccagaagaagattgtcacgtttacatcttagatgacggaaaaacagatggttatcgtcgttattcctacgaagttcatggtgataaaggaaatacatttattggtatttggcgcaccgaagaagaaatcaagcaagtcgtagagcaactcagaaagatacgaggtactaactcatga

SEQ ID NO: 66330 - DNA, 594 bp, Acinetobacter baumannii
atgagaactcctacccttgaaagctttctacatgatgttcgtgatcacgaattaacaattaacttggatcaaggtgtattccgtgacatcacagtaaagcgtccaaactcaagtcatttttattacaacatcactactcgttctggttatctaattatcactggcgatatgggttgttatgtatttagacgacttacagacatgttccactttttcagaccagagagtgaaggatacccaataaatcctagttactgggcagagaaattagaagcaggtgaatttgaaaagtactcaccagatgttgcgcgtgctgctttaaatcaagagtttgaaaactggaaagaagatacagactttgatgcctatgccattgcagaagaaaaaagcgaactagataacattgataccgatgattattacgagcttatagaggcggtacgcaattggactccaaatgcaaatggagtgcagctagctgatttttgggagcacaaccttaacgattacacatatcactacatttggtgtttatacgcaattgtccatgcaatcaagttgtatgacgcagctaaggagccctctcatggataa

SEQ ID NO: 66331 - DNA, 333 bp, Acinetobacter baumannii
atgaaaccagaacagtttattcgtgagcaggggttgaagaaggcgagagaggttgttgagggggcgcctgatggtcacaaaggatacaacggtgttattaaccaatacacaagaggggtttggtttagtagggatgtgatgctttctgagctcaagcgtctcgtggagtctttagaaattgttaatcgtgcatgtggggcagaacgtgtaatcgatttgcatgagagatacaaaaataacccatttgctcataaatattggcttggtgtccgcgtggatcgtatggcgcaagctgtggctgattacgaatcaatatacggaggcggtcaatga

SEQ ID NO: 66332 - DNA, 330 bp, Acinetobacter baumannii
atggataagtgtagagaagagtttgaagcatatttcaaagagcatcatgcgtatcgtttttatagtgttgatgttgctttagaaatgcgtggagatgattacattgacttgctggcctctattttatgggatgtttggcagcaccagcaagctaaagtggaggagctgcaaaagcgggtggaagcttttaaggaccatgcggcaatgcttcgaagtgctgctaagtcttatgcatacacggagcgtgagcaaaacatcttgttaagtcaggcagatgatatcgaaaagatattggggttagaacaacgcccaaatggagaagaacaatga

SEQ ID NO: 66333 - DNA, 213 bp, Acinetobacter baumannii
atgaaatttaaagctaaagacaaagtggtttttgaagcagattacattccaaataaccaagtgatgactgtcaagcgtgggactcataagcgtcacggtttcgatatggttcgcttacatcttgaaggtggggaaggtgtcgcctttgctagtcagttgcgtccagctacagcagaagaggaagcaactggttttcgtgcaaaaggagcgtga

SEQ ID NO: 66334 - DNA, 312 bp, Acinetobacter baumannii
atgtcattgagaacattagagattgagttaaaccgcctttatgatgagattgttgcaagagatgatttcgtaaatctaagggctgagcaaaagaaaatagagaaattatttttgtctaatgctgataagcattttggggtttcgtatagtatgtctggatatttgtttagatattcatattattcccaaaataatttgtttgctgaaatagatttatgggaatgcccaaattttgaagatagagaagaatttataaaatggtttgtagatcaaattagaattggacgacaaaatctacaattaactgactaa

SEQ ID NO: 66335 - DNA, 222 bp, Acinetobacter baumannii
atgggcgctaaaccttttgagaatttctcagctaatgacgtggtagggcaaattaattgtgggttgaatgaaattagtaacccctttgttattgaagagccagcaaccctttttgaaaagaatgttcaaactgatgttcttaaacattttgaaggttcaaatactaagatagatatagaacgtaaagatggttatctaatctttacagcaacaagagaataa

SEQ ID NO: 66336 - DNA, 306 bp, Acinetobacter baumannii
atgaagattgcatgtattggtggggttaaacacgggaaagttaaggatgttcttaatggatttaataaaaatgaattggactgggagtttaaggcagaacttcctattaggcctcaagtgtatgaagacagaccatttactataaatttgaatgcggaataccaaacataccaacttaaagtactcaagaaacatggcgagcttaaatacttctatgtggctaaagatcttcctctagaagagattaaaagtggggtggaagagtgctgggaactatcagataacttgggatatgactttgattaa

SEQ ID NO: 66337 - DNA, 726 bp, Acinetobacter baumannii
atggacctaacaaagtttttagatctgattttaaataaatccatctatttaagaagaatcgataagtttgaagatccatatgagggatatatttcaagtgcttacaaagcagatcttagtgctcagtatgaagtaattcaatcagattttaatatctctcaagaagccaaagatcgattacatcaaacacatcttactggattggaattaataccattatatgcctatgcaagttgttggtttataggggatgtagaatctgctgctatgtggaaattgtatgggcaaagcaatgattgcattgcgatttgtagcacaatttatgatttaggattagctcttgaagaaggtgataatgaagaaggggatatttatttacaagaaattgattatgtagatgattcttcctcagtgaatgctaaaaatttcttaaaaccaatgtttgagaaaagagtgagttttgctcatgaaaatgaatttagagctttatacttacttaatcaagcgcgtacccttttaaatagcaatatacatcagccgaaaaaggaagatgtgcgaaatactgatggaatcaagttggatattgatgttaaacagctggtcaggtctatttatatatcacctacagcgaatggtaactttaaaccaattgtggaaagggttttagaattggctggatttgatggactagaatgcatccaatcagagttatacaaattaaagtaa

SEQ ID NO: 66338 - DNA, 396 bp, Acinetobacter baumannii
atggctagaaaatttcctgcaattaatgatgcttggacagcattttttttatgtctaatagtacatatgtctttaccacttttacccttagtggctgaatggttaataacaggtattgttactaaaagctcattaacaataacaattgcaatttatgcaatgacaattggagcttcttcaactaatgcaattatcgcaattatatgtataattattggtatcatcttctcagttctatatggtgtaactttaattcaaaacacttatcaatttatgattgacacgatgcttatttctaagatagctcttggtacgataatagtccctcatgtaattgaaagatataatagacatgtggttgatttgcaaccatttaaaattttgggtcaaaaataa

SEQ ID NO: 66339 - DNA, 426 bp, Acinetobacter baumannii
atggaaactttattactttctttatctcaaaactccgataaaatttcatcattgatgactgctttaactattttaatgtccttattagctttatcttctttattaacaacaaagaaaatgtataaagcaagaagagaagctgaaataacttatattaaatcacttctggaaagtaaggaatttatagagcgtattaagaattcggagcaaacaaaatttttagttgaaatacatcctaagcataatttagttgtactaaatggagaggagttgtttataaatgtttttaaaaatctagatcaaaaaagtcaaaaacaaattgagccggctctctttcaaaaaaatttaaaaaatagaaaagcctatcttgaaaaagtcgtaagtgaggcaaaaaaaattatgaatatgattgaatctcattgttaa

SEQ ID NO: 66340 - DNA, 171 bp, Acinetobacter baumannii
atgtcttgggctgtatatgagtttcatgacagcgttcaggtgatacctgacgatgatttaaaaccccattcattatttcactgtgaatgccatcccaaatatgaggatggcatttttattcataactcatttgatggtagagaagcgactgaaacgcctttacctagttaa

SEQ ID NO: 66341 - DNA, 1098 bp, Acinetobacter baumannii
atgaatttgtatgagattttgcatatttctcaagatgcacctgaagaaattatcaaactcgcttataagggattagctcaaaaatatcatcctgatcgttacaagggtgatgatgcaaatgagatgatggtaaaaataagagaagcgtatgagaccttaatagaccctcagaaacgcaaggaatatgatgcttttttagcagcacaggcgcgacgaaaacagcaacaagaggattttcaaaggaagcaaaaagaacagcaacaggcggcaccctcaaatcaaggcaaccaaaatgccagctttaatttgaatatatctgtaaatttgcctttcaagttcaatatcttgaaacctttgatcaaatgtagagattggtttattaaattcaagaattggcttgttgctaaaaaaaaggtctttatccttctgcttattatatttttggtcatattatttatttttcataccttcaataagctgatatcagagtctcaaaagagtcgagtatctagctatgagaccaactcttatgaaaatcggtatgagtacaatcatttaaacaatgaatctagtaatgaggcagctattgcggcgatggaagctgccgatgaggctacgaaagctgcgactgaggctacagaagctgtggcggctgcagaagctgccgcttcatttgatggatcgtatgaaactagtgaagaaactttattagcagaatatagcgaaggacactaccctctgctaaataacaatcctgcggaaatcaaaaatgcagttcttaaagtattagaagcacttaaaaatggcgggctacctgaaatacaggctttaatttcaaattgctatatcacaagtacaacgtcaaaagactgtgtatatttagacattgcaggtaaatatgtacatgatgtgatgactcagggtgacaatggtatagaagcgatggggtattttgaccccaatacagcttggcaaagaatactaagtgaattctataaccatcattctattcctccaacacttatccaaaagcacgccaaggacactatcaaagatacaacggaactgcttgagaaaactcttgatgaaatttcatag

SEQ ID NO: 66342 - DNA, 4890 bp, Acinetobacter baumannii
atgtcgtcatttttcgacttaattaatacatatagaacaacagcaaaaacagaacgcgaaaaaggcacttattttgagttgctctgcatcaaatactttgaaaacgagccttactatgctgacttgttcagcaaggtacagacctatagcgaatgggcaaaagaaaaaggcttatcaggcaaagatacaggcattgacttggtcgcaaccaccaaagacggtgactttcatgccattcaatgcaaactctacgatgctgatcgtaaggtcaccaaggctgaaattgacagcttcctagcggcagcatctaaaacctactttaaacgccgtattatcgtcagtacgacacatgattggtcggacaatgccttagcgacccttgaaaaccaagacccgcctgtcaccaaaattgatttggacacgcttgcacagagtgcgattgattggtctctgtttgcggaaaagaaagaagttgtattcaagcccaaaaaagaactccgtgaccatcaaaaagcagccttggcaaacgtaaaagctggcttgtatgagcaaaagcttgaacgtggcaagctcatcatggcatgtggtacgggtaaaacctttacaagtttaaaaattgccgaagcatgtgcgggcaaaggcaagcgtgtactattccttgtgccaagtttatctttgctttcccaaacgctgacagagtggacacaagaatcgacaacgccgttgcatagctacgccgtatgttcagacaccgaggttggcaagaagaaaaatgccacagcgattgatgcagtgacaacgcttgaacatgagcttcaatatcctgcgacgacggatgcgaaaaaacttgcggagaacgtagaaaagcatcacgacgatgaacacatgacggtcgtgttctcgacttatcactccattaataccgtcagcgatgcgcaaaatgagcatcagatgcatgagtttgacctcatcatctgtgatgaagcacaccgcacgactggcgcaacgcatgatagcgaagatgattcgaacttcgtaaaaatccacgacggcgggttcattcttggcaagaaacgcctctacatgaccgcaacgcctcgtatcttctctgacgatgtgaaggataaggcaactgactttaccttgtactcaatggacaatgagaagctctttggtgaaacgctttacactattaacttctcggaagcagttaagcgtggtctattagtcgattacaaggtgattgtccttacggtcgattcagacacaatcattaacaagatcggcagcaccattaccgagaacagtgaaatcgtagtcgatgatgccgctcgtattgtcggctgttggaaagccctatcgaagcaaggtattcactcggacgttgaagaagacacagcaccgatgcaacgtgccttggcattctgtcaggtgattgaacagtcggagaaggcacgtaaacaccaagtcagctcaacacgtattgcaaacatcttccagactgtcgtagaagcctaccaagaagcagaagccaaagaaggcaatgaaatctcacatcgtttgatctgcgaagcacagcatgtcgacggcgcaatgggtgcggataagaaagaacagaagctgaattggctgaaagcaacacctgagcctcagtttgatgaaaacggcgtggagcgtccaatttgtcgtgttttaagcaacgtgcgctgtttgtccgaaggtgtggacgtacctgccttagattcggtattgttccttacgccacgtaattctcaagtggatgtcgtgcaatcagttggtcgtgtgatgcgactagcaccgaacaagaagcgtggatatgtgattcttcctgtcgtgattccaccaggtgttgacccaaacaaagcattagacgacaacctaacctataaagtggtttggcaagtgttaaatgcacttcgttcgcacgatgaccgcttcgatgccatgatcaataagatggatttaacgggcattgatcgctcgaaaatggaagtgattgctatcaccgacaaagtagcggcgaaagcgaagaagaaaggtgctggcaaaggcggtacaacgattggtacagccaagaaaaagaccaagaaagaagaacttgaggatgcacaacagtcctttagttttgaatcgggtgagattgagcgtgctattgttgccaaagtcgttcagaaagtcggtaatcgtcatcactgggaagattgggcaaacgacattgccaagattgcacagactcatatcaagctgattacagacatccttgcaagacctgaatgtgaaaaagaacgtgcggtatttgaagagtttgcacacgagattcgtgacgacttaaataatgcggtatcggacgctgaaattattgagatgttggcgcaacatttgattactaagcctgtctttgatgctttgtttgacgagtatagctttgcggcacataacccaatggcaatcgctatgcagaaggttttagatgtacttgatcaacatcacctagacagtgaaaccgaagccttacaacgcttctatgacagcgtgaagctacgtgcatcaggcattgatagtgcggaaggcaaacaaaagattattgttgagttatatgacaagttcttccgtaacgctttccctcgtatgactgaacgccttggtattgtctatacacctgttgaagtggtggacttcatcttgcacagtgtaaatgatgtcttaaagcaagagttcggcaaaagtattgcagacaaaggggtgcatattcttgacccattcacggggacagggacatttatcacgcgcctattgcagagcggtttaatcccagcaagtgaactgacctataaatacaagaatgaaattcatgccaatgagcttgtgttgcttgcttattacattgcggcaatcaatattgaagcggtctatcacagccaaatcatcgatgaatacacgccatttaagggtatctgtttaaccgatactttccaaatgtacgaaaaggatgatttagtcgatcaggtattggtggataacagcgcacgccgtaaacgtcagaagtcactagatatacaagttattattggtaatccaccgtattcggcaggacaaaagtcggaaaatgatgataatcagaatgttgcctaccctcaattggatcagcgcatagcacaaacctatgcaaagaactcaacggcaactttaaagaataagttatacgattcttatattcgtgcgattcgttgggcaagtgatcgtatatctatgcaaggtgtgattggtttcgttaccaatgctggttttattgatgcgaatactgcagatggcttacgtaagtgtttggttgaagactttagtagtttgtatatcttccacttgcgaggaaatcaacgaacttcaggcgaaaaatctcgtcaagaaggtgggaaaattttcggtagtggtagtcgtgcacctattgctatttcaatattagtgaagaatcccaaagcggaaaagcaggggcaaatctattttcatgatattggagattatctaagccgtgaagataagcttgaaaaaatttcacaatttaggagtattcaaggtattaccaatgcaaatggatgggaaattaaagtccctgatgagcatggagattggttgaatcaacgtgacaattcttatcaaaactatatgttaattggtgataaagagttttcacatagtaagagtatattttgttgctactctcaaggcttgttaacaggaagagatgcttgggtaattaactactctaaaacacaactagaatcaaatgtgaagagaatgatttccttttataatgattcaatcaataacaatggtcagctttcaaatgatccgactaagattagttggacggcaaatcttaaaaagagtgcagataataaaagactattagcgtttgatattcaaaacatcgtgcctatctactatagacctttttcaaagcattggatgtactttgataagtccttgaatgaaagaacctcattcatgggggctatgttcccaaagaaatatgatcactctaataaagctattgttgtcttaggtcgtggtgaaaataaagaattctctgtcatgcttgttgaatcaatttcagagtataaaaccttatataatagccaatcattcccgatgtattactttgaagaagtagtcgaagatagaaacgtagattcaggtgacttattcgctaaaccatcggatgcaaccgagaccaaatatgaacgtaaagacggtatcagtgacgaaggcttaaagcacttccaaactgcctaccctagcgaagaaatcaccaaagaagacatcttctattacacctacggtttattgcacagtgaagaataccgcacgcgctacgcggataacctcaccaaagaactgcctcgcattccgtgcgtgaagaaagcagaagatttttgggcgttctctaaagcagggcgtgaccttgcgcattggcatctcaactatgaaactgttgagccatacaaggcaacattagagacaggtagcacgccatacaatcaattgaccgatcaggatttctatgtcgaaaaaatgaggtttgccaagaaaggcgaaaaaggtacggtcatttacaacaagcgtataaccatcaaagatattccattagaggcttatgattacgtggtgaatggtaagcctgcccttgaatgggtcatggagcgtcaaggcgtttctacgcacaaggacagcggtatcgtaaacgatgcaaatgattgggcaattgagaccatgaacaacccagcatacccgcttgagctgttcttgcgtgtgattacggtcagccttgagacgatgaagattgtgaaggctttgccaaagttggatatttga

SEQ ID NO: 66343 - DNA, 297 bp, Acinetobacter baumannii
atgtcaattcaagatcatacaaaacctatctcattacattctcaagaatttttccgcattgcagaacttgcgacaactgcggaacgcccagcacgtacctttacagactgctatggaagagttcgtcgacttaaagggaggcctgctaaaaaaggattgcttccactaggtgaaagcaccatttgggaaatgactcgaagaggtgaattccccgaaccaattagactttctaaccgcattacagtttggaaatcatcggatatttttcaatggatgaagtcacgtaacttggtgtaa

SEQ ID NO: 66344 - DNA, 801 bp, Acinetobacter baumannii
atgcaattgaatttcttaactattgaacaagtaattacgattttaagtgaaaaaaccaagaccgcttggaatacatacaatatcgctgacctcttaataaataatcacctcgaactagtcttttggttcgagggttatgcaggcgtattaagtggtttgcatcttcaggatggcattgacgaacaaccacttaaagcaataaataaaataaaaggcttcgtcaggcccaatgatattcacttccaagacatctatgatttattgctagatgcaaaagaagctatcgacatatcactggtcggcaaaggtgcaaaaatatcggtactttttcctaattgttctgaagaactcataactgaaattttaagcaatgtaagacatgataagaaaaaccgtcaactgatatatgaactggggcttttggaaaacgccccgctaagtgtgtttcatctgagttcaaaaggcatcagcacatcaatacaagtcacagctagcaaactaagaatcaccaaagaaagccttgaccgttttatgtctagtaacgaagaaaacgtaatcgagagcaaagctgtgagtatgtctagcgataaagctatagcgataatggcaatgatgctgtcaaaaaatgttgcaaaatttaaagttggcaatagaccaaatgcttcacagctgggcaaggaaattgatgcaattgctcaaaatcattttaaagaagaagatctgcgcggcttagagtcatttaataaacggatttctgcggccttaaaaacgtatgagaagttaacaaactcgaaaaactga

SEQ ID NO: 66345 - DNA, 1269 bp, Acinetobacter baumannii
atggcaaaacaatcaaataagctcactgcaaaaacagtcaaaaaccttacctatcgagcagattgttcgaataaatacgccgatggcggtggtctgtatttattcattaccgccaacggctctaagtattggcgcatgaattacagacgccctataactaaaaaggaaaatacattagcaattggcgtatacccaaccataacccttgaacaggcacggttaaaacgcgatgaattcaagaaaatgctaaccaatggaattgacccagcagaagaacgcaacaacctcaaacgcaatcaaaaaactgaacttgaaaatacgtttggaaaatttgcagcggaatggttagctattcgtgaacaagaaggaaagtctgatcgtgagaccatacgcaagctgaacaaggatattctgccttttattggtgatatgcctgtgaccgcccttaatacagaacaactcgagcgggatgtaacaaattcacttgtagaacgcggggcacttgaatcagcaaggcgtgtgaaatccatcattaatatggtgttaaaacttcctcttagacgtcgaataattcaatacaaccctgcccctgagattacgctacctaagccaataagaggcaatcacaaggcgattgtttcggaaaaagagctacaagagttattgcgtaaaatatggcgatatcgcgtagacaatcctagagcaagaaaaagaactgaacttgccatgaaattatctgtttatatttttcagcgacctaatgaaatacgagggttattgtgggagtcggtagactttgataacagttgtctagcttttgccgcgagtaaaacatatcaggaacacattgttcctttatcacgccaagcctttgatattctcaaagagctagagaatatgcgtacatcttcgaaatatgttttcccgagcattaaaacaagtttggaatgtatgagtgaagacactattcgtcaggcattgatacgcataggctatcacggtaaacatactgctcatggatttcgtgcaaccgcacgtaccattttagatgaagaaatcgaatatagaactgacatcattgaacatcaattggcacatagagtgaaagacccaaacggtacagcatataaccgtactaaatttttacgccgtcgacgtgagctgatgcaactttgggctgattacttggacacacttagacaaggtggtgatgtctctacattcaagcctcaaacggatggaaaaattattcaattcaaaacagcataa

SEQ ID NO: 66346 - DNA, 306 bp, Acinetobacter baumannii; identical to SEQ ID NO: 44768

SEQ ID NO: 66347 - DNA, 336 bp, Acinetobacter baumannii; identical to SEQ ID NO: 45236

SEQ ID NO: 66348 - DNA, 366 bp, Acinetobacter baumannii
atggctgcagcaacacaaaacactgacgaaactttagcttcaactgacgaacaagcgactactaaaccaaaaaacacacgtaataaaaccaataaaactacagaaacacaggatacccaagctggtgatgaaaaagcttcagaccaaggtgatttgttaaatagccaaggtgctgaagacggcgcatctcaagatgaaggtaataaaactactgatttgaaaaatggcgattcagaaaatggaaatccaactgaaacatcgaatgattctgtcaaaccttcaaatgatctagattcaaatggtggtaagtctatatatctggcctttcttcttcacttaaaactactgatgatattgctaaactag

SEQ ID NO: 66349 - DNA, 183 bp, Acinetobacter baumannii
atgagtgttgattatactaaaatcaaaaaagtaattactatttataatgcgaaacaggtaaataattgccttcgtgaaggttggattatcttaagcgtagcaggcggccaagatgaaaataaattcccgttaattcagtattcacttggacatgagaatgaacttgctgatgtacctcaataa

SEQ ID NO: 66350 - DNA, 843 bp, Acinetobacter baumannii
atggtaaaaaatactggacgggaatatgaggaatttgtccgatctatctatcaagcaattattcaatctgaatttttaggcttaagtaatcaaaaaaacatagaggtagaaataaacaaaaaattaattggtagagatggtcttgaacgtcaatttgatatttattgggagtatgttttagcggggcattcgtataaaactgtgattgaatgcaaagactataacagtaaaatctctgttgataaaattgatgcatttattgggaaattaaatgaatttccaaacttaaggggattatacgctaccaataaaggataccaaacaggtgcaaatataaaagctgaacagcacaatattgatttattaattgttagagaacaaaatgatacggattgggaagatgaaaatggagatcccctaattaagcaagttaatattggaatcacagcaatatttcctgccagaattacaggatttaatattttaatccctaaagaagtggatccatatgatcccaaaagcatgtcaggcatgaataatgaaataataattaccaatgaggatatgaacgaacaatactctctttatgacctacaacataaacttgtagatagccatactgaaggatatggaaagtttgaaaaagagtttttgtttaaaggcaaagttgctaatggtgaatttgtatttgatattgtaggctataaagttaaatatgaaatattaaagccaagtacagaaaatatgttaatcgacttctcaacaaaacttcttggagtagttgaatatttacatcaaggttctaaatcactagtttttgatgatcatattaaaaagagataa

SEQ ID NO: 66351 - DNA, 546 bp, Acinetobacter baumannii
atgaatattgaacaatatcttgatgagttaattaagcgcgagggtggttacgtaaataacccagcagatcggggcggtgcaaccaaatacggtataactcaagctgtagcacgtgaaaacggctataagggtaatatgaaagatttgcctcttgatgtggccaaagcaatttatcgcaaaaactattggacagctccacgatttgaccaagtaaatactgttagtcccatggtggcagaagagcttttggatacaggtgtaaattgtggtaccagttttgcaaaaccacttttacaacgcgctttgaacttactaaacaaccaaggaaaagctggatatgcagatttagaggttgatggtgtttatggatctgaaactcttagagctctaaaaaactatctggccaaacgcgggaaagaaggcgagaaagttctggtgcgagttctcaatattatgcaaggacaacgctacattgaaatctgtgagcgtaatccaaagcaggaacagtttttctatggttggattgccaatcgggttgttatatga

SEQ ID NO: 66352 - DNA, 264 bp, Acinetobacter baumannii
atggttgtcaaagtaaccgatgccgaagcttcggtacccggtaaaggttaccgaacccaaaatgatcgttatggatctccattatcaggtgatggcggaaactggggcgaacgtggtaccaagtccactaatgatggaacgtggaactggcaataccatggaatgactgaaggtcagccggggccgggtggacctgcaattgtgggagttgcaccactgacaactcaattgattaatggagggaaaatcttacaaacactttaa

SEQ ID NO: 66353 - DNA, 255 bp, Acinetobacter baumannii
atgagaaaattttttcttattcgaaagttgattagccaagtggcgaacttagatgaaaatgatccggccgttttaccttgtattttaagcgtgatgaccccgtgcatgatgcttattattgccggacctaatgctcaagcacctgagtcacttaaaaatattgctcagatgcccttacatgatttagttgaacactttaaaaaattttcattagctggattaaaagcaattagccaatcaaatcttaaaaattag

SEQ ID NO: 66354 - DNA, 189 bp, Acinetobacter baumannii
gtggctaccttgacttgtgcagcattaagccagagcacacaaaagggttggcttaatgtgaaatctggagcaagcacagctgcttggcctgttggtttgtatcaaatggatattaaagcggtagtaagcggcaacactcaacacaccgaaactttgactttccaagtgattgacggggtaacagcataa

SEQ ID NO: 66355 - DNA, 588 bp, Acinetobacter baumannii
atgaataaagaagataagcaatcgctattgctttggggaattgttgcttattcggtagcattattaatgtattgcacatcaaaaacattgattggagcgagtgcagattcaatttctgcttttggttcaatactatctgcaatagcaacaatatatgctacttttatcgcaataaaactatatgctgattggaaggatcctcacaaagcaagcttctatgtcaatgaatgtaagagtgtactagacatctataagcaattacatttatgtcagaggaatttaagtattcttgagttggagttatttaatttaattagcaccaaaaatggtttagatattagagaggaaagtgattttactgaagatgaattagaaagattaaaaactcttaacaacttagtggatgcaggaattgattctttatatacgaaaataagcgaactacaagctgaaattcttatgcttgcagctttaactgaagatcctgagtttttaatacaaagtattagtttagaagctagtctaacaagatcttataaagctgtctcttatacacatctgacgctgccgacgagcgatctagtgtag

SEQ ID NO: 66356 - DNA, 1749 bp, Acinetobacter baumannii; identical to SEQ ID NO: 45041

SEQ ID NO: 66357 - DNA, 582 bp, Acinetobacter baumannii; identical to SEQ ID NO: 45335

SEQ ID NO: 66358 - DNA, 327 bp, Acinetobacter baumannii
atggaaggcttggaaggtttccttgctaaaaagcgtgatttagctcagcaatatcaagatttctttaaagatagtgatatttcatttgttgtggaacctgaagactgccgatctaactattggttaaatgccattgtttgcaaagataaagcccaacgagatttgattttggatgaaaccaattcaaataaggtgatgactcgcccaatctggactttaatgaccagattgccaatgtaccaaactgcattacaaggcgatttaactaactcattatggttggaagaaagagttgtaaatattccaagttcagttcctctggagtaa

SEQ ID NO: 66359 - DNA, 498 bp, Acinetobacter baumannii; identical to SEQ ID NO: 57121

SEQ ID NO: 66360 - DNA, 477 bp, Acinetobacter baumannii
atggcgaaagcaacagtagtaaagaaacataatggcggaaccatcgcacaaaataaacgtgcccgtcatgattattttatcgaagaaaaatttgaagctggcatgtctttactcggctgggaagtaaagtctttacgtgctggtcgtatgagtttgacagaaagttatgtcatttttaaaaacggtgaagcattcttatttggtgcacaaattcaaccgctcctttctgcatctacacatatcgtgccggaagctacacgtacacgtaaattattattatctcgccgtgaacttgaaaagctaacaggttcagtaaaccaaaaaggttattcatgcgttccattagcatgttactggaaaggtcatctggttaaacttgaaattgcgcttgtgaaaggtaaacagcttcatgacaaacgtgcgactgaaaaagatcgtgactggcaacgtgataaagctcgtatatttcataaataa

SEQ ID NO: 66361 - DNA, 465 bp, Acinetobacter baumannii
atgcatttatttttagattgcgaatttaatggttggcatgaccaaggtacaggtgagttgatttcattaggcttggtatccgccaatggtaaatatgagttttatgaagtcgtgggttgtaaaaaccctagttcatttgttttacaacatgttatgccaattttagggcaatcagctattcctatgtgggagttagttaataagctgtgcagtttcttatgggaagtgaactctctagaagaggagcagattactatcgtagctgactatccttcagatatagaattatttaaccgtattttgctcttaggacaagggcaatgtatcgatgtgccagtattaggttttttactcgatctgtcgctcactacgaaggattctgtgattcctcacaatgcattagctgatgctaaagctttgagcaaagattatatgtcgaagtatggccataagattttaaagtga

SEQ ID NO: 66362 - DNA, 825 bp, Acinetobacter baumannii
atgaattttttatattctcgaaataatacaaagtttcatattgttttatctggtcaaaattgccctgatttttttgctggtttattaccggccactttaaatactatttcttatacaccgacagctatagcccagaatggtgattggtttaaagtagacttaaactcattgaccggtgtagctaaccctattctcgaattagagaaaaaagtaagtacttcaatgcctactatcagtggggctcagtacaaagacattaagtatttaatttttaaacgtcagagcgataatttttactatattcaaaaagttttacctagcgcaaaaatttatagaaaaaccctaagtttttcaaatcagcctgaagtattggataatcctattgtggttttagcagactctccagatgcaatctttgataaaagctcagggtatttatattttaaaagcttaagtgccatgaatagtatttttaaaggattgaatacgctttatagagccgctacaacagcggaagtaacacagttctttcaattaggtggtctattagctgttgatccctcatacactgaagataaagtagggattccaaatcgcaagaatatcgctaaagcattagatacttataatgcatatagccctaaagttcagaaaaacttacatacctatattcaaaccttaggattacctacagatgcaaatggtaaatatacgattacagacgaagagtccttaaagaattttgtatatgctatacaagagcgtttttacacaacacaagcatctacagaaaagcgtttagctcaagcttatgttccagtttga

SEQ ID NO: 66363 - DNA, 174 bp, Acinetobacter baumannii
atgttagggtataaattttatttcataaagcagatagatgattcaaaggttttggttatttctaagaaagagataaaaactcttgatgagctttttgaaaatagtaatggtgatattcaagactatattactattacaaaagtgaatgaatatacttttttaattctagactaa

SEQ ID NO: 66364 - DNA, 1302 bp, Acinetobacter baumannii
atggcgaagtatcagaagtatgctgaatataaagattctgggattgagtggttaggagagattcctagccattggaaagtgacaaaacttaaatttttagccaagattaaaaatggacaagattataaacatgtagaagctgaaaaaggttttcctgtgatgggctcaggtggacagtttacgttcagtacagaatttatgtttgatcagccttcagttttacttggacgaaaaggaactatcgataagcctttatttatcgatgagcctttttggacagttgacactatgtattatacagatgttcaaaaggatatagacgttaagtatttttattatttagcaaaaattattctttttgatcggtattccacaaatactgctttaccaagtatgactcaagaaaatcttaataattttgagttttctatcccatgtgattttgatgagagattggcgattagaaaatttcttgactatgaaaccgcaaaaattgataccctgattgccaaacaagaaaagctgattgaattactgaaagaaaaacgtcaagcggtgattagtcatgccgtgactaaaggtttaaatccaaatgtaaaaatgaaagattcgggcgtggaatggttgggggaagtgcctgagcattggaaattagtccctttaaaatatttatgttcatttagtggcggtgggacaccaacaaaagataatttgacctattggactaatgggaatattccttgggtttctccaaaagatatgaaaacttttttgattaaagaaacacaggattacattactgaaaaggcagttaaagaatcttctacaaatatggttgaaccgaatagcttacttatagttgttcgatcagggattctgcaaagaaccattcctattgcgattaatattgttcctgtaacaatgaatcaggatatgaaagcacttaaatttggtcaaagaattttagtagagtatgtggctaatttgattcatggaaatacgcagcaattacttttagagtggtctaaagaaggtgcaactgtagaaagtattgagcatgaatatttagctaatagtattattcctgttccaccaattgaagagcaagaagaaataatccaacatattgataatgagttgaaattatttaagcaacttgaaaataatgcaaataaagcaattcaactcatgcaagaacgccgtacagcccttatttcagcagccgtaactggcaaaattgacgttcggcatcatgcctcacgtattatgggcaacgataaaatgcaaactgaggttgtttaa

SEQ ID NO: 66365 - DNA, 624 bp, Acinetobacter baumannii
atgctgatgcagctttacttattaaaactggaacttttttggtttgaactgcatcagcattatcatttttctgaaccgcagaaaattttaaatgaacttattgctgcttatagtgaaaagcagcgagcctaccacaccgtacaacatttatatgaatgtttgagtttaattgagacgattcagtccgaattaaatgatccgtatgctgttgcattagctctctggttccatgatgtagtctacgaacctcaagcgctagataatgaacttaaaagtgccgagttatttgagcaattaatggctcaagatttacagctcgatacaatgcagaaaataaagcgttggattcttgcgactcaaaagcatgcaccaaccggtgaaacagatttgcaatttttgttagatatcgatttagctattttggcagcaacacctgaacgttttatccagtatgaacagcaaattcagcaggagtattcttgggttgattcagaagtatattcaattaagcgaaaagaagttttaatgaatttttatcagtctgagccgctttatcaaactgcatatttccaaaagaattttgagttaaacgccaagcaaaatttaaagaaaatattggaatag

SEQ ID NO: 66366 - DNA, 384 bp, Acinetobacter baumannii
  misc_feature (364)..(373): n is a, c, g, or t
atgatccttcggcataataatttatgcaaaagtattttgctgattttattgtcgggtggatgtttaaatattccaaatactgtgttcgcaggcgatttgcctccaccaccaagagacattaatgaaattaatcaactttttaaactgtacctagatttggttgtgaaccagtattcggtccagcaagttgtgccagtgattgtaaaaaatgatgagtatttcatacaaaaaaagaagctgattgatgaattagaaattaagatccctcaagatttattaacaaacactgacacatctttatctaatcaagatgttttgaccttggggtttagtggtgacgcgagtgattggatatctttagatnnnnnnnnnntctttagataa

SEQ ID NO: 66367 - DNA, 1254 bp, Acinetobacter baumannii
atgcatcgaccatggccaatttatggacaacaaaaaacgttaatgctcatcaatattttatgttgtagtgcattttctactcaggcttattcagcggatgaagaatggaaatttacatcaaaaaatgcatatatagacagaaactatgacaatccagatgtaaaagacacaggtagctggtcacaatcagtttctctattttacaactcaaatatgcatgatacgccgttagaaattggaggaaccccaattcaaattggcgcaaatgcttcagcacaatatgcagttcgtttaagccaagataaacatgttgcagatacggtattaccttttgataaagccacgcagtcacaagcacctgattatctaaaatatggcgcgaccttaaagttaggctataacaagacactactaagcattggtgaactatggctggatttacccgtaaccacagtagatgcaagtcggcaactcctgacgtcttattggggaactaatcttaagagccagctaaacgataagctttttgctgaaattggccgtattgaaaaagtatcaccgcgaaatgaagaagatttccatcgattttcttttacttcaaaaggtgtgactggttactccgacggccttaactatatagatcttcgctatcaatttacgcctacgctgaagggtgaatattactttggaaatatggaggatttatataacaaacattatgtcggcgttgaccacctatggaaaaattctaatttttcagttaattcaaaattcaaatatttcaatgctaaagataatggaaatctatttgacatcgacgcacaaaatatagggttactagaaacgcttaaagtaaaaaatcacagctttggtgtgggttatcagcaaattattggtgagtctgcttatccgttaccagatggtttcttgcctgaaacttatttcattaactggaacacgactggtttcttcaaacaagatgaaaagtcttatcacttcatctatggctatgactttaaagattatgtgcctggtttaaataccactttcaaatatgtatatggcgatcactttaaaacagcagatggcttaaaaaacaaagaaagtgaagcaaacgttattgtcaattatgcccttcaacagccttttctcaaaggtttagctcttcagtacatcttcatcaattacgacgttaagcatggaaacgatttctctgaaaaccgtttcttcgtcaattacagcaaaaaattttaa

SEQ ID NO: 66368 - DNA, 294 bp, Acinetobacter baumannii
atgttttttattaatgatgcgtttaaagatagcattaccaccaaaaaagatcttttatatttaataattttttctacgtcagtcttactaatcggagtttatattgcatttaaagtattaacttattcaatgaagttaaaatatgctaaatggttattagaaatggatcgaattgaaacctctataactggaatggagtcttctgagtcttctgagtcttctgagtcttctgagtcttctgagtcttctgagtcttcagtagaaattattaataatctagaacgccaaccttaa

SEQ ID NO: 66369 - DNA, 315 bp, Acinetobacter baumannii
atgacagtgttaaatgttggtgataaccaagaaataatccatttttttatgggggtcaaagctcattttgaagctatttttaaagattctgaatttgatactaattatttaattaattgttattattcaaaattttcaaataaaatgtttgcggaaaagcatggtttattacctgagagtcaagagctatgggaacattggggatattttgaggttgcacttagagtttattattatgaggttttaaaacataaaccagatcaactagcttttattgaatggttgaatgattttgtaaaagagtatagagcatag

SEQ ID NO: 66370 - DNA, 318 bp, Acinetobacter baumannii
atgattttagttagtcaaaaagatcgtatctggactgatagtagtatccctggagttcaaacctgtcgaacttggattagtgaagatggtattgaaagctatttagcaaaatttcaggctggaacaagttttcccaaacacactcatattggatgggaacagatcattgttttagaaggtgtgattcgcttcaatgatgtcgaaatgcaggctggagatgtgttacaagttcaaggtactgacgaacataaggcatttgccgtagagaacactctcttgttcattactcatcatggcggtattgaactgacggaataa

SEQ ID NO: 66371 - DNA, 600 bp, Acinetobacter baumannii
atgacatcctctacaaaaaaccatacacctttgacgcgagaaaaaatactaggagccgcaattcatctgtttcaacagcatggattcagcggactaggcatgcgacaaatcgctgattgcttacaaataaaggcgcctagtctctactaccattttgagtctaaagatgatctggcacgatctgcacttcaacactacagagaagagcaattctaccgattacaggaaattgaaaaactggatggcttaaccgaaaaactgtatgcgtattctgaacttttcgccgagatgctgaacgacgaaaagcgtctatgcttatatatggtcatggtgagagaggcctctttccagcaagagccatgtgtaagcgaattgaggttgttcgccaaacagaatatcgactggttagaagatactttatgccaagcaaaaaaagaatcaccccaaactatcgaaaatgggcaagatatggctgaaatcatatttgcttctctcgaaggtatcatggcgacctctctagttgatgagaacccatctacacactttcgctcaaaagctaaatctttcctcaacattatgttgcgcacaaccgttaaataa

SEQ ID NO: 66372 - DNA, 819 bp, Acinetobacter baumannii
atgacaaaattggataaaaagggtagaaagcctactcaagaaagacttgatctcgaggattcatcagttcatcaagaactagatgataatcttgacttcgtcttaaaaatccatgacggacatcttcatgatctagaaatatcgagtgttgctaatctattgtctgcacttggtcaaatcgtgggtgtcaaacaagctagcttcaaaaccattaaagaaggttcgacaactatagcagtaacagttcctcgtgattgtaaggctatagctatggctaatgttcttaaggacacagcattaaagcgtaaacaggttactcgaatacaaaaagaattaagtaagtatggtttccataatgctgaaatttcgaatggacatttgaaagaaaatcagccatatcaaccatctcaaattctatattctgtccctgaacttgattatgaagaaaacttcactcaagacgaatcaatagatgggtacttaactcgattgcaaaagggtaaagataattcagatcacatcactattattttaaataacggtgatgaaatccccgcagaatgttctcataaattattagaagaattacatccatactttaatactaacaaatgcttaagatttgaaggcatagcgtcatattcatcgaaaactaacacttatcaattaaaactcaagaaatactcgattactaaatttactgtgattgaagatatgggtcttgatcaatggattgatagttttagagcgcagggggcatctaattggtctaaatttgatgatcctattgccgagtggctgaaggagcgtcaggattga

SEQ ID NO: 66373 - DNA, 957 bp, Acinetobacter baumannii
atgaagaatgacttagtcgtaaaagataatgctttaattaatgccagctataatctcgaagtaacagaacaacgactgatcctattatcaattataagagcaagagaaacaggccaaggaatttcatcagacagtaagttagaaatccatgcttctgattatgcttctcgctttgatgtgactaaagaagctgcttataatgcactcaaaaatgcggttaataatctttttgaaaggaagttctctttcaaggagatccataaagatacaaacaaagaaattgtagtcaaatcacgttgggttagtagaattgcatatgttgatgaccttgctatattagaggtcacatttgcacctgatgttgttcctcttattacaagattggaaaagcactttacaagttatcaactcaaacaagttgcccaactcactagtaagtatgctattcgcttatatgagtttctaattgcttggagaagtactggaaaaacgccaatcatttctttatctgaattcagggaaaaattaggacttgatattaatgaatatcaaaaaatgattaattttaaaaaccgagtcttagaaccagcaataaaacaaattaatgaattgacagatatatacgtgaaatatgagcagtacaaaactggaagatccatttcaggcttatcattcacttttaagcaaaagaaagctgaatctttatcacaaaaaaaagatcttaatacattagatttattcacaaaaatgactgatgctcagcgccatatgtttgctagtaaactttcacagttacctgaaatgagtaagtattctcaaggtacagaaagttatcagcaattttctgtacgtattgcagagatgctgcaagatcctgagcaaattaaagaactatacccgcacttaaaaaaagtgggatacataccatccaacaacaaggacaccgtaaatggctaa

SEQ ID NO: 66374 - DNA, 555 bp, Acinetobacter baumannii
atggctaagttatcgctaagcgaagtatccaaacgctttaacgtcagtcgttctacattatatagagcaataaaggaaggccgcatatcccgaaatgcagatggttattttgacgttgcggaagttattcgatgctttggagaacccagcaaaaagcatgagcaaaaccaagaaatagataagcctaaagatgatactgatctacgtcagctagttgatttcatgagaaaggaaattgattcatataaggatcgagaaaaacgttatttagatcagattgaccgcttccaattattattagggcataaagagtccgaagagaaaatgtctcatgacacatcagtgagacaaaccaatgacacaccttgtgacaacaatcatgaaacacataaagatactgtaaatcaagaattttattctactgaatcacctcatgatacaccactaacacatctcaatgaagcaccacaaaacatatcaaagacacatcatgagacaaagaaaaaacgtggcttatttggccgtgttttaaatgccgtatttgataatgattga

SEQ ID NO: 66375 - DNA, 144 bp, Acinetobacter baumannii
atgcctaaattgaaagatattgctctgggtattgtagttgcgccactgttggtcccaatcatgctgattgcatcctaccaggatagaaaggcactaaaaagagagcggagtgaacgccaaaaagaaaaagaccatgcaccctga

SEQ ID NO: 66376 - DNA, 915 bp, Acinetobacter baumannii
atgaatttaactcatcgccagctgacgatgtttcgcgccatcatgctgcacggcaacctggggcgtgcagccgacgcgtgtgcgtcaagccagcctactttgagtcgtgagctggggcgtttggagcagttactggggtttaaccttttcgaccgggtgcgtggccgattaagacctactgtgcgggcactcgcgctgatgcaggaagtagaacgctcgtttataggcttggaacagatcgcagcgcgcgccagtgaattgcgtacgcaagcgacaggtcgcttgcgcattgcgtgtttaccggcattggcccatgccttggtaccgcgcgcactggtatatctctcacatacacatcctgaactaggagtcagcgtacatcccttagagtcgccttggttggaacaagccatgagtgaacaacgttttgacctagggttgagtgaaacacaaaaggcacctgctggagttaccttgcagcccttactgaaagttaatgaagtggctgttttgccccgtgatcacagcctgtgccgcaaggcacgactgcaaccacgcgactttacaggcgagcgcttcatcagcctcgcggttggcgacccgtatcgaaccgcaattgatgcgatgttcgaggacgctaaagtacatcgtgtaaccttgcttgaaactacgagttcagtggctgtctgcgccatggtgcgtcaaggccttggagttgccatcgtaaacccgtttaccgcaatggaactaagcggaccagacctagtagtacggtcgcttactgttgccatcggttaccaggtgaatatgcttcttccggaaatagcagctccacaccccctgcagagcgttctcgcagacacagtccgcaaagccagtgccgacttgagccaccttgaccagtgtttttattag

SEQ ID NO: 66377 - DNA, 1251 bp, Acinetobacter baumannii
atgaatccttttactcccactaccatcgctcctttggcccagcaattcagtaccccgctgtggatctatgatgccgacaccattacgcgccagattgccgctctgcagttgtttgacgtagtgcgtttcgctcagaaagccaattctaatacacatatccttcgcctcatgaagcgacagggcgtagtggtggactcggtgtctttgggtgaaatcgaacgtgcgttggctagtggttttacgccgggcttgcacaacgggcacgcagacattgtgtttacggctgatctactggaccgcgctacgcttgcgcgcgtggtggaactaaatattcctgtgaactgtggttccatggacatgctggatcaattgggtgcggtcaacccaggacacccagtgtggttacgcatcaatccaggtttcgggcatggccattcgaagaaaacaaatactggtggagagcatagcaagcatggcatctggcatggcgacctagtacgcgcctgcgaaaagatcaagtcaaacagcctgaccttgcatggcctgcacatgcacatcggctcaggcgtagactacacgcacttgcaagaagtctgcggtgccatgctgaagttggtagaagtagtaaatgcgcagggtttggacttgcacgccatctcggctggtggcgggctatccgttccctatcagactggtgaacccacgattgatatagcgcactacttttcattatggaatgcagcgcgccatgctgtggaacaactactggagcacccagtgaaactagaaatagaaccaggccgctatttaatggccgagtctggtgtgttggtcactgaagtacgcgctacgaagcaacagggcgccaaccattttttgatggtggacgccggcttcaatgatctggttcgcccagctctatacggtgcctaccacggtatggagttgatccactctgatggcacagcggttaatggcttgcagtttgacacagtagttgccggacctctgtgcgagtcgggagatgtgtttacgcagggagacggtggcgtggtgttacaccgatccttgccgcaggcacaggtgggagatttgctggtattgcacgacactggtgcgtatggtgcctccatgtcatcgaactacaacgctcgcccgctgattgccgaagtgcttatggaaaatggggagccccggcttattcgacgaaggcagacggtggctgagctgctcgcgctggaggcagtgtaa

SEQ ID NO: 66378 - DNA, 591 bp, Acinetobacter baumannii
atgaaaagatacctaactcatagcaaatatattaactttgaagatccatctattctttctcttgcaaagagcctagctaaaaattgctctaatgaaaatgatatagtacaaaaatgttttgagtatgtcagagatgaaattaagcacagctctgatttcagattgaatcctataacttgtaaagcatctgatgtcttactccataagacaggatactgctatgctaaaagtcatctactagcagctttattgagagcaaatggtattcctgctggactgtgctatcaacggttatctgtcggtgatagtggagatgctccatattgtctacatggtcttaatgctgtttatttaaaagcacatggttggtatcgaattgatgctagaggtaataaagatggagttaatgctcaattttcacctccacaggaacaactagcctttcctatccgatctaaaaatgaacgagatttacctgaaatatgggcagagccattagatataattatcaaagtattggagaattatgaaacgtatgatcaagtgctagataatttacctgacgtcaacttgatcgaaatacatttttag

SEQ ID NO: 66379 - DNA, 483 bp, Acinetobacter baumannii
atgtattttccgcaacctcgaaaatttgagattcctaaagatgatggtggtagtagcatctatacgcctgattttgaagttatttatacttctggtgttcggaaatatgttgaggtcaaaccctctgaaaatactcaaaccgaacactataagtccctcttttctcgcttttccaatttcttgcaggatactaatacagactttctgatagtgagtgaaattgaaatctatcagcagccattactatcaaactatgaaaagctttatcaatatagaaaacgccccttattaaaaatgaagaatcttcagcagtgtgccgaagatattaaagattcgatgccattagtacagctagtaaatagacttggtgatcgtgcacacttgagagaaatatattcatggattgcgctggggtatttgcgatttgatatgagctctgagccattgagtatgacaacagaggtgaaattcgatgtctgttga

SEQ ID NO: 66380 - DNA, 738 bp, Acinetobacter baumannii
atgaatgagttggctcttttcgcaggcgctggtggcggagtactcgcatcttatctcatgggatggcgaacagtgtgtgcagttgaacgtgatgcctacgcagcacaagttctggcgcaacgacagaatgatggaattctcgaagctttcccaatttggtctgacattacaacttttgacggaaaaccatggaaaggaattgttgacgttatatctggcggcttcccgtgccaagacattagtgttgcgggcaaaggcgcaggacttgacggagagcgttcaggactctggaaagaatttaaacggatcatttgcgaagtacaacccgagttcgcattcattgaaaacagcccaatgctcattactcgtggactcgacagaatcctctgtgatcttgcccaaatggggtttgatgctcaatggggaattatttcatgcgccgatattggtggagttcataaacgagaacgcacctggattgttgctaccaactcttggagcaaacgagggaaagggttcatcaaaaaaaagatatcgcggatcaaaggaataccgtgggaccaagatgtgcgaagcgttgaggacttgcgaagaagatccgatttacctaaacccctcatttgcagaattaaccatgatgtggcctttggggtggaccgacttaaagccattggaaatggacaagttcctttcgtggctaaaagcgcattcgaatatttagggggaatcaatgagtaa

SEQ ID NO: 66381 - DNA, 1161 bp, Acinetobacter baumannii
atggctattgaagttttcacacctgaaaaaacattgctggtgcaaagtgtaatttgttacctctacacagatcctggtcttggtaaaagttccattgctcatacagcaaataaaccagtcatttttgactttgacaaaggtcaacaccgtgtagcacctgagttacgtcgtggaacaattgttcgtatagatacatggccagacttagaaaacctaaaagatagtttttatgacaactatcaaacaattgtggctgataccgttggggccatgcttgatgctattaaagatcaattattaaagaaccctgacaatagacagcgtgatcaaactctaactctcaaagctcaaggtttagctggtaataagtttatgactatggttcgtaaatggcagagccttggcaaagatgtagtgtttattgctcatgccattgaagaggaagcgggcaaagaaaagctaaaagtatatagaccagatttagccggtaaaaaccgtaatttgctttaccgcatggctgatgtaatgggctatctccattctgccaccgatgagaatggcgatactattcgtactattcttttcaatccgacacctactcaccacgctaaaaactctggccgattaggaacggtaataaaaacatctagtggtgcagaaatctgtactggccaagttcccgtaccagagttaagcaattcgccaacattcttagctgatctacttaagcaagctaaagatcacatcaacactttgacgccagtgcaagctgcggagattaaagcccaagctgatttgagtaactttaaacagtcttgtgctgaagcaaaccacgctggtgatctaaaccagcttactgaatctctcgatagacaacataagtatgcccttcccatgtggcatgcaattcagttacgtgctcgtgaaatgaactgcacttttgatcaagagcagaagaagtggaaaaacccgccagagttcaaaggtatatcgaatgagcagcgagacgaattacaagttttcattgatgagcgcggtttagacgtgaaaacagtttgtgagcacttaggtatagatgccctcattcaaatagaagcggcaaaactaactgcagttaaacaagaaattgataccttagcgaaaacggggatgacagcatga

SEQ ID NO: 66382 - DNA, 324 bp, Acinetobacter baumannii
atgaaacccgatcaaagcgaggtcaaagtagaatttaatgttgaaaataaaaatgtttttgaatgtgataaagtagcttctatcttggttatattttgtaggatcggtagtcattctataggtgctattttaacttttatcggtaaacctgagcaaatatctaaaaagaaatttaaagttgaaaatggtgacttgataattgaaagaacatttgttcctaattctaataaaatagatttcaataaagaagttcaactattaatagataatatatcttcaaagtatatagatgaatacgatgttttttataattgggggcagtaa

SEQ ID NO: 66383 - DNA, 3120 bp, Acinetobacter baumannii
atgagtaaatcatttgtagaagctagaaaaaactttttaaactatttaagttcacagttaataggacccgttcaaggagaggaagaacaaataacagatgctccacataaaagatatttaatggggactctatttcctagagctgcttgtatggatgaaactgatgaggatgtggaacaagatacaacaactgaagctttaagtaatgattttaagccatcgtccatggcgttttcttttgctgtagcacatggtacaaaaattaatttagaaatatctgctgccaaatataaaaaacaagatcaggacactatttggactagaaagcctctcatatatattgaagatattgtcatagaaaaaacagtaagaaagacaatatttgatgagagtgcaaccctagatattacagttaggccctatacaaaaggatcaattgttacaatcgcgctatcaaataaagaaaattcgggtgatcgtctgaatcctgctcaatgcttataccaatgcggtttgaatattactgtaattgaagggcgaattagagagtacccgacaagtgatagatttaaactagatgatgagcagaaagatttaaatttaatttatcgtaagcgtatttcatgggctgtcggacatggcgtagctgtagattgggaactaaacgaacaccaagttcctattagtattaaaacgcaagttatgccattttatgaagtgaaggactttagtacagatttagatactgaaaaatattcagagcttgatgatagtattttaagtatctggagaattgtagataatcaagtacctaaagcactactacttgcagattatactaaattaataaatgcatatgatcagtggattgaagaactaaattcagaagagttggactcagtttataatgaagcaaaaaaaagaattatatctagattaaataaagtttctgatcgtttaaaaaaagctattgaattattaagtaattctgaagatgcctttactgcatttcgtctagcaaataaggcgatgcttatgcagatgatacatgctgataaaaattatgcaggggaatcaaaaaaaaaggattggggatataaaacccctgactatgattctattgaagtcaagcaaaaatataaatggcgccctttccagttagcatttcaactcttaattttggagtcaatcattcccgacgtaaaaacaaatcaatattctgaaacacatgatgatgttgatttactatggttccctacaggtggtggtaaaactgaagcctatttagttgttgcggcttgggagatgatatatcgaagattaaccaagggttctaagggcggtggaacagctgtaatcaagagatataccttgagattattgacttcacaacaatttcagagagcaggcacattaatttgtgcacttgatgcaattcgtaaaaaggattcacgtcttggtaatgagcctttttccttaggtttatgggcaggacagggaagtactccaaatgattataagagcgcttacgaaaagtactctctagctagacaagaccatgagccagaaaatattttccaattacattcatgtccttggtgtggcactgaaataatgccaaagatacatagcgaaagtaattcagcttatggcataaaatgtaatgaatttgatcacttttctttctactgtccgagtagcacttgcgagtttcatgagtttttacctattcaaattattgatgaagcactttataaaaatccacctagccttctgattgggacagttgataagtttgcaagattaacttggaaagaagatgcttgtaaattttttggtgataaaaaagtattgccaccttctttaattattcaagatgaattacatctgatttcgggtccattaggaacgatcgctggtatttatgaagcaggttttgattctattattgaatatttaggaggaaaacctaaggttattgcagcaactgcaactattcgtgctgcttcacagcagtgtttaagaatatttggacggaacgtaaatatctttccaccatctggtacagatcaaagtgattcattcttttcgaaagaagaaaaagaaaagcctggtcgtttgtatgttggggtaatgccttcgggacatactaacactacagcattggttcatacagcagctgctactttacaagctccatatgatctaggatttgacggtattacccttgatagttattggagtctaccaatttatcacaatagccgtagagagttaggcaaatcgatgactttagctcgtgatgatatcccagagcgtattaaaattattgccgaggaagcgagaaaaattgattgggttgaagagcttagttcaggtgtgctgggtactaaaattccagaagttttagctaatttaaataagccagctccggatacaatcgatattttaccttgtactaatatgatttctgtgggagttgatattagtaggttgggtatgatgattattgcaggacaaccgaaagcgactgctgaatatattcaagcgtctagtcgagttgggcgtaataagcaacgcccgtcgggcattgtattcaccttgtattctgcaacaaaaccccgagatcgttcacattacgaaacttttaaaagttatcatcaggccttgtatcgatatgtagagccgacaagtgtaactccatgggcaatgcctgcattggagcgagcattacatgcatcattcattgctctgatacgagtaagtggccatttgagaaagaatacaaatgcacgtttttttgaccctaatcatgatgagtttaagaaattaaagaaaatttttaaaaatagaattgctttagctatgcaaggccttacagaatcgaataaagaagaagtttatgattatttagatgagttgattacgagttgggatgagcgtgcaaatgcaacaattaatcaattaacacattatgaatctcaaaattcaggtaagcaatttcatccattaattaaatcttttgaacaggaaggaaattctgaagcttggaaaacactgaattccatgagaaatgttgatactgaaacaaatttatatatccgtggggagtcaatgtaa

SEQ ID NO: 66384 - DNA, 1794 bp, Acinetobacter baumannii
atgacatcaataaagagagcatatcgtagttcacaattgatttcaccatttggaccgggttctattattgatcttggggaagagtctttaattttagtagatcctcatctttggcctgaagaaaagttagaagaaattaaacttgataggcttaccaaagaagccggtgtttgggcattgaaaaaaccacccatattaaaaagtaaatatgaaaaagttaataaaaacaatgctttgatggtggttagattcccaaagtggatgttctgcccaagatgtagaaaattagagtattggcgtaatgagacgggttcagtaaataagcacggtatacccatgtgtacgaacattaggtgtaaggaaaaggctcttgttcctatgcgttttgtagcagcctgtgtgcatggacatttaagtgatgttccttggagtctttgggcacatcgtgatgctaatgagcgttgtactagcccagagttgtactttaactcggatccaaaaaaaggcagtggactggatgctctatatattgaatgtaagaatccaaattgtggtgctaaaaaggatttaaaaaatcttatgagcccgcaggctttagcaggtatcaaatgttttggtactcagccttgggagtatgatgatcagaagacatgtagtgaagaattaaaagttctgcaaaaaggtgcgagtaacttatattactctgtagttagatcggcattagatattccatttaatactataagtaatggtaactcggtctacgaaaaaataaaaaaatcggaggactttgaagacttaataaaagctattgagaagggtagggatagaaaaataaaagacttaataggttatattgcagacgagttgggtatatctgaacaagaaattactcgagccgtgatgagtcaagaaaaagatcaacgtacttttaagataccatctgataaagacctgcgtttagccgaatgggaagtactatcttcaaaagatatcgaacaaaagagttcggtaacattcaaagctgaagttatagattggatatccgataatgattttgaactaaaccaaattataagtagggttgttttattacataagcttcgtgaggtgagagcattctgtggatttgagagaatttcacctagtgacaatatagttgctccacaatctattaatgcgtctagatcttggttgccagctgtagaagtatatggagaaggagtctttttagaatttgatatcaatcatattgaagcatgggaatctaatctttcacctgatatgagagtaaggttggagcgtttgatagcccgtcatgccggtttaacaaataactatttgccagtacctaccgccaaatttttaatattacatactttttcacatttactcataagacaattgagttttgaaagtggttattcaagtggctctttaagagaaagaatctatgcagaagagggacaagctgggctattaatttatacggctgatggggactccgaaggtagcttaggaggattagtacaacagggtaaattacaaactttgttacctttaattttagcaactttggaaaattctcattggtgctcaaatgacccagtatgtagtgaaatggagactcaaggtgtaatgggccttaatcaagccgcttgccacgcatgtacattagtgtctgaaactagctgtgaatataataatttactgttggatcgtaaggtactcattgctgaagatggaaaaggattcttcagtaagattttaaaacaagctagtgagttatcttaa

SEQ ID NO: 66385 - DNA, 1257 bp, Acinetobacter baumannii
atgtttaagcgattgatttttttggatttgtttgccggcgcagggggcctgtcagaaggatttattcgtgctgggtttagacctgttgcgcacgtggaagcagatgcttcagcatgttttactcttaagacacgtcaagcttttcattggttaaacaataatggcttgcagtataaatacattcaatatttaaataatgagatttccagagaggagctttatcaagaagtccctaaatcagaaatagattcagttattaatgaaactattggtttagaaacattagatactatatttgataggattgataatctccttgtaaaccgaaaattagacttaataattggtgggcctccatgccaagcttattcattaatagggcgtgctagaggaaatatggttaatgatgctcgaaatcatttatatatatattatgcagagtttctaaaacgttatttacctaaatactttgtttttgaaaatgtattaggacttttgacagctagagaccctgatggtgaactctattttgataaaatgaaaaaattattcatagaaattggttatagccttgaatataaagtgttatgtgcaaatgaatatggagttttgcaaaatcgaaaacgtattattttagtaggtaaaagagggcatcgttctaaaaaatctttttatcccgaaccagaaaaatggatgcctgaagtttgtgtatgggaccttttgaatgatttaccaaaaattcaggctggaagtggtacggtcacacctcaacaggcagctaaaaaaccctctgaatggcttgaaaaatcaggagtttattctaattttccaattacatggcatcaagctaggccacattcaaagcaagatctagaaatatatcgatatgctgtaaatttatgggatagtgaaaaaagaagattacattacgatgatttgccagaatatttaaagagccataagggaagaaattcgtttgtagatcgatttaaagtggttgctggggatatacaggctagtcatactgtggttgcacatatatctaaagatggtcatcattatattcatccagatattgaacaaaatcgttcacttacaccgagggaagctgcaagaattcaaagctttcccgatgattatttttttgaaaatgtttccggtaaacctgcgcgtacaagtgcttttaaacaaattggtaatgctgtaccagttttacttgctcaaaaaattgcagaacaattattaaggaattggtaa

SEQ ID NO: 66386 - DNA, 921 bp, Acinetobacter baumannii
atgaagcttttattttctaaagatgaactaaattctaaaaagttaagtgatttaatattaaacctatttgaacaaaatgatcatattagttttttatgtgatgagactttattgagtggattttttgatgagtttattgaaaagttaaaagattatgaattggaaccaatagagattgcagctggcgctaaaaaaaatagccgtccagctcttttctttataaaaataaaaatgaaagaagatctagcaaattcattagactttattactcatacattattaatgaatttagatcaaaatgaggatggttattttattcatggatttagcaaaattgatgatctaaaaattgcagttcaaacttttaaaaaacttattattgcaaaagatacaaagaataaatttatttttcgttggtatgatccacgagtgttagtttacttgccagcaataattgataagaaaagcgagcgaattgagtcatttttagagaattggcattttgttttttttaacggtttgtatgaggtgaaaattcaggaaaaaaggtcgctttttcctcttacttttacaaatgctgagtcagcaaaactagatttaattgagttatcgaatacagtaattaaacaatcacttatatatgacgagaagttattgattcgtcaggatgagatattggattcacttcatcaagcaataacacattatggaattttacatgtaacggatcttattgcttatggaatgtattccgttattttgcatagaaattttataaaaagtcgtttgatttcagacatacttgatcattattgggttgatagaagtgaggccaactcatttaccaaagcaatggactatttagaagaaaatcaatattcacaagttataagagaatgtaaagagagctaccatggctaa

SEQ ID NO: 66387 - DNA, 2679 bp, Acinetobacter baumannii
atggctaatgataaaccgacttttgcgaaacaaatgaaaaaatttgggacgccagcacaacaagagcagaaagtagttcaaaagttaggtgttagtccaaacccaagcaaaattagtcagcaggctgctgcatcgacgactcagaataataaaataccagtcactcagatgtctaaaaaggaatgtactaacttttgtcgccctacaggtataaatatattacctcttaaatattcggtagctcgtttaggagtaaaaccattaccagcacaattagggggcaatgttactaatgttccacttaaggaatataaatatacggttcgaatgattgattcaggatatatttacttactcataaaaagaaagtcagggaaaaaagagtgggttgcgtatattactaataagaaagggtttcatcaggagtttcctataggaagtaaagctccaattgttgctcaagattttgcatgcaataaagctggacatagtgctaacgcttctttaattactatcccttcggtaaataatgatgatgctcaaacggtctatttacttcatgctcacgctccactcaccaaaaaaataagagaaaaatttgaaaaaaatgctgatcagtatgcgacttcaggctactggcaaaaaattgatgtaacaaaaggagctgtccagcaacattgtctttctagtgcccagttaagtgctgttgcattacctttggaatcatatggttctgctcgttggggagcaataaacaagaaatttagtgagaaaccgaaagagcatattggtgttgcgctctatgatccgattggaattacttctaaattaaatgaagatcgtaatatattaagctttaaaggggttgatagcttcttaaaagaaaataaagacggctttagcaacgaacataagcttcaaactatgactttgattgataatatcgaatctactttgaagcaaaatttgataagtgcaaaatttaaaaacattgaagctaataaaaatacagcgttgggtcatttgcaatatgacccaagaattacagctcatttagataagaaaactgtagatcaagtcaaaaaaaatattgagaaaactgccgaacaacataaggttagtgcacatcaagaagcaattgtgcaaggtaataaagcttggggagaatatcgaaaagaacttgacatggatgctttagataaatttcgtaaggatgtcgataagaaatctgaagaaagttatgctgctgcggctcgctatgtagatgatcattataactggttggtttcttctaatctgttaaaaggtttattctattttgaccaaagtgaagaattgaaagaggggaaagtatcaaaagaaagcaacggctttattttccatgcagtcattatggatttaatgtatggcatgaatttattacagaaaggtaaagatttattaaataaatggatatgcgaaaaaaatgtttcagataaaaacttgttcttgagagcctattgttttaataacaaagtcttgatggatgagtatgccaaaatatttgaaagtccaagttcagcaaaagatttactagattatagtaaacaaggtttcactacatttaaagaagccgatgctgcctttgatagttggttgagtagtattgaggggagaaaatttatctcggcaaatgattttaaatggccagataaactgttctactggatatctttgatgctgaatacggctctaaaagagtttggtgatatacgtttaagaacaataaatattagtacaattactataatggcgcgtgaaggtgctcaaaggcatacagctcaactgttatatttaaggtcagggaatttagctcaacaagtcccattaacgagattgatgtataacctagaatttagaaacgctgcaatagcatctttaccgcaaagtggcatggcttatacttatcgtaatactagggcgatagaaattaaaaattcggtatccttagcagttaaaggacaacctgatattaccaaaaaccgaatacttgctattgtgggagtttttgagttactgaatttttatttccaatatgatgcttggaaatctgatattaaagataaaccggagttatctttacaattaacgggtgctttgtttactttaacctctgctacttttgagatgttaggagagggttggtcaaaaaaaggagtaactgtagctaattcaactgctgcccttagaattactgcaggagggatgggggtaattggtggaattataggcttggttgtggatagcaagaatcttaaagatacaactaataataccttaaaacttttgttaacttttaagatagcggctaactttctattagctgtaagtcaaactttggtttttacaagtgttgttgtatctcatatagaatggcaattaactaaaaaattatcaataaaattatctagtagtgtaattgttgcaagattagcaagtgcaagattcttggcagggatcaatattataactattggtcttgttgcacttgaatttgcattaaagaattgggttttagatgatgctttaaaggattggtgtcaaaaatctgcctttcataaagcaaaaagtggtgagaagccgtttaaaaccgcagatgaagagtacgaagagtttaataaggcaatagtgagtgtttga

SEQ ID NO: 66388 - DNA, 819 bp, Acinetobacter baumannii
gtgggtttagctggggtagggtttggtagaacagcacaatactatggtggctcagcaatagctggatcaggaacaggtgcacttatggaaactgggattcagagtgctgagtggattaattatgatataagtggcggaatcactggacgatctgaatatgatttaggacaaatagcattttcaagtgtggttgatggggttgcttttcctttattaggtgcgataccagcattttcaaattcaaaatataatttggacttacaatcacctatatattttgacgtaagtgcaggacgattgaatagtgggttacctattgagtttagatgtcctattattaaagaagcagatagtgtattaattaattcagaaatagcagcattacaacggattgctactaacaataagtctgacttatattggggaagcttgcgtagagcttatcaagatgctcgtggacagattgattttgcacatattgaggctgatattgattttagtcaagtagctagtaagcaagtgatgggaggacacttttcaacgtcgcctcttttgaaaattatagaaggtacagagcacataggtcaaaatggttctattcaagctaaggtagagttgcttactatcgaaggaaatttttatacaaaaacgaataatggtggttattcatcaatgactccgcttacatggtctttagcacaagctaagggggaaatgagcttagcatggttgaatagaagtttagtatcaggtaagacctatgaaggtaagtctggtggactatcgtttaaattttttaaccgaattatagaaatgtga

SEQ ID NO: 66389 - DNA, 459 bp, Acinetobacter baumannii
gtgaagaaaatagtggcagagttaattctattaactaataaatctatatatccaagagtttattgtattgatgaaaagggaattgagaatgaagctataactctgacactttgtgatacgatatgggagttacgtggtaaaccccttttagaattaaaggagttaataaataattctatatcagggaaatatcatccaattaatcaagagttaccggatatgtctattaacgataaattcatttgggtgagaacatcatttgcaaataataatgaaatttgtatttcaaatgaaaatatacctgaatattccatagatgagggattgccacaatactttaactttgaacagtttaatatagtaagtaagcttgtagaggactttgaaacagaaataattaagcatggtaaagataatttgctcggctttaagtttgaagttacgttcccagagagttaa

SEQ ID NO: 66390 - DNA, 174 bp, Acinetobacter baumannii
atgcgaaacggttgtttatacttctgttattcggttagatttgacgatataaatggtgagttaattgctcaagtcgacagggaaaaaccgttagctatgaataaatggcatagtacaaaagctaaagtcttagatgcagtaaacaaattattaggtaaactaaaaattaactaa

SEQ ID NO: 66391 - DNA, 285 bp, Acinetobacter baumannii
ttgggattacaaccgggcgaaaccaaagaaattgagcctctactctacccagactttaaagatgttccggctgaacaaccttatcgttcacgttcatatgtgaaaaaaccgggtggcactggcggtaagccaatggttcgcaagaacaaagatggatctgcgaaaaaatctggtacaaagcgtatttggcaaatggatgaaagtgaaaaaccgcgtcgtaagactaacggtacaacgcgtccaaataccaaagcaccacgtggtcgtagccgtaatagccgataa

SEQ ID NO: 66392 - DNA, 516 bp, Acinetobacter baumannii
  misc_feature (456)..(465): n is a, c, g, or t
atgaaaatcgtcattctcaacaaaccatatgacgttctctcccagtttcgtaaagacgaagcacacatgacggtctctgactttgtagatgacccgactttgcgcatagcaggccgtcttgatatggactctgagggtttagttttcttaactgatcatggtggtttgaatcagttcattaccaaccctgcgaataaaaaatacaaaacgtatttagttcaagttgatggcgatgtaaccgaagaagcgctcgagcagcttcgtaagggtgtagagcttaatgatggtatgactttaccagctaaagcaattaaggtaagtgagcctgaatggttatgggaccgcgatcctcctgtacgttaccgtgccagcattccaacatcttggattgaaatctctatttgtgaaggtcgtaaccgccaagttcgtcgcatgacctccgcggtaggttttccnnnnnnnnnngttttccgactttacgtctcattcgtacaaaaattggtacgattgacttag

SEQ ID NO: 66393 - DNA, 1488 bp, Acinetobacter baumannii
atgccaacacatcaatatcgacagtctaaacgtccttttttgtttaaacccaattaccttgcgttggtattgggagtattaattgcaacgcctatttatgcccaaagtttaagttatgctgaagcagaacaacaggctttaaaaagctcatacagcactcaagccaaccaagcattacaacaagcctctcagttagaagccgaagcggtaaaaggtttaggactccccagagttgatttaaatgtgagagcatatgcttttcatagtgaaacagatgtacccttaggctcttttaaacaaaaacttgaaaatgatttaagccaaggactcaatgataaattatcccagtggaacaatgtcattccatcagatgttttaggtcaagttcaggagggctcaaaccaaatcatacatgacggtataaaccgttttcctgactacgctaatttgactgtagaagaccaagtagtccgaccatctatttcagtggtgatgccgctctacacaggtgggttaacaactagtgcaaaaaaaatagctaacattcaggctcaacgctccgagctttcaagccaacaacaacaagatatccagcgcttcgaagtcgtacaaagttattttaatgtgcaattacaacaacaactggtcgcaagtagtctatttaactttaatgcaatgcaaaaacattacagcaatgcgttaaagctcgaacagcaaggttttattagtaaagggcaacgtatgcagtttgaagttgctcgtaacaatgccgaacgaactctacaaaatgcgcaggcaaatctgaatgctagccaatttaatttaaacaatcttttgcaccagcaaaataatgctgatttaagtactcctctttttgtaaatactgttcgtagccaatcgttagaatctcttttaagcagttactctcaaaaatccagccttgtgcaaaaaatgcagttagatactcaattggcaaatgcaaatattcaggctcaacaagcagcaaaaaaaccgagtcttttcgcttttggtgagtattcactcgatgaaaatgaaaactggattgtaggtgttatggcaaaatacaatctgttttctggcgtagataaaaataagaatattcatgctgccgagttaaaacgttatgcttcggaactcatgactgaacaaactaaacaagagattgaagcattattgaataagtcctataacgagctcaattcagcacagcaaagtcatacgctattacaaaggaatatcagcgcagctcaagaaaacttacgtattcaggaactttctttccgagaaggcatgggtacagcgactcaagtgatcgatgcacaaaatgcattaagtgctttaaaaacagaaatggctttaaatgcttataaatatgtcatgtcgcttgcaactctgttgcaaagccatggttctatggaccagtttaaagcttatgtgactcaaccacacactgactatattcgctaa

SEQ ID NO: 66394 - DNA, 399 bp, Acinetobacter baumannii
atgaaattatcatcaattattcttatcttattttgtttaaattctagttacttacatgcagaaaaattagaaaaagaaaaaatcgaagcttatataaagttgttagaaaattatcgaactgctgaacaaaacttagaaaattatttaagcggaattcattcggcaggacaagtcagctttaaacatcagatgagaatagcagaccttttatgtgatgttgggaaagcacaaaaaccaatgattgaatttatggagtcaaataaagaaagatttggcttaaaagatcaggatattatgaatattttcccacttgaacgtcaaaaaatagtagaagaattagaagacataaaaggtacaccgtatgagtgcggtaaacagagttataaacatttgttgtga

SEQ ID NO: 66395 - DNA, 1026 bp, Acinetobacter baumannii
atgaatggattgaataagccgttgtatagaagaaggattcctgaaacctatgttcagttattgtttgaatatctcgaaaaactaggacatgacccagaaaaggtgctgggtgaaccgtggcctaaaacagattcaaaccatttagaaggcgtagatattgatcattgggaaagtcttcttattattgccaaagattatttaaatgaccctttcattggtttacatgtgggtcaaaccattacagctcagcatctaggtgttttagggtcagtatttcttgcttgtgaaaatctgggggcggttttagaaaggtttgagcgatatcagcggcttgtctatgatgtttatccagccactgttcgtatttatactgaatatgtagagctttcatgggatacaaaaggtgagcaagtcggccctttatcggacgaaactggccgtaccgttatagttcaattttgccgtagtctcattagaggaaaagaaagacttaaagaaatacattttattcatgaacggcctgaaaatgttcagccttatgaggagtattttggttgtcctgtgctttttgaacagcctgtggcactgatgcgttttgataaggaaatcttaagtctaccgcttaaaaactccgacgccgccttagttgccatactagaaaagcatgccgacaagttactggcaagtctgccacatattgatgaaattacagatcaagttcgtaaacagattgcttacttacttcatcaaggcgaacccactattgaacaacttgcagagcgattaaattattcacgtagaaccttgcaacgtcgtttaaccgaggcaggtacgaattttcggaaagaattaaatactgtccgttacgaattagcaaaatcgtatttaaaagatctaaggctacaaattgtagaaatagccttactgttaggttatgccgaacacagcccatttacacgggcttataaagagtggtcgggtaaaacaccacaacaagctagagaagaaatgaatgaattaaggtag

SEQ ID NO: 66396 - DNA, 1149 bp, Acinetobacter baumannii
atggacttgaatttacagcgtgtaaataatccatctatgagaattagtgtaaatcagattattggatatgttcgtattgaatctgaggaacaatctaaattatatgaaaaaagtgcacgagacggtctccgagataatgaagcttataagaatctagttgctatttcccaacgtgtcttaagactattagaggaaaatagatttagatatcgcgagtctacgggtaaatcgagaaaaaataatgagtcaattgatgagaaattgaataacattttttctagtgaaaggctgtcttcaaagattcaaaatactttagaaaagtcaggcctctcatctgataaaaaagataaaatatctaaagatattataggattggttgaagaggatgccaagacaaagacaaaagaattggagtttattaaacgtgctgttgcaatttatcagggacaagcaacattaggtaaaattatcaatcgattaattcatgaaggtcgtagaccacttaattactttcagaatgaaattccaaacttaaaacgttggaaggaaaaatatgatcaaagtcatgatgaaaaacactttgctaaagtgcttgaaagaattgatggtgtcctagagaatacaaaacatttcgtagttttatttaaaaagattgatccattagcaactgcccgtagaccaaataaaaaagatgaaaatcttaaaaatattattttatctgcgcttaatatttttgaaaaagatattattgataatgcaataacggtaaatgtctcttgccctgatgagcttacttatttgtgttggaagcaagatattattgctattctttataatcttttagagaatagtatttattggatggtcaccacaaattgtctaaagaagcatattgaaattactattactgagaaagatggtagatttgaatctattatttatagtgatactggacctggaattaaaatcgaggatatagagagtttagtgatctttactcccggattttcaggtaaaccggatggtggtaccggtctaggtctttcaatagcaggagaagctgctgttcgaaataatttaaagttgcaagcggaagaaaatttggacggggcactatttaagctcatcagtaagggggatgaaaagtga

SEQ ID NO: 66397 - DNA, 861 bp, Acinetobacter baumannii
atgaaaagtctggcttttattcatcgtaacgatactcgctttgcggtcggtgatttttatccagttctttctgttttttcctaccatgagttaggcaataccctctcacccttcttactactcgaccatttaggtcccggaaaaattgcaccttctatgaaacgtagaggagttaatgatcatccccatcgtggattcgaaacggtaacacttgtttatgcaggtgaactggaacataaagattcatctggtggaggtggatttataagtgctggcgatgtgcaatggatgaccgcagcctctggtgtgattcatcgggaattgtttagtgaagagtattctcgatctggtggtccttttgaaatgattcaactttgggtcaatttaccagcagcaaataaaatgaattctccgcgctatcaaagtttaaagaaagctgaaatacctatggtgaaactggaaaatgaagctggatttgtacgtattattgcagggcagtttaagcatgttatgggccctgcacttactcacactcctattaccgtattagatgtagagctccatgcaggtcagcaagctgcctttcctgctcaatctggtgaaacagctttagtttatttacgttcaggtcgggcacaatttcaaaaagatgaagacgttttagaggaacaaggcctagcagtcatgtcaaaccaaggagagcatttctctattactgccctgcaaagttgcaaattacttattttgacaggacaacccatcacagaaccgattaatggtcatggtccatttgtaatgaatacttatgatgagattttacaagcctataatgatattaaaaatggaagatttgccaagtaa

SEQ ID NO: 66398 - DNA, 918 bp, Acinetobacter baumannii
gtgaacccttcttattacgaaccctctaacatcacaaatgagcttaaaaaaaactgggatataggaattatcagtaattctgatgaagagcgagcaatcttctctaaagaactacttaatgagaaaactaccgatctaattactttaaactataaccctgacgaatttagctttttaattgaaaaagatgaaacgagtgataccctttttacacatgatttaattgattacttatctgaatttagagataaatcaattgtaattgatgctacttcttttgatattgctgttttaacattcatatgtaaatcattgaaagaattaaatattctaaaaattgatattctatatatagagccagaagactacgaaatacaaaggacttttgatgaaaatgattacgaccctttgctttcagacagtacattaggttttgaggaagctgccattcctgatatttccaaacctatagaacaagatgaaactaattattttatttttcttgtaggttatgaaggtgatagacttaccaatgcttttcagaaattagactttaatttgcaaaaatatgaatttatttttggagttccaagttttatatatagttgggagagaattccctttactacacaggctgaaattctgctcgaaaagaatcaactagcacaagattatattcattattgtggtgctaataatattattggtacctacagattaataaaaaacttaaaaaatgaagcgcaattcgacaatatcttcttagtacctctaggaaccaaacttatgagtctagctgcaattaaagctgtttgtgaagacatggaaaagacatttatattgtatgattatccaagtaaaatgtcaggtcgtagcaaaggcaaaaataaagttcatttgattgagaattttttataa

SEQ ID NO: 66399 - DNA, 246 bp, Acinetobacter baumannii
atgttgaatatagtacagcctaatatttgcttcattggtagcagtaatttgtctttagctttaattggaggtttagttttaaaaggctttcaaagagaaaaaattaatctaatagaggaagtcaaatttgagaatcaaatcattctaaagcaaaagcaacatgaggtgaaaaaggcagatatagttgttctattactagacccaaaagacttaaaggctatactggcgcccttaaaaaatggttag

SEQ ID NO: 66400 - DNA, 237 bp, Acinetobacter baumannii
atgggggagcagtttatttttgcttttattatattgttacctgtcattttaggggtgtggttggtggatattgctttcgccataatgtcgagatcaatgccacaagctaatatttattttttggctctcccagttaaatttattgctggtttggttttgcttatgttggctatgccaatgatcgtccagaatatacctcgactttttgatgaacctttaaaactgattctgttttaa

SEQ ID NO: 66401 - DNA, 141 bp, Acinetobacter baumannii
atggtagagatgcatatcgttggtggttatgtactgaatatacagattcaaaaattaatgttaatcgatttacgcttagtccaaaggacggtaaaaaatttaagaatgctcgaacaatggaagaaattattgtctttttag

SEQ ID NO: 66402 - DNA, 936 bp, Acinetobacter baumannii
atgtcatttgaacaatcattttatacaaaaactcgaattaaaacacagaagcttgtacaagcaggtttttggggaggcattaatcaaaatagatttaataaatggtgtgatgaattcaagactccagaagaagaaacattattagcttttttattagactctctagtttatagatcacaaggtcaaatttcaggccttatacatcagatgattgatgtagacctttcctccagcattgattggaaagatatacttgatttggataataaacatccaactttattcgatctattatctgataaatatcctcaaaatttacagaaaagaattgctcttgttcccgttataaaaataagtgacccgcctactaagagtggacctctactagctagaattattcacaaacacaaaataaataataaatttatgtgttggccttgggattcaaatcgtttacataacgaggatctcagagtagtagtattttttgatgactttgtcggaacaggagatcagtttactgatttttttaattattttaataaagtagaagctttcggcaattcaagtaaaatacaatatatatacatagctttttcaggtactcaagaaggcgtttcattcattgaaaatcatacaaaaaatcaagtaaaggtatatgttgcagaattgataaaagactcaaacaaattttttagtggctttccaattcgatacgaaaaactaaaaaatatcatagatatatcagttaatgaatatagagataatttaaaaaatacttatactaattttatgcaaaataaaggtattagacgtgaaatttttggatacaatgatttagagttgacgcatgtcttttcccatggcacacctaatggtactttaccaatattttggtgtactaacccatcttatacagctccgtttacgagataa

SEQ ID NO: 66403 - DNA, 267 bp, Acinetobacter baumannii
atgattaagtataaattatgtctggcactcctattgggagcctcaacagtagctaatgctgagtttaatatagaaaataatccaaatcagcctgtatatatcaaattagggtatcagaatgtcttaaattcttcctttatatatactgatgtcagcaaaaatgtagatttgaaaaaaaatatcgttactgttccatatggcgaagttacagttttactaaatccagttttgaataataataatgagataaaaggaagcttatactga

SEQ ID NO: 66404 - DNA, 573 bp, Acinetobacter baumannii
gtgtataagagacagggctataactcattaccattaaaagcaaatgctagctcgtataatgaaaaaaatttagaacaagcaacaaaaattgcatcgagatttaatcgtacaagctatagggctagtggtattcatcagggagtagatttagaagctgataatggagttaatatttatcccgtttgtgtgggtactatcgcaaaagtaattcccgcatatcctggttatgggaaaacaattattttagaatgtgatgtaaatgatttacctagttcaaaaaaagtcttagcaaaaaatttagacacaatttactttatttatgcacatttaaattctataaatgtatcggaaggagatagtataacgactctcgatacagttttaggaaaaacgggtaatagtggtaatgctgggagtatgactagaattgaagatggttcccatttacattttgaagtgcgttctgaaataatgaaatcaatgggtaaatctggaatgtcttatagattagatccattcccatggctagataattgtatgacaactgaaaatggtgttaaagtaaataggtaa

SEQ ID NO: 66405 - DNA, 216 bp, Acinetobacter baumannii
atgtcaaagttcaaaggtaaatttatccaagacattgttgaagtacaaaaagatttaccagaaggatcgagatttgaagtaactgatgctggattaatacttttactaccaaattgttgggttgaaagcccaaacttgatcaataatttccgtaatttattcgaagtgttaaagccattgaaggttgaacaaaaatcaagcttaataatttcatag

SEQ ID NO: 66406 - DNA, 576 bp, Acinetobacter baumannii
atgccagtatttaataaaattggtgcagtatgtgcactgacagctttattaacggtcggttgtagcacggtaagtaagactgtatctgatacagcccatgcacttaccacaatgcatactaaaaaagtggtggatgttaatgaagtgacagccaatggtataggtaaaaaaattggtacgattagctttcaagatagtgataagggcttaatcattacccctgctttagcagatttaccaagtggtactcgcggtttccacattcatgaaaatccatcttgtgcccctgctgttaaagatggaaaaccaggcgctgctttagctgctggtagccactataaccctaaccaagccccacatcatggtacgccaactaccgggcatttaggcgatttaccagcattagtcgttgacaatactggtgtagctacaactgctgttattgcaccacgtttaaaacttgctgacattcaaggtcgcgctatcatgatccatgctggtggtgataactattcagattctcctttgcctctaggtggtggcggagcgcgaatcgcatgtggtgtaatcaaataa

SEQ ID NO: 66407 - DNA, 366 bp, Acinetobacter baumannii
ttgttagctgaaatcatcccaccattaacatatgtacgtgataacttaccaggaaataaagaaagtagcactagaaaagaaaagctaaagagggttattaataataataagcaggaataccattatttacctagattattagataattttgatggaggttttatcgattttacctctgtaaaaagttattctaagaaagaaatagatgaaaaatttagcggagttaaagttcaaatctctccatattttatcagtgatattcttgggcggttctcaagctattatgcgagacaaggtcaacctgatttgcatcataatgatagttatatggctgaactgttaaatcaggatacattaactgcttaa

SEQ ID NO: 66408 - DNA, 402 bp, Acinetobacter baumannii
atgggagccctatctaaacaagaattagatcatcttcttcaaaaaaatttattcgaatatccaggttatgtttcagatgtaaaaaagtggattataaaatcaagtgtgtttgtattaccttcctatcgagaaggggtgccgcgtagcactcaagaagcgatggcaatggggcgtccagtgattactacaaatgtcccaggatgtcgtgaaacagtagtaaacggagttaatggctttctcgtaccgaagtgggatcctgaaactttggctgatagaatgtgttattttattgaaaatcctcaacagatcaatattatggggcaagaaagttacagaattgctctagagaaatttgatgtgaataaggttaacaataaattattgaagattttaaccttgtaa

SEQ ID NO: 66409 - DNA, 207 bp, Acinetobacter baumannii
atgattgataatacaattacatttctaataaatgtggttgtcgctatcattgctagaggaataaagcttagaagtgttaaagaaacaaatgttgacgtagggttcattaagttagctatatcaacttgcttagaagtttcttgggcgaaacaacttatacttaaaaatgaacagagcaaagcgattaatactttacttaatgattga

SEQ ID NO: 66410 - DNA, 510 bp, Acinetobacter baumannii; identical to SEQ ID NO: 45887

SEQ ID NO: 66411 - DNA, 564 bp, Acinetobacter baumannii
atgagtaagtatgtccctaattcattccaagttgcgaacgcttttgtagatgaagcaatgagtaaaatctctgatgcttcagtaaaaatctatttgattattaaccgtaaaacacgtggctgggcaaaagaatgtgatgcgctttcacttacgcaactagaagaactgtcagggaaaagtcatccaacagtcgttagatgtacaaaagagcttgttaaagttggtttagtaagaaaacatgagcaatctgtatatgggaatgtttactcattaatagacaattattttgttggtgagcatgtaaacttcccaaacaagagttcagtacttgttcagtcttttagcttatttaatgggcagctagttaaaatttttaactaccaaaagcctgtgtctaaaaaatcagttaagagcaaaaagagtaaaaatctgtgtttaaattttccacaaaaatctcggttgctagttaaaaattttaactaccttgaaaatactagccagttaaattttttaactactgctagtaaaaattttttacccctactagttaaaatttttaactag

SEQ ID NO: 66412 - DNA, 204 bp, Acinetobacter baumannii
atgtcacatgtacagtctgaaattgaaagggcgattatcgctctaattatagaaaaaatgaacaaatatagtcagtttttctatacaactcataattatgatattttagatatgaatctgcctattcatagttatcttaaaaatgatgttttatgtactttgccagacacatatttaatagatgaactcatgatggaagattaa

SEQ ID NO: 66413 - DNA, 696 bp, Acinetobacter baumannii
atgagtaatcctaaaactgtttcagttgatggtattaaagtattaattggcatcttccttaaccatacccaatatatcaatgtggtggaagatgcatctaatattatttgccaattaatagataagcataaagatacattaattaaagaaaataaagatggaacaataaactttaatttaccctatattgaaactaaacatgattcaaaaatactaatttcttatcgaaaatttacaagacatattctattagctgttcgtcaaaaaaactttattaatgaagtaactaaagatgcaaaagatgcagcaaatttggcgtctaaagttgctaatgatgcctctgttttggcgattaataccgaaagtgaaataaaaaactctgttgtaaactatattactatcttaggtatttttgccactattatatttgcattatttggtggagtaaatttggttagtgctattaataatcttctagcttctgagcatagaccaagattaactaccattatgttcctgatgagcgctttggttttaactatatcaacattattagttttacttatgacttggcttaatgaagttaaaggattaggggaagcaaagtggaaaaacaaaatgtatctaaaaatatattttggaataataggggtttgcctacttattatgattttatccgcttgccgtttaatgtaa

SEQ ID NO: 66414 - DNA, 1374 bp, Acinetobacter baumannii; identical to SEQ ID NO: 63188

SEQ ID NO: 66415 - DNA, 465 bp, Acinetobacter baumannii; identical to SEQ ID NO: 52640

SEQ ID NO: 66416 - DNA, 1527 bp, Acinetobacter baumannii; identical to SEQ ID NO: 62471

SEQ ID NO: 66417 - DNA, 321 bp, Acinetobacter baumannii; identical to SEQ ID NO: 46176

SEQ ID NO: 66418 - DNA, 147 bp, Acinetobacter baumannii
atgatgcgagcacgttttagtggaggtgttttactccaagatggaaacgctgctttagctgaagcgactgcttcatcaattgttttagctccacctaaacttacttgtttactgatctcacctgttgatgggttgaatactggttga

SEQ ID NO: 66419 - DNA, 711 bp, Acinetobacter baumannii
ttgttaggtttggcgtttgcttcatctgttgctgctcctgccgctcaagcagaaattgtaattcatggcacccgtgtaatttatccgtcggatgctagagaagttacgctacaagttagcaataacggttcaaagccagcacttgtccaagcttggattgatgaaggtgatccaaaaagtactccggatcaatcaaaagttccttttatgattgctcctccaatttctcgtgttgaagcgacaaaaagtcagacgctccgtattactgcccttccaaatgcttctcaatttaaccagaagcaagaaactgttttgtggttaaacgttttggatattccaccaagacctacctcaaaaaatgcagatacgacacctgataacttcttacaacttgcaattcgttcccggatcaaattcttctatcgtccggcttcaattaaagaagatgcgaatttagcagcagataagcttcaatgggttaaatctggtcagaatttaacggtaaaaaatccaactcctttccacattacgatgacttctgtttatcaaaaggttggagataaaaaagttgatttattgcctcaagggctaatggttaagcctttttctgaagcttctattcagcttaagaatagcaatcttcaggatatgagttttattaatgtcaacgactatggtggtcgagtcgaacaccaaataaaacttcagtaa

SEQ ID NO: 66420 - DNA, 210 bp, Acinetobacter baumannii
atggcagaaaccactaaagtcagtacgacagaaacgcgcgccagtgataataagaacatcactgcaatcgcaataacgacagcattcatgaataagttcagagcaaaacaaaaggcgatattctaccagattcacctctatgaagccgaaaatatcgccgaattaccagttttgtatattaaacagtcacttattagctctgcgagttaa

SEQ ID NO: 66421 - DNA, 486 bp, Acinetobacter baumannii
ttgaatccgccaagtattggtgctgcatcattagtcttaattacaggacttggaattggtacaacactcaatgaataccccaagattcaattaatattaagtttcactggcggcatttggttaagctatattggatggaaaatttttaattatagacctgatctagaatctaaaatccaaaatcaaaataagaaaaatggtttttttacaggcttctttttacagtttatcaaccctaaaagctggttgatggctattgctgttattactgtttatacagcacaactagctaactactatcagtcactcattctattttcattcatctttatgctgatttctctaccttgtttatttatttgggcttatttaggaaaaatcacaaaaaaaatactttctacagctcatcatatggtgctctttaatcgagtattaggtactgttttacttatttcagtatggtatccaatattgcatgctatttaa

SEQ ID NO: 66422 - DNA, 1374 bp, Acinetobacter baumannii
atgcaaaggactacgaaacactttcaaattaatgcattagcacttgctatagcaatgagcacaatttcagcgcatgcagagactgatcagcagacttcggaatatggaactcttcctaccattaaagtaaaagctggaagtggccaagaaaatgaaaaaagttatatagcagggaaaacagatacagcggttccactgggtttatctgttcgtgaggttccacaatctgtttctgtcattactcaacagcgtttacaagaccagcaattgtcaactttagttgaggtcgccgaaaatgttacaggggtaagtgtcaaccgttatgaaaccaaccgaggtggaatctattcacgtggttttgtagtagataactatattattgatggtattcccaccacatatagcttgccttggtcttcaggtgaaattttctcaagtatggccttatatgatcatattgatgtagttcgaggggcaacaggtcttacatttggtgctggaaatccatctgctgcaattaatatggttcgtaagcgtgctacgagtacagagccaacagctaacgtagaagtgagtgcaggtagttgggataattaccgtgttatgggcgatattgccaactcccttaatcaatcaggaacagtacgtggacgagcagtggcccaatatgaacaaggcgacagctataccgacttgttgtctaaagaaaagctatctttattgttaagtgctgaagcagatttatctgaaaatacccttttatcgggtggggtaacttatcaggaagatgatccgcgtggaccaatgtggggaggtttacctgtctggtttagtgatggcacaaaaacgaactggtctaaaaatatcactacaagtgctgactggacacgctggaatgttaaatataccaacctatttgcagatttaactcataaatttaatgacaactggtcagctaaactgtcttattctcatggtaagcgtgatgctaattctaagcttttatatgtttcaggtagtgtagataaaaatactggtctagggctatctccttatgcatcagcgtatgaccttgaggtagagcaagataatgcttctttgcagctcaatggtagttttgatttgtggggcttagagcaaaaggttgttttgggttatcaatattccaatcaggactttacagcgtatgctcgttcaactgatacaaaaatggaaattggcaatttctttgaatggaacggcagcatgcctgagccagtgtggaatgcacctacactcaatgaaaaatataatattgaacaaaatgcactattcgctgcgacttatttaaatccgattgagcctcagatatatatggtcgtagttcatccataa

SEQ ID NO: 66423 - DNA, 600 bp, Acinetobacter baumannii; identical to SEQ ID NO: 55993

SEQ ID NO: 66424 - DNA, 420 bp, Acinetobacter baumannii
atgcatcctcaagccgaaagccttgactcagatatccaacgttttattgaaaaagtacaagctggtgccaatgcgggaattactcaattcttctttaatccagactcatacttttattttatagagcgtttggaaaaagctggaattaacattccagtcgctcctggtatcatgcctattaccaatgcaagtaatttaattcgctttgcagatggtactggtgctgaaattcctcgctggattcgtaagcaattacaagcctatggcgatgacagtgaaagtattaaagcttttggtcatgaagttgttgttaagctatgcgaacgcctcattgcaggtggtgcaccaagcttacacttttactcaatgaaccaagtcgaaccaactcgtcagcttgttgttgaccttggtttaaattaa

SEQ ID NO: 66425 - DNA, 999 bp, Acinetobacter baumannii
atgcagtcagaacgttggtggcaagactcttctgtaacggctgagttgtttcaacgccctaagtcttttgagtttattcaagcaacacgtttattgcgtcatatgcctgccaatgacgcagctttatcatggtctgaccattttaaatttgagacctcatttaacttaaactttccagccactgaaattgaaagtttagagttagtagatgaacgtgttcatttaacaaacctgatcgttggtctgactggtatacaaggtgcattaccttatacatatacaaataaaattaagcaggctccaaggcaacaacgcgctgaaacgaaagagtttttaagcttatttaatcataagctgaccagtcagtatgtagagtcaagtattacttatcacttgcctgtgcgctatgaaattgaaaataaaaatgattatttggatattctccatgcattgaatggttatgttcgctcacaacatcagcaacaagacttggatgaatatttcgctgaattttcaggcctaatgcaggggcaaaataatacggttcatgctttaaagacgatgttgagttgtatttttaagcatgaaattacaattaaagagtttgtacaggaatcgtttaagttagcgggtgatcagctaaccactttaggcggaagtcaaccgagcttacttggtattaacacattttgtggggaaacgattcaacaaattgatggaaaaattgagattcaaataggtccgcttaagcgtcagcaatatttaaaatttttacctcatcaagagcttagcttaaagctcaaaaaaatcgtagaaacctggtgcagtccaactttatcgatagatttaagattgatattggatgagactgaaatacaacctgttcgcttaactcaaggccaagaaagtggtttagggcaaggcgcttttttaatgtctcgtaagcctaatacacataacgatgaaacatgttatagcctgtctcttatacacatctga

SEQ ID NO: 66426 - DNA, 1071 bp, Acinetobacter baumannii
gtgattggtgctggcttatttgtcggttccagttcagtaatagctgcagcaggtccagcagccttcatctgctacgctattacaggaattatggtaggtttaattatgagaatgctaggagaaatggcggcagctcgcccttccactggctcatttgtagatttctctagattagctttcggcaatctcgcaggcttttcaactggatggctttattggtatttctgggtagttgtcgttggctttgaagctgtcgttggtggtcaaattattaatcagtggttaccagatattcctgtttgggttatctcacttggcctgctaatcttgatgacctccctcaacttattatcagtaagttcttttggtgaagcagaatattggtttgcgggcattaaagtagcagctattgttgtattcttggttatcgttggtgcatatgtatttaaagtatggccaaattcaacagcctctttttctaatttaactcagcatggcggtttcttgccccatggcacattagcgctattctctggtgtagtttcagtaattttctcaatgagtggagtagaagttgctactatcgctgctgctgaatccgataatccttcacaaaacattcgtcgtgccgtaaatactgtaatggcgcggatcttagtctttttcgttttatcgacactgttcattgttgttgcacaaccttggactaatataattccagggaaatcacctttcgtagcaacacttgaaaaaattggtattcctggtgctggtacaatgctgacagtagtaattcttgttgctgtattatctgtactgaacgcaggtttatacactgcatctcgtttactgcatgtattaagttcaaataatgaagctccaagttggttagctagaaaaaataagcgtggtgtaccagtttggggtgtactcacctctactttggtcgggtatggatgtgttgtaattgcggcattgtggccagacactgcattccaatttttacttgactcctctggtgctcctgtctcttatacacatctgacgctgccgacgatctactctgtgtag

SEQ ID NO: 66427 - DNA, 399 bp, Acinetobacter baumannii
atggcaatgactttagagcagacaaggcaagctattattgatcgcatgcaaagctttacgggtattgctcaagaacggattcagtatccaaatgcacctgactttactgttccaacaaaaggtgtatggtgccgtttaacgattgcaggtggcccgagttttacctcaggcattgcagataagccatgtacacgccgtaccggtaatatcatgatccaatgctttgaccgattacatactggagagaaggccgtaacggttctaagcgatgcattgctggctcattttgaatatttcacaatcgaacacttagaatgtttgaatggccaatctatttatgcgggtaaagatgctgatttcattcagtataatgtgagcattgggtacaaggtgaattga

SEQ ID NO: 66428 - DNA, 399 bp, Acinetobacter baumannii; identical to SEQ ID NO: 65937

SEQ ID NO: 66429 - DNA, 441 bp, Acinetobacter baumannii
ttgataaaaagaaatgttgctgaattttcaagaaatagcattattatttttgatggggacgagaaagaaggaaataaattcaaaaacactctttgtcttccaggaaccctacctccagatcaactcttatttgattttctttatagattacctgccgatgatatgtattggaaaaataataaaattagcttttctaaaccagtatttttaagaatagcctctccaatattggaattttttaatcttgaccaaactcctacggaaaattatgacttagaaactatcattttagagaaaagagcttcgagtagtgagtcaggagggaaagcgagagaaaaatttaaaaatttctataaaaatgaaattattcaatctctaatcaaaggaaagattagtgataatcctttcagagtcatgattgattataatcctgagaaataa

SEQ ID NO: 66430 - DNA, 768 bp, Acinetobacter baumannii
atgtttaaggtaactttcgattcaaatgtttgggaaaaggtggttcgaaaggaaacatctgagcatgaatatattaataatcaaatattactgggcaatatacagccttatatttctgagattgctatttcattagagtcgttacaaaaaaagaaacgtttagagtttatgaaggggtatagcccaaaatttgaatttgaagagttagataaagctttagacagcaaaattcatggaagaatgagtattagtccaaatctagactcacatctaggtttgcatcctaagcttaaagaatcattagacttagctgaacaattaggttttaaagttattcctatgactaatttgggaactgtgcgtagccctgaaattcctaataaaatgaaagtagaaattgaggatttttggagttttgcggaaaaattacatgaatgtagtaactatattgctgagatgggatgtggaagttttacttattttttattgaaaaaagctttatatatgaatagtaaaaggcaatttagcgaaaaagaattttcagaagcaatcgctgagtgggtagatggagatatgttgtctgcacattatgcaattggaaatgactttttttgtacagaggacagagggaaaaatgctggaaaaaattctattatgttttctactaatataaacaaagttatagagagatttgacattaaagtatgttcattaaatgaattaataagattattaacaagaaaagatacttcaactaaagatacataa

SEQ ID NO: 66431 - DNA, 942 bp, Acinetobacter baumannii
atgggcataaaagtaaataaagtcagagataaaaaaaacttatatgaagttacagttaatgattgtgatcaaggatataatagtgattatatctgcagaacagaaaattgtaatgctaatatgagttttataaaaagtcatgagaaaagattgtttgataaggtaatagaggttccatcattttttaaattaaaaaatggaaataaacatagtgaattttgcccttatgatactcaaggagcgattgaaattatctgtagaaattcggatagtaatattttaaattctctgaataataaaaagttcgaatttagtttgcaaattttacataatcctaaaaatgaaaatagagaaagtaatacgattgatgaggctggaaatcatgatggcgatgaaaaaaaattagggaaaaaatatagttcaagtggaagtttgtcgaattatataaacacgttgaaacaaatacttgtattaaggaataagctagaagaagacaataatatttcagaatttcttatgcttaattatagaggtgagaaaattaaatggaataatttttattttagtgaaaaaaactatatagatgcatttacactaggatatttaaaaaaaatatcttatcctatctgttttgaaggtgttgtgaaaagtataaaagagccaactgataattttaaaaattattcaattaaattttatagtcctcatattgaaagtttagaagaaaatattactgaaatacctgtggtggaaataattttgaaacctgaagattatgataaaattaatatatcaaacggtagttcattattagtatatggtttgtcaagtttcaagccaagtagtgagccttgggtatctaaagaaaataaaaaatataaattttttaatatatcattatggattaaaactatacatcaaataatagttctagatgattaa

SEQ ID NO: 66432 - DNA, 1191 bp, Acinetobacter baumannii
ttggctggatgtggtgaaaataaccaaagtatagtatcaaataaagataatacattgtttatacaaggcgttaatgttaatgaaaaggttgaattaaacccagccataaccaactatgacctaattgcttatggtaatgaacctactgaagctgtcttgattaatttaacgggacaggaaaaaaagctcttgggctctatttcattaaaaccttattcaaatatagcgagtttagattatctggtatggaaggatactttaaataaggcacttatatgtttaccactcttaacttgttcagatggtacgacatataagatagaaaatttcggggataaatttaaattgagttttgatttgaatcagtccaaaaatgagttctcagtaacttctataaatggagaggagataggaaatagagttcccgtagttgtgtctggaaatataaattttacggttccttcaaattggccattgtttcaaaaagataggttttcagctatcaaagttaatgatattgctattgatggaagtatttttaaaattatagattttgaagagtcaaagcaatattataataatgaattaatatacactacaaaaaaaattactttgaagaaaaatgaagatatttcatatttaagtataatattttatgaaaataaggtgaaaagtaatgcattaattaatttggtatataaaggtggggattttgaaaatatagagaaattgagcgatcagttttggaaggaagatcaaaaaaatatagagtttaatctcgaaaatatagaattgattgatcatactaataataggaaactaaatgttagtgtaaatatgaacatgcctaaaacttatagtgacttacaatttggggatcaaaaaatagtaatgttgcctattcacaatcgttatatagctacagttaaaaatgatcaaaaaatttataatctaggttttgaaaatagtaatgaattaattgatatatctatcattcaagagcttgcaggacatttaagcgttaaaacaatagttggtgaacaagagttcatgtgcggaaatcgagaaatcccttgttctggcataacttcagatagtaatagacaaaccttttattttcataatgtaaaagcaggagtaaatacacttaatggtatgactcatattacaggagtatttgaacaaaaataa

SEQ ID NO: 66433 - DNA, 186 bp, Acinetobacter baumannii
atgcggcctatcggcccatatcccgaagttagtttagcagaagctcatttaaaaactctagaatttcaaaaagaattgactaatggtgcagatccatcaagttatcaacaagaagaactattgaaggctatacaaacaaacacaggtacatttagtttagttgcggctgagtacaagattaattaa

SEQ ID NO: 66434 - DNA, 195 bp, Acinetobacter baumannii
atgagtgaagaatacctaaaagagagactttactgggctttgcgttcgagcaagacaaagaaaaaacaactcaattggcaccatgccatgtatatggcttgtacaggtgcctcacatggatatcagctttgtgttgatcttggagtagatccagaaggtacagattttgttaaagcggaaagtaaggaggggtga

SEQ ID NO: 66435 - DNA, 924 bp, Acinetobacter baumannii
atgagattcaaacaaaaatccttcagaaagattcctgattctttagctaacatcccagggaaatttttacttggtaaaaaattatcagatttaacttcagatcacctaaaaaaaatatctgataaccatacatgggaagatggggattcaattcttccaaataaaatcggaaaattttccagaataaacgcagatggcaaagaaattgttaggagagaccaacctaaagaaaccattacgagagcattttactacactcgctatgagtttcatggaagagataatagagttgaaattgaagatacagcatggagaacatatcaacgctatcctagagaaactattcccgctcaaaatattcatgttaattgcattgaaagccaaaatgagaaatttttattaatagaatgtgatagtcaagaagatccagctttattcttacataagcttaacttagctttagaaatttttggctcagatttggagtttcacgtagctgctaaagatggtttcgtagcattacctcaaacattcaacatcgtaaattggttaattcttccagcaggcacatatagccaagaagaattaaaagataaagttaaacaaacgatatcacctaaattaagtaaaacagtcaaaccagtaattgaaaaaagattagataaaataggatcttatcaacacagcggtattgttattggagtaggtggatataaaggatatgttatttatcacttcccccaaaaaagtatctctgttttagagtctgatagccctaataatgctacgtatgtatttaatcactctgactgggaacaactatctaaaaaaactaagactgaaattattaacaataatctagcaatcaagagaattattcacgatcctgattgggatcaaaaaatagataatcttttaagataa

SEQ ID NO: 66436 - DNA, 327 bp, Acinetobacter baumannii
atgaaatttaaagaaatatttactcaggctattaatactaaaagcaaaatacaagttaccttcttttctaaagaggataatacgtctttaactcgcttatgtgctccttttgatataggtcctagtagtagagcaaaagataaaacagatcgttatcacttctgggattatgatagcgacactggatcacatactttatctcttatcgatgagcaagttattaatataaaaatattagatgaaaagtttgagccttcacatattattacttggaatttcaaaccaaattcttggtatcttcaaagaaattggggagcttatagctaa

SEQ ID NO: 66437 - DNA, 762 bp, Acinetobacter baumannii
atgaatatagataatttactggttgaaaatgaacgttttataattgagcatgctgttggacggctatgtaatgcacttcgaatatttggtgaagaacatatacgattcccaagtctggtagaagttgataaagaggaagccgttaataattatgaccgtgcttttgaattaattttagaaaattttcatactctgtatgatgtatcaaagaaatactttaatttttttgaatttgcagatagtgcattgctaattctattacgtaatgctattcatcaccgagatcataatttgtttaaaagctggaatgctcaaatggttttaaatgatgggtatcaaaaattttatggagctagctttctattatgctcttataagcctatcgatgatgatgctcatgttatgaaatattactataagcttgaagatattttagatcgtctggataggacacgtaattcaccttatcgtgataatcatctcagtcaggcaaatagtgttaagcaattaaaactattgaatgatcaattaggtttttcaaaaataatagaatatggtcaaaaagagcgttaccctttggggcaaatctatatcaatatgcttccaatattgaatggagctcttaagagagtatttgaaagattacttcagataggaattaaacctattgggtacgatgatgaaatatatttaaaacattttactactgaaggtttttttgattttgatgaagtcttattcacaaatttgaaaataatctaa

SEQ ID NO: 66438 - DNA, 732 bp, Acinetobacter baumannii
atgactttagatacaattaacgaaacaagaactttattattattaacaccttatattcttctttatttttactatttaaaatatgttaaggatccatttttcatcaaagcaagagcagatgttcaactcttatttatgatttacacagtaatcatcatatttctagagatgtttgcttggtctgttatttttaatgatgcaacgttcattggttttgatggaatcaattcaagctcttcaatgctccataaagtaccgaatcaacaatcagattcaatacaaactattggaattctgattggtgctgcagctgcaattataggctggcttttcacaacacgcgctcagacaattgattcaacaaaagcaaatactatgcagattctaatggaatcaagattctcagatgaatatgctcgtaacttaaaaattacaactcgcttatttacacatcaaaggaatataaatggagataattgcaatttaacgctagaagattatacaaaactaaaaccaaaacaattagatgccgtacactacatgcttaattattttgaatttattgctgtaggaattcggtgcggtgatttagatgaattatttatgaaacaatcattacgcagtattattttaaccaattataaattctataaattaataatcgaagaacgacaaaaaaaagtacctagtgccctagaaaatttagtggccctttctaaacgttggacataa

SEQ ID NO: 66439 - DNA, 624 bp, Acinetobacter baumannii
atgcctataccgcatcgcaaagttataaaaacacagttggttgatctactttctagtaaaggacctatgaaagttaaagaggtatacaccgaatttgctattttatggaaactcacaaataaagaaatggctatgaaacgtcatggccgagcgttatatgagaatgaaattcgttgggcacgccaagaattagctggtgaagatattattgaaaaaccagatatagctggacgaagtatctggaaattaaaagaaagccctgttattttcgctgaagaatacgatgaagataattttaataatttaacagaaggggcagctaaaaaaattgtagttaatgcttatgagcgtaataaagaagcacgaaaaaaatgcttagaattttatggttaccaatgtgttatatgcaattttgattttgaaaaaacttatggttccgttggtaaaaattgtattcatgtccatcatttggttgagattagctctattggaaaaaaatatattgttgacccaataaaagatatggctcctgtctgtcctaattgccattttatcattcatcaacgaaaacctgcattttcaatagatgaggtaagagctatgttaaagtcagataaagattaa

SEQ ID NO: 66440 - DNA, 219 bp, Acinetobacter baumannii
gtggaacttaaacaattaaaatattttattgcagtgatcgagtcaggaagcttgggtaaagctgcaaaaaatctcgatattggaacgtctgcattaagtcagcaaatctcaaaattagaaagcgagctttctattcgccttttacaacgtactgctttgggtacagttcccaccccctgcgggtttagctttttttcaacaggttcaactggcacttag

SEQ ID NO: 66441 - DNA, 2184 bp, Acinetobacter baumannii
atggaaaataaaaaacgaatgaccacacaagcttcgggttgggtctcggcttttaaagcatttttagatcgccgtgcattaattatgctgtttctaggtttttctgccggaattccgattttattaattttctctagtctctctttatggcttggagaggcgggcattgataaaagtgcagtcactttttttagttgggctgccctaggttactcttttaagttcgtttgggctcctcttattgatgagttacctgtgcctgtcttaactaaaacattaggtcgaagacgagcttggttgttaattgcacagtgtttgatcgttcttgctatttgtattatggctttttctgatccttctctaggtcaaagttatcttattcaaatggcggtgggtgctgtattactcggcttctcagcagcaacccaagatattgtgattgatgcttaccgtattgaattagcagaaacagaaatgcaaacggtattggcctctacctataatgcgggttaccgaattggcatgattgtggctggagcgggtgcattatttctagctgcccacttgggaactgctaaaggtaattacatttacgaagcttggaaaacgacttatttaaccatggcaggcgttatgttagtgggtattgtcacgaccctacttgtgcgtgagcctgttgtaaatcgagtttataaaaattataagagtagtgattactaccgtttggttctcgtattttttattgccgttatttcattcgtagtcacttatatttattcagggcaagttaccgaggccatttcacaagctggtaatattaaagacagtgctgcgttatttggtttggaagctttaagatttttaactgcaactgctgctgcgatttttgtaggttatctactcgttaaaattggtgtagttaaccagcaaatggcgaaagagacatggattgcaccaattctagatttctttaaacgctatggtgtcaaacttgcattagtgttgttgctacttattggtttcttccgtatttcagacattattgctggtgttatttctaatgtgttctaccaagatcttaacttcagtaaagagcaaattgcagaagcagttaaaatctatggagtactatttagtttagtcggtggtttcttaggtggtcttttagcacagcgcatcaacattatgaaactgatgtttgtcggtgctgttttggctagctctaccaatttaatttttattggactagtaaaatctggtcagccattagatatggtagatgtaaaagttggtgaacacagctatcaagtcaaaccagacgaagtcgggttatggaagttagaagtaccaagttctgcttttagcggaacaaaacaaattgaagtaaaagctgcttatgcttcaaatgatgtagcgcctgttacacgtactcagccattactgacaactgagtcagctaaatcgcctctacaaattttacctgttatgggcaatgatcaggtctcacttaaagagggagagggaagtgttgtggttcgagggcaatactttggacaagcattaactcctacgcaaaaaattatcattagccttgatgggcaaaattttgatgcaaaaatgactgatcaaaaaggtgtttttagtgcagccattgatgcgaaaaaactagtggcatcgaccagtaaagagcttaacgtagctgtaatggatggcgaacaaaaaatactttctgcatctcatccatatgttgttagttcaaatcaaaaagcggcaagtgaacttgatgtgaatattgaaccggtagcatatattgatccactttctggtcaaccagtggaagtcagcggtaaggtcattaaaccatatagttctttatggctttattttgccattattgtcgataacttggcttctggtttagctggtgcggcatttattgcattcctttcaagtttaacgagtgtttcatttacagctgttcaatatgcaatctttagttcactcatgacacttactccaaaacttttgggtggatattcaggtaccatagtcagtaatattggatacccaaagttctttttgatgacaactcttattggtattccaatcttgatcttagtggtttgggttggaaaattgctaaaagatcatcaaacacatgaatcagaaaaggcaggtgaataa

SEQ ID NO: 66442 - DNA, 900 bp, Acinetobacter baumannii
gtgaaaccttggctagaaacactcaatcataataaatgttggttctgtgatggagaatgtgatcaagctgaatacgatgtagaacattttagaccgaaaaaaggaattacccagaattatgcacctttaatgtatcctgctgagcaccctaagagtggaatgcctttacgaggatattggtggttagcctttaacataaataattatcgtttagcttgccaatattgtaatagagctaattctgaagaatcaaccagttatgggaaaaagaatgatttccccttagaaaatgaaagttctagggtgttaaagcatgaatatgacttgtctttagaaaaacctttactattagatccaattaactccgatgatacaaagctattaacatatctgagctcaggtcatgcatccccatgcgccgttgaaatcgatctaaaggaactagacctattagaaaaaaaaccaattagctttgaagaaataaaatacaatcaacaaactttaattaaacgaaatcaagagttatcacaatctgatattgatactttaattcatgcaggtattaacacgattattggacaatttaaaactggttcagcctatattcgaccaaattacaccattaaccttttaggtttaaataatcgtaataaaccaacaaaacgtgctcaacgctggcaagaaattttgcagaacattgcgatagtagaacaatattcatctaaccaaaacaatcaagtaaaaagcttaattaatgatttaaaaaattcggtacgtagtgaggtaagccatgtaattcatgaaagccatccttatgtaaaatattacattacacagttaaaagttttaaaagatcttccttggatttgtgatttaataccctcagattttattgattaa

SEQ ID NO: 66443 - DNA, 1458 bp, Acinetobacter baumannii
atgaacgcaacgactctcgtttccaaaatttggaatttttgccataccctacgcgatgatggtgttggctatggtgattacctagaacaactgacattcttactgttcttaaaaatggctcatgaacaaaaaacagacaacccatttgaggcggttgatgttggaattcctaatggttttgactggaacagtctcattagcttaaaaggtgctgagctagaagatcactaccttaacgtactcaataagcttggtacgatgtcaggtatgttgggggctattttctttaaagcacagaataaaatacaagatccagccaaattacatcgtttagttcaactcatcaatgaagatacatggagtggtattggcgctgatgtaaaaggtgatatgtacgaaggcctattacagaaaaatgctgaagatacaaagagtggtgctggacagtacttcacccctcgtcctgttatcgatgccatagttgaatgtgttcgtccccaaccgatgaaaacaattgctgatcctgcatgtggtacaggtggctttttccttggtgcacataaatacctgttggctcaaaaattagataacaaacaagctaaatttcttcaagaaaatacattctttggtaatgagatcgttccaagtacacgacgtttatgtcttatgaacttgtatctacataatgttggtcaccttaccgatgaaccatctattgttcgtgcagatgctttaataagtgagccaacaaaaaaagcagactatgttttagcgaaccctccttttggtaagaagagcagtatgacggttaccaacgaggaaggtgaagaagataaagaatctctcacctatgaacgttcagacttttgggtaactacatcaaataagcaacttaattttctccagcatattgtgagtatgctaaaaaaagatggaaaagcagctgtagtattaccagataacgtattgttcgaaggtggtgctggtgaacgtgtacgtaaaaaattacttgctggatgcgatgtacataccattttgcgattaccaacaggtatcttttatgcaaacggtgtaaaagcaaacgttattttcttcgataacaaacctaaatctgaaaagattcaaacgaaaggaatctggttctatgatcttaggaccaatcaacgatttacactcaaaactcgtcaattacgtcaatctgatttgagtgattttattcagtgttataaccctgaaaatcgctttgaacgtcaggagactgaacgatttaaatatttcagctatgatgaaatcattgctcgtgacaaaaccagtctagatatcttctggttgaaggacaacagtttagacaatcttgatgatttaccctcaccagaagttctacagcaagaaattattgagcatctagaagctgcattagatgcttttaaatccgttgctataagtttaaaaaactaa

SEQ ID NO: 66444 - DNA, 552 bp, Acinetobacter baumannii
atgatcaaaactatagggtctattttttcatttatcttttctagaagaggtgtagagaaattttggatacactgcatttattggactttccctatagtcttgataattacacttagtcgttttgaatattcttatgatattgcaaaacgaattaccaatgccaaattagtagaagtaaaaggtgtgttggttgagcatcgtagttctaaaggtgggggaggattatatatttatggaaaagtaatttctttgtcggatcagggaactgatgtaaaactaagactagttgcttttccatcaagtcttcatgattttactaaggcaatgaatgaggaaacagttattttgtttggaagagtcttagatcggtcattgtacccaactagaattactaatatacaatacgtagaatatgcttctccatcttctaaagaattcaaagatagttttattcaatcccaagcaagagcacctaaagaagctagaaaatggggttatatatcgtttatatggttattactcataatactttctagggcttttaaaagatga

SEQ ID NO: 66445 - DNA, 210 bp, Acinetobacter baumannii
gtgtttcggttaaagtgtcttggtggtccactgtatggacaagaatattctcatgcacaggatgagtttatttttagagacaaacagacaggaaaacaaactatctatcgtaaacaaactttagacttcaacccaccacaagatttttttgtcgctgaagctatatcgagtgcagtggcatataatcttgccttgcaattgatgatataa

SEQ ID NO: 66446 - DNA, 249 bp, Acinetobacter baumannii
atgaagatcaatacccaacggttgaaacggcgctggaaatggtacacagcttatgcggtgatttttatgctgttatttgcattgctttatacctatgaccgtgctcaggatgaacaaaccgagcagatgcttgaagcggctcgcagtcattcaagcagtcctaataatacagcagtgacaaacattactgacaaagatgaagttcctgcttttgatcaagctgaactcaatctagaaaaccataaataa

SEQ ID NO: 66447 - DNA, 615 bp, Acinetobacter baumannii
atgatgacatcacaaactaaaaatattcagacttttattattggcgttttatctacattaatagtggtacttgcaggatgggtcggctatgacaagtttttaaagcctaaatcagaaacaatagttacagcatctgtttctgaacctgctgctgcctctgagcctgtaattcaggcatccagtgaacccctattagtaacgcaggaaaaagaaactatccctactcaaaaattagaggaaaatacaaaaggtgaataccttggaagcggactttatacctcaaacatggatagcggtaagtgtttaggttctgccaaagtaacctgtggtttgtttgaaatgaataagctgccgaaagagtgggaaaatgtagttgaagctacatctgagaaaaatctcgaatattggttttcaacaactgatccgaataaggtgacttcaattccccatgactggtctggctggcaagttatggaatatggtgaagacaataaaaaggtgatggctttctttgatagtgcttataccaatacaggtgaatgtttattaactcaaactgtatatgacatcaaaaccaagaaagaaattgatagcgttgatcttgcctgtaactaa

SEQ ID NO: 66448 - DNA, 927 bp, Acinetobacter baumannii
atgaattttttaaactacgatcaagctaaagacattctaaattggcatgaagctattgaggcactacgcttaggtcatgaaaaacccaaagcaactctgcacgactcactcataggccctaaagatggcatgttgttaaatcgcatggcaagaattgaagggttgggctatggaataaaagctgagtctgtcttcaatggaaatgcgagtataggacttcctaatactcatggagtggtcgtagtttattcttctgaaaatggtattttacgcggcttggttgatagccacattattaccgatctgaaaactgctgctgattctgtattaggggctactctactcgctcgtcccgatagtaagcatctagtaatcattggagcaggtcgcgttgctcacaatcttgcacatgcctacagtgctttatttccccaacttaaaaaaatatcaatttggtctcgccgtttaaatcaatctcaagcactcgttaaaaaactagatggattatctgtgccagttgttgctgcctcagatttacagttggctttatcaactgctgatattgtttcttcagcgactatggcacaacaaccaattttaaaagcagactggattcgctcaggaactcatatcgacttaattggtgcttttacccctgacatgcgtgaagctgatgatcaattaatcgcagcttctcagctctatgtagataatcttgaaactacttggaatattggagaaattgtaattccaattgcgaatgggaaaatatcaaaagatcatattcgaggtgacctatacagattggtgaatagcaactcagaaaattttagaaatcaatatgatattactgttttcaagaatggtggaggtgctcatttggatcttatgattgctgatgcaatgttgaagaagttagggttataa

SEQ ID NO: 66449 - DNA, 297 bp, Acinetobacter baumannii
atgtgtgttcctaaaggatattggattatcgagtgtcaggaaattactgaccaaatctctatggaaaaatatgcaaatgcttggactgaaatagcaaacgagtttaatgctcaaattattggtggtactaagtcttctgactttgtagaaggcccacaaaaagcacgagtacttattttggagttcccttcttaccaaattgctcaagattgctattacagtgaaaagtaccaaaaagctaaggagcttgcattaaaagcaatggaaagaacattttccattattgagggaatataa

SEQ ID NO: 66450 - DNA, 195 bp, Acinetobacter baumannii
atggatagcatgaattactctaatgctagagcgcaactttctatgcttatggataaagctattggtggccaacccgttgaaattactcgtagaggtagagggtcggctgtcattattagtaaagagtcatatgaagcatataaaagagctgaattcgaagcgagattctctgctgagcaaaaaaaaccttattag

SEQ ID NO: 66451 - DNA, 444 bp, Acinetobacter baumannii
atgactccggatatggcaaatttttctggcaatgttcatggaggaacgattcttaaactattagaccaagtggcctatgcttgcgcgagccgttattcaggtagttatgttgttaccttatctgtcgataaagttatttttaaagaatcaattcatgtaggggaattagtaacttttctggccacagttaatcatgtaggtacaacctctatggaagtaggtattagggttgaatcacaaaatattcagcaacgtactatacgccatactaacagttgttatttcacaatgattgctgttgatgaagatcgtaaatcatgtgtagtcccgaagttggttctagatacagccttaaaacagtgccgttttaaagctgcttcgaagcgcaaaagtattcgcttaaaagaacaaattcaaccttcttgtcaactaagagagaagtag

SEQ ID NO: 66452 - DNA, 411 bp, Acinetobacter baumannii
gtgaaatatcctaaattatgtcctttaacggcggcaattgttatctccggtttttctagctttgccaatgctcaattaggacaaaacttagctgttgatattcgctcactatcgatggggaatgctgtaactgcagacccccctggtattagtgcagttcattttaaccctgcagctttagcaaaaattgatggcctgcaaacagatgtgcaggggatccttgctaactttgatattcagcgtgagttttcagctccacctggttataacatctttggttattcagatgaccctctcgtttgtaatgatggtcctgaggtttcagctaatatttgtacagattttaaagggacagtacatggtgatgtggagtacgcgagcctgtatgtacctattcttaaaaaatggtag

SEQ ID NO: 66453 - DNA, 261 bp, Acinetobacter baumannii
atgctaacgatgttggtagaagtaattatgagtgtttttattgctaattttaaagcatcagaacaccctattataaatataatagtacgtggccttttggtggcggtaatcggtttttttatagcattattttcgtcaatcgtagaaggttgggatttttcgattgggtttgctttaatatttagtctagcaattggtatgctcgtaagtgtttttctgttagtggtggagattttttttaattacattgataagaaataa

SEQ ID NO: 66454 - DNA, 162 bp, Acinetobacter baumannii
atggatggatttgataaacatcttctgtatgcgttaacagtgatttgtatataccttctttctatgtatgcagtagagaaatggtcacttaatacacaagtacacaacgcgcaaatgcagctaattgagatgcaaaaactaaaacaatgtaagacaaattaa

SEQ ID NO: 66455 - DNA, 396 bp, Acinetobacter baumannii
atgaaactaactaaacgtcaacgtgaagagcttaagcagaagtttggcggccattgtgcttattgtggtgagttacttggtgataagtggcatgcagaccatatcgaagcagtgaagcgcgatttaattcatgttggtggcggcaagttaattacgggtgaaatgactagaccgcaaaacgatactttagaaaacatgaatcctgcttgtgttccttgcaatacaaacaagtcgtcaatgcctttggaaggttggcgaaaaatgctgactcattatcgtgatgtgcagttactacgtgatagcacacatgcgcgtcatttacttcgttttggtttgattgaaattaaatctgaaccagtggtgtttttctttgagaaaggagccagccatgagtga

SEQ ID NO: 66456 - DNA, 468 bp, Acinetobacter baumannii
atgaaaccagaacagtttattcgtgagcagggtttgccagaggttaaccgaattttagaagaagccccaaagcactctaaatttgttatcccttgtttagatggcgagatgtacttttcacaacgtgaagatgatggcaagtggtttaaatggagcaatggctatagcaaatggcttgaatattttgggaaatgtaatccacttgatttggcatacagcctttccgacctcaagcgtctggtggagtctttgaatatcgttagggtgattggccctattgaatacacgcgctcagtagtcactaacgcacctgttaatgcaattggctatgacacgatgtacgaaggatattttggcgaagaaaccaaacattattacgagaacctaagaaccttcaccattgatcaaatcaaggatgcagtagctgcccacgaatcaatatacggaggcggggatgaaactaactaa

SEQ ID NO: 66457 - DNA, 762 bp, Acinetobacter baumannii
gtgaagttaactaaacagcaatcaaaattacatctccaagcgatggacttaattcatagcgataaaagactaagtgaagatgataagtacttcattttagaaaattatcaagaatctgcacagaatttaaatgcattagctggagcattctttaccccagaaggattggcaagagatttctcaattgaagtatcaggcggacatattgttgatttgtgtgccggtatagggcgcctttcttttgcttgtgaacataaagccaagtctctcacatgtgtcgaattaaatgctgattacattgtagttggtaaaagaattcttcctgatgccaattgggttcaatcagatgctttgctattcgaatcttctgaattatttgacgttgcaatcagcaacccaccatttgggaacattgggacaagcaaatttaaaggtaattattcaggttcaagctttgaatacaaagtgattgaggctgcgtcaaaaatatctaagcgaggtgtatttatcctaccgcaaatttcttcagggtttagatacagcggtgttcagtgttttgagaagcaaccttctgcagatttagaaaagttttcaaagcaaacaggcattgaacttgaacatggttgtggaattgacacttcaatctattcaaaagattggcatggagtttcggtgatctgtgaagtggtgctgtgtgattttgaagaattgcatcatgaagttgctttaggtcagctagatatgtggggagaagctgtatga

SEQ ID NO: 66458 - DNA, 270 bp, Acinetobacter baumannii
atgacacgtaaaaacttttttgatactgctcgtgctattgcaggcggcaagcttacacaagcgcaagtagatgatttaaataagttggtagataaatttgcaccttctagcatgactacaagtgatgttagtatagttttaatctcaggatttgaagatacacgtttcaaagcttatgacgatggtgtaggagtctggaccattggcactggcactacagtttatccaaatggcgtgaaagttaagcaggggaatacttgtacaccttaa

SEQ ID NO: 66459 - DNA, 201 bp, Acinetobacter baumannii
atggagagtaagcaaattattactattgcggtcttagttctagtactactgattttaattttcttattcttcttggatatttcaaaagaaaataaggatttaataaatatcctattgggtacagttgtcggttggactggcgccatcgtcaactcttactttggacatgatcgaacaaatgtagagccaaatgacacgtaa

SEQ ID NO: 66460 - DNA, 1029 bp, Acinetobacter baumannii
atgaacagctctaatgaatcaaaagctatatatttcttggttactttttttattggcttaatgtatgtttatttcgcggtttctatgccaaacgaatggtttagggaccgtaattattacgtactttatgcagagatatcaggaaacttattaagtgattttggctcaaatttatcacttttagttaatgagccccttttcttaaccgcagcaaagctatttggtgacacattttcttctgatactttcccaaaattcatgtgtgccatagttacaagtatatttgtatatgtggtcgcaaaaaaatcaagaacattcataatgttcttattaggtatggtgtcacttttcttcatatcatatttgcagactgcacaaattatggtgcttagacaaggtgttgcaactgcaatatttttacttgtcttcctttcaaacatgagtgataagaaaaagctaataatttgtttagttctttcttttttccattctgtgttctttattgtctcgcttctttatgcgctgtatttattctatttgcgaaatagaagtactggaacaatgctttcaatggtggcgattgtatctgcagttctattcctattttctaaatttctattagtttattttggatttagacaagcagaattgtattcggttgactctgaaagcggagggggaggcgcatttgtactaagtgctatcatcttcttgtatttatacttttatggagatagaagtaacaaagagctatatgactggtcattaattggtattgtacttttccttgttggatactacttattcttctctgctggtcgtctttatgtttctttttttccattcattctagttttactgatatcaaggtcaaggctacaagatatattgtttctaactattattaattttatttatattatcctgttctacaatggcggttatttaatattgtttgaaacccaagatccattttatataagtacactgttttcaaaccatgtaagtaatctcctcgatttattctaa

SEQ ID NO: 66461 - DNA, 240 bp, Acinetobacter baumannii
atgccattatttaaatctgtcccaatatcttcattgattcttgaccctcaatcaatgcaaaacatagtggcatttgctgactttatgtgtaaggcagttatcacagtgcccaagcatttacagggcacttcaagtgactgcctagccataactatgcaagcaatgcaatggggaatgaatccttttgcagtcgctcaaaaggcccacttagtcaatggcaacttaggttatgatacctaa

SEQ ID NO: 66462 - DNA, 237 bp, Acinetobacter baumannii
gtgaactcaaccgatttagagggataccaagctcttaaagacgagaacttgcctaccctaaaatctgaagctcaatacggtactgaacgtttgcaagctgcttatgtaactattccaaagggtaattctaaaaggcacctttgggaagttcactcaattagcttaaaagaaattgctcagtttgctgaccaagttttacagcaccaaggagaaacctatgaacattctccagcgtag

SEQ ID NO: 66463 - DNA, 330 bp, Acinetobacter baumannii
atgaacattctccagcgtagtgaagattggcattcggaacgctgtagcaaagtcacagcaagccgagtgaaggatttaaatgcaaagcctaataagggcaaagctttaaatgccttagttttaattattctagctgagcgcctaactggcgttcagaaggaaatcccgacaaattcagccatgcaatggagtatctacaataagccttatgcaattgcagcttatgaaaatgagaaaggtaactttgtcaaaggaacaggtttaattaaccacccttttgttgaaatgttcggggcttcaccagatgtgcttgttaatgaagatggttaa

SEQ ID NO: 66464 - DNA, 258 bp, Acinetobacter baumannii
atgatagatcaagaatacagaggaaatatgaactacccttttcaagatcacatcgtcttgaatgtcgaagaaaatgtagctcctttcccaagaacaaatctgcgtaaatgtcagcacgctcaagtagagattgatactaaagctttaaagcttacatgcatgaagtgcggagcaaaagtaaatcctgcgatggggatcaaagacactatgctgtattggtcaagacagcaaacaaggattgcagagcagaaaaagtag

SEQ ID NO: 66465 - DNA, 321 bp, Acinetobacter baumannii
atgaacacaatggcacaaagtaagctgtttggtctcgctgaaaatagaacagatatttgggcaacacctcaagattttttcgaaaaattagatagagtttttaactttgatttagatgtttgtgctttgcctgagaatgccaaatgtgggcgctttttcacgcctgaattggacggtttaaagcaagaatggactggtacatgttggatgaatctcccatatggacgtgaaatttccttgtggattgagaaggcagttgaaacagcaaataatggtcacactgttgtagggctattaccagtgcgtacagatgtagtttga

SEQ ID NO: 66466 - DNA, 162 bp, Acinetobacter baumannii
atgggagttgcaatcgatttgacatatatagaacgtagggtttcaactgctgagttcgcccttcgaatgaatttcacagaaagagagctatacgaacgaattaaggatggctggattaagccgcctataaaagatggtcgtaaaaacttctggttaatatag

SEQ ID NO: 66467 - DNA, 5763 bp, Acinetobacter baumannii
atgaataaaaatctttatcgaatcatttttaacaaagcccgtaacatgtttatggcagttgccgagaatgtcagaagccagagcaaggcggcagggcaatctagttcctcagaaatagtgagttatgggcaatcatcgggacaagaaaaatcatttcatcaactgtggcatgtcaaggcattagtgacaagtatgagcttattggtgccttttgctccagtctatgctgatatcgttgcagatagtgcagcgaatgctgcaaaccgagctgtcatagctgctggtaagaactcagcaggtacaactgttccagtggttaacattcagactcctaaaaatggtatttcccacaatatctataaacagtttgatgtattggctgaaggtgctgttttaaataacagccgccaaggggctaccactaaaaccgtaggagccgtggcggcaaacccatttttagcgactggtgaagcgcgtgtcatcctcaatgaagtaaattcatcagccgcttcacgttttgaggggaacttggaagttgcagggcaaatggcagatgtcattattgccaacccatctggaattaacattaaaggtggtggttttattaatgccaataaggcaatttttaccacaggtaaacctcaattaaatgccgatggtagtattaaacagttcacagttgatcaaggaagaattacggattcagcaaatcctaactctaagtttggattagggggaaataataatgatgcaaactatgttgacctctatgctcgtgcattagaacttagtgctgagctacgtgccaaaaatgatattcaggtgattgcaggggcaaataatgtcagtgcagatttacaggaggttacagctaaaacaggtactggaactgcaccggcattggctgtggatgttaaagcgctgggtgggatgtatgccaacaacatctatctgatgggtacagaaaagggcttgggtgttactaatgcgggtacacttcaggcagtcaacaatctggtaattaccagtgcaggaaaaattgagcatagcggtacaatcagttcaaccagtaaaacccaaggtttggtcagtgtacaaacaacgggtgttggtgcagctgcagatatcaactcatcaggcagtattaatagtaatagcatgttaaatattgattcaggtaatgacctgaatgtaaatgctaaagaaattattattaataacggcagtttggcagcctctccattaatcattagcagtaaagggaaagtaaatttagcggcaaatagtcgaatttttaatgatgcacagagtggagatgtatatgttgatgcagcgaatatcaatctggcaactaatgcaggcattactagtaatcgtggttcagcatatattcagtcgcaaaaagatgtagttgcagcacaaggtgcaaaattaatagcagcacagaatttaaatgtatctggaaaaggtaagctctcactgaatgaaaatcagatacaggcatccttgggttcaattaacctacaagcagattcttcaaatacagatggtttaattgatatccgaggtgggactatttatgggggtaaagatttaaacctgtatagttcaggagatgtaaatttacagaatcttggatttgcacttgaaaattctgcaacacgagttaagaacattaatgctcacagtgggcgaaacttggtttggaacaatgcaacaaaagttctaccccagattactggcaaagttgcattggatgccgagagtaatttaagtatttcagctcaaggagtctctaacaaggatagtatccaactgcgagcaggtcaattaacattaaatacgaatctcacctctcaaaaagatattaatgtgatcgcagaaacaactgatttatttctaaataatggattaactgctcaaaatgatatcaacatttcagctttaacgggtgggattactgccaatagcctcaaagccaattctaatgctggcaaaatttcgattcttgcgaataaaaatctagttttaaattcactgcaagaaatagaatcagctccttgggcagatcaagatggtgcaacaactgatatgaccttcatcaatggtaataaaggggttacattagggtcaattggggatgggaatgtacaattaaaatctacccgtatcactgctgaacagggcgatattcaactggttgcaggtaatggtatttctttacaggcgaataccgatgtgacaattagaggtgatcatggatatgatgatattagaaagaatactttacagggacaatctttacaaattcagaataagaaagcagatgtcgtcattgataacactactttaacaacttctgttggtggtttatctattaatggggaaggtaaaacgacattatcaaatagtgaattaaattctaaagggaatattgagctttccgccaaagatcatttgactttacgaaatatagaagcgaatgctgataaacacatggcggtgagtagtaaaaagaacatttacttcaatagtaagtatggttcaacagcaactccagttgtttgggattcttcgagttctgttaacttaaaagcgaatggtattttatctatggtgggtatggatcatatcgctaatcagacaacttatactggcggagcgatttcactagaagctaataacttaatcagtccttctgctggtaccttaacttttaatgcaatggatagttctgttctcacaaatgatcctgccctaaaaaatttagagggtgatcttacaattcagacaaatggggctttaacattggatcccaaaatccataagctcggtgctgcaggagattatgaacttatttcaaaaaatggaaagttaactttattaggttatggtggaaccaatggtaatttctccgaaacagtattcagattgaccaacaatatgggggggagccatctagaaggaaataaaggggttgaaattcagggtactgtaataagaaacatgaaagacctcaaaattatagcacctgatggagacatcaaaattgaaggggtaaaaaatacttttaataattctacttattcaaaacattctgattatttgttcaaacagaggctgtattacgaaaataaaatacaagaaattaatagattaggtgtattgaatacggctcaaaagaaacttgttgcacaatacacagaagaaattaatgatattacaaaacagattaacttcttaagtctaggaaccaacggagctgaacacgcagggagtcttttaaggtctgaaacagggaaagttaatattgtctctggaaaaggcattatgattacgggggcggatattatggctattgatggtcaagtcaatattgaagctcaaggtattggagagaaaatctatacctcgacggcattagataagaatagccaacccatgagcatgaatgcgggtgttattcttgcagcccataatgatttttatgatcgtggcaatgaaacggatcaaaactatcaggcgatctcattacttacaccgacccttgtggaagggaagcgtggagttaatataaaaactacaggagcacaggaaggaagcaatctgattcttcaagcagtaggtattagctcttctgagggggatgttaagattgaatcgaataaaaatatactatttgatgtggcgcttgagcaaatttatgatcggtcaacatcaattgaaaagaaaaagtcgtggggtggtttaaaaaagaaaacgattacgaccttttctgagaatgaatcaacacgacctgcttcagtcgatattagtggcaagaatatctatatcgagagtaaagaattaaataaaaataataagatcgatatctattcaggacagtttatagcagaaggcggggatgtatttatccgttcaggtggggatttattctttaatacagtgaacgaaatttccaagaatcagcttgaggttaacaagaaatcttcaatattagggattaaatataatacttcaaaaaccaatagtagttatcaggtggtcactcaagttccttctacactaactgcatcatatattgggaccaagtcagggtttgatacccatttagccggtacagagtttaattatctgaaagaagcgacaattgagtccggcggtaaaatatttttagaaccaagtgtcaccagtattaataacacaattaaaaaagaaaagaattcggttgtttggcaatcaatgcaagataagggatcaattacagaaacggccaaactcccaagttttaatggacctgttgcgcctatatttaaggctgctggtggcttagcagttcaagttcctgtaaaagatgatgtgagatcagcacttgatactttggttaatcaacaaggtacaacttaccttaaagacttagttttaagaaatgatgttgattggcaagctgtaaaacttgcacagcaacaatgggattataaatctcagggattaacgcctgctgcagctgcgattattgtaatcattattacggttgctacttatggatatggagcccaaggagcaggagctgctttgttccagacttcttcagcgacatccagtgcgatggcaaatgcagctgtagcttcaatggcaagtcaggcagcaattagtcttgcgaacaatggaggggacccacttaaagcattaaagtcgttaggaagcagtgaatatataaaaagtctcgctgtttctgttctctctgctggtgcattaagtgctgtaggtggaacagccatgatgcaaaatttagaaaaattgaaacaatcaggtgatttggttcaaaaaattgttggcaatactgctcaagcattggttaattctacgattggtgcgggaatcaatacagcagtatccggtaacagcctaagtgaaaatcttgaaaattacttggcttcaggagcgatgactgccttacaagggacaatggcacaatatattaagccattagaaagtcagggttttagtatcgaatatgtattgcacaaaatcgctcatgctgctgcaggatgtggcgctgccgcagcgacaaaacaaagctgtgaagctggtgcgattggagctggagttagtgaagttgctgcagaatacctgcgaaaaccaagagtttttgaaagtgttgatgatgctttagcttataaaaatcaaattgttgaagtttcaaagggtattgcaggcgctgttgctattgttacaggatatgattctaatacagcaatggcatcagcagataatgcacttaaaaataattttgtatttttagctgcggtacccacggctggagaggctctcgttggtttaactttaggtgcgattcgtacttgtgctacaaatgcagcatgtgtatctagagcagcacagttaggaatttcagtaagtgcaaccttagcagctaattctaacagcactgatgataaaaaggtggttaaacctgttccgaatacttcgggaagtgaaacaggaacacctaataacggggatgatcagaatgatggtaaacaggctaagaaattaagtaataatgatattgttgatttaacgaaaaatcctaattggcataaaactagtttgaaatctcgaattgcagccgcttatgcaagagagttaagagggtctaagaattttgatttctatcgtgaccctaaaacaggtgatatttttattaaaggtaaccaatcaaataatatggttaagattgatatttcgaggtttttaaaatga

SEQ ID NO: 66468 - DNA, 780 bp, Acinetobacter baumannii
atgaacaaaacaatccaaagcttagtcgtagcagcttttgctggtttcgcagttacaacttatgcaaatgaacaggctcagcaacaggaaattcattttccagcgattgaaaagagttatttgaaacaagtaaaacgttatgaatacccagatgttgctcgtttagatacaggactaaataaagatcaaattcgagctttactaggcaatccacaatttagtgaagggctttttgcagtaaaagtttggaactatgtgctagatatccgtgttcccaacacacaccagtaccagcgttgccagttgcgtattgattttgataagcactatttagcagaacgtttatcttggagaggtgaagcatgtgaaggtttggttgcttggggtgggaataatcagtcaccagagcatagtaatttaatttttgagcgaacagcaagtgtgttattcctcttcgatcgatttgatgttaacgctattgaacaaagtattcatagtgttgaggaaattgctgaaaagatcaaaaaaagccagacaacaacaccagttattgtttcaggttttaccgatccattgggtaaatttagctataatcaagaattgtcttcacagcgtgctaatacagttgccaagttattggttcaacaaggtattgatcctacacgtatacagatacaggcgaatagccagactgatctatacaagcagtgttcagggaaaaatagttcgcaacttatcgaatgtttagcgccaaatagacgcgtcaatataagctggtaa

SEQ ID NO: 66469 - DNA, 435 bp, Acinetobacter baumannii
atggcgaaaatagctaaaaatttagaagcagtacaagaggcccttacatggctcggtactccttaccatcatcaagggcgagtaaaaggtgtgggggtggactgtggtactttgatctgtgaagtctatgaaaaagttggactcatggaccatttagacccgcggccatatccacctgactggcacttacaccagatggggcaacgttatttagaactcattttaggtgtatgtgatccggtcgaaggtcctccacaaccgggtgacatcgttttatatcaatttggcaagtgtatcagtcatggtgcaattgttatcgaatggccaaaggtcatccacagttacctccatcagggagtgattatacaagatggaacaaaaggaagtttagcccggcgaattgccgggttttttcgtatgaagaggcttaaataa

SEQ ID NO: 66470 - DNA, 552 bp, Acinetobacter baumannii
atgaatcttttttttcaagaacaattaaataatatttcaaataacaatagcattcctcctgagctatcagtactttttaaactcactcccactatcgcggatagcttagatcttttaatgaaaaaggccccaattgagcttcctgaaaaattcttctattctttagctagactatatgcagctgctgatgcaatagcgatagatttacataatcttttagagcaagagcatgagccagaagatattgataaaatacttatagaaagattaaccacagatactcctttttttacacaactagctttgctaattggtggcttaagacaagaatttattactcggtttgaattattaagtaaagaagaacaagagcaagtacataaaaaagggaatagagctcgagcaaaaaaatatgaactaattaaagcccaagtctttaaaaaatttaaggaaggtaattatcgttcttacagcgactttgctaataaagagcataataattttgaagttacatacactacattaactaggtggcttagtgaattaagttaa

SEQ ID NO: 66471 - DNA, 1320 bp, Acinetobacter baumannii
atggaaagaataggttcaacacctgctgatgataatggatgtgcttggttccatttaagcccaaatcgattaccaaaaccttcccttagtggaagaatagaggctgattgggtcgtagttggagcagggtttacaggtctgtcagctgcaagacaacttgccttgaattttcctaatgatcacattgttcttgtggaagcgcaagaggttggatatggtgcttctggaagaaactctgggtttatgattgatcttcctcatgatattggtgcagcagactatattggggatatcaaaacagcaagcatgcacttaaagctcaatcttgctgcacagaatattattaaaaaactagttgctgactataaaattaattgtcaacttgagccagcgggtaagtatcaggcagctgttgaaaagagaggattggcagttcttgaagcgtataaaagtggtttagaaaagcttggccaagcgtgtgaaattattgaggaacaagatattccagctcatttaggtacacatttttataaaaaagcgctctatactcctggaacattattagtacagcctgctgccgttgtaaaaggtctggcggatcatttaccaaaaaatgtaacgttgtatgaacatactgcgattacaagtgtggattacgggcagaaaattactctacagtcccctcaaggaactttaattgctaataagctaatactgactaacaatgctttcgcttcacaatttggctttttaaaaggccgattacttcccattttcacttatgccagtatgactcgtgtactgacagaagaagaacaaaacgttttaggtgggaaaaaaacttggggcattattccagcagatccgttcggtagtacattacgtcgtacaccagacaaccgtttattagtacggaatagctttagttttaatactgatggacgtagtaaacctcatcttttacctcgtgtagcacagagacagcgacgttcatttgaaaatagatttccaatgctgcctaaagttgagtttgagtatacgtggggtggatcgatgtgtctgtcccgaaatcatgagtctttttttgggcaattagctccaaatgtatatggcgcactatgttggcaaggactaggtacaactaaaggcaccattgcaggtacattactggcaaactggttagctggggaaaagaatgaattaattgattttttactttcctctccaggacctaatgcaaaccctcctcaaccttttttatctttaggcgttaacctcaacttggcaatggggcaatgtcgagctggtaaggaaagttag

SEQ ID NO: 66472 - DNA, 1341 bp, Acinetobacter baumannii
atgagttacaagatacctttagaggatattcctttaaattcattccacaaaaaattgacattctattcatcaggtgggccatttttagatggctatgtgctaagtattattggcgtagtcatgatgcaaatgacagaagctttatcactttctgcattttggcaagggatgatcgctgcatctgcattaattggtgtgtttcttggtggttttcttggtggatggattacggataaatatggaagaaaagttctctatttaatcgatcttatcgcaattattggcttttccgctgcccaattctgggttgagtcggctctcatgctttttatatggcgactattaattgggatcgctgttggagcagattatccaattgcaactgcatatcttgcagaatttttaccacgtaaaaatcgcggaccacgtttagcagcaatggtgatggtatggttcttaggagcagctgcagcttatgcagtcggtgagtttattttaagagttggcggtgaaaatgcttggcgttgggctttagcaagtgcagttgtaccaggagcattatttttaatggtgcgtatgggggcttctgaatctccacgttggttacttaataaaggacgcattgctgaagctgaccgaatcatcaaaaaagtatatggttcacaatactctcatacagacttatctgaaaatgtaggtgataagaattcaaatacttctgtatggtcacttttccactcaggatatggcaaacgaatgcttttcgtatgtattttctggacttgcgcaatcttacctctctttgctgtttatgcttttgcacctcaggttttacatgctttagggcttacaggtgatttagcaggatggggtgccgttgcaattactttcttattttttgtgggttgtctagttgcaacaatgcttattaatgtcatgggacgtaagaagatgctattccatagttttctttggtccggtttggcattgtttattctaggtttttatcctaatgcttctccaatgacggtgttaatactattcggtgcttatgctgtatttattggtggtgcacaagttatggaatatgtatatccgaatgaactttttccaacagaagttcgtgcatcagctgttggtcttggtacttcaatttcaagaatcggggcggctattggaacctatttattaccgtttgccttaaccagttggggtattggaaccacaatgattgttgcagcagcagtttgttttattggagcgtggtctgcgtgggctttagcacctgatgttgatgcgatggatttaaatcaggctgcaagtttaggaagtcgtaaatag

SEQ ID NO: 66473 - DNA, 351 bp, Acinetobacter baumannii
atgaaaaatcaactcgttgtagtacgtcaagctgaatgtgccgtattaggcgcaccagcaccagcaaaacttccggtgggtgagttaattgcacagcagagcactgcacaagatcaaacttctgagagtattgctgcaagtattggtgtatgggaaagctcgccaggtaagtttaagcgtcatattgcaaaccgtgagtttagccatattgtcaaaggatggtgtattttcactccagaaggtggggaaccagtagagctacgtgcaggagatgcggttttattcccggcaaactgtgaaggtgtttgggacatcaaagaagacttcagaaagacttattgtattttttga

SEQ ID NO: 66474 - DNA, 354 bp, Acinetobacter baumannii
atgatgacagatataaaaagatttcatagcggagctcgtgctagtcaggttgttgtaagtggccaacatatcgaaacggctgggttagttgctaagtgcactgataaagggattgcagaacaaacccgttgtgtattagatcaacttgaacagttaatggttgatgtaggtgcaaatcgtaaccaaattacccgtattcagatttggctagccaatatgtctgattttgaagaaatgaataaggtctatgatgcatgggtaagtgaaatagataaacctgcacgagcttgtgttggttcgcaactcgctagtcctgaatatttaattgaaattcaagcaacaggaacgttttag

SEQ ID NO: 66475 - DNA, 1494 bp, Acinetobacter baumannii
atggaacgattaacattagaaagtttacaagaacaagtttatgacgttgtagttattggtgcaggcgctgttggatgcgcatcagcccgagagttggctgcacgaggttaccgtactttattagttgatagaggtgatataggtgcaggaacttcatcacgttcaagtcgtatgttgtattctggcgtaggttatctagcaccagattttcctctatggcaaatacctttccgatttatagcatcatggaaacgttttctctatgcacgcaatattatgcattgtcgagctgagttagttgctgacatgcctcatcgtttgaccaagcattcattttattatccatttagaaaaggtgaccgttatcctcattggttaattgattttggttttcgcttgatggaaacgcttactagtcgtggagttccattagcctattgtaaggtatcagctgctaaagcagccaaaaagagtgcgatggtggctagtttgagtaagccattacctaatgtcgcgatatttgaagagtatatgtacgattggcctgaacgtatctgcgtagacacagcattagatgctgagcaaagaggagcacatatacgtacttatacgaaagtaaataaaatagaacgctgtaatgaaatttgggaaattactttagatgaccaagcgcccggtatggatgggcaggtacagataaaaacacgatcaatagtgaatgctgctggcccatgggttgaccgagtagtgggtggaggtaaaaaagaagaaaatcgagtactaggacgtaaaggtgttaatgtcatggtgcgtttgccagatgaatggcgtggacaaggcttagaagcattttctagcaaaggtgaacctttctatgtttttccatggcgtgactatcattttatcggaccaactgaatctctggttaccgatgatcccgataatattcatgtattagattctgagattgactatatattgggtgaagctaactttttgtttccagatctaaaattgtcacgtaaagatgttaaacattgttggtgtggggttaggcccatgtcaacattagatggtaaaacagttagtttacctgtgcgtgctattacggatccagatatgcccggattgataacgatgacagggtcatacattatgatgcatcgtcatgctggacgattggctgctcaatctattgaaaaatgtctaggcaaacgacttgcaccagcaaaaggaatgatcttcaaggctaataatgccaaaagtgaaaaggatattaagcaaatcattatgaaagaacatgttgtacgtcttactgatttgattcgcaggcgtttgaatgatggattaaatatagatttggggtttgatcgtgttgaagaattatcaatcatggccgcaaaagttttaggttggagtgaagcacggcgtttggaagagattgcttattttaaagaagatacccaccgtgtctatcgaaaaataaattcctaa

SEQ ID NO: 66476 - DNA, 1053 bp, Acinetobacter baumannii
atgaaaaatgtatctgctcatgcttatgaagaaactttagatcctgaagaatcattctccgcaattaacccagatatgcgagttgcatttatcctgatgaacaaattcactttagctccagttactggactagtggaatcattacgatttgcagcagataagtcttttcgtagtttacagatttattgtaaatgggattggatgaccttcaacaatattcccgtcgttgcaagttgtggacttactattcaaccaacaactgactttaatttagaaaatcttaaaaataattatgactatattgttcttgctggtggtttgttaagtgaaacacgagaacccccacaaggattaataaatgctcttcaagaaattcataaagctaaaattcctattattgccttatgctccgcaagttttgttttagggaaagcaggtattcttgatcaacataagtgtgcaattcattttacgattagagatgagttcgttcagagatttccaaaagccattgctgttattgataaaacgtatgttgaagatcgaggggtttttacttgtcccggtggaacagcaattgatttagcagcaaatctaatccgacaacattgtggtgatgtccgagcacaaaaaggtttggaatatcttttaattaatggagaaaaaccccctaaaactaaagaaagtccagaaatcgataagccagatacatacgaaaatataaccgtcactcgtgcaatcgaatttatgagtaaaaatttaagtgcccatgtgactttaaaagaggtggcagaacacgctcaaaccagtccacgccaattacatcgcgtatttgtagcaaatacgaatgagtcccctgctaactattggagacgcttaaggcttgaacacgcccgaaaattattggcaaatacgagtgcttatgtaactactattgcaatagaatgtggattttctgatgcttcacacttcatttactggtttaagaaacaatatggcgaaacacctttctcttatagaaagcgacgtcatgaagttgaacgattaaattaa

SEQ ID NO: 66477 - DNA, 1389 bp, Acinetobacter baumannii
atgtaccgtggattttggtatgcagaggcgttagatcgtgaaagtgcactttctccggccttacaaggaaacgttaaagccgatgtttgtattattggtggaggctatttagggctatggtcagcaattcggcttaaaaaagctcacccgaatatgacgattgtggttattgaaaaagatcgttgtggttcaggtgcaagtggtcgtaatggtggttttgttaataactggtggccaaaatacttatctttagttgaaatttgtggtgagaaagaagcacgtcgcatttgtgaagctgctgagtctgctattgatgagatgggagagttttgtcgtgaacataatatcgatgcgcaattccgtaaagatggtttgttatggaccgctagcaataaacgccaaatggattcatggcttggtttaaccagagaactggataaatataacgttaatccatttaaagtaatttctaaagaagaagcacagcgccgttcaggttcaaaacgaatgttaggcggtgtattcgattcaaatgcagcaacgattcagccggctttcttagcgcgtggtttacgccgtgtagcagttgaattaggcatcattatctatgaaaaaactccgatgacacgattggagcgtagtgagcgtccagtcgtacacaccgaaaaaggtaaggttgaggccaataaagttgttattgcaatgaatgcatggggagcacaattccctgaattacgtcgcatgattatggtgatgtcgagtgacatggtagcaactgcacctgctaaagaacgcttggatgagcttggttttagtggtggagagtgtgttatggactcacgtactattttgaattattggcgaaacactccacaaggccgcattgttttcggaaagccattaggcgaatttgcttacggcggaaaaattggtgacctttatgaaaaaccatctccagctgctgcaggtgttgaggctgagatgcgttcgttctatccagaattagaagacatccctgtagtaagcagttggactgggccgcttgatcgtgcaatgaaaggtttacctaactttggtcatttaggtggccataaaaatattatttttggtattggcttctctggaaatggcgtaggtacaactgtattcgctagtcgcatcattaaatcgttagtagaagatgccaatgatgaatgggcaaactgtggtctcgttgagcaaaaaatgaagttattgccacctgagccattctgttatatcggagcgcattgggttcgtgatgccttagtaagaaaagaaacattggaagatcaggaccgagatgccggcccaattactaactttttagtgagtttggcacctgcaggttatgcgcctaagaaaaagtaa

SEQ ID NO: 66478 - DNA, 984 bp, Acinetobacter baumannii
atgaagcatcatattgtttttttggataatgaaggcattggaccgacggttaaattaccagagtttccatttccacatacttgggcaagttacccttatacaaaccctgaacaagtagttgagcgtctaaaagatgcaacgattgtgatgacatgtagtgtcccattacgtaaagaacatctatcacaattgccaaatttaaaaatgatttctttggcacttaccggaacagatggcgttgatctggattattgtcatgaacatggcattgtagtaaccaacgtcccagcatatgcgcaaaatacggtagctgaacatatcatggcgatgatttttactttaatgcgtcagacctctagctatcatcaactgttaagtaaagtttcaaaaggtgaggctgaaccgcagaatatttattttgattaccgtattcgagatgtgcgcggtcaaattctaggcattattggccatggtgctattgctaaacgattagctgagttagcaacagctgtagggatgaaagttcgtttctttgatcgaaatggtaaataccaaggagacgaattcttcagttttgaagaaattttatctcagagtgatgtggtgtcgttatgttgcccacttactaaagaaactaaagacatgatcggttctgctgaaattgccctaatgaaggatgatgtaattttaattaatgctgctcgtggtggcatcgtgaatgaaccagcactcatcgaagcaattcagaataaacgaattggtggtgctgcccttgatggttcagtagaagaaccgattcagcctcatgatcctttatttcagattattgactatccgaactttattttaaatccacatgttgcatggagcagtgaagatgccatgcaaacactaattaaccgtaccgttcaaaatattattgattttgcacaaggtaaaacacctgcttctgtagttaaaaaggaagaattatgtcaagcgtaa

SEQ ID NO: 66479 - DNA, 1452 bp, Acinetobacter baumannii
atgtcaagcgtaatgaagaccagttatgtaaatggcgaattcgttgtttgccaaggtacagaagatattctggaaaatattaatccatctaatccgagtgaaattgttgatcgttttgctcgcgcagatgaagctttaactcagcaggcaattgctgctgcaaaagcggccagtaaagaatgggcaaacagtaatcctcaattacgtgcggacgttcttgatcgtattggtactgaaattttagaacgtcgagaagagttagctaaattgctgtctttagaagagggaaaaatctttaaagaagcattaggtgaagttgatcgagcagggcgttcttttaagttctatgcacaagaagcattacgtgctgtgggtgaaaaatataattcagtgcgtgatcaggttggaatcgatgtttatacccaagcggttggagtagtgggaattatcagtccatggaatttccctattgcgattcctgcatggaaaatagcgcctgcattatgttttggtaatacagtcgtgtttaagcctgcagagcttgtaccctcatctgcctgggctttagcagaaattatttctcgttctggtttacctgcaggcgtatttaacatgctgattggtccagggcgtaaagttggcgatacgattattcgttcgccagatgtcaatgcgattacttttacgggttctgaaggtacaggacgacaagtcgctgaaattgcagcttcgcgtttggtccgtgttcagcttgaaatgggtgggaaaaatcctttagttgtactagatgatgcagatttagaaaccgctgtagaagttgcattacaaggttcatttttctcaactggtcaacgttgtacagcaagctcgcgtgtcattgttacagccggaatctatgagtcattcattaaacgtttagaagaaaagactcggtcattaaagattggcaatgctgcaaaagcagaaactgatattggtccagttgttgattctaaacaactcaaacaaaacctgacttatgtacaagcaggtttggatgaaggtgcaacgttactttgtggtggtgaacatcttcaaagtgaagagggtggtttttactttacaccggcaatatttaccgacgtgacaccggaaatgcgaatttatcgtgaagaaattttcggtccagtattgtgtgtgttgaaagttgagaattatgaaaaagcttttgccgcagcagaagatacaccatttggtttgtcggcgggtatagtcacaacttcattgaaatatgctgaagattttaaacgccgttcatccgcaggtatggtgatggttaacttggccacagcaggcgttgattaccatgtcgcttttggtggaaataaaggctcaagtctaggacctcgtgaacaaggtacttatgcaagacagtttttcaccaaagttaaaacaacatatcaacttgcatag

SEQ ID NO: 66480 - DNA, 1407 bp, Acinetobacter baumannii
atgaatagctttttattatctccagatgtacttgatgcattaaaaaatattgttggtgaaaaccgcgtaaaaactgatgcggatagcctagaaaattggggtaaagatcatacgaaatattttgctccacatgcctcggcgattgtatttccttcatcaacagaacaggtacaggcaattgttaagcttgctaaccatcatggaattgcgataaccccgtctggtggtcggactgggttatcggcaggtgcggttgctcataatggggagatagtcataagtctggacaaaatgaaccagattttggagtttttcccagctgatagaatggtccgcattcaagctggtgtagtgacagaacaattacaagattatgcagaagagcagggtatgtattacccagtagattttgcttcagcaggttcaagtcaactgggtggaaatattgcaaccaatgctggtggaatcaaagttattaaatatggcatgacgcgtaattggatattaggtcttacagttgttactggaaaaggcgatatccttcggttaaataaaggcatgatcaagaatgctacaggctatgctttacatcatttatttattggtggtgaaggtacgctgggtattgtaacggaagctgaaattcgtcttgatcgccaaccccaagatttacaagtattggtacttggagtgcctgattttgaatcagtcatgccaattatgcatgcctttagaaaggaaatagatttaacagcctttgaattttttaatgatttggctatgcagaaagtattagatcatggactagtacaacgtccatttgaaacttcttgtcctttctatgtgttgttagagtttgaagctccatatgagcctgtaattgataaagctatgcaaatttttgagcattgtatggaacagggatgggttctggatggtgttatgagccaatctctagaacaggcgcaaaatctatggcgtttaagagaagatatttctgaatctatctcggcatttacaccttataaaaatgacatttctgttttgattacgcatgtaccagattttattgctgaaattgattctatcgtagcagacaattatccagattttgaaacatgctggtttggccatattggtgatgggaatcttcatttaaatattttaaagccagcaaatctaagcaatgaagatttctttgcaaaatgtgaaatcgtcaactcatatgtttttgaggtggtaaataaattcgatggttctatatctgctgaacatggagtcggtatgacaaagaaaccttatcttgaatttagtcgaagtgagcaagaaattgaatatatgaaagcgcttaagaaggtttttgatcctaacttgattatgaaccctggaaaactattagatttctaa

SEQ ID NO: 66481 - DNA, 183 bp, Acinetobacter baumannii
atgtttggtacatggcttaaagaaaaattaaagcaatactcaagtacagatagtcacgatgagctagaattcattcgcttagcaagtgacggattatggttgcagacaattacagaaattatagatatagtaacctctttaaaatataaaaataaactaatagaaagaacttatttaaattga

SEQ ID NO: 66482 - DNA, 915 bp, Acinetobacter baumannii
atgtcatctccgaccatcaagcaattggaagctttttactgggcagcgacatgtgataattttgcaatcgcagcgcaacgcttacatatatctgtttcatcgctatctcaaagaattcatgaattagaatgcattttagatcatcaactttttgatcgacgtggacatcgggccgttttaactgaggatggagaacatcttttaagcatggccagtaatgtgcttgaagccgtcatcaccctacaagccacctttacgaatcaacagaaaggattaaatggaaggctaaagtttggtgtaggcgagttatcagcgctgacctggttacctaaatttattgccattgcccagaaacagtaccccttattacatctagaaccctatgtagatgtaggtgcagtgcttgaacagaaattagatgcaggagaactagattttgccataatggcgggccgatcttctaaaagtagtattctctctcagtccattacgaaagctgattttgtatggatgatcgccgactccttactcgatcaagactcaccccaaaatttaatcagtctattaactcgacatacactggtcaccctaccagcgggtgcaggaacaacacgtattctagatgactggctattaagccaaaatattcatgaaattaaacgtatcacttgtaataactggagtgctgttgccggcatgattcgagaaggtgttgggattggttttttacccaaaggctggatggaaaatagcgcaggttctactctaattcaacttgaaagtaatcctccactcccctcactgtattatgcttttcagtggagacgtggcgatattcgaaatattattccaaccatgcaaatattagtaagtgaacacatcaatttttcgctgagaccgaataatattttataa

SEQ ID NO: 66483 - DNA, 1146 bp, Acinetobacter baumannii
atgacatatcaaacagtgaatttaggcacagcgcctactggcgcaggcggtgatactttccgttcaactggcgcaaaaattaatgaaaactttacaaattggactcatgcagctagccgttatgtaggtactgcggatggtaatttgctagaagttggagcttttggtgtaggtcgggtttcatcatctactgagcagccgaatgcaataactgcgaatggcttttatcacacagggttagagaatgggatgaattattgttctttcattcacgcaggccattcttatgataccaattattcatggcaacttggcgtaccgatgggtgatacaaatttgtattcgctaaaggggcggattaaatcaaaaggagtatggtcgaatgaggctattattagaaatagtcataataccactatcgactcgaacggatttatcaaagctgcctctcccgttgttaaattgtttgcagataaaatcgaacctaacgatgaagcagccgaacaaccactttcatttgagaagttgggtattggtcattatttagttaaaggttcttctggattcgctaaagaaggctggtggattgaaattccgactgacacacatggcaacaagatttgtgctgttgaatatcaaactttagagaatggtgatcttgaaattaaaactttcaagaaaaagctaaatgaagatggtgacattgttgctaatcttgatgcaccaatcgatattccaaacaatgcaaacggtgagccgcgctggatcgatattcgtttgaatgaaatcaaaaagccagaagtaatcacaacattacgtactgaaaaacaaccacgtatggtccagcagattaaatatgctccgcagctgacttatatcactaaatacgaagatttatttgatgatgaaggaaaagctgtaatcgtggatggtaagaactataaaaagccagtaacccacattcaaactgatcaaaacggcacacccatcctatcaaatcaaccagtgatgaatgaaaaaggtgaaccagtttttgagtgggttcaagctgttgacggtgaaggtaaacctatttttgatgatgttcctgttttagataaagatggaaatccaatctatgacgaggtaattcatgagtctgaatag

SEQ ID NO: 66484 - DNA, 924 bp, Acinetobacter baumannii
  misc_feature (899)..(908): n is a, c, g, or t
atgaagcctgaagataaagcacgtatagttattgataaaaaactagaagatgctggatgggttgttgtcgataagaaaaattataatcctagcgcaggatttggtatcgctgttcgtgaatttcaaacaaagaccggacctgcagactatattcttttcgtgaaccgtatacctatcggtgtacttgaagctaaacgtgatgaagaaggggaaaatattactgctcacgagcgccaaactgatcgatacgctacttctggctttaaagccaaacagacatacgatacccttccatttctatttcaagctacatcgaaaattattcgattcactgacaaacgagatcctgaagctcgatctcgtgaactatttcatttttataagcctgaatatttacatgagctgtatacaagaaataaaaacttaagacaaaacttactagacatgccaccattagctactgataatcttcgtgactgtcagattgatgctattactggattagaaaaatctttagcactccaaaaaccgcgatctctagttcatatggcaactggcgcaggaaaaacatttactgccatttcatctgtatatcgtctattgaaattcgctaaagcaaaacggattttgtttttagttgatacacggaacttaggtaaacaagctcatcaagaatttatggcatttactccatccgatgacaaacgtaaattcactgaactctataatgttcaaagattaatgtcatccacgttggataccaaagccgatgtatgtatttctaccattcaacgaatgtattccattttatctggcgagaaattagatgagcaagatgaagatattaatctaaatgaagttactactttagaagaaagtacacgactatctaaaagacnnnnnnnnnngacatattcaatataa

SEQ ID NO: 66485 - DNA, 1869 bp, Acinetobacter baumannii
gtgccaattgaatcttttgattttattattattgatgaatgccatcgcagcatctataacttatggaaacaagtactcgactactttgatgcatttcttattggcttaacagcgactcctgataacagaacttatggcttttttaacgaaaatattgttgcagaatatagctatgaacagtcagtggttgatggtgttaatgttgggtatgacatctatgagattgaaactgagattacaaagaaggggaaaaagattcgtgctaagcagtggattgaccgtcgtaaccgtcaaactcgtgctaaacggttagttgaagcagaagaagatattgtctatacccataaggatttagacagggaggttgttaatccaagtcaaattcgcaatattattcgggaaatgaaacgcgcaataagccaagaaatttttcctaatcgagaagaagtacctaaaacactcatctttgcaaaatctgatagtcacgcggatgacattattaatattgttcgtgaagagtatggtaaaggtaatgagttttgtgaaaaagttacctacagtgccaaagatcctgatggtgttttaagtgattttcggaacgaatataaccctcgtatcgcagtaacagtcgatatgattgcgactggcacagatgtaaaaccgttagaggttttactcttcatgcgagatgtacgctccaagggttattatgagcaaatgaaaggtcgtggtgttcgtagcttagataaagatggactacaaaaagtctctcagagtgccacaggtgcaaaaactcgtttcgtcatcattgatgctgtaggtgttgagaagtctcaaaaaacagaatgtcgccaactggaacggagaccctcaacgacgttaaaacaacttatggatggtatcattctcggtgatgttgatgaagatactgctttaagtctggcaaatcgcttaattcgactaaataaaaacttagatgcagagactcaatctgaaattactgaattgaccaagggtaaaagcttaaagcagattacagaaaccattcttaatgccgttgatcccgatacaattaatcaagctctcatcttagatgaagctttaaaaggtaatgttctggatgaagactccatctcagaacaacagtatttagaaaaaatggctgaactcttagaacaagcttatagagtttttgatgatcctgaatttcgttctctcctgactgataaaaaggatgcagaacaggttattgatacggtgaatttggataagttaattaaccgaggcttctctgcaaatgtagaacagaaagctcaggaagatatcgaaaagttcgaagcatatttaaaagagcaccgagaagaaattgaagccttaagtttcttttatgatcaaccctatcaacggcgtgaactgacgttaagcatgattcaagagcttcatgataaactcagccgccctccgctattactcacaactgaacgtctttggactgcttatgaaagagtaaaaggcagtcaagtcaaaggggtaaatactcagcgtaaattaactgatttattatccttaattcgttttgcttctggcttagatcaagagctttctccttttagtgaggaagtcgataagcggtttaaaaagtgggtctttagacataatgcacagaatgcaacggcttttactgaagagcaaatgaattggttacgtttaatgaaagatcatatagcaaatagttgtcagctaacacccaatgattttaagttaggttcgttggcgagtcatggtggggcatttaaagcggcagaagtttttggtcgagagaaacttatgccattaatgaaagagttgaatgaagagttagtggcatga

SEQ ID NO: 66486 - DNA, 1599 bp, Acinetobacter baumannii
atgattttggcttggacaattgctgatgttcgttatcgctttagagtacaagtagcccctctaccgttaaaaatgattactttttctgtcgttgtttttattggtttatctactattcttacagatctatggcgtgcatctggatggtttgtacttagccagacatttataacctcagcgctttggcaggcctttttaggtattacctttttttctacatttctaatatggatttggtttgcttttataagacctcctttatttagtaaattgaattcaaaacgttatgtcagtactgtttataaatatttagttgaaggtgtacctactaatttagcgataattgccgatgaactgactcactcggcctcaagagttataaaatatgctccagaaagctatagatttgaaaaagttgataattcggctaaattagaaaaagtagaattatatgctcatgatttacttaatttaattgcagataaaagattttgtaaggtagtagttgagtcatctccaattactacttttgctttttttagagaaatagagaaacagcataaatataaagttgatataagagtttttgctagaaatattgtaagtgaagcaataactaataaagattcatttatatatcacgaaacagaaggatatgattcaggattaattggaaatgaaaagcctataacacaatctatattttcaaactttgatatggtggaaagtataggaactatatttgatgcaccgtttactaaatgggatgcaccgcaatgggaggcttatagtagagttgtattaattactatagaaaacttattggagaaaaaatttataaatccttgttatacaatttatagggctatgaataacttggaaaactctgttagggacttatatacattaaatggaagcccaaatatgggagaaaatgatacttatgagcgtctaaaagtagtgattggttttatagaaaagtttttaaagttacttgaggaaaaaagagcagacgaaaaaattaaattgcgtagtttagataaagaaaatatttattatgacagaactatttatgatcatttagtcaatatgttgtttgaaataatttgcaaagcatcctttataaaatcttcctcttcttcttttgagctttggaatattcaccataatactatttggagcgaattttttaattatggtagttttgatacttatattggtagagcttttaaattcaaattaagaagaattatatataacgaaatattaagaatgaacgaatttcctaattttcaaggagccgctattttgggattttgcctttatctacttggttttaaagttaatgaaaattcagttgactatagagatataaaagctttacacaaagttgtattaagctggactaaaaaaaattttgctgctctatatgagttcaatccaaaagttgctgagcaatgtttaatagataatattacttatgatcatgaaaaactcagactaacccgtgcattttctggaaatgccttaaaacgagagataacttattatcattttgatgtagatcctcctcatgaaaattttaaaaaatttgattaa

SEQ ID NO: 66487 - DNA, 726 bp, Acinetobacter baumannii
atgaaaaaaataactgctctactctttgctttttgtgcaactgtgactcatgcagaattgcaaaccttggataatgatgcattacaggcaattaatggccaagctggtgctgatttatctttgatgcttaatttaaaccagaccagtaacggcatatttgataatggcagtggcggcgtttgtgaaaacgtagagttctgtcatattggtttagcaattaataaacgctttgtgcaagcagacgcgactaagccaagtggttgggctgaaaatagcgacagcggtaataaactttggttagtatttaaaggtgtgcaaggcactttaaatattcaaaaaatgggtttggatggtgctgatttaaagtatcttgataaaagtaatactgaaattataaaaccggctattcaacttagttttagtgcagcacagccaattttaattcgtaattttggttttaatgctctgtcaattgagcaagataactttacgagctcaacaacaacgcaaggctcgagtgcaaatatgtatgattatgcatatttcaaaaagccaacttatgcagcgactgctaatagtgcgaaccagcaagtggctactgcgaccccatcggcatatgactacggtcgtgaaacaggttttatgggcttaatgatgaatggcaacttagcaattcaaggaaaagtcatggtctttagctgtgatggtagccatccacgttgttaa

SEQ ID NO: 66488 - DNA, 930 bp, Acinetobacter baumannii
atgtcgagtggtgcaaagatccgtctttactatgctgaagagcaaacccccgaagtattacctgcaacaccagtttggaaaactgtacgtcgagtatcggatagcttgactgaaaacgttacgaccgaaacatcgaacagtgttgttgacacacgctttcagcaaggtagttttgcaaccgaagctgaaattactggatctttagaagttgaattgtctattggtctttttgatgacttttggtcagcagtcgcgttgaataactggaatagcgatgtgcttaactttgggggtgatgtacgtaagaccttcaccttcgttaaggtttattcagatatcaatcaagtttttatttaccgtggcgtgcgcgttaatgaagcatcaatgtcaattgctactacaggtaaaatttcagctagttttggattgatgggcacactgtttgaacgtacgacttcaagtccagttgtttcccctttaccagtacctgatgttgtcctagtttcatcagtaaacgttggcgatttaacagtaaatggcgaaacagttgttggcactgcttgcatgcagtctcttgaattgactatcaacaataatatggaagcaatccgttgtattggctctaaaaagctcactgcaacgacatatctagaaaagatagtagctattgcattgaacactcaatacatgttctcggcccaatcggcaggttacattgactacatcaaatcccgagacacaatgccaattaacttctctattgaagataaggatggcaatggctatgcctttgaattccctaaacttgaagtgatggaagcaccgcatcctgatggcggtggagaagacaccatcacagttgacatcaactacaaccatattcgcgtatcgccagttattactcgtgtgattgcgccagttacaccttaa

SEQ ID NO: 66489 - DNA, 753 bp, Acinetobacter baumannii
atgtcaagaactgctattttagttgatggtgcattttttttaaaacgttataaaagtctttatacaaaacctgaagatcaaacgcctgaagcggcggctaaaaatctttatacaatgtgtttatctcacctaacagaagggcgtccacaaaagcgttatgaaactgaaaggcagactaaacgaccagagcataagggatatagtgtagagcaccaactctataggattttttactatgactgtgagccactagataaaaaacatcactatccaatttcaaagaaagccgttgatttctcaaaatcagatacagctatatttcgtaaagctttttttgattgcttaaaagagcaaagaaaagtagcactccgtatggggcatttatcagagattagcggatggataatccatcctagggtgcagaaggaaatattcgcaggcaaaagaacatatgacagccttactgatgatgactttattttagaagtcaaacagaaaacggttgatatgaaaattggccttgatgttgcaagtctcacttataaaaaatttgttgatcagattatattagtatctggtgatgcagactttttaccagcagcaaaactggcaagacgtgaaggcattgacttcatccttgacccaatgcataaggatatacccgcaaatctctcggaacatattgatgggaagagatcaacttgcccaaaacctaagccaaaacaaaaaccgcccaaattagaagttgtataa

SEQ ID NO: 66490 - DNA, 348 bp, Acinetobacter baumannii
atgttagttaaacttttatatacattggggtgttctatttttattgtggttttaattagctgcactaaaaaatttgaaataaagccacttcctccttcagttgaagaggagtatctaacttcaaatcaagaaataggggagatgcttgatgcattaaataatcgagatgtaccaattgttgagaagcgagagatattgtgtaagacatatcctgaagtctacaaaaaccactatatgccagctctacttaagctttctccagaccaatataataagaaaacactcttaagagattacgaggcagtggtcaacttctataaaaaagcctttactcttaattgtaattga

SEQ ID NO: 66491 - DNA, 420 bp, Acinetobacter baumannii
ttgggtaagcatccgattgttttaaataaagaagttaaagggcatgtagcaaatcgtttacaagctgctttgtggcgagaggcgttttcactggttaaagaaggggtgtgttcggcagaagatgttgatatcgcaatcaccagtgggcctgggctgagatgggctttatttggcccctatataaatatggaacttgccaatcagaaggggtttaaagaggcaattcaccatttaggaccacctatgaccgaatggtggaatgatatgcaaaattttcagcactctgaagaaactactgcgttgctagaagaacaaactaaagaacttttaacacattataaagatatcgatttatctcaaaaaagggataaaggactagtcgatattttaaaattgagacaacaattagagttggattaa

SEQ ID NO: 66492 - DNA, 258 bp, Acinetobacter baumannii
ttgagcaacgatttaaatagagaattatctaaattgaaagattttgtatttcagaattatgatccagtaggagtatctggtaaggccatggaaatttataatgactatgccttgcaattatcaacttttgcatctgagaaacttatgattttagtagcgatggatatgggggaagagtttgagttatctaaagatgaagttgagagtttattagatgctttattactagatagttcactaagctcatctaatgaataa

SEQ ID NO: 66493 - DNA, 1302 bp, Acinetobacter baumannii
atgcgacagtttacgtctcttcaggttgcgatattagcactcggaagtttatgcttttctacagcctatgctgactctactttagttccaatgtcagatgctgagctgtcagctactcgtggccaagccttgatgagtatgtcttatattgcccctaccgatgctgcaagtaactctagtactaatggaaacatgggcttctatcgacttgccctagatgcccaattagaactgaatgccaatattaaaaaattacagttaggttgtggcggtgtcaatggagcaggggcctgtgatattgatatcgattatttaagcttaagtggtggtactgtagatagtaccagtgctgaacgtgctgcctcttcagcagttattactaatccatttttagagttcgctgttaagaacccgaattcagcgtctacacgtgaaatacaaggtttccgattaagtgctaaatcgctttcgggtttacttacttttggtttagaaaatggtgatgcctcgagtggtattaactcattaagtggatatatggtcactaaacccactggggggaccgtaactacgaatccttactacggtattacccaagatgagacaaatacggcaattactggtcgagcaaccgttctaggtaatttatatactgtcccatttacatctactggttataacttgaatttaggggcaggtagtggaacattgtctatgggacaacaagttattacgggtaaacgtattaataccgctaacttgaatgcaaccgcaagggttggggggctggctattacggggactctagatgctacagcctctgtactagggcttcctattcctatttcaggtaatgtaactggaacagtgaataatcttgatgtaaatgtagctattaagcaaagcttaggttacttccatgctgcgcaactaaatggatctgctggttacctatctgtgcaaggggtaaatattctatggcccgaagctgcatctactgcacagacaggatggtggttagagcttacaaatccgatcgatattggtcaaattactcctgctggtagcgttgatattgcgctctctaccattgttgatgctttaggacaggtaagcgcgtatttagacaaaaatcctgtagattgtggtttgttagcaagtagttgtttaattgcagggaatcttcctgtaggaacggttgacttaactggaaaaacgcctgcttctatgagtttaaccaatgttgttttacaaaaacagagtttttcttctaactgttatggctctttgaaattctgttag

SEQ ID NO: 66494 - DNA, 402 bp, Acinetobacter baumannii
atgaaaaaaattattttattgagtttggttctaggtttgggaggctgtgcagccacaacagatatgatgaataatcaatacatgtctgtaataccaacatcaacggatctcaatggcttttggacgggcaataatggcccatacgctgtgacttactcattcaataaagatggcactggtctaatgtgttccagttggaatggtaaagattctattgaaaagctaaaagtaaatggtaatgaaattattgttcaatcagggttaaagcaaacgattaaaagtaaaactgactctaaacttgagttaaaagttaactactatggtggaggtagttaccagtacagcccagatccaaacttacaaaatgcatcgccatattgtgagaaagcactgagaaattaa

SEQ ID NO: 66495 - DNA, 348 bp, Acinetobacter baumannii
atgaaaaagattattttaataggtctaatcttctttcctttactagcattagctaaaccagttcaacctgtgagtgatagtgagcatgagcgaaattgtagaaatacaatggaaattgcaaatgtaattatgcaacaaaagcaaaatgggatgccgttaatgaaagcattggaggctaatgattatgcatttaaaaagaatcctgataaaaatatgcaaaaaattatcaacttaattacccgtgatgcttatgagcaaccaagttactcaacaccctcaataaaagaagaacagttaaatgaattctcagcaaaatattacttgggttgcatggcaatgtatgaataa

SEQ ID NO: 66496 - DNA, 150 bp, Acinetobacter baumannii
atgctcataaatgggaaacaacaatatctagaagccaaagatttaaattatcaactcttgaagatcccttatttgatgttaaataccatgctagagaacaaggtgcttcaacggaaatatcagaactacctcctattaagtattctttag

SEQ ID NO: 66497 - DNA, 471 bp, Acinetobacter baumannii
gtgtataagagacaggaatgtaagatcagtggctttgataatagaaccatatgtagtgttaaggaatatggtgtttacgtctatgataaaccaacagttttaagctcggtttcatttggtggggtttggacaagcgcagatccaggtaatattggattaacgtttagtcttggcgacatatcttctttaatagaaagtatttcctttaatgtagatgatgaaattcagaattttaaagtttcaattgattccacaaaatcagtgcatatgggaggatcattatggaaatctactggagtagttgtattaccgaagatttacatagagaaaatgctaaaaagtaaaaatgtaaaattcagaattgttacggtatctaaaggttatcgagaaggttcattttattctgaaaaagggcaggctagtgagccagtaaaaactttaaatgctttgatgaataagattaaagaataa

SEQ ID NO: 66498 - DNA, 1083 bp, Acinetobacter baumannii
atgactgatattaccctagctccagtacaacctgatcaaccaacacatttaatggctacttatggtcgccaagcgatcagttttgttcgaggccgaggggcgtatctttatacacaagatggtacagaatatttagatgcactcactggtattgctgtatgtggtttagggcacgctcatccagctattgcagaagccattgcagagcaagctgctacacttgtgcatacgagtaatttgtttgaaattccttggcaaactgcggctgctcaaaagcttgctgaagtttcaggtatggaggaaattttcttttcaaacagcggtgccgagtcaaatgaaggagcaattaaaattgctcgtaaatttggtactcaacaaggtataagcttgccaaagattattgttgctgagcagtcatttcatggtcgtactttggcgacactttcagcaactggtaacaagaaagtacaagacggttttgcacctttagtggaagactttattcgagtgccatttggtgatattgaagccatccaagaggctgccttacagcatccagatatcgttgctattttaattgaaccaattcaaggtgaaggtggtattaatactgcaccacaaggatttagctatttagaagaagttcgccaaatttgtaaccagcataactggttaatgatgctagatgaaatccaaactggtaatggccgtactggtaaatactttgcgtatcaacatacgaatattattccggatgttttgaccacagcaaaaggtttgggtaatggttttccggtgggtgctgtaatgactcaaggtaaagcagtaggcttgttagggcctggcagtcatggttctacttatggtggtacagtattgggttctcgtgtggtttacacggtaattgatacgatccagaaggaaaatgcagtagagaatgcagcagtagtgggtaattatattgttgaccaattacgtgctcaattgtcggataagaatgtgcaagtacgtggtttcggtatgatgattggtatccaattacctaaagattgtgctgagctcctgtctcttatacacatctga

SEQ ID NO: 66499 - DNA, 171 bp, Acinetobacter baumannii
atgacttggactgcacttgaagtttatgacagcgttcaggtagttcctgatgacgatcttaagccccattcattaatacattgcgaatgccatcccaaatatgaggatggcatttttattcataactcatttgatggtagagaagcgactgaaacgcctttaccgagttaa

SEQ ID NO: 66500 - DNA, 390 bp, Acinetobacter baumannii
atgaaaactactatttgtttattaggctctattttccttacttcagcagctttcgcacatgaatatcctgatgtaaaaggtcaatgctttgttgtagatgggaaaaacattcctaagccttgtatagtttcttctggcggtggtgccggaggcatgtatacagctttaaaaattggaaaacaaaatttcttagtcgaagaatcaactatgaatccagattctgaagagcgatcgatagtcatgggtaaagacgtggatcacttaatggatgcagtagattattcgcgtgattttaaaaccaagaaagtgattaaaatttataaagatgattcatggtcatgttataagcaaatcaaaggcaaactggatgcttgctatagaacgcattga

SEQ ID NO: 66501 - DNA, 432 bp, Acinetobacter baumannii
atgactatcgttgcacaagtaattaagaacaaatctgaacaagccatttttacaatttcacccgaagcaactgtcctcgaagcaattacgattatggccgaaaaaggtattggtgctttagtcgtagcagaaggtgaacaagttgttggaatcctatctgaacgcgattacacacgaaaagtaacgcttatggagcgctcatcttatagcactactgttgctgaaattatgacagcaaaagtgattacggtaggtttaaataatacggttgaagaatgtttacagctcatgaccgatcgtcatttacgtcacttacctgtattagataatggaaaattggttggtttcatttcaattggtgacttggttaaagccgctatggaagaccagaaggttttgattgaacaattaaagcaatatatttcaggctaa

SEQ ID NO: 66502 - DNA, 828 bp, Acinetobacter baumannii
atgaagcaaaagcagcatgaagttttaatgaaagcccaaaaacgtgaacgtgctggcaacaaacttcgtgactcaaactcgcaagctaaaattttgctcgattttaaaaaagaacaggctgggcaaagcctaggagcaattcattctcaacatcagcgtcaaatcgatcaaagccagcaagacttgaagagtaaaaaagtacttctagaaactgttaagccccaacaatttatattcccctcttttaacaaaagaacaggagaaattcttagaattgagaacttaaaactcaactatgggacacaacaaccaattcatctcgccttaagagcttgtcaaaagattcatttggttggccgaaatggtattgggaaatcaactttgctgaaacagattgatcaatcagctgtaactgctacagatgaaattaaactgtttgcaaattgcttctatctcgatcagaactttagctttttattagaccatctctctgctgttgaaaacttaagaaatattaacccaaatattactgagttagagtggagaaatttattaggtcagcttcggattcgtggtgataaaagcacatatcccttagctcaactcagtggtggtgagaagttaaaagttgctttactaggtttgagccatgctcagcctatgcctgaacttttactacttgatgaaccagaaaaccacttagatatcgagtcaagagagttatttgcaaatgctatttctagttatgaaggtgctgtgctattagtttcacatgatttaagttttgttgaaaaatgtgggattgttgattcaatttatttaaattaa

SEQ ID NO: 66503 - DNA, 534 bp, Acinetobacter baumannii
atgcatgagagtgcaaatagtcctgttgggattattgcttttgctcaagaagacatggttgcgactttgatgaatggaattaatccgaactatgatagattcgtcaatgaaatagtacaaaattcttttgacgaaataaaaaaattagtaaaagatagaataatagaaaaccccgaatgttcagttacagtttcgtctggtgatttcgatcaagtcattgaccagataacgcagggaataagagaaaatgtgaacaatcatcgttggacggagcatgttgatccagtagtgagcatggtcggagctcttccaaaagatgaacttgcagctatggccgaatcattagtgaaccttactgcttttaagcggagaataacagagtcattagaaaccgttggtggacctattgatgtagctgttatttcgaaaggtgatggttttgtgtgggtaaaacggaaacattactttccagcagaacttaaccagcattttatagcaaactatttaaaggataataatgatgcaaaagattaa

SEQ ID NO: 66504 - DNA, 387 bp, Acinetobacter baumannii
atgcatgagcataaagtttatgtctatgtggtagacaaagaataccaaccaacacaagatcaaaaagatcaaaaagatcaaaaagatcaagctatatctttttttgaaataattgtaccggaagcagaacactatccatgtggttgggataatgccaaaattactctcgacagtaaatttatagaaagtccttttgcattaactgctggattaccaagtggttcaaataaatattggcttattgatgaggatgaaaaagcagccaactcagatgaagatgattatgatgagttagctttggatactcaacttcgatcagaaataataaaagaactagaaaacatattaggaatagaacttgccttagtttgggaacctgattactaa

SEQ ID NO: 66505 - DNA, 411 bp, Acinetobacter baumannii
gtgaaaacaatagataaagctaagctggcgataaaggctttaaaagaaaaatcatcggtacaggaagttaaaaagcaattttgtaatgatgataaagctgactgggatagagtcagcaaaaaagcttatgatttatatcttcaagaagagcgtcaacaacgtaaattagatgaagaaactccccacgtacttgttacttcattagaggatatcaatgggatcgttcagcttaatcacaaacttctagaatatgctttaagcctaccctcgacagcgacgtattcagatatagtgaatattcaacagttagtttctaatataccagcaaatgaacataaaatcatagatgcctttgcaagcattgtcatgaatcctagaatgcgagtgctacagaaaaagggtcgattttag

SEQ ID NO: 66506 - DNA, 672 bp, Acinetobacter baumannii
atgcttaaaacaattaagctttacggcatcttggggcaaaaattcggtcgtgaatttaagctcgatgtcgcaaatacacgtgaagccatgcgtgcattatctgttcagatcgctggctttgaacactttatgttgcatgcacatgagcagggcctacgctttgccgtgtttctaaaaggaaagaactcgagtaataagcgaggcaagaaacgacctgcgatttatgaccacgaaactaagcggctcattaccggtgataacattggtgaagaacagcttgatatgaatactgaagctgaggttattcatattgttccgcgagttatgggggcaggtggtaatggtggtctacagactattctcggtgctgtcatggttgtagttggggtaattgtgggggttgcagtaggctggactggagcaggcgctgtcgctgcacaaggcttgattggagcaggtgttgggatgatggtcggaggtattgcacaaatgctaatgccaaaggttgatacgactcaagaccagaaccaagatggcaatagagcaaataagggctttggcggtgcagtaactacagttgcccaaggcaatcctgttccaattctttatggtcaacgggaaattggtggcttcattatcagtgctggtcaatatccagaagatcagatgtaa

SEQ ID NO: 66507 - DNA, 654 bp, Acinetobacter baumannii
atgcttaaaacaattaagctgtacggcatcttggggcaaaagttcggtcgtgaatttaagctcgatgtcgcaaatactcgcgaagcaatgcgagcattatctgttcagatcgctggctttgagcattttatgttgcatgcacatgagcagggcctacgctttgccgtgtttttaaaatcaaagaactcaagtaataagcgaggcaagaaacgcccagcgatttatgaccacgaaactaagcgactcattaccggcgataacatcggtgaagaacagcttgatatgaatactgaagctgaggttattcatattgttccacgtgtaatgggggctggtggcaataatgggattttgcaacttgtacttggtgcgattctgatagctgcttcatttataccaggtattggtcaggctgctcaggttgcattgataggtgcaggtgctggcatggctatgggaggggttgcatcaatgctcatgccaaaaattgataatactcaagaccaaaaccaagatggcaaccgtgccaacaaaggctttggcggtgcagtaactacagttgcacaaggtaatcctgttccaattctttatggtcaacgggaaatcggcggcttcattatcagtgctggtcaatatcctgaagatcagatgtaa

SEQ ID NO: 66508 - DNA, 339 bp, Acinetobacter baumannii
atgaataatgaagaaatagacgagatgcttttagatgaaagttttaaagcaacttttttagcttctgctactcaattaaatagagacattcaaaaattgagttgggaacatagcaatcctattgaagcagccaatatttatgcccaagaattaaaagacaagttgtttgtaaatacaactcaagatgaacaacatcaattgattaataaaatatcaatgtcttatttaatatttgctcgagccctagaaacgaatgcatatgatattgagcgcctaattgaaaatgctcaatatgtaaaagattttatgaaacgatttctaattaacttttcttcatga

SEQ ID NO: 66509 - DNA, 180 bp, Acinetobacter baumannii
atgtcagagctttacttgtatgaaacttattgtaatgaccctagattttatttgagtagtgaagaaatctcactagaattgaatgaatatctcaaactaatggcacagttacatagccctgaaagagttcttttaggtgtgccaatggacattaaacaaccttcatcaggtgtcctatga

SEQ ID NO: 66510 - DNA, 186 bp, Acinetobacter baumannii
atggtcgggaagtatcggggcgaagaatgtggttacacaggtgtagcaatgttcaccgataaagatgagccaacggataatcctgcacttgatcgatgcggtggacgtttacgttcttgtcgcttgcgatttggtgaaaataaaccgctgccgtttggtgggttcccggcttcaagcttattgtga

SEQ ID NO: 66511 - DNA, 354 bp, Acinetobacter baumannii
gtgtcagcagcttgtaatatccttgaatcgatttttaaagtatatattacagatgaggatttacctgaaccaagtaaacaagaccttcagaatgtatggaaaattgtaagagcagatttaggttttgatccaaatcttgtgcaggatgatgatcttaaaagaattttatcaggtattttgtccatagttgatggaattggggcatttagaactcatgctagttctgctcatggacaaggtagaaaattgtataatattaaacctagacatgcccggttagctattcattcagctcatacgctcgcactttttattttagaaacatgggatgagaaacgtgcaaagaaatgttaa

SEQ ID NO: 66512 - DNA, 477 bp, Acinetobacter baumannii
gtgctttgcggagatttttttaaaagacaatcaaaaaatgccgattatcctgaagagtcatcattttcttcattgcatacgtattataatgaattgggcgcagttgggtttagtgattatacaattacaggtgaagagttttctgagagtggaggtcctgcatatgtagtgacaattcatttgtcctatatcgattcagaaagatttgaggaaatgtttattagacattactcttcttactcagatggaactcctgcacaaccgggtgcaaaatttttagatgctttaaaaaaattaatagctgatatttcatcagaaaaaatttcttttgttaaaactagtgcattgcaagagtttgtgacattaaataatcctcctccacattttccagggttaggacaagtaaaaaaaatatctataaaacatcatattgagactttagtggattacttaagtaataaacctaaagtggagtaa

SEQ ID NO: 66513 - DNA, 444 bp, Acinetobacter baumannii
atgggcttaccgcctactgattttgatgcaacagttgctttattaacatttatatattgcataccttcagtattgattgtgacagcttctttattaacattgatagggctgggaatttggtgtgtatttatctttagatttggctttttgatttttaaagatagatttatggaaggtttttcacttttccatgttatgggcctagttctgactcttggcttattaaatgaagcttgtgataagttttttacatatgggcaacagtcctccgaattagtgaaatttttagcatactcttcagactattatcctattcctaactatatgaaaaaatttcctgaattaagtagtcatgataaggttcatttacatgaaaatggtgtgatttctaaaatgataaagacaggaaatggttatgaaataattgtagaaaaattaccgtga

SEQ ID NO: 66514 - DNA, 264 bp, Acinetobacter baumannii
gtgaaaaataatcgtttttttcctcaaactcctatatatagagatatattctcccgggcagatgaagcaaaggttttttttgaacttacagaaaccttattaactacttatagtagtggggatattttatatagggcaagaatatctgaagaattattagaaaaagagaaaatgggaaagccttgttataagattgcttccgtgggacgagctaaccctactggtattccctatttatatttagcaaataatcaagaaacatga

SEQ ID NO: 66515 - DNA, 369 bp, Acinetobacter baumannii
ttgaaaaatgcgggcgatgttgctggtcgtacaccttttcaaatcaatttaacgaattgtgcttcagttggtaaagtcgcgacttattttgaaccaggcgcaacagttgattttaatactggtcgactattgaaccaagctacctctggtgcagctgccaatgtcaacatccaattattgggtagcaacaatgcagtcattcctgtaattgcgaaaggtgcttctggtgcacaagataactcacaatgggtaaatgtttctgctggggggaatgccgatcttaattattatgctgaatattatgcaactggagcatctacagcaggtactgtaacgtcacaagtgaaatacacgattatttatcaataa

SEQ ID NO: 66516 - DNA, 351 bp, Acinetobacter baumannii; identical to SEQ ID NO: 62870

SEQ ID NO: 66517 - DNA, 273 bp, Acinetobacter baumannii
atgtttgatgatgtcggtttagatattacgagacatgctttatctgaacaccatgaaatggatgagttggtcgagcaacttgaaaaaacggatatgagtagcccaagttggttggcaaccgctaaacagttgagcgaaaaagtccatcaccacttaaaagaagaagagcataaattttttcaacaagccggtaaaattcttaaagatagtgaaaaagaaacgctaggcaataaatatttaaaggaatataaaaagtataaaaaacagcaataa

SEQ ID NO: 66518 - DNA, 288 bp, Acinetobacter baumannii
gtgtttatctcaaacactgttcatgaagaaaatcagccagctcatttaaagcttatcaacaattctattcctattaatgtcaatttgcctaaatggggcgagcctgcacagcgttactgtcctgctgctgtttacgaggttatggaaaatgatgatggttctaaatgctttcagattaacgcagcgaactgtgttcactgtaagacttgtgacattaaagacccatctcagaacatcacatggatagcgccagaaggcggtggtggtcctaactatccaaatatgtag

SEQ ID NO: 66519 - DNA, 216 bp, Acinetobacter baumannii
ttggttgataagaatgatgagttgatgtatgcctatcaacaatggggtggcgagtatgcttatctaaattggtattttgaatgtaataataatgacttaacacaatgttatttggaaagctataattggactaaagaaaagctcaatgaaataaaacggatcattgatcaatttaaagcaatcagtcttatcgtttttgttgttaaatcaagttga

SEQ ID NO: 66520 - DNA, 240 bp, Acinetobacter baumannii; identical to SEQ ID NO: 54344

SEQ ID NO: 66521 - DNA, 429 bp, Acinetobacter baumannii
atggatttaaagacagttatagacactgcaccaacgctaaaaaagccccgtcgaaccttcacggctgaatttaaacatcaacttattcagcaatcccagcagccagatacatcggtggctaaggtcgcaatgcaacatcagatcaatgccaatctgttgcataaatggattcgtcagtccagatcaatggttccatcattaacaatctcatccattccacagaccgacttccttcccgtcattcttcacccgacgccagtcaaacaagaagcacctccgccacctgtgccagagaagaaagctaccgctcatatcaggattccattacatgatgaacaaggttcagtaagggatcagatgatcgaaatcgaatggccggtggagtctgcaactgaattactgcttttacttcagggcttgatcaagtga

SEQ ID NO: 66522 - DNA, 246 bp, Acinetobacter baumannii
atgtcagtaaaacttaaattaacagatatcctttctgagaaattctttcaaaagaatacaccctttgaaagtttagatgacctattttcaaaagcaggtgtttcactctcttcagttgaagattacacgacgctttgtgagaataatgattttaacacttttattcaaaacactactaaatattcaagttttagtgacatgaaaggtaaagcttcagtagaattgctgcttggaaatttacgttaa

SEQ ID NO: 66523 - DNA, 219 bp, Acinetobacter baumannii
atgaatttcaaaagaaagtgcccatacaaggattataaagggcaagaaatatttgaaggtgactctttacaacatccttctggtgaaaagggttctgtattatttgaacacagaacagaaagtgactcagacaattggcttgtccaatacgaagatggcattaaatcccgtttatgtcttcaagttggtgacaaaggtcaagcctacgttactaaatag

SEQ ID NO: 66524 - DNA, 207 bp, Acinetobacter baumannii
atgatcgaatctaatttccaaatcagaatagggattgaaattaaaagcactgacaagaaaacctttttcaaagttagctctcgtatctggttcatttgctcaggtgtaacagaactagaagtttccgttttatcccatttaattggaggggttgaaacagttggtggcggaggtactggttttggtctagggttgtggcaaggttga

SEQ ID NO: 66525 - DNA, 1170 bp, Acinetobacter baumannii
atgacaaatttaatttcagctcaagaagcatttaacgcattgcaaaacggcaaagaagtattatgcagcaagttatttgaaaacgatttcaaaactcttgaaagctacccagccactatttttgttatgccgggttatgaattttgcatcaaacctgaattaatggaattgtcaggtattcagtttacaaaacctttaacaccgcatgacgtagaagataatcaagagatctttatcgttatgcctatgcagattttaagaaccaaatttgatgcagaaaatagcgaaattctctgcagtgtaatgaatggctttgctcaggctgatgctgaaaacgccactctacaacttaaagctataggcgctacatttggtcaagtaattggtgaagttgaaattaaagatggtttcaatgataagcctaaaaaacctcgcggcaagaaagaacctcaggtcaaagcagaacagtcacaagttaaagaaaagcctagtgaagttatttctgcagaaactcagccagcgatagttattaccgaacaaacaaatgtcaccacatctgaggatctgttagttccagaaacttctgatccagatataaagccgaatgttaatgctcaatttgaaattttgctggatgctattcgcatttgccaatctgaaaaagaattggactcaacttgtgcaaatcttgaaaaagaaggcttttcacctgagcaaatcaaatcgattgatgatgctaaacaaaatcgcctgactgagcttgacgcacaagaaattgatgatgtagctaccactttaatgcctgaaaactttgaatctttagttcaaagcattcaaaacgctcatacccctgaagaagtaaatagtgttgtccgttacacatcaaaatggactgaagaacaacgcaagccactattaaatgagatgcataaacgcctttctgagttaaatcaaactaaacagcaagatgatgggctatctcctttaattgttcgccttcaatatgcaccagatttaaacaccctagaggaattagagcgtgaaattccgtcacgccatccagatgttcataagactttgtggaacatggccaaaaagcgccgtggtgaactcaacgcagcttccaccccctctttagatccggattatctgttaggagacaacttctaa

SEQ ID NO: 66526 - DNA, 672 bp, Acinetobacter baumannii
atgagtgcaatcattttagatactgaaactaacactttaaacggctatccaattgagatagcccatgtaccaacttactttgaaaatggtgtgttggttgtaaataaagatgcctgttttgacgagtacttttcttgtccagataaaattgaatatggcgctatggctgttcatcacattattgaaagtgatattgcagacaaaccaagctatgaaactttccgtgctccggaatgtgagttcatcattggccataatattgattatgacattcaagctattcgattagctcataaagattttaatgcgaaggctatttgtacacttgccctttcaagaatggtttggcctgaagaagctcacaacatttcagcattggtttacatgcttactaaaggtagtgaaaaagcccgtcaaagcattcgcaatgcccacaatgctaagcaagacgtatttttaacaggatttgtattaacccatatttgtaagaatctcggccttaaagatatgcaatcgctctacctcgcatctgaacatgcccgagttccgaccgtcatgccttttggaaaatacaaagggacaaaaattaaagatctacctgctgattatgttgcttggctgttaagacaagacgacatagataaatacgtactcaaggcattacaaggataa

SEQ ID NO: 66527 - DNA, 1119 bp, Acinetobacter baumannii
atggctttaaatattattcgtccttctcagcctatcttggtaaatgccattaaagtttacttctatggcgacccaggtatgcataaaactaccttgggtatgactgctgataaacctcttattatcgatgctgacaaaggtgcctaccgtactggggcaaatcgccgtggtgatgtggtagtagctgaaacatggcttgatatagcaaatatcacagagaacgaccttgctccatacaatacagttgttttcgatactatcggccgtgtccttgatttgattaaagctcacctagccagcaatcaaaaaaacactaaaagtgatggttctttaaagctgaacgttcaaggtgttgccaacaacatgtttagtttattcgtcaataaactaattggatttggcaaagatgtcattttcattgctcatgctactgaagataaaaacgatactttgactttggttcgtccagatctaggcggcaaaaaccgtcaagagatttaccgcctagctgatgctatggcctatcttgcagaagaaactgatgcaaaaggtaataccaacaaagtacttaagttcaaaggcggcgaaggttttcatactaaagattctggagctctaggaaacattattgttcctgatcttcgcaaacccgagaacgctaactttatggctaatttaatccagcgtactaaggaccatttaaacaccctgacccctgagcagcaggcaactatgaaattgcagcaagaatgggagcaatggaataaagcatgtgaagaggcgcactacccttctgatttcaatgcattgctagaaacattagatcaaaaccatccacatattaaaaacatgtgggaatgcatgaagcactacgcaactaaccttggatttacatacaacaaagaaaaaaggaagtggctggagctggaagtattaccttcaaccatttcggaagaacagcgtgacgaacttcagaactttattgctgaacgtggcctcgatgtaaaaacagtgtgtgaacacctcggcattgatgcccttactcaaattgaagcggcacagctagaaaaagttaaacaagaaattgaacaacttgcaaaacaggaaatctctgcatga

SEQ ID NO: 66528 - DNA, 324 bp, Acinetobacter baumannii
atgcaaaaagttaagcatcatccagacggctacaagtcttatttaggccgtgacaatacaggtatttattcagtccgtattggctggcaagtatttgcgtcaaatgcaaacggcacagtgctctacaaaatcattaaaggagttaagacgcctttagatgtagcaaatttccaaaaggaatatccgaacgtttgggaagtactcacccaagaaatccgcttccagcgttctaagcaattagctaaagatctaggcgactcacacatcccttcacctgaccgtaaagcttacaagcaaaaacgcggtttcactggtagtcgatag

SEQ ID NO: 66529 - DNA, 222 bp, Acinetobacter baumannii
atgaaaaatcaggatctttctattgtcgagctaattagtaaacgcaataaaattgtctatacggtttgcggattattggtcttactgacaatcttatcttttgccaggtactttctgaattttagtatcctttaccttttaattctgcagattccattttttgttttgatgtattggatgataaaagtcactgaatatattaaagaaaaaaggattaattaa

SEQ ID NO: 66530 - DNA, 495 bp, Acinetobacter baumannii
atgcgaacaaaaaacagaattttcaggcagacacagctgcaatgggaacaacttgagaaatatctaaaagaaacacaagaagggtttacggatttcattcagtcgttaatccaacgcgagctatcccaagcagcaatggcatttagatacgatgagcaagatccaccgcctagattcaaaatcaaaacggtttttgaagtcataaagcgctatcaaaaaacagacccagcattactgctcgagctggccaagatcgggaataatctcaaccaaatcgcccgagccttaaacatcctaaaaaacgctaccgcagaagaacagcgcaagctggatatttttaggtgtttccacgcgctcaaagcaattcaagaccaaattgaacagctctcccccgacttgcctaaaatcagtagacagaccccagatcgtattaaaaaacaattactttctcttccttctgtcgatttgatcgaggaggatgaagatgcatattaa

SEQ ID NO: 66531 - DNA, 1197 bp, Acinetobacter baumannii
atggaatctattcaactcaatctcttaaaaattatgaataatttcaaaaaatctgctttatcaatactagttacattcttagtaggttgtggaggtgggggcggaagctcagatcctgtaaccccaactattccaacagatcctgtaaccccaactattccagatgaaaagattttaaaaattgaagatgtatttgatatttcaggattaaaaaatgtcggtgtaaaatttaatattattccgaaagctgaaagttatggggctaaattaatactagtaaatgtacctcaagaatcagaactaaaaaataagtcttattcaatttactcccaaactgaaattgtatttgataaagctggtgaatatgtatttgaatacattacatctaatgataaagggaaaataaaacttactattgaagatagccatttaataaaaggtactattctaaaagagaacacagtctatgatgacacttcaaaaccgtatgttttgcttggtaccgtgggtgtaccaagaggtatgagtttaaccatattgcctaaagtaacagttattgggaacttaaattacattcaagttgaaggtacattggatgctaaagggcaagataatgcgatggttaattttcatgaaacccgtattaccccagttaatgatggtggtttaatcaagctacattatgtcaattacaatatgggtagtatctatgaagcaactggaaatggcggaagtgcaactttggatttagagaattcaattctcaatagtttagatcgttacatgcatatttggtatcctgttggtgatactagaattatcaaaaatcattttaaaaactctcaaggtgttgattttggatttagtcaaggtcaagccaactccattcaaattttaaataacaaatttgaaaactggacttctgattttgcaatcaaaaactgggctaattatggtgataagaactttgctaagattgaatacaatacattcatgacaagcaatgcaaactatgctgctgtccttccatctggttatacaagtgctcaattaaatatgccaaataactactggggcacaacagatgttaataaaattagtgaaatgatctttgataaaaatgatgatctttcatcaaatgattatgtaaatttccagccaattttgactcaaccgcatccagcgacgcctaagtga

SEQ ID NO: 66532 - DNA, 267 bp, Acinetobacter baumannii
atgtgtataagagacagtaactatttagaaccgattgaaatttcactaactgaatatgatgaaatgtttaatatcattccccctacccgcacgtatggaggttttaactttgaaatgttcatgctgcctgaacagttgggaggtgggctattctcacactttttagtgacctttgagccatacactaaaaaacgccttaaagcgtatagagtgacggcttataggaatgatccattccataaaatttttaattcttgtccaatttaa

SEQ ID NO: 66533 - DNA, 390 bp, Acinetobacter baumannii
ttgaaattaaaatatgcagcgtatatagctcttttaatagtagtgtctgttatggcctttaaacaggtttataacccttactttgatcaagataaagaagtaaagacgtttagctttaatggaaaaaaattaacggctctatacctatatagggaacatgatcaagaaataggttttaaagaaaatcctttattaaagcctttagtttttacgtggaaaaagccgatttatacctgttttaatatggtcaatgtaccttatgacttagagatatttttctttaatgcagataaaaaaattattgggtcggctgtaatggaaaaattttcccaaaagcagtactgccccaaagaaaagattcaatttgcattagaaagaataaaaacttag

SEQ ID NO: 66534 - DNA, 966 bp, Acinetobacter baumannii
gtgaaacgtgaggaaaagctagctcagaaagtattaaaaaaatataaccttgtaccgccctataacattctagagctcgtcgaaaaaaaggcgatgattgctttccatacttttccattcaaagcagacggaatcactgtaaatatcaaatcagataaaccaaaaatttatatcaataatgcttttggtatccctaaaacacgccaaaaatttacaattgcgcatgaattaggtcatatatttttgccatggcataaaggcactattgcaagtgatattaatgaatattctatctctacacatataatgtatagagaaatggagtctgaagccaataggtttgcatctgaactactcatgccttcggattgggttaacaagatattggatcaaaatattcctttcaaggatcgaatagaaaagattcttaaagatgctggcgtttctctagaagcggcattaattaaaatagataacacttgtattcaaagaagaactattgcagtttttattaataatgtatgtatacaagagataactggcttaaaagctaaaacatctcatttttatgaaaaaaagtattctgatgttaaggaaaaaattttttctttaaatggtattggagaatatgaggagttttatatatatggaaagtactttattacatttaccatcaaagaacctgatttagaggattttgatcgtgtagataatcgctcatggcgagaaatactaaaacaaattttagctgaaacaggtactgaaaattatattcttaatattaatgcagcagttcccgttcctgttagtaacgcaaaaaaacaaggaataaccaatgtgaaagaggtttgtgctttagttaaattaaattatagccatagagctaatttaaaagatgtagtaaaccataatctatttccgatatatattcgaaaacgagttgaagagttgatggctaaatggtag

SEQ ID NO: 66535 - DNA, 321 bp, Acinetobacter baumannii
atgaagacttttattcttgactgtattaacggtgatgctttaatagatgaacttgatgactatgtagattattggactgagcatggagaggaactgggttgttcattaagagaatatctaggtatgtctgtgaaagaatatggatattttttggttgatgaggattatctagcagatattatctacgcccaagagcatcaactagatattgatgacgtgataagagatgctaaaaatagtcttcctatggcagcacgtgctgaaaaagcggatgagacaaaaaaaattcaagattggttaaatgacattgaggacaaataa

SEQ ID NO: 66536 - DNA, 240 bp, Acinetobacter baumannii
gtgggtggtataccaaaacctagaccatgttttttagatgagcagattaaatctcatatagataatggtaaacaggtttataaaaacctaaaaggcaatcgttattatacatgggatagcttacatggtgagattgaagtctttgataaacgtgggattcatcttggtgttttagcacctagtggtcctcctccaatcaaagaagctgttcttggacgtaaaattgctaaaccaaactga

SEQ ID NO: 66537 - DNA, 294 bp, Acinetobacter baumannii
atgatcaatcaatatgtagaaggtggcgatgttcatgccagacttttaaaacaaaggtttgatagtgatgtatcaaatcttcctgtaaatattctagctgaatattttgctaaaactgaaaatattaatcatatgtttcaatttgcaaaaacattagagcaaatggctatgcaatctaaaacaccaacattaccagaagcacttgatattaaagggtacttatattgccttttagattattggcaaataaaccgtcaagaattttcagctgctatgagttcttctaaaaattga

SEQ ID NO: 66538 - DNA, 477 bp, Acinetobacter baumannii; identical to SEQ ID NO: 43863

SEQ ID NO: 66539 - DNA, 3231 bp, Acinetobacter baumannii
atgcctaaacgtacggatattaaaagcatcttaattattggtgctggtccaattgtcattggtcaagcttgtgagtttgactattctggtgctcaagcatgtaaagcacttcgtgaagaaggctatcgtgttattttggttaactctaacccagcaaccattatgactgacccttcaatggctgatgcaacttatattgagccaattacttggcaaactgttgctcaaatcattgaaaaagagcgcccagatgcagtactccctactatgggtggacaaactgcacttaactgcgcacttgcacttgatgaaaatggtgtattagaaaaatacggcgtagaacttattggtgcaacgaaagaagcaattgaaaaagctgaagaccgtaaattgtttgatgaagcaatgcgcaaaatcggcttggaatgtccaaaagctgccattgctgaaacaatggaagaagcattggaaattcaatctcgctttggtttcccagtaattatccgtccgtcattcactatgggtggttcaggcggtggtattgcatataaccgcgaagaattccttgagatttgtgaacgtggtttcgacctctctcctactcaccaattattgatcgacgaatctttaattggctggaaagaatacgaaatggaagttgttcgtgacaaaaacgacaactgtattatcgtatgtgcgatcgaaaacttcgacccaatgggcgttcacacaggtgactcaatcactgtagcaccggctcaaaccttaactgacaaagaatatcaattgatgcgtaatgcttcagttgcagttcttcgtgaaattggtgttgagacaggtggttctaacgttcagttcggtattaacccgaaagacggccgtatggttgtgatcgagatgaacccacgtgtatctcgttcttctgcgcttgcgtctaaagcaactggtttcccaattgcaaaaatcgcagccaaacttgctgttggttacacccttgatgaattgaaaaatgacatcactggtggcgtaactcctgcaagctttgaaccatcaattgactacgttgtaacaaagattcctcgttttaacttcgagaaattcccacaagcagaacctgtattaaccactcagatgaaatctgttggtgaagtcatggctattggtcgtaacttccaggaatctgtacaaaaagcattacgtggtcttgaagttggcgtaagcggtttcgatgaaaaaatcgaagctggtgcaacaaatgtaaaagaaactattctaaaagagcttaaagttccgggacctgaacgtatttggtacgtagcagatgcattccgtcatggcttctctttagatgatgtatttgaagcaactaaaattgaccgttggttcttgatccaaattcaagatatcgtcaacacagaagctcaagtaaaaactttaggttttggtgatctcactgctgaaaatatccgttcgttcaaacgtaaaggtttatctgaccttcgtattgcgaaccttatgggtatttctcaaaagcaattccgtaagcaacgttggaacttgggtgtttaccctgtttacaaacgtgttgatacatgtgctgccgagtttgaatctggtacagcatatatgtactcgacttacgatgaagagtgtgaagctaacccatcaaatcgtgacaagatcatggttattggtggtggtccaaaccgtattggtcaaggtatcgaatttgactactgctgtgtacacgctgctttagcaatgcgtgaagacggttatgaaacaatcatggtgaactgtaaccctgaaactgtttctaccgactatgacacatctgatcgtctatacttcgaacctgtaacacttgaagatgtacttgaaatcgtacgtacagagaagcctaaaggcgtaatcgtacaatacggtggtcagactccactgaaattggcacgtgctttagacgaagctggtactccaattatcggtacatctccagatgcaattgaccgtgcagaagaccgtgaacgtttccaacaaatgattcaacgtttacagcttcgtcaaccaaacaacagcattgtaaaatctgctgaagaaggtatctctgaagctgcgaaagttggctatccattagttgttcgcccatcttatgtattaggtggccgtgcaatggaaatcgtctataacgaagatgagcttaaacgttatcttcgtgaagcagtacaggcttctaatgaagcacctgttcttcttgaccacttccttgatgatgcaactgaagttgatgttgattgcgtatctgacggtaaagatgtcgtgattggcggtattatgcaacacatcgaacaagcaggtattcactcaggtgactctgcatgttccatccctccttactctctttctaaagagattcaggatgagatgcgtcgtcaaacaattgctatggcaaaagaacttggtgtagttggtttaatgaacgttcagttcgcagtgaaaggcaacgatatttacgttcttgaagtaaacccacgtgcatcacgtactgttccattcgtatcgaaatgtattggtgaatctttagcaaaagtagctgctcgttgtatggcgggtcaatcacttgagtctcaaggttttactaaagaaattattccaaatcgtttcgcagtaaaagaagcagtattcccatttgcaaaattccctggcgtagacccaatgcttggtcctgagatgaaatctacaggtgaagtaatgggtgttggtcaaacctttggtgaagcattctataaggctgttttaggctcaaatgaccgcttaccaggcttgccaactgaaggtgaagtaaagcatgcgttcttatctgttcgtgaatcagacaagaaatacatcgctgatattgctaagaaattagttgaatatggcttcaaacttgtagcaacaggtggaacatatcaggtacttaaagaagcaggtttagaatgtgaatctgtaaataaagtaactgaaggccgtccacatattgttgaccgcttgaaaaatggtgaaatacaccttattgtcaatactactgaaggcaaacaagctcaatatgactctgcaatgattcgtcgtgctgccctacaaggcaaagtgtattacacaacgactatcaatggtgcagaagcggtttgccaagcctttgctgtgaaattgccaatggatgtataccgcttgcaagatttaactgtaggttaa

SEQ ID NO: 66540 - DNA, 1140 bp, Acinetobacter baumannii
ttgagcacccccgccattttagccctcgcagatggaacgatctttaaaggaacgtcaatcggcgcaacgggaagtacgactggagaagtcgtttttaacacagccatgacaggctatcaagaaattttgactgacccaagttatgcacaacaaattgtgacattaacttaccctcatattggtaacactggttgcaacgaagaagacgttgaatctggtcgtatccataaagtatgggcgaatggtttaattattcgtgaccttccactattacacagcaacttccgttctgagcaatcattaagtgaatatttgcaagcgcacaatgttgtcgcaattgctgatattgacacacgtaaacttactcgtattttacgtgataaaggtgcacaaaatggttgcatccttgctggcgaaaatattactgaagaagaagctattgctaaagctcgcgcttttggtggtttaaatggtttagaccttgcaaaagagtgctgtgacccgacaggctttgaatggtctgaaggttcgtgggtattaggtaaaggctttactcaacctgagttaaaataccatgtggttgcatacgattatggtgtcaaaaccaacatcttgcgtatgcttgcagaccgcggttgtaaactcactgttgtccctgctgaaactccggctgaaaaagtattagcacttaatccggatggcgtattcctttcaaacggccctggcgacccagctgcttgtgattacgctatcgaagctgtaaaaactattgttgaaaccacaacattacctgtatttggtatctgtttaggacaccaaatcttggcactcgcttctggtgcaaaaactgtaaaaatgaatcatggtcaccacggtgcgaaccaccctgtacaaaatcttgaagatggtacagtgatgattacatctcaaaaccatggttttgctgtagatgcagaaacattaccggctaacttaaaagcaacgcataaatcattgttcgatggcactctacaagggattcatcgtacagacaaaccagctttcagcttccaaggtcaccctgaagcaagcccaggtccacatgattgtgcacctttgttcgatcatttcatcgaacttattgaagcatctaaacagtaa

SEQ ID NO: 66541 - DNA, 375 bp, Acinetobacter baumannii
gtgcgtcttgcacgaagcgttgcacttaatttagtggaacaggaatatatcgaagctgcccgaattcttggttattcaaaaacttatattttattccgtgaaattttacccaatatgttgacgccattactcattcatcttggtgtgatgctgacatgggcagtgggtatgttatctggtttggcttttctaggttatggcgtggcacctccagcagcagattgggggctcatgattaatgaaaatcgcgctggtttattagttcaaccatgggccgtgtttgctcctgtcatcttaattgccttgtttgcgctcggaacgaatgtattggctgagggcgttggacgtgcagcagctcggattgaggaaaaataa

SEQ ID NO: 66542 - DNA, 663 bp, Acinetobacter baumannii
atgaacaaattaatatacttcatcattcttaatattcttttaattggttctgtttatgctgaaaaaaataaatttttaaatatggctcaaagtaaagtaaagcaggaaatgaaagatcctgactctacaaagtttcaaaatttaagggaaatcaaaaattctgttggtgagagtgtggtttgtggtgaagtaaatgctaaaaattcctatggaggatatgttggatatcatttattttcgtatagtccggatggggttgtaattttaaattcaccaaaagatagcgattattatagaaataagtttatttatgacaaatctggctgtgcaggtgaaaaagaagaatttttagctcgaaataaagatatgttcaaaaattactgtttggttgcatatgacctttttacagacgtaatagtaaataataaaacgaatttagatgctattacttatgccatgagtaattatcaaaaatataatttgagtgtttttaataatgatctagataaagcaaaaacagatttattagcaaatttggaacaagtattacaatctaaagagactgtaaaaaaaattaaaaaagataaaaacggaatgtttaaagctcaatatatgtttatttgtcctataagcatggaaaaaaaatatatttttgaaaagtaa

SEQ ID NO: 66543 - DNA, 1674 bp, Acinetobacter baumannii
atggcgagtccggcacaaatcattcgacataaatttctcaatacattcttttcacgccactctatttggttcttgtgtatttttactgcactcacaatcacgtggtttagaaccgtatatacacctcatagtatttattattttatttcggatactttactcaacggtttatgggtcgtcagtggcgcattaagcttattaggtctatatgatgtcttacaaaatagacattcaatcttaagaaattacccgattatgggccatttccgttttttatttgaagatatacgccctgaaattcgccaatactttattgaagcggatcaagatgcccttcctttctcgcgtatgcaaagaagtttggtttatcaacgtgctaaaaatgagaatgcagataaaccttttggatcaattattgatgtctatcaagaagattatcgctttattgttcattccattagtccatgtccaccagcggatcctaagagtttccgtattcaaattggtaatgcccaatgccttcaaccttatagtgcatccattatgaatatctctgccatgagctttggtagtttaagtgcgaatgcaatacgtgcattaaacaaaggagcacaattaggcggtttttatcacgatacaggtgaaggtagtctcagcccttatcatttagaaaatgggggtgatattgtttggcaaattgccagtggatattttggctgccgaactttagacggaaaatttgatgaacagaagtttgctaagcagtctcaattgccacaaatcaaaatgattgagcttaagctttcgcaaggggctaaaccgggccatggcggtattttacctaaacataagattactgctgaaattgccgagatccgtggtgtttcccgtgaccatgattgtatctctcctgcgaagcattcaagcttttcgacaccaattgaaatgatgcatttcttacagaagttacgaactttatctggtggtaaaccggtaggtttcaaactgtgtattggtcaaccttggcagtttatgagtattgtaaaagcaatgcttgaaacaaaaattgtgcctgattttattgtagttgatggttctgaaggtggcactggcgcagcccctattgagtttagtgactatatcggaacaccattacgtgaaggcctacgttttgttcataacacacttgtaggtgctggcctaagagatcaagttaaaattggtgcaagcggtaaaattattagtgcatttgatattgccagcacatttgcactcggtgcagattgggtgaactcagcacgtggctttatgtttgcagttggatgtattcaagcgcaaagttgccatacaaaccaatgtcctgtaggcgttgcaacccaagataaagatcgccagaaagcactccatgtaccgaccaaagcagaacgcgtatttaatttccacaaaaatacattacatgcattatcagaaatgattgctgcggcaggtttacgtcatccatcggatattaaagctcatcatttagctcaacggattaatgaccgtgaaattaaaaactatgctcaattacacttcttcttagaagaaggtgagcttttacaatctgaactgaaaaatgatgatgataatttctattatcgtatgtggaatatggctgacgccaatcatttttaa

SEQ ID NO: 66544 - DNA, 612 bp, Acinetobacter baumannii; identical to SEQ ID NO: 63125

SEQ ID NO: 66545 - DNA, 342 bp, Acinetobacter baumannii; identical to SEQ ID NO: 47765

SEQ ID NO: 66546 - DNA, 726 bp, Acinetobacter baumannii
atgaaaaaaataactgctttactctttgctctttgtgcaactgtgactcatgcagagttacaaaccttggataatgatgcattacaggcaattaatggccaagctggtgctgatttatcactcatgcttaatttaaaccagaccagtaacggtatatttgataatggcagtggtggcgtttgtgaaaaggtagagttctgtcatattggtttagcaattaataaacgctttgtgcaagcagatgcgactaagccaagtggttgggctgaaaatagcgacagcggtaataaactttggttagtatttaaaggtgtgcaaggcactttaaatattcaaaaaatgggtttggatggtgctgatttaaagtatcttgataaaagtaatacggaaattataaaaccggctattcaacttagttttagtgcagcacagccaattttaattcgtaactttggttttaatgccttatcaattgagcaagataactttaccagttcaacaacagcgcaaggctcgagtgcaaatatgtatgattatgcatatttcaaaaagccaacttatgaggccactgctaatagtgcaaaccagcaagttgctactgcgaccccatcggcgtatgaccatggacgtgaaactggttttatgggcttgatgatgaatgggaatttggctatccaaggaaaagtcatggtctttagctgtgatggtagccatccacgttgttaa

SEQ ID NO: 66547 - DNA, 498 bp, Acinetobacter baumannii; identical to SEQ ID NO: 58604

SEQ ID NO: 66548 - DNA, 273 bp, Acinetobacter baumannii; identical to SEQ ID NO: 47774

SEQ ID NO: 66549 - DNA, 903 bp, Acinetobacter baumannii
ttgttaaaaaccatttacttgtcactcgatccttatatgcgtggtcgcatgagcgatgctccttcatatgcagcaccggttgaaattggcgaagtgatggtcggtggaacagtcagtcaagtagtggcctctaaaaacccaaaattcaaagaaggcgagtgggttttttcaggaaatggctggcagggctacgcaatttctaatgggactgcatgtcaaagcttaggtatgcaacctgaacatccatcttgggcattgggtattttgggaatgccaggatttactgcttatatggggttgttggacattggtcagcctaaagccggtgaaactttagtcgttgcagctgcaacgggacctgttggtgctacggttggacagattggcaaacttaaaggttgtcgcgtggttggcgtcgcaggtgggcctgaaaaatgccgttatgcagtagaagaactcggcttcgacgcttgtatcaatcatcatgatgaaaattttgcagaacaattacaacaagcagttccgaacggtattgatatttattatgagaatgtagggggtaaagtgtttgatgcggtatggccattgcttaactctgcggcacgtgtaccggtgtgtggtgtggtttcccagtataacgctaccgagcaagtacaagggctagaccgtttaccgggctttatttccacccttttaaaaaagcgtattcgcatgcaaggctttattatttttgatgattatggcagtcagtatccggaattctatcagcaaatgtttgaatggttgaaagacggaaaaatcaaatataaagagcatatggtgcaaggtttagataacacgatcaatgctttcaatggtatgttgaaaggcgaaaactttggcaaagtggttgtaaaaatttaa

SEQ ID NO: 66550 - DNA, 2154 bp, Acinetobacter baumannii
atgacaacttcagaaaatccaacaaaccaacgaattgtccctgctgtttccatcaaaacagcttgtacaggatcatcaaacaaagccaatgaactaggcatgcgcccaatgcaggaacgtgcctatgataaacgtggtgaacaatacctactaattaaatcaccaccagcatcaggtaaatcacgagcattaatgtttgtcgctttagataaattagagaatcaagggattcagcaagcacttattgtggtgcctgagcgttctattggcagtagctttgcagatgaagaattaacaaagcatggcttttgggcagattggaaagtacaaccgcattggaacctatgtaatgcacccaatgctgatgatgaaaaagttgcaaaatctaaagtaaaagcagtaggtgaatttttagcaagtgaagacaaagtattagtgtgtacgcatgcaaccttccgctttgctgttgaagagcttggtgttgaagcatttgacaatcgactcattgcgattgatgaattccatcatgtgagtagtaatccagataataagctgggtgcacaactcagccagtttatggaacgagacaaagcgcatatcgtagcgatgacaggttcatacttccgtggggattctgaagcagttttatcaccaacggatgaaaataagttcgagactgttacttatacttactacgaacagctgaatggctatacctatttaaaagcattagatattgggtattttttctatacaggaaaatataccgatgctgttatgaaagttttagatcctacgcttaaaactatcattcatattccaaatgtgaattctcgtgaaagtaccaaaattggcaagcacctcgaagttgaacatatcatggatgcaatggggacttggaaaggcgttgatgatgaaacaggtttccatttaatcgaaatcacaactgagatgggcaataagcgtattttaaaagtcgctgatcttgttgatgatagtgatgcagcaaaacgctctaaggtactgacagcactgaaagatccaaaacaacgatttaaccgtgatcatgtcgatatcattattgcattaggtatggcgaaagaaggctttgactggatttggtgtgagcatgctttaacgattggttaccgtagtagcttaactgagatcgttcagatcattggtcgtgcgactcgagatgctgaaggtaaacaccgtgccaaatttaccaatttaattgctgagcctgatgcttctgaaaaacttgttgtcgaagctgtcaatgatatgctgaaagccattgctgcaagtttattaatggagcaagtattagctcctcgttttgaatttacgcctaaagatcagggtgcattaaatggctttgattatggtgaagatggctatcagaaaggtaaaacgaatgttgggattaatggtaagacaggacaagtccatgtcgagattaatggcttaaaaaaaccagaatctgaagaagctaatcgtatttgtaaagaagatttgaacgaaattattacggcttttgttcaaaataaatctgctattgaacgtggcctctttgaccaagaaaatgtcgtacctgaagaattaacgcagttagcactgggtaaaattgttcaggaaaaatatccagaattagagcctgaagatcaagaagctgtacgtcagcatgccattgcagcattcaacttaattcagcaggcgaaaaaagagcttgaacaagcccagcaaacacttggaggcacaaccgctggctctagtggaactggaaatccagatggtaaacctgaatcgaacatagcatttattcagggtgttaaacgttttatgaatgtacgtgatttagatatagatttgattgatcacatcaatccattcgaatcagcgtatgctgtactgtctaaggcaatggatgaagcaacactaagacaagtccaagctcatatttcagctaaacgtatcaatctaagccctgaagaggcaaaggacttagcaattcgtgcagtacaatttaaaaaagaacgtggtcgtttaccagatataaattctcaagatgcttgggaaaaaaggatggcagaaggtgttgcagcttttgcaagattcaaagcacaagaaaaggcaaaagctggatcttaa

SEQ ID NO: 66551 - DNA, 2772 bp, Acinetobacter baumannii
atgaatgccgttgaaattgaagcagccgtatccgagctggcagcaaaaccttttgatgctcaagagtttgcttttgattttttaagagcatttggtaataaagaaacaaccatcaaacaattaaaagcaggcgtaagtaataaatcagatattccaaatggggttttacaacgtagtaatattcacattgcggtatgcgaccaagacaaagtctctgaagttttaagggctttacgagaaagtaaagctacagagaaagcaaaagcaaaagcaaaatttattctcgcaacggacggtttgaatttacaagctgaggatttagtttctggcgacactattagttcaaatttttctgagtttgcagagcattttggtttctttttacctttagcaggtatttccacgattcgggagattaaagataacccgattgatgtacgtgcaactgggcgtctcaacaagctctacattgagcttttaaaagaaaatccagattgggcgactgaggaacgtcgccaagacatgaaccatttcatggcacgtttaatcttttgcttcttcgcagaagatactgaaattttccagccaagtggaatttttactcagacaatagaacaaatgtcggaacgtgactcaagtaacacacatgaagtcattggtacgttattccatgctatgaatgtggatcatcctcaacgtgaagatacaaagcttcctgtatgggcaaaaagattcccttatgtaaatggtggtctattctcaggtggtacagaagtaccaaaattttcaaagattgctcgtacttacctattacatgcaggtgaactgaattggcaaaaaatcaatcctgatatttttggctcaatgattcaagctgttactaatgatgatgagcgtggttcattggggatgcactatactagtgtgccaaacatcttaaaggtactaaatcctctattcttggatgatttaaacgagcaattagaagcatcaaaggaaagtcctttaaagttgcttaatttacgcaaacgtattgcacggattcgtgtatttgaccctgcatgtggatcggggaatttccttgttattgcgtataaggaattacgtaagattgaggctcaaattaataagcttcgtaatgaagaaggacgtgcaacagacattccactgacgaatttccgtggtattgagatcaatagcttccctgctgaaattgcacgtttagcattggtgattgctgagtatcaatcgaatgttcaatactgtggtcagattgaggcactacaaacagtgttgccactgtctaaagagaactggattatttgtggtaatgctttacgtttggattggttaagcatttgtccgccaacaggtaacacggtgaaggttgtagctgatgatttatttgaaactccattagaacagacagaaattaattttgaaaatgaagggggagaaatatatatctgcggcaaccccccatacaaaggcacttcagaacaaaccaaagaaatgaaagatgatatgaagtggttattcaatgggcgaatagataaattcaaatcattggattatgtatgcggatggttcttgaaagcatatgattacggtttagttacacctacaaaaagtgcatttgttacaaccaattcaatttgccaagggcaacacgtcccaattctttggccgcacattttaaaaaatggtttcaaaatattttttgcacattcttcatttaaatggaaaaaccttgcttcaaaaaacgcgggagtgacagttgttattgcaggtattacaaattcaaatattaattcttgcagacttttttcaaccagtgacgatggattaaatattgaaaaatcttgcagctacattaatccctacctcactcctgatttgaaaattgaaatgcaaacaagaacaatacctctatccgaattgcaacaaatggattacggaagtaaggctgcggatggcaaatttttaaatttcgacaacgaaacagctaaaaagctaattggcttaaatccaaatgctgcaaaatttgtctatccttattgtagtgctgacgatgttatttctgggaaaattagaaaatgcctttggattgaagacaatgcagttgaagaggcgttatcaattcctgaaattgccaaacgaattaatagcgtcagagattttagaagtaaaagctccaaggaagcaacagcaaaacttgcaacaagaccccatgcttttgcggagccaaggtttataaagaacaagtccattttagttattccaagcgttacttctgaaaatagagattaccttccggtcgagctactaccaaaaaactttgtaattaccaacgctgctttcgccttatacaacgcgcccctttggtatatggcacttattgcttcaaagcttcatctagtatggattgcggcagtatgtagaaaacttgaaacgcggtatcgttactccaacacactaggctggaacaccttccccgtcccaaaactcaccgaaaaaaacaaagcggatttaactcgttgcgctgaaaatattttattagctcgggaagcacatttccctgcaacaattgcagatctttataatcctgaaaaaatgccagaaaacttacgccaagcacatgaagaaaatgatgaggtgctagaacgcatctatattggtcgtcgctttaaaaatgacacagagcgactagaaaaactattttcaatgtatacagaaatgacttcaaaacaagctggaaagaaaaaagcatga

SEQ ID NO: 66552 - DNA, 1524 bp, Acinetobacter baumannii
atgttgaactttcctacaccatatcccaatgagttaatttacagcacgatagcacgagctggaattcaccatgctattacaagtccaaaacaattacttgaagaagtgtttgctaatcgtaaggttattgccacgattgatttacctagccatctaagatgtcttttaaagcatttaccaccacactacacgcttgaaaatcttgcttataaacatacgctttttcccatccacgctttattttctccagaaaacacacgtttaagatgccttcaatggatgaggaatcaatcaaaaggttctattcatttaacattaggagtggcggcatccaaagttaagcagatatcaacacatcgatattgtcgacattgcttagaaaagcaatatgatcaatatggagaatttttttggtcaagactttggtacattcaaggcgcaaattgctgtagcaaacataaagttaaattgtcagaatttttacaaccagtccatttgaatggacgacatcaatttattcctgcaagttctactctgaatcacaagcaatctcataaccctgctcacgaattagatctaatcgtgagtaggcatgttgatgaactgttaaaccttcctccatcaacatcccctacgtttcatcaatggagccaattttatcaacgtatagcaaagcgattaggtttcaacaaaggttctaaccacattgatcattcaaaaatttattcagcagttataaaaacatgggatctaaaatggttacaggagcatcacctagatgaactgaagtctgaaacaagttggcttaaagctatctttagaaagcatcgtaagtcattcagttatcttgaacatattatcgtcttagagacgttttttgctaaagactggacatgggaagccatcctgagtgaaatccatcagttaccttctaatccctttaagcttgatacatcgattcaaagaaataagtataaagacatattgatgctcaaagaaaaacgtaatgaatggatgtctttgattcaaaattatggaataaagctatctagagtcaaaaatgccgccttatacgcatggctttatcgcaatgataaaatgtggttgttaaataaaaatagtaaatttcacgctttaccgacactaggccgtaagaaggtcaattggcctctgagggattggcaaatggtgaggcgattattcaaaatattttatcaatcgttgaatgatttgaatttgcctaggcaatctagaaactggtatctcaagcaactaccgcaacactccaccatagagaaaaacctatatcagctgcccttaacacataaatttctgagcacgttttcagaagatattagcagttatcaaatccgaagaatcactcgaacaattattcaatttaaaaaaatgaatcaacacccagcgaattggcaattattacgacattcaggattaagtgaagaacgattaacagatgaagccctcaaatttctaaatcaaatgaaaaggatgaatcatggctaa

SEQ ID NO: 66553 - DNA, 2439 bp, Acinetobacter baumannii
atgctaaagaaatgtgttttttcattggtctatctcttgccaattcatttatacgctgctcaggttgatgtattgcgtgagcaagctattcaaaattatagagcaggacaaactcaacaagctgtatctcaactagatcaattgctaaataaatacccgcatgatcaaaagctgcttgctgattatctgtttattatgtcaagtgaaaaaagggatcttacgaatttttcacggtttttagtaaatattaattatgtagactttccagaatatgcaaagttacctttaattcaaaatttccgtgattttaaacattttaaaactgcaattgactggtcaaaaaaattcaatattcaaaagtcagttgatgggcgtattttattatcggttttgtatgctgaagctcaagatgtggcgaatgctaaagatcagttgtcgaagatcgatattaaaggtttaactgctgatcagttggtacgggttgcatatgcttatcgtttaataaatttaccagtagatgctttagctacagttgagcatgcttatcaacaacaatcaaaatcttcatccgttttacaagaatatgtttacgatctaattgctattggctcatataaaaaggcgcagcaattgctgcaagcgagcgaaaaaactgaacaaacagtgcaaatgctgcagactttacaagttagtgagttttctcaacatatcaacaatgcaattgctcgatataaatatttaaatcgcgaaggtctatccgatgccgaaagctttgctgaattagataaagtgctggagcaaggacaaaaaatgcatcagcaaatgaatccttccgatcctaattacttacggttttattacgattatttatatggattagattttagagggcgttcaaaagcggttatagagaattttacccagttgaatattccactcgaaaaattaccggcatatgtacgtcatgcaattgcggatagttatttggcggagcaaaaaccgaaaaaggccgagtttgcttataaaacgcttttaagtgaaaagaattatccggatatgaccgtttatacgggactgtattattcttatattgaacaagaaaaatataaggaagctgaacaacttctcgctgaagttgatcggcttattccgacttataaatatagtcaggctaagggggtagataaaaccagtcatcctgatcgtgatgattatattgctttacaaggaatgcatttagcctacgctaatcatctggatcaagctgaaaagcattttcaaaaaaaagtagagcaggcgcctgcgaatgagagcctgattaataatcttgcgcgtgtagaacattggagagaaaaaccgctagaggcaaaaaaaacaatttcccggttaaatggtatagatccgattgctaaagacacccgcattaatgaaatgcaaaatgctcaagctttaggtgatattccgacatggcgaaaaacgactcaaaacttagtgcaatattaccctgatgatagtggggtcattaaaagtcgaaaagaattagaagatcgtaatagagccactatttcacactcaaccacttgggggcaaagtaaggccgacggtcgcgatactgtaagtgggcagaatggtttaaaagaccgtgaaatggaaacgcgtcttaatagcccttggattaatgataattatcgtttattcgcttggcatcaagatcgttatggtgagtaccgttttggcgatgtgcatgaccaacgttatggggtcggagcagaatggcaggcgaaccgtaaggcgttgtcggcaattgtgtcgcaaagtacggatggtggacaagcaggagtccgtcttgattggtcccaatggctaaacgaccactggcagtatcaattgcaatataacagtcaggctgacattcctctacaagcccttgatgcaggggaagatggtcaatcttaccgagctgctgtcacatggcaaaaagatgaatctcgccagattggcgcgagttacggtttaactgatattagtgatggtaacaaacaacaggaattttcaacattttggcgtgaaaggctattcgacgcacctcatcatattacttatggcactgttcgaggtttctacggtactaacagccaagatcaaacagcttattttagtccaagttcacattacagcgctgagttgaacttaagtcatgactgggtgacttggcgtgaatatgagcgttcatttaagcagcattttgaagcgggtgtaggcctttataaacaggccgattactctgctaaacctacttactctttgcaatatcaacatcaatggcagctatcccggacatggcagctcaattatggaattggttggcaataccatccttacgatggacatgatgaacaacatacctacggtatttttggatttgaagggcgtttttaa

SEQ ID NO: 66554 - DNA, 3831 bp, Acinetobacter baumannii
atggctacacttttttggaaactttcagatcgtgaaactagacttgaacaaaatattacacatattttaaaagctaaaccaagcctcgaacctttatttgaaaatgtagcttcagacataagcacacattttttgaatatttttttcccatctatgccaacagtgtgttatgtcgcaaatttgtctttacaggataaatctgcacaacgcattaatttagctattcgtatccctcaacatcctgcttttagtgcgtatttagatgaacacagttcattagttgtgattggttactgggggactcgttcttccacaccttatttaatcccagaaagcgtaataattagccataatagtgaacaccctactaactatgaacatgaattagagtgtgaatatcagtttttgggggaaggggaatatccctctcgtggtatccaaaatgtattaacaccacaacttgtagaagaattacctaaaatttctgttttagctaatgagcgtttagaagagtggcgtaaatttttgggctttaaaaaagaactgattcggcaaaaatcagtaggtttgcgctatttaacaattaattatgatgaacaaaaacatatttttaaattgcttgcgattgctaacagtcaacaagattttgagcttgtacgtagagccttagcacgaaaagacctacaattatttgatctaaatacctcaactgatccatggaaatttgaattaccgagcttagaagataaacgtcaaaataagcaaaaagtaaaatttgaactcggacaatttaaacgtggtaaaaatgctttcagtttactgaatccagatgaagtaaagaatgtttttcaacatatagatttaaaagatatacctttttcagcacctgtatttgcatggctgaatattgagcccacagaagattggaaaaataaagtcaccaatttggtacctgatcaatctgatgaagaagccattctacaatatagagaagatattaaagaaatgcttgaaacagtaccaagcacaggttttgtatcttttgctttaattggtgattggtcattggtagatcgtcaggataggatcctgcgtaatttaaagcaaaatgaaaattgctatgcaccatatctctcaagttatttatttgatattacgcaagcacaattacctaacttacttcctgaaattaaagaatggtttaattctaacttaaatgatgcacaaaagcgtgcagtgcaaaaaatgcttgctgcaccagacttatgtttaattcaaggccctccaggtacaggtaaaaccacagttattgctgaagctattttacagctagtaaaacagggtaaaactattttgctgagtagccaatcacatgatgctattgataatgcgctatcacgtatcaccaatcacccttcattacgtgcggttcgtttagcaaaacaaggacgtgggcgagataaaattaccgaagaaggtaaactattttcaggtgagcaagctttagcacgtcattatgaagcattgagccatgatattcaggctcgttttttaacgccattgcaacagcaggaagcacaaattgatgcgttaaaaacatggttaaatcaagctgagtttttacaacttgatgcacaaaagtttgaacaacaacgtcaaagtatcaagcaacaaggtattgaaaagcgtcaacaacaacaacaggcgcaaaatgcctttgaacagcaacaactcgagtatcgggcacatcaacaacaactagtagaattacaacagttgcaagatttgttagcagggcaaagtattgcacctcaaggtcttgttttacccgatatgattaaaaatattgcagatcgcttatttgaattagacagctatcaggttcaattgccatttcagattacagattttcgcttttatccagaatcacaagctcaaattttgatggcattattagatgtttggcaaaatattcatagtagccttgaggttatggagcaggatattactcgcttgcaacaagcaggtcagggtagtctaacaagtatcgagacacagctaaaagttcaacaattacaacaagaaattgaacagcttgccaatcaaatggatctagatgatagtgaagaaatttctaatttatggcgtctaaaacgtcgtgaagtaaatcaattaaagcaacaaagtggtggtttaacccacgaatgttaccaattgtttaaggatagaaatcaattcctcaatattacaaatgcacaatctactgcaatgttattagcggagcgtttagagaaatttaaacaatttgagcaatgtcttaatggtcagattacagaagcaagccaaagcttaactgcacaaatgcatgcatttgagataaacatacccaatgatgcaccgatcaaacaaatcgaacgtgaaatcacaaacctacttgatcaatacaaaatgatcgaaattcaattgcaaaaacagcaacatgctgaacaacaacatttacagcaacaaaattttcaaaatagcaacttgagtgaatcaattaaatctactcaaaatcatatttcgtatttacagcaacaatatcaggagagcaaagcacaaaaccaaaattggcatggtttatttgaagactgggtacagtctcttaacaatccacaacaatcaaaattggattgggaattaatgagccaagaatatacccaaaactgtaatttagtggcgatttcttgtaatgaaaattcacgtaccttacaggatgcaggtattgatggctttgatgtggtgattattgatgaagtatctaaagctaccccaattgagctgttaatgccacttatgcgtgcgcgtaaagctattttagtgggtgatcatcgtcaattacctccaatgtttcaagaaggccaagatgctactgaaacatttgaagatttagtagaagtagaagatgaaaatcaagatcgttccaatttactcacaaaagacaatttcaaacgctatgaaaaattagttactgcatcattatttaaagagttatttgaaaaagcacctgatgtgttacgtgaacgtctcaccacacaatttcgtatgcatcctagcattatgaaaatgattaactatttttatgatgggcaactcacttgtggtaatcctgatgaaccacgtgagcatcaagtcgttttaaaatcaaagcttaatactttggtggatgctaataagcatttgctttgggtggacacttcaaatgatgaaaaaggtgtgtcttacagagacgatgaaagtagcaatgtaactgaagctaaattgattgctaaaactctaatcaacatcaatctacaaatgaaacaacaaggttatcacagtaagaataagcaaaaagttggtgtggtgtctttttaccaatcgcagtgccgaactattcgagatgaaattcgtaaagccaatggtggcaaattagattttgatgccattcatgtcgaaattaacacggtcatccgttaccaaggtaaagaaaaacctatcattttaataagcctagtgcgtaatgatggtaagccaaaagaatatagacgctcatctcgtgccaatatcgcccgttttgaatttattaatgtcgcaatgtcacgtgcacaaaacttattaatcgtatttggtgcacgtaatatgttggagttacgtgatgtgaatttaccgaatatggataaacctggcacgagcaaacgtaaaatttatcaggacatctttaatcggttggatcgtgaagggcaggtctgtacagcaagggaatttatacaggcttgtgaaatttcaaaatcacaggtggctaagtcataa

SEQ ID NO: 66555 - DNA, 1275 bp, Acinetobacter baumannii
atgtttgaaaaaaaacttaagggtgcatggattattcatcatgcacaaaaattaaatgagataaaatatgcggataatacatttgataatactttaactgcaggtaaagcaggcttacttttgtcatctttatctaaagatgatgagtctgaaataaattcttcaaaagtacaggctcttagtacttatgttgggataactaacttagaaagaaaaccactactagagttattaaaagaaaaggaattaattgattatagtaaaaatggtgatgttgtaacgttagggttaactcagcactcaattttggagcatacagccaatatttttgatcaaagtaatgattcttttgataatattgaaaacgcatcaatctttttagctgagaaagcatctcaagaaccaattttccaaaatgaaataaaacccctcctgagtgatgaatttaagcttacctctgataatttagactatttatttacctctgctgaaaccatagggtttactgatgtggagacattgtctgataagggtaaattactgtttaatggtaatctttttaaaagacaatattccgaaaaaataggacgagtatttcagtctttatcagctgaagaaagtacaaggataaatgagttaaattctattattcgttcagaagggtgcgtagcaataagcgaaggtactcgcgtactagggcaaaaacttttagataagttattacctatcggagtatacgaagtaaacatagtatccaattctaaagaagaaataggctttctaactctgccagaatcattctcaaaatttggaagtaactctattattgatgatacttttgatttagctaaagcgttcattagctccttgaaatatggaatgacacgcagtgcgtatggacgagggcaaattcaagcaatagaaccattattaagaaaactaattgcaggagggcaagtagggcctgttactgcaataggccaggattatagagttcttgaactaaagggagttgttcaagtcattccttacgcaaatgatagattttacttaagactattaaaaaaagaggttggtgaaattgccttattggtcttaacttcaggaaatgctagtgaacatgctttaatttcggatagcctaataccgtcaacagcagctactcaatttagtggaccagaagtaaatcgtgatttattaagaaaaaaacaagtaaaagtaaatcccacagcaactaataatatgttagatgctttacggactggaggtttttaa

SEQ ID NO: 66556 - DNA, 1986 bp, Acinetobacter baumannii
atggcttcatttaatgtcagcatactttttgaaacaccacccaaaaatgtattaaccgattcccaagactggtggccagccgactggggaaattatacgggcttatttatccgtttagcgtggcatgctgccggtacatatcgtatgggcgatggccgtggtggtgccggtcgtggtcaacaacgttttgctccattaaatagttggcctgacaatgcaagtttagataaagcacgccgtttactatggccagttaaacaaaaatacggtcaaaaaatatcttgggccgatttatttattcttgccgggaacatcgcacttgagtcttctggtttccgtacctttggttttggtgccggtcgtgaagatgtttgggaaccagacaacgatgtaaactggggcgatgaaaaagaatggttagctcatcgcaactctgaagcattggcgggcagtaatcttgctgcaaccgaaatgggtctaatttatgtgaaccctgaaggaccacaagcgagtggtgacccacgatcagcagcaccgtttattcgtgccactttcggcaacatggcaatggatgatgaagaaattgttgccttgattgcaggcggtcatactttaggtaaaactcacggcgctgcccctgctgaccatgtccaagcagacccggaaggtgcaccaattgaacaaatgggctttggttgggcaaacagctatggtacaggtgtcggtaaagatgcgatcacttcaggtttagaagttatttggtcacaaacgccaacacaatggagcaattacttctttgaaaacctcttcaaatacgaatgggtacaagaacgttcacctgctggcgcaattcaatgggtagcagcagatgctgaagccattattccagatcctttcgacccatcaattaaacgtaagccaacgatgcttactacagatttgaccttacgttttgatcctgagttcgaaaagatctctcgtcgtttccttaacgatccacaagcctttgccaatgcttttgctcgtgcatggtttaaattaactcaccgtgatatgggaccaaaagcacgttatttaggaccagaagttcctgctgaagatttaatttggcaagatccattacctgctgctagcgctacaccatcttctgcaagcattgctgatgcaaaagcaaaaatcgttgctctagggttatctgcaggtgagttagtttcccttgcatgggcatcagcatcaacattccgtggtggagataaacgtggtggtgcaaacggtgcacgtattgctttatcaccacaacgtgagtgggaagtaaacaaaaaagctgttgagactttaactcaaattgaagagctcaaggcatcaacccaattgtcattggcggatttaatcgtgttagctggtaacgttggtgtagagcaagctgctcaagcagcaggtttcaatattaccgttccgtttgcccctggtcgtgttgacgcattacaaagtcaaaccgatgttgaatcattccaattgctgctcggtcttgctgacggtttcagaaattggaaaaaacagggagtcaacactccagctgaagtcttattaattgataaagcacaacaactgactttaactgcaccagagttaactgcattgattggtggtttacgtgtactgggcactaactgggatggttctcaacatggtgtcttcactcagcaagttggtgtactcagcacagacttcttcacaaacttactcgacatgtcgaatgtatgggcacctgttgattcaacaagtgaagtatttgaaggaaaagaccgtaaatcaggcacagtgaaatttaccgcaacacgtaatgatttagtctttggttcaaattctatcttacgtgcattagcagaggtttatgctcaggcggatggtaaagaaaaatttgttcaagactttgttgctgcatggactaaagtcatgaatcttgaccgttttgacttagcttaa

SEQ ID NO: 66557 - DNA, 504 bp, Acinetobacter baumannii
atgattagttatttttgtcaacttaactcgggtttatttgctgcatcacgtatgatgtggtcgctttcagcaaaaaatcaattacctaaaatttttgcgaaactcacgccgtctggaacacctattattgccattattgtgacaatgtttggtgctattccggggttgctttcagaacaatttgcgccagaaacaatttttaaaaatttgttgggtgtcgctgcttttacaatggttgttgtttggattgcaatttgtatttcgcaatttaacttccgtagacagtggtataagtcaggaaaaacagtaaaagatctacgtttcgctgcaccactttttcctcttactccaattgtaggcgggctattctgtatagttacttgtatcagtatggtatttgatccttctatgcaagtgggctttatctgctgcattatttttatcttgctatgctatgtcagctatttcatcttttatcgtaaaaaagatatagctcaaaactaa

SEQ ID NO: 66558 - DNA, 456 bp, Acinetobacter baumannii
atgcctcgaattgtttctgtaccacttagtttagaacagcgagaacgactcatttttctggccaagcatgcaaaacattggcgtgaaagacaacgtgcccaaactattctctggctttctgaaggtaaaagtgttgcggaagttgccactctacaagaacgtatcccagaaaccataaggctacaacgccgacgttgggaattgtatgagtttgaatcgattaaagaaggtcatcgctcaggtcggcccaatacattgatctcagactatcaggcgaaaatcctagattgggtcaatacaagtccactcaatgcagaacaaatccgagtcaaactacatgaagaatacgaagtgtccgtgtctgttgaaaccattcgtaagtttttacgtgattcaggtatggtcttcaagcgtacccgtcatagcttgaaaaaaaagagatccgattgcatttga

SEQ ID NO: 66559 - DNA, 384 bp, Acinetobacter baumannii
atggggtgtttgctttcaacggggaaactggtgacaagttgtttacaagagtctgttacaagcacttggttttatgcctatttaactggaatagctcaacaagtaaaacagacttataaccttccattggttcttattgttgataatgcctcgattcatagaagtaaaaagatggctgattacagagagctacttaaaagtaacttttcgacgaatttgtattttattccagcttatagccctgagttaaatcgaatcgagatggtatggaagcagatgaaatattattggcgagattttcaagtcatgacagctgataaaatagagcaatgggtggagagagtatcaaaccaattcggaaaagaatacatgtttactttttaa

SEQ ID NO: 66560 - DNA, 564 bp, Acinetobacter baumannii
ttggttttttttcttaatgtaagttcaactcgcttatttgcagagtctgaattttggctggcgcttgtaaaagtaatcaccattatctgttttattggtttgggattgctggcgattttcggctttattccttatcaggggcatgaaacagcaccattgttcagtaatttgactgctcatggttggttcccaaatggtcttttcccaatttttgccactatgcttatcgttaactttgcattttctggcacggaattaattggagtggcggctggcgaagctgagaatccagcaaaaacagttcctaaggcaattaatgcggctatttggcgcttgttgattttctttgttggtacgattgtagtgattagttcactattgccataccacctagcaggtcttagtgcaaatgatgtgagcagtagcccatttgtgactgtatttaattacattggtattccatatgcagaggatattatccgttttgtaattattacagctttactatcagctgctaagctgtcattaaaaagtaaacatgtattcttttccgaattggtttga

SEQ ID NO: 66561 - DNA, 1635 bp, Acinetobacter baumannii
atggcccgtactaagcttttaaccaatattattcaaagaaaaatgatggtgcctgacgaaatgtctcactcaaatctgcaccataactttgaaatatcactttatgacttcgccaaccatgagatcctagaaaaactatataaagcagacaatcaacgctccacagagtgctggagccctgctgaaattcaggagtttattctaaactgtttgaatgatcgtaatgtcaatttatgcgttcgctattggaaagatgctgctggtaatatttatatcatcgatggtgggcacaggatttcaatcatttatgcttggattaaaagatactttattgatgagcaagtaataggagccccaaaattcacggcaccacaaaaacgagatattcgtcagattcgtaatcgattaggtggattagctgattttcaagagttatgtagcgattctgagtttcagcaaaaattaaaatcaaccaaaattaattttattgaagtcattgggacacctgaggaagctcgaaaagccttttgttcaatcaattcgggtacgaagcgattagatccagatgaagaatatcatttacaaaatagggggagtgatgctttttatgtgatctatgcgtgttgttatataaacgataataaatccaacttggctgaactgaattacgagcggataaatgaagtgatcactttgggtgagcaaattcatgatcatctttttaagataatacttttagatccagatttaacacacggtaaaaaaatcggcttggtcaatgaactcctgaatatcatgtttggtgatactagtcagaatactgtgaatatagaccaaggtcagcgtgtagaaaatttaatgctaaaacttagagttgtgctgtgtcgtatcgctacaccaccaattagtattcggattccaagtttgggcttacacccaaaactatatttttataaagataatcgttttcaagtgacatcctttttggcctggttctctatcgtctgtgaaattgaacaagactgttttgaaatacagaataagaagttagattttattggatttactcgagcacgccgtggtgttgaaagtttaattgaaaaaattcctgtggccatcaaagaaactgtcggtaagtttggtagcgggatcagatcacatgagcgattgaagaacgtgtatcaagcctttatctgtattggactcaatatggatttagattttgaagatgaagtttgtttgaacaccgtcattctttctatgagtcaatcatttgattatattaattttaatgatttttaccttgaacgttttgatggtgattatgatgagagcattgttgatgatgttgtgagctttgtgaaatcagtaagaccatcaaagaagaaaaaacctctaaatttttcactcgcagccaaaagaaacctgtatcaacgtgaggaaaggaaaacatggagctattgcgaagtatgtgatagcgctttataccttgaatcgactgaagtagatcatcgagaatcgaaagcagaaggtggttacggtgttttagaaaatggagcaattattcacccgatatgtaatcgttttaagtcagatcgtgctttggaagaagtaagagcagatttatttgactaa

SEQ ID NO: 66562 - DNA, 741 bp, Acinetobacter baumannii
atgtgtataagagacaggcttatagcatgtctattaagttcagcaagtgatattgttaatactgtaggaaaacagtttgctcaaccaatgaaaattaccgataaggcgggtaatataaaaaaattacaattcaacagaacagtccagaataagagattaaatgtattagagaagttttctgatgcatttataagttttaatgatgctcaaaaaaatacatgtagtaatgaacataaaatattttgttgtgatgtatttcagttcctagatgaatataagggagaaattggatgtttctatgcagatcctccctatacaattgaccactatagtcgcttttaccatgtcttagaaactatagccttatatgataatccttccttttcttggatgaaaaagaaaggaaaattagaaatcatgaatggtctgtaccgcacgaatagatatcaatcggaattctcagttccttctttagcaccgcatgcctttgaaaaactttttgacaaatgcagtaaattcaatgctcctcttattttgtcatattcgccatttaatgaacaaaataatgatcgtccaagattattaacacaacacgaaattgaaaaattagcattgaaatattactcaaaagttacgattgtcgaagtaagtgaccataaacatagaaagcttcattcaacaaataaaaatattgaggagattcaaacgggcgaaatatttataatttgtgagatgatgtaa

SEQ ID NO: 66563 - DNA, 1266 bp, Acinetobacter baumannii
atggaaaaatacctaggaaataaaagatcgttattaagtgatatatataccttttctcaagaaaattgtcctgatgcacgttctgttttagacattttcgctggaacaacaaatgttgctcgtatgtttaaagaaaagggttttacagtatattcaaatgatgccaatcggttttcacaagtattgggtaaaacttatcttgaactctcacactacccagaatttataggattagatcaattaaagtctgatatatcagaatttaatttaaagaaacgattgtttgatgacttaagtaaatattatgatttggaagatgattataaaaaggaattaataaatattaatttcaatgaatcaattaaggtattcaacttcttgaattgcttaacggatattatcccagaagttgattatatttttcttgattattatactcagttcggaaataaatcaaattataaaagtatgcgaggtactgaaggaaagaggaactacttttctaaggaaaacgcaattatattagataatattctattttttttaaagaaatggaaaagtgatgcgattattaatgatgaagaattttattttattttgacagctataattgaagaagttgtattaatcgctaatgtgaatggaacttttcatgatttcaatagaaataagctatggcccaattcattgcaaaaattttatttaaaaatccctgctgttaaagtagacaataaggtaaaaggattttctttttgtagtgattcaataaatgttgcttcaaaaaacaatattcaagtagatctcttatatattgatcctccttataactttagacaatatacagcctattatcatttacttaatttcatagctgcatttcctacaatacctgatattgcagcatatcttgcaaacttagaatttgttagaggacaaaatcctaaagatgacttcactagtgatttttgttttaaagataaatttattgatgccttagatactatgattgaagatgtaaatcctcgctatattattatgagttattatggtggtcgaaatcactggaatcactggtctaaagaagaagttccaacagatacagggtacaaaattattagtaattacttcaatcaggataaatactgtcaacatacaagtacttctatcatcaaattaagacagaactatcagagtcgtgcgggtgaaaagaagcagattattgatgaatatttattttttgcctcactgaacaacaagttgggataa

SEQ ID NO: 66564 - DNA, 297 bp, Acinetobacter baumannii
atgtgtataagagacagagtatgtggtgcatcagatatagcaaaacagtttatttatgctcaagtttctccatataaaaaaattatgaatttttttatattcccttttgatgatgaaaaattaatagaatgttctggttacgtcagcgtttttaaggataaaaatgagctgccccattttcaggcgcagcgtatccattcaattaagctttctcttttcccagttattgaaaaaatcataaataaagaacatgagagttgggataaaaataatttatcccaacttgttgttcagtga

SEQ ID NO: 66565 - DNA, 2094 bp, Acinetobacter baumannii
atgacttcaatgtcgaacactacccaaaagcattttattgttgagcagtttcctttaccgacttgggtcagtgatgaaaaaggcttaattttatactgcaatacggagtgtacaaagtactggcgcgatacttctcctccattgtttcaacaatggctagatttcgtgtaccctgccgatttagaagaagttaaaaacaactggttagatgcgatacgactccgatcaagaattgaatttaaatgccgtcttttgcataaaacccattattatcgatggtgtaaaatttctattcaattgtcgaaataccatgaatcttctcaagaaaatgaatggtttattagttttcttgatattgaccaagatatacaagagcagcaaagcttacgaaaagatatcgatatacaaaatcaaatgctcgatatcagtgtcgattgtattaaggttttaaatacagatggcactgtatctcatatgaataaatcaggatgccttgcattaggtatacctgtagatgaaaaaaaattcggtatgcgatggttagatcttttaccaccccatattcgtaaacgcggaagagttgccttaaaaaaagccttacagggtaaagtggcccgattcgctggcatgagttgcttaccaaatcaagatccagaatattgggataacatgcttaccccaattcaacatacaaacggcgaaattattcaaatattgtgtgtttcgcgaaatgtcactcaacagtatcttaccgaaaaccgtctaagagatattagcgagagagatgaactcacaggattatttaaccgacgctcatttaagctacaactaaaacgcaccctagcttactcaagagaaacccaaaccagtgtagggctacttttaattgatctagatcatttcaagcatattaatgacactataggtcatagtgctggtgaccacttattaaaaatactttctaaacgttttaatcagtgcgtagaccctgaaagatgttcagttgccagattaggtggtgatgagtttgcagttattgttagccatttaaaaaatgagagtgatgttcgtgaacttgcagaagtattgcttcaacaactcaatcaacccattacatatgctgggaatgtgctcaacggcggcatgagcatcggctgcgccatttatcctcaagatgcagttgatcaatcgagcttattaagttgtgccgatatggcattacatgacttaaaagcccgtggtcgtggcggcatacgtatgtataacccaagtatgatgcagttaaccgaggcaatcgcctctcaactcaacattgctcgccagcttattcgtcatcataccattcagccctactatcaacccaaagtcgatctaaaaactcatgctgtagtgggctttgaagcattactccgctggcatacgacttcggcccaaagaggtttgccttctcagattgctgaagcttttaaagactacgatttagccagtaaaattggtgaaatcatgcaacaacaagttttgcatgatattgctaaatggataaaattaggttttgtgccgcttcctgtttctctaaatgccgcaccagttgagttcttaagagataattatgctgaacgtttattaaaaaagattaatcaacttgaaattcctacccatttaattgaaatagaagttactgaacatatgctgggtgaccgtggttctgaatatgtgattcgcgcacttaataaactaaaacagcatggagtacgcattgctttagatgacttcggaacaggtttctcttctttaacacatataagagactatcctattgattgcttaaaagttgattgtagctttatacaaaagatgcaacatgatccatccatttatgcaattgttcaggcaattggcttacttgctccaaatctctcactcggattaattgcagaaggtattgaaacaccagaacaagaagagttgcttcttcaatttggatacaacatagggcaaggttttttatttgaatcagctattgacgctaatcaggtgatctctattcttaaacagggtcaggcttatctagaaagtcactattctatgaattag

SEQ ID NO: 66566 - DNA, 1443 bp, Acinetobacter baumannii
atgaataaacatttattagcaaaaatcactcttttaggtgctgcacaactatttacgtttcatacggcatttgcagatatacctctgacacctgctcagttcgcaaaagcgaaaacagaaaattttgataaaaaagtgattctgtccaatttaaataaaccacatgctttgttatgggggccagataatcaaatttggttaaccgaacgtgcaactggcaaaattttaagagtaaatcctgaatctggtagcgcgaaaacagtatttcaggttcctgaaattgtgagtgatgctgatgggcaaaatggtttgttaggctttgcttttcatcctgactttaaacataacccttatatctatatttcaggcacttttaaaaatccaaaatctacagataaagagttacctaatcagacgattattcgtagatatacctataataaaactacagatatatttgaaaagcctattgatttgattgcaggtttaccgtcatcaaaagatcatcagtctggtcgtctcgtcattggtccagaccaaaaaatctactatacgattggtgaccaaggtcgtaatcagttagcttatctgttcttaccaaatcaggcacagcatactccgactcagcaagagctcaatagtaaagactaccatacatatatgggtaaagtattacgcttaaatctggacggcagtattcctaaagacaacccaagctttaacggcgtagtgagtcatatctacactttagggcaccgtaatccacaaggtttagcatttgccccaaatggaaagcttttacaatctgagcaaggaccaaattctgatgatgaaattaaccttgtattaaaaggtggtaactatggctggccaaatgtagctggttataaagatgacagtggttatgcctatgcaaactattcggcagcaaccaataaatcacaaattaaagatttagctcaaaacgggataaaagtagcaacaggtgttcctgtgactaaagagtctgaatggactggtaaaaactttgtgccacctttgaaaactttatatacggtacaagatacctataactataatgaccctacttgtggtgagatggcatatatttgctggccaacggttgcgccgtcatcggcatatgtatatacgggaggcaaaaaagcgattccagggtgggaaaatacattattggtcccatctttaaaacgtggggtgattttccgtattaaattggacccgacatatagcacgactttggatgatgctatcccaatgtttaaaagcaataaccgttatcgtgatgtcatcgctagtccagaaggtaataccttatatgtgctgactgatacagcggggaatgtacaaaaagatgatggttcagtcactcatactttagagaatcccggttctctcattaaatttacatataacggtaagtaa

SEQ ID NO: 66567 - DNA, 909 bp, Acinetobacter baumannii
atgaattggtcacaaatactcaatttgcaatgggataatgaatttcatatatctagcactcatcaattattcagaacaataaaatggagagctgcaggtaaagagtgcagttttgaaatacctgtaggatttatgcctagattcaaaaatttcattagattaaggaattatcttttaaataatcaaaagtttgaatatttgttttttactgctggtgaacgaggtttaggcaccccgaaacaagttaaatcatttactttgcatggtatttactcagcaattaagcgaattgatcctctgttacccacaattcaatcaagagaatggcgtgcagcaaaaagtgattggcttgtgcgaaatactgacatttcaacaacagcactaattttacaaaatacagaaaaaacagttttatcttcttatattgcaggttctgaaagtgcacattgggaagagatatcaaactttctacataacatatctaaagttattctttcgcctaatcacgatcaaacgcaattattacagagtgctattggtaaatgctcctcctttggaaaccctgtaattccacaggaaaacgacacaataaacacccctaattgtattaatcccgaaggttgcttattttgtgagaattatagaatacacgtagatgaaactgatattcgaaaattattaagttgtaggtattgtattgaaaaaacagcacatttaataggaaacttggaagaacaagatttaataacaaaaccaatttttgaaagaattaatttaattatagcccatgttaaaaagaacaatgaaccgcttgtaaacaaaattatgtctgaagttgaagaaggggaacttgacatttattgggcaagaaaacttgaaatgtttatggagttagattggataatatga

SEQ ID NO: 66568 - DNA, 1773 bp, Acinetobacter baumannii
atgtgtataagagacagctataaattgaaaccatatgatacccaagcaccttatgtaatgcctcaaatgctttttgaagcgaacatatcgcatatcgatcaaatgattcgtgacatgcttaataaggcaagtgagaaacaatttgaatggaaaaagccgaatactaatatcagtgacgttaatagtttagtggctaaaacagtagcacatcgcttaccaatgcgtattgcacttactatgcaaggtcatcttggatttgatgctaaaggtaattcggaagtacagcaaatatttagtatgtggcttgagcaaactaagcatgaagtgctgtgggagcatcttttagccccaacgttccaacagatagacaatgatttacccacttttgaatggtcatcagtattagatgtgacgctggcagaaaatactttactcgatgagaacgcattaattcaggtttatgctgaaaaaagtccaaaccaagtcagtaataaaccagaaatcgttttgtcggaaaaggcaaaattagcgaaattacaaggtaaaacactaactttgccattcactacggctttaccacaaggctttcaggcattgtacctatataaagatcaaacagcgacaatagtattaaaaggtaatacccatatcttttatgccaaacaaccacgtttagtggctttgaaaattaaacttcgtgatgagcatgtgtggtcgacaattaaaaatgaagtgatgcattggaataccactaacaccttagatgtcttagcattttcacgttactttttatcagaacatgaagtgattcaacaggcaccgaatttaactatgaaagaagccatgaatttgcatgaagccatgaaaaaattgaataataccggtttacgtgctagtgcatggttagacaaaattcaacagattgcaaattttaatgaattaaaagattttcgtagtaccttttcacatttagaacttgcaccacaatgggcagaacctctcttttttgcaaaattacttgatgatgcttttgacaaaggtcaaaaagctggaacaacgctcgatcaagactttgtcaatattgtacagacacaaaagtcattaaaaagtcagattaatccagatgtacttaatccaaatcagcagattaattccagctctttaagcaaggtaaatataaaggccctagctttaatcgacgattggctagattgttatgaggaactacaactcaagcatactgaaattttgaatctttgcgaaaggctgaaaaagcaacaacgacatttagttgcattaaaacaagggatagcacaaagctttgcacctttacgcacagatgctaagcctattgcagtattagatactagctatttgatgcgtcatagtgatgatctgactaatttagaaagagattattttgtagtgattccgcaagttgtcttacatgaactagacggccttaaaaagggacaagacggggataactttagcgagcaagcacagaaagcgagacgtgcgattcgtgctattgagcatttaacatcagaacatattgaaccgactcacgatgagtttgtaactatcattgcaaaaagtaaaacagcacaagaaatgactccagatgaacaaatcctttcagtggctttattttatcgatttaacagtagtgaactttttagtttagataaaaatatggggaatttggcaaaagcagtcaatattcgcactatatccgaatatcagcctaagttaattaaagaacatcaataa

SEQ ID NO: 66569 - DNA, 1605 bp, Acinetobacter baumannii
atgaagcatgaactcgaacaatatgacagagcttttttcggccatccaaaaccattaaaaactttattttttacagagctttgggaaagattttcttattatggtattcggcctttactcgttctttatatgattgcaatggttaatgacggtggtttaggtcttgaccgtccaactgcagccgcaattgttgggttattcgctggatctatgtatttaatgaccgtttttggtggctggattgccgataactggctaggtcaggcacgatcggtctggtatggttctattattattgcactaggtcatttatctattgccctcactaccatttttgatcaattctttttttatttcggtttagtccttattgttttaggtaccggattatttaaaacctgtatttcagtgattgtcggaacgttatataaagctcaagatagtaggcgcgatgctggtttttccattttttacatggggattaatttaggttcttttattgctcctcttcttacaggcttattagcacgtgatcataactggcacttaggttttggaattggtggccttgggatgttagttgcattacttatttttcgtgtattggctgttcctcagttacaaacttttaatgagttacgtcaagaaaatgacaattggaataaacctgtcgtacaaaacaaaaatgcaccaaaaattgctttctcctttttactatctgttgcagtcgttattgctcttaccttatttggtgtcattcatatcaatccggttgaggtagcaacttatttaacagttgggattggtattgggattattgcttattttgcatatttactgcttttcctgaatttagagcagcatgacaaatttaaaattattatttgttttgttttattagcagcctctgccctattctggtcagcttttgaacaaaagcccacaacttttactttatttgcacaagactatacggatcgtatgttttttggatttgagattccaactgtatggtttgaatcaattaatgccctatttattattatttttgccccagttgcagcatggctttgggcaagactgggtaaatcaaataaagacccaagctatatcagcaaatttattattgcattgttattcgcggcaggtggctttcttgttatgtcttttgctagtcgtttcgcaattgctggcggcctagtttcaccattttggttagtaggaactttatttttacttaccataggagaactgtgcttaagcccaattggattatcaaccatgactaaacttgcacctgatgttatacgcggtcaaattatggggctatggtttactggcacagctttaggtaatctcatcgctggcttaattggcgggcatgtatcagcagataatattgatcatttaccaaatctctttatgcgatgcgttttggcattagtcgttggtgcaatcgtgttatttttattaaagaaaccctctgtacacgacaaatttcatatagcccttgtcctatcaggctttttctttcttaaaattgctagaattttcttaaattcctctttttttccaaaaccaatcaaacgtagaatagccatttga

SEQ ID NO: 66570 - DNA, 303 bp, Acinetobacter baumannii
atgaaacgcttaaagtcccttgtctcagaacaaagtcaaatcaagcacctctctacccgactatttcgtcctcaaacattagtattgtcacaaagcactccgtttgaagtgattggtgaattcaaccaaacccgtgttcgatattatgcagctacagaaaagaactttagagaaccattagtatttgtggcacctttagctattaatatggcgatttatgatttatatccatatcgttctcttatcaaatacttccaaaatgcccaggttttgacgtataccttgtcgattgggggcgtttag

SEQ ID NO: 66571 - DNA, 330 bp, Acinetobacter baumannii
atgaaatcgttgtgcaacaaagccgaatcagcaatcaaatatgtttggccagatgcgcgattacatgaagatttaaaaagttctgaaaggtttctctctttcaaagactcaaaaattttagaagtagtaaggattaattatgattcagcggaaagtagacctgagtattatcaagaattttataaaattatttcagtgatggtaaaagttaaagtcgtccatatagatgatgctggtagtccagtaggtgactatattttatttattactcttgtgaaacaatctcctcaatctgattggctaattacagaatttggtagtgggccttaa

SEQ ID NO: 66572 - DNA, 177 bp, Acinetobacter baumannii; identical to SEQ ID NO: 55697

SEQ ID NO: 66573 - DNA, 240 bp, Acinetobacter baumannii
gtgcttgagtatccgatcaaggctgactttgccctgattaaagcttacaagggcgaccgctggggcaatctggtttaccgtaaatctgcccgtaactttggcccgatcatggccatggctgctgatgtcaccattgcccaggtctctgaagtggttgaactgggtggattagatccggaacacatcattaccccaggtatctttgtacagcatgttgtacaagtacagcccgcacagtaa

SEQ ID NO: 66574 - DNA, 693 bp, Acinetobacter baumannii
atgcctgaaattaatattggtttatatcctgatgttggagcaagccgtttccttgctgaccgtgggcaaattggtttatttactggtttgacaggttctattatgacggctgctggggcatatagcattggttgggcgacgcatatttgtgaagcacaacgtgataatgttctacagaaagtactcaatattaattgggctcactatccggcaggtgatttccgtgcaatcgatgatactttaaatagtttgcatcgaccggttgcagcagggccattacaaaattcgttagacgttatacatagtgtttgccgtggttcaagctttgaacaagactatcaagcgatcgtcagcttgcgagatgcaagcagtgactggttgcgtcaagcgagtgaaaacttacaaaagggctcgcctagtacggcagcaattacttggttgttatggcaatggggtaaacaagttcattcttgggatgaagtttttgatttagaagcgcaaatctctgaatggaaaattcgccatcctgactttgtggaaggcgtacgtgctcgtttagtcgataaagatttatcgccagaatggaaagcatgtgaagaccttacattacgaggtattttggccgatgatccaccgatcacgacgattgatagctggaatgcattacttagacaatatggcgtagtgtcataa

SEQ ID NO: 66575 - DNA, 597 bp, Acinetobacter baumannii
atggctatcactgaaacagttggctcattattgtttggtggtcatcgttcaataatgggtttatttgctgacgttgttattgaagaaaaccactctgatgagcttgtaataacagagcatccagtagaaaagggttcaccgatttctgaccactgctataaagcaccaccagaagtaacaatgaaaattggctggtctgagagtgctggcagaatgaacgggctaataggtaatacatttatcggggcagatttgtcacttcttggtatttatcaggggttgcaggccttacaaggtcaacgacttattatttctaatggtaaacgcctttatacggacatgttgattaagtcattaaagaatgtcactgatgaaacgtccgaaaatgctttgatgatcgatattgtgtttaaaaaagtctttattgtttccacaaaagaaacgctggtttcaatcgttgatcaaaagaaccccgaagtaacttctgatgttgttgattctggtaccaagcaaccgaaacaagttaactcttcagtattgaatactgttttagggccagctgtagatgcttttagttcattaatgagtggtaagtaa

SEQ ID NO: 66576 - DNA, 558 bp, Acinetobacter baumannii
ttgtttggagatttcttccagttattagatcgcaagaatggtgaaagtgagcttggtattgaacctatgcctgacttagctgcatatttagttgatcatgggctagatcctataattaaattgccaaaaaatttatatatttttggaacaatgaatgccgccgatcaaggcgtatttcccttagattcagcatttagaagacgttgggaattcatttataaaggcttcaatgatccatgtttatatccagtaggagacagggagatactttatggtggacagttatatgattgggatatttttagaactaatttaaacgtgaaattagcagaattaggtattcatgaagacaaaatgataggcccatatttcttgaaaccaagcgagctaaagaaccctaaaaaagtgtgtaataagctgtttttatacttatgggatgatgtattaagattccagcgatcagaattaatggacgtaaccagcttttctgatttagcaaatatttggaaagatggtaatggatcaccgctgaaaatatctttgagtcaggaatcatga

SEQ ID NO: 66577 - DNA, 441 bp, Acinetobacter baumannii
ttgtggcgagatttaacagcgattgcaagctatacatatttagatgcaacctttgattctactgtacccgcagctgggaaaatttctgagatcccagaaggaaatgccattcctggcattgccaaaaaccaagcttatgtctctttggcatggcagccatcgcacggtctatatggtggtgtagatgtacagtatatggacaaagtatacgtgaatgataccaacagtgacgcagcaccgagctacagtgtaacctcagcaaatattggttatgcatgggtaatgggcgattggaaagtcaatagctttgctcgtgtagataacctctttgataaaaaatatgcaggttcagtgattgtaaatgacggtaatagccgctatttcgaacctgctgatggacgtaactggagtgcaggtttacgtgtaattaaacaattctag

SEQ ID NO: 66578 - DNA, 588 bp, Acinetobacter baumannii; identical to SEQ ID NO: 47391

SEQ ID NO: 66579 - DNA, 483 bp, Acinetobacter baumannii
atgactcaacgctttgctttttcaacttcaaaaactttgttagcagttgctatttttacttcaatgacaacaagtcatgctgaagaaccggcagaacagcaaaattcaaccaatgtgttacccactatttctattcaagcacaaaaagaaaaccccacttcttatgtcgcaacaaaagcaaattcagctttaaaatcagatgcacctctatttaaaactgctcaatcagtttctgtcgtcacccgcgaacaacttgaccaaaaacaagcaagaactttagcagatgcacttgaaggtgttgcaggcgtagaagctgggaaacttggtcgccgcggttgggatgatttcattatccgtgggcaaacttcttctgattcggtgtatgtcgatggtttaagggtaggccaaaatacttatgttgccaccgaactatctggtatggatcaggtacaaattttggtggtgtttcaaaaagtatgctga

SEQ ID NO: 66580 - DNA, 171 bp, Acinetobacter baumannii
atgcatctagcaattattgcaacacttctatctgaaatgcatgaacaaggtattgattattcttctattttagatagagttgaaatttctactaaaaaaccccgtggttcagcaaaagttgggaaattcggaggagataaacaaattgatcttgagctaggggatgattga

SEQ ID NO: 66581 - DNA, 2223 bp, Acinetobacter baumannii
atgactgcatatcaagaaaccccaagcctagaacagcctaaagacatattagcaaattgtacgttacttcatccacaggacggcgcatttatgcgtcaccctgttattgaatcaaatggaagccctcaacaacccatctatattgataatacagtcgttgatatagatggcgtgaagtatgaaagcccgatgatattgcctatctacaatggtcaattgaaattgattcaatgcgctgtattacaacataagcaacgagtacaaataccacctgatggatttgcttgtggctttgcctatttcggcgaattagaaaaagataaacctgtcattgtctgctatgagttacaggcattttttaaatttgctcaaacgcattacgccactgttttggctgtacttcctgatttatgtaaaacaactagcccaaagttaaaacagacggatgcaaacataattgaagatgtcataaagcaattatggaatgcgggctataaacagctatatatcccgactcgaccacagaacaaagacatattgatcaaaatagctcaaagccaaaaagcacagcttatagaccaatatagaaatgatggagcttttatggaaattacccaatatgaaacggcgcaagaggtgcagtcgtttataaataatgcaatacaagagttacctgtatttcaagaagattggaaagaaccaatacagattaaatctgaattattgccagtcaagaaaatcaccgaagatatgcttccacttgatgtatataaatattgtgaagatgaagcaaaacgagcagataacatgacttttgatctaatcgccgtgtgtctacttacttcattgggtgcattgataggcgcacgagtcgctattaagcctaaacaactcgatgattatgcaatcgtacctaacctatggggcggaataattgcgccaccgagtagtaagaaatcccctgctatcagtgcaggcacacgacatttagaccgactcgtttcacaggctaaagaacagtttgaacttgagcaaaaggaaaatatggccaaagctattgtgtttaagtctgctgaaaaagacctagtaaaaaaattagataaagcaaaagaggaaaatgaaaaattaaagttagctcaagatattgcagatatgcaaacagaggtaaatcaaaaacctgtattgaaacgatacttcaccaatgattcatcacccgaagcattggcagatttagaaagaagtaacccaaatggtattttggtcatccgtgatgaacttatcggcttactaagttcattagatcaaaatgatactgatactggacgagcattttatcttgagggatggaacggcacaggctcatatcaatttgaccgtattacacgaggttcaggacatattcaaaatcactgcctatccgtattgggaggtattcagcctgacaagttaatgagctacttagaaaagaccatacacggtatgggcaatgatggcttattacagcgttttcaattgctcatttatcctgatttagctcaatggcaatatgcggatattaaaagtgataaagatgccaaagaagctgtatttaacttgttcaaacagcttgatgagttgagcgagtatgaattaacgaagctaggcgcaaatccaagtgatgattttaatgctcgaccttattttcgctttacagcagaagcacagcaagcctataaagcatggtcaacaaagttaaatagccaaacaatacccaatgaagaacacacaatcattcaagagcatttatcaaagtttggaaaactgatgcctgctttggctttaatttttcatcttatagattctgttcaattaggggcgagtattggcggtgtgagtcttaattgtgtagaaatggcgattaaatggtgtgattacttagaaagccacgcacggcgcatttatggcatggttttacattcatctacatttaaagcgaatactttagccattaagttaaagaagctaaaaaatgatgaatcgtggcgtatagatggctttagtgcgagggatttacatcgtaaaaattggaaaggtttaaccgagttaaatgctgtaaatgatgccctagaattattagttgattatggttggttaaatgagcaagaaattgaatcgactgtaagaggtgggcgacccagtaaacgctatttgattaatcctaaaatttacacttcccaaaagtag

SEQ ID NO: 66582 - DNA, 228 bp, Acinetobacter baumannii
atgactatctatcctgtccgtatctcatttaaaacaacgtgccaaatccttgatgtaagccgtgaaaccctcaacaacattattaaattagaccctgacttcccccaaaagattaaggcgggaacttcacgccagtcgccagtctatttcgactatatgcaaatcatcgaatggcataaatcaaaaatgcaaaaccttactaaagactcaaatgaggtgaacgcatga

SEQ ID NO: 66583 - DNA, 777 bp, Acinetobacter baumannii
atgcaaggtttagtagaagaagatttatttaaattgatggatgatttttcaattaatgatgcttcctgcttaatagcagggataagccctcataaatattattttgatgatcaatatggcgaatggggatttagagaaattaataacagtgatcctgataatatccgtgaggctgttgagcttgttaaaaaatctttgtgtaatgctattaaaaaaggaaagttaaaagcaactatagttgtggataattacaatactaaattgttaacaaaaagtgatatgcaggctgattggtttttgactcatgaattagatgtgactagaacaacgattgaaaaaacagatttaatagaatggcttagagatagaggcgtatatcccttatcttttttccctcaaggaaaaattgcggatattggtaatcaatctcatcctttatatagccccaaattgcatgcagttgtcagtgcatgggaatcattatttacagcagacattcaaagtacaacaacaaaaaaatatctaacggattggctatcaacccatgctgacaaattttctttgaatattaaatcaataacaaaatttgaggaaatggctgaaattgctaattttgataaaggggggaatacaattgttggaaaccccctccaccattttggaggtgatgcttataaagttaaagaacatgctagttcaacacaattaaataaaaatattttagctgaaatccctgaaacactaaatgacgctttaagtgtagacttacccttttag

SEQ ID NO: 66584 - DNA, 1230 bp, Acinetobacter baumannii
gtgaaaagaactgaaataaaacgccgtcctttgtctgatacggtacttgctaaccttgaagccgatgaaaaggaatatcgtgaactagatggcaatggtttatatattcgagtaaaatccgatggtaataagtcatggcaactcagatataaaaagcccaacggtaaatggtcatggttagggcttggtggttatcctgaaatcagtgggcagttagcacgtaagaaagccaaagaacttttagatgatgtgtctagaggtgaaaatccaatcatttctaaacaggaaagaaaacaacaagaacttgagcaaaacaatgcaacttttgagttattggctcgtgagtggttagacacgaaattaaattcatgggtagctgatacaatgactcgaaataaaggcgcattggaaaagcatatctttcctatttttggaaatcgcttgtacaccacaataaaaccgattgaatggatgaacttgttaaaagggatacaacaagagaaaggcatttatgagcaagtgaatcgtatgcgggcaatgtgtcgtgatatttatgattttgcaaaggtcacaggtcgtattgattacaatcctttagagggtattcagaaatatcttgagcaaggcaaaaaagccaatatggcgcatgttgatgaaaaggaattacccgcccttttaagagctatcaataattatccgactatggatgtacgaatgggcttacagcttttggctatgttgttttgccgtccgagtgaactacgtggcgcaaaatgggatgagtttgattttgaaaatgctgtatggaatattcccgaagaacgtatgaagaaacgccgtgagcatgttgtccctttaccgactcaagccatagcaattttgcaagaacttaaaagctacgatactaattctgattttttatttccgagtcgttcagataagagcaaaccaaagtcggacactgtttttattatggctttgcgccgtatgggttatgaggggcgacaaaccccacacggttttaggcacatagccagtacgcttttaaataatcgtggttttgatgagcgtcatattgaatctgctttagcgcatgtaaaggatggtgtagctggtgtgtataacaaggctcaatacttacaagatagagcaaatatgatgcaatggtatgcgaatcatttagaagaaatagcagatcaaagtattattcaatttaagaaagctaaatga

SEQ ID NO: 66585 - DNA, 672 bp, Acinetobacter baumannii
atgcaagaagtaatagttatcgtagaagggcaaactgaagaagcatttataaaaagagtaatagctccagtatttagaccacaacaaatttatttgaagccttttttgatgagtacatcatcaacaggtaaaggtggtgctataaattttgatcgtttaaaaataaatgttaggaattcccttagaggtaatagttctgctgttctcacaacttttttagatttgtatggactggatacaagttttcctaattatgatgaaaccagaaatcaaacggatgtttatcagcgagttaatagtctagagcaggcattgcatcaagcgttaatcaattttgttgaatgtcgtcctgatagaattattccatatattcaaccgtatgaatttgaaggtctattattttctgatattactcaactttgtttaattgagcctacttggcaacgatcacaagatatattgcagcgaatgcgagatgaggttgattcgccagaacatattaataatggctttcaaacaaagccatcaaaaagattggaagataatctacaacctaaatataaaaagactacacatggtccaaggattgctcaacatattggcacggaaaaaatggagttggaatgtgttcattttaaatcatggatgaataaaattagagcgttaggttaa

SEQ ID NO: 66586 - DNA, 1077 bp, Acinetobacter baumannii
atggcattgagtaaaataacgatttttggttataaatccattgaaaaattagaaaatttcagactatataacttgaatgtactaattggtgcaaatggtgcaggtaaaagtaattttatcagtatttttaaattgcttaatgaaatgtatgagcaacgtctgcagctttatgtgcagcaacaaggcggtcccgatagtctacttcattttggtcgagatattacggaaaaaatccatgctgagttctattttggtctgaatggatataagtttgatcttattcctactgtggataatagattaatttttgaaagtgaatatacatggtttgagggtgtttactatggttctagtagtcatctaatcggatacggggaatcagaatctaagcttaaagaaacaaaggactctttctcagagtatgtccgaccagctatacagggatggcgtgtttatcattttcatgatacgagcgatacagctaaagtaaagcgtaaacatcaagtcaatgataatttaagattaaaaccagacgctgaaaatcttgcagcttatctgcgtatgctatcaagtaaatatcctgcagaatatcgtcgaatcgtagagactattcagctcgttctgcccttctttcaggattttgttcaacgtgaagatgaagaggaatctattcaattagagtggtttcaaatcaatcgtcctgatacccctttgaaggctcatctattgtctgatggtagcttgagatttatttgccttgcgactttattgttacagcctatagcattattgcctgatacaattttaattgatgagcctgaattaggacttcatccgtatgctattagtgttcttgcagatatttttaagcaagtagcagaaaataaacaacttattatttctacacaatcagttgaactcattaatgagatgagtgctgaaaatattatagttgttgatcaagagcaaggtaaatcaacatttaaacgctttgatcagcaagaactaagtgggtggttggaagagtatagcttaggagagttatggaagcagaatgtcttaggggggagaccttaa

SEQ ID NO: 66587 - DNA, 1338 bp, Acinetobacter baumannii
gtgaattttaatcctagtcgtccgttatctaaaggtaaggagtttccttttattgatatggcatctttacctgtaaatggcagagatattactgaaatttctaataaagtttttaatggcggtggagcaaaatttaaaaatggtgataccttatttgcacgaatcactccatgtttggaaaatggtaaaacagctaaagtcgaaaatttaccagtaggttgtattgcccatggttcaacagaatttatagttttgtcagctaagtcaaaagacgacgaagattttgtttactatctcgcacgattacctgattttagaagttacgcaatttcaagaatggaaggaacatctggaagacaaagagtttcttggcaagcattggcagaatttaatttacgattaccagaaaaaggtaaacggaaaaaaataggtgaaattttaaaatcaatagacgataaaatccatcttaataaccaaatcaaccaaacactagaatccatcgcccaagtgatttttaaaagttggtttattgactttgatccggtacgtgccaaaattgcagcaaaacaagaagggaacgatcctgagcttgctgcgatgtgtgcgattagcggaaaaagcgaagctgagcttgagcagattgcaaaggaagattttgcagagttacaagcaacggctgcactgtttcctgatgagttggtagaaagtgagctaggggaggttccgaaggggtgggtagtttcaatagttggagaacaagtccaaacagttggaggtgggacgccttcaactaagaatgctgatttttgggataatggaattcatcattggacaacacccaaagacttatcaaatttaacagataaaattctgttgaatacagaaagaaaaataactgatgctggactgaaaaaaattagctcaggattattaccaaaaaatacggtgttgatgtcatcccgtgcaccagttggttatttagctctagctaaaattgaagtagctattaaccaaggctatatagcaattttgccaaatacgaaatattcggctgaatatttaattcattggtgtaaagctaatatggctgaaatcaaagggcgtgcatcaggtacgacatttcaggaaataagtaagaaaaacttcagggaaattaactttattcgcccagatgaaaaagtgattgctgtttatactagaacagctaaaacgctatatgatgaaattacattaaaagcaaaagaaaagcagagtttaattaatttaagagatactttgttgccgaagttattattgggggaagtagaaatacccgattttataaatgagggtgaataa

SEQ ID NO: 66588 - DNA, 1404 bp, Acinetobacter baumannii
atgagttctgatcatcctttattgcaagaaattcagaagggtgaaagtcaaacccttgaatttaaagagcagttaccgaaaggtcaacaggtggcaaagaccctgattgcttttgccaataccagtggtggtaaattggtagtgggtgtaagtgatgatcgccagctcttaggcattcaaggtgatatttttgagctgcaagatcagatcacttcaattatcaatgagctgtgtgcgcccaatattctaccttacatttatatcgagaatatccaaggcattgagttattggtgattgaagtcagccgtggttcgttattgccttattatctcaagccgcaaggtaaggcacagggaacctatatccgtttgggtgcaagtaatcgtgtggcatcgcctgagtatatccagcaacttgaattgcaacgtctgaaccagacttttgatgagcagccgaatccgcaatacagtttagataacatcgatttacaacctttacaacaagcctttactgaggtgggtaaagaattgtctttgcagaaaatgcgtaatcttaaattgatcattcagcagaatggacaggattacccaagtcatgggttactcattttgttggggctttatgagcaggttgagattaaatgtagccgctttaaaggcacgactatgacggtgtttttggataaaaaagaataccgtggagacttatttagtcagttaaagcaaacagagcaattcatcaaaaaccatctgcatctacgtgctgaaattttaggattacaacgtacagaatgttatgaaatccccattcctgccattcgtgaagccttggtgaatgcagtgttacatcgtgactatagcaatgcagggcgtgatattaaggttggcatttatgatgacatcctgaatattgtatccccgggtggcttgcccaatggtctgactgaagaagatttggctcaaggtcgttctgagatccgtaaccgtgttttggcgcgtgtgtttaaagagctgggttatatcgagcagtggggcagtggtattgctcgtattaaagatctttgtttacaagcaggtaatgcagaacctcaactgaaagcacaaggtgattttgtcgattgggaattttatcgtccttcgattgagcaattaggtggctcaataggtggctcaataggtagctcattccaagaaactatgctgacagatcgtcaaaaagagattttagttttgattcaacaaaatccgaaagtttcctatcgtgctatggcagagcaacttgctattaatgagtcagcagtgaaaaagcatttgaataacttaaaagatgcaggctggcttgagcgtattggtggaacacgaggttattgggcgattatgaaaaaagttgggggtgttgtgtga

SEQ ID NO: 66589 - DNA, 1038 bp, Acinetobacter baumannii
atgaacacagctttaattcaaccaaacaatgcaacactaaatatacatgctaaccgaccaaaactgtttactgcaaaacgcttcgtagagaccaaaaatatgactcaggccgaatggctagaagtccgtagaaaaggtatcggtagcagtgactgtgccgctgcttgtggtctaaacccttatatgtcgatgttggaattgtggatgattaaaacaggacgtattcaacagaatatcgaagatgaaagcgaaggccatgcaccgctgtactggggtaagcagctggaacctttggtggcagagttctatagcatgaacaccaataacaaggtgcgacggatcaatgccgtgcttcagcatcccgatccggataagtcatttatgttggctattctggactatgcggtcgtgggtagcgatgacgtgcagattctggaatgtaaaacagctggggaacatggtgccaggctatggcgagatggtgtgcctttatacgtgctgtgtcaggtgcaacaccaacttgcggtaataggcaaacaggctgcacatgtctgtgtcctgatctgtgggcatgaaaccaaaatcttcaaagtgatacgttctgaatcagtgattcaacacatcattcaggcagagcgttatttctgggagtgtgtggaaacggatactccgccatctgtagatgccagtgaatccgcagccaaagcgattcagcaactctatccagcacatgtagcattaagcgttgaagatctctcgcaaaatgaaaatgccaatttgatgttcgatcagctcatcaaaatgaaggaagagattcagcataagcaggaacgctttgaccagttgaagcatcacatccaaatgctgatgaaagatgttgagcgagctgtgtttagtcgtggctctgtggtgtggaagaaagccaaggactccatcagtctgaataccaaggcattgcttcagcatcagcctgaactcattgagctttatccacttcagaagcaaggcggtcgtcgattcaacatctataccgactaa

SEQ ID NO: 66590 - DNA, 1047 bp, Acinetobacter baumannii
atggcacatcaagttgaaacaatggcatttgtaggtcaaaccccttggcatggtttaggaaatcaactgacccgaaaccaacctatagaagtatgggcggaacaagcaggaatgaactggaaaatcgaatcttccaatgtcacttatatggcaaagaatgaacgtggacaaaatatcctgatgccttatgaagaacagcgagtgctttatcgttcagatactcatgagccgctctcggttgtgagtcaacgttaccaagaagtacaacccaaagaaattctagagttttaccgagaccttaccgagcaatcgggctttgaattggaaacggcgggagtcctcaaaggcgggcgtaagttctgggcattggctcgaacaggacaatcagctgcactgaaaggcaaggatgttagtaatggctatattttgttagcaacagcatgtgatggcacgctggcgaccacggcacaatttacctcgattcgtgtggtgtgtaacaacactctggcgattgccttacgtggacagaatagtagtgctggtgtagtgaaagttccacacagtaccaaattcgatgccgacaagattaaacagcaactaggtatttcaattaaaacttgggatgagtatatgtatgaaatgaagcaactgagtcagcgtaaagttacacaaaccgaagcagcagcgtatttcgatgcggtgtttaacaatactagcctgagtccaatagaacaggatgaaggcattattcagttctaccgtaatgtggcatcacaagccaaccacataaacaaagctgacaacaagactgaaccgaatggacgtgcgatgtctaaagttatgaccatgtttaatggacatggtcgtggagcagaactgagttcagccaaagacaccgcttatggtttgctgtgctcaatcaccgagttcaccgatcacgaacgtcgtgccatgagtcaggatcaccgtctcgattctgcatggtttggtgcgggggcaggccttaagcaacgtggattggaacaagctttacgcatgttgacctaa

SEQ ID NO: 66591 - DNA, 330 bp, Acinetobacter baumannii
atgaaaatagagaatgattcaccgagcccatcaccagaacaacgcaaaccagttggtcttatcatctgttatcttttactgggtttacctgctagcctgactatcggtagtttgatcgctcaagttctgacaatcaatgtatccaattttgaaggtggtcgcggttatgcgtgggtttggatactgatgattatctcccctctaacctatctcgcttgtttgattgctttaccaattcttataaagaaatatattaatgctctttctactgttgtaatcgtgtttggtatcttaagtctctttagcttaagttttttagcatcactataa

SEQ ID NO: 66592 - DNA, 450 bp, Acinetobacter baumannii
atgaatgcacaaaaaggttttacattaatcgaacttatgatcgtggttgccattatcggtattttggcggcaattgcgattcctgcttatcagagttatattgcaaaatctcaagcttctgaagcatttacattagcagatggtctaaaaacaactattgctactaacttgcaagctggtacatgtttcgctaatggttcagctgcagcaacagcaactgactcagttacgggtaaatatggtaaagcagaaattttagcagatacaacgtctggtagtaatggatgtgggattaaatatacatttaatccatcaaatgtatctgctaagttgaaaaacggagttattggtattgctgtaagtgaaaatggtgtattgaaaaaatctacagtaacagcgacaacttctacattaaatgaatatttaccacaatctttctctggttcttaa

SEQ ID NO: 66593 - DNA, 2421 bp, Acinetobacter baumannii
atgatttacaaaaaacagaatgcggttgagtcagcaggaacttttgaaggtcctcatgcacgtatatatgctcgtgttgatggagatgtaaaaaccgaacaagacttaaaaaatattgtagttcaggttggatcacacaatattcatttaggagatgttgcccatattagtaaagggttcattgaccctccccaaatctcaatgagacgaaatggtgaacgagtcactggacttgcagtttcaatgacagaaaaaggcgatattcttgctttaggaaaacagctcgatcaacgtattaaagaggtacaagaagccttacctgctggaattattattgaaaaaatagtagaccaacctagtcttgttgaacattcggtgaatgagtttctcggacactttgtgctagcactagccattgttttagctgtgagtttatttgctttaggtatgcgaacagggattgtggttgctttatctgtacctctagttttaggtattacctttttcttgatgtggcgcctagatatcaatttacaacgaatctcgttaggtgctcttattattgccttgggcttgttagttgatgacgcgattattgcagtcgaaatgatgcaagttaaaatggaagaaggtctggaccgttttaaagctgccagttttgcctggagcagtacagcttttccaatgctaacaggcacattaattacagccgcgggctttgtcccagttggctttgcattatcttcaacaagtgaatttaccggatcaattttttgggtcgttgggatttctttaattgtttcgtggttggtggcagtattatttacaccctttttaggtacagttttacttcctaaaatacaagcccatggttcccattcctcacaacactcttatagggataaactctcacaatggtttagtcataaaattgcatggtgcgtcaaaaacaggaaatgggttttactggcaaccgttctcagctttattttatctttaattgcatttcaattcgttcctcaacaattcttcccagattctccacgtgaagaaattttaattgatgtacaactggaagaaggcgctagctatacagcaactttaaatgcaacgaaacaggttgaaaaattactttctagtgatcaacgcgtccgcgatttcacagcttatgtgggaactggttctccccgtttttatttatcgcttgatccggaaacacctaaaaataattatgctcagttaattgtttatcctaaagacattaaacaagcgagtcagctaacttctgatttgcataatcgtcttactcaacaatttccgcatatccgcacacgggtttaccgactagagttaggaccaacagtcggctatcctgtacagtttagggttcgtggtaaagacccagaaaaagttcgtgaaattgctggcgaagtccgtgacattatgcgtcagcatccaaatgtacgcgatgtcaattttcaatggaatgaacgcagtaaagccatcagatttatcattgatcaggaacgcgcccgtagtttaggaatcagttcgcaagatatttcacgtaccctacaaatgttattaagtggttatacagtcacccaaattagagaaggtaccgaactaattgatgtagtagcaagagcaaaagcagataatcggcttgatacaactcaaatgggtcaaattatgattcgtgcatctaatggaaggaatattcctctcgaccaagtcgctgaacttagacccgtattagaagaaggtggaatctggatacgtaatcgcttgccaactctcagtgttcgtgctgatgtaaatggtgctcaagccccagatgtttcgaagcaaattgtacccttgttaaatgaccttcgtaaaatgctgcctattgggtacagtatcgagactggtgggacgattgaagaaagtgctaaagcggatgcagcaattcaatctgttatgcctgttatgttattattgtgggcgatattcttaatggtgcagctgcaaagctttagtcgaatgtttatggtggtattaaccgccccacttggcatgataggagtaagtctagccctattaattactcgcgcgcctttcggctttgttgcaacattaggggtcattgctctagcaggcatgattatgcgcaattcagttattttggtggatcagatagatagaaatatttcgactggccaaacaccggaacaagcaatcattcaagccactgtcggacgtactcgtcccgttctattaacagcattggctgcaattttagcgatgattccccttacactttccaccttatgggggccaatggcaattgcaattatgggcggtttggccgtagcgactgtactcaccttattctttgtaccagcgctttatgcagcttggtttagggtaaaaagctaa

SEQ ID NO: 66594 - DNA, 726 bp, Acinetobacter baumannii
atgtcagatgaactatttgtattcagctatgacgatgatgaagatgcattaaatacgctcgctagatatcaccaaacaactaaggaacatattctttctagatggagaaaattgaaaagactttatagagaataccagcaaagtcgtaatgaaactttctttctattggcaattattgcttgtttgggaactgatccattagatatctcaaaccctgcttttaagatatttttttatcatcggaccggttctgatggcactaaatcatggttttcaaatggtttacttaattctagagatggtatttctagttttgtttcaaatattaactcattattccctcatttagattttcaagaatatgaaagtgcaatgttagggaaagatacccaaaaacatatgtcaaaaatagtaggaccattcgctttttatcgtaaaaaagatgctatagagaattcttatcagagatcatttttaaatctacctgaagtactatttgatgttgctaataatgataaggtatatagttatttactaaaagaattagaacctaccgttgttaagttctgggttgagaaatcaatagattatttagattcatatatagtttcttattgggaattgttattgggtgatgatgagagaagtacagatgtaggaagaggaaaaaatattccttcagaaaatattgtagaaattattactttaccaaaatttcaatcataa

SEQ ID NO: 66595 - DNA, 126 bp, Acinetobacter baumannii
atgaaagattgggtctatttttatattgaacataccattaaatatggtgaaccattctttaaagtttcaggttggtcattaggtttaaggagtaattattttgttgtaagtatgtcttggagttaa

SEQ ID NO: 66596 - DNA, 144 bp, Acinetobacter baumannii
atgaataagcaatggataaagatgagtgtattggccttaagtatgagtgccattacagggacaatttatgccgaagatcaagttcaacaaacacaagtggaaccatcaaatcaaacctccgatgggggaggtgagataagataa

SEQ ID NO: 66597 - DNA, 222 bp, Acinetobacter baumannii
atgaacatcattttaacggaaactgatctcgacattgctcttgaagccggtgatagctaccgagatattcttgatcatgtcgcctatttgttaattgataaagctttaattaagtcccgtggaagtaaagcccaagccgcaacgatgttaaagatgaaccggggcacactaaacaaagtgttaattcgagcgaaagcaaagaaggaggctaatcgtggataa

SEQ ID NO: 66598 - DNA, 240 bp, Acinetobacter baumannii
atgaaaaaattaatacttatttttttattattaactggctgctcttcctcaaatgatgctgtaaaagctttaaaagcaaatggattcactgacattgaaacacacggccatgctttttttaattgcagcaatgatgacacatttgccacaaagtttactgcaaaaaacaaagatggccagaaagtaacaggcgctgtgtgtagcggttggcttaaaggctcaaccattagatttgattga

SEQ ID NO: 66599 - DNA, 285 bp, Acinetobacter baumannii
atgagcaaaacaataagtgaagtgaatgttaaatctagccgttttgaaggtacaccagatcaagtagcagtgcatattttccaagaggttatttgtccaagtacagaagcactttataaagtcaatccgcaagctgcagctctttttgcatatcacatttttggtttagccatttcacattttgctgaacttcaaagcactgagcgtttggaaaaggttgtgaacgaaattcttcaaaagcttttaaaacaattaaaagctgaacgtaatgagttaaagcattga

SEQ ID NO: 66600 - DNA, 291 bp, Acinetobacter baumannii
atggaatatgcaagattagaagagttgtatgaagattttattgaacatcccagctatgagaagttaaagcaattagcatcgtctgattatcctaaagataatataggaaaaatcatgatgttcttaatagcgaaatttaagtgtaagaataagaaactaatatttaataatgattttaaaataaacgttgatgataagttagttattttagacttaacacaatctcctgattttgaggaccaagataaattccttgcttggcttcatcaacagatttttgaacaaacctaa

SEQ ID NO: 66601 - DNA, 1602 bp, Acinetobacter baumannii
atgaacttgtccaatgaaattttattgaaagtaaagaaaaattttgggacaccaatatatgtttatgatgaatatcagttgaaaagcagctttcaagagttacgaaatgcattaccaaagtgcgttgatattttttatgccctcaaagttaatcctaacttatcaattgttaaattaattaagtcttatggtggaaacaccgaagtatgttctttaacggaactagaaattgcactaaaagcaggtgtgaaccctcaaaatataattttcttgggaccaatgaaaaaagaagaagaacatagacgcgctttagaattaaatatttttgctattgttgttgaatctgaagaagaacttaaaaaattatcagatttagctacaaaaatgggggttttagcgccagtagcaatacgtattaatccgaatttctcagcatctggttctccatggaaaatgggaggtagacctacacattttggtattgaagaagaaacggccataaaaaagatggggagttacgcaaaacttcctaatattcatctaaaaggacttcatgtttataatggaacaaaaattttagatgcacagtctatctacgacaactcaaaatatgttttggagctatttgaatctatttcacgtttgtatggattagacctgacgatggttgatgttggaggtggtctgggtattaagtatcatgaaaatgaaaaagatctagacatcaaagaattaacaagattattacatcctttattcaatgactttcacaaaaaacatcctaaaactcgcatcattatggagtcaggacgtttcattgctggtaaaagtgcggctctgttagtgactgttgataatatcaagcaaaaccatggcaaaaatttcgccgtaaccgatggtggaacaaactgccattcagccgctgtgggttctggtcaggttttaaaacgaaattttgagattattaaagttactgaccaaaaatcaaatgaaattgaaacctaccatgtttctggaccattatgtaatcctgacgatttattagcaaaagatataaaacttgaaaaattaaaatctggtgatcttcttgcagtattatcatctggtgcgtatggggctacggcttccccaacattatttcacggtcatggctacccagcagaagttctgtactcaaatggaaaactaaatttagtacgttatagagatacagtcgaagatattatttcgatgcacaccgatatttcattagagcaactgctaggacaaaacaaagtcattactgaagaaaagcataatgaagtcattacagatgacacacagcgtatcgttgccactattgttagtaaaattctaaaattacctcaagacaaaactattcttgcaaattctcatcttcgtgatgatttggggattgattcactttcttctgtagaaatattggtcgctttagaagaccaaatcgaacatttctttgttaatccagaaacgatagaacctaagcatttcaatacaattgaaacacttgcatcttatatcgaagctgaaaaaaaccgctttaatcaagttgagatgaaggagcagtgtcatgcaaatgtataa

SEQ ID NO: 66602 - DNA, 1593 bp, Acinetobacter baumannii
atgcaaatgtataatattttgccgcatcacactttatcttatatcgcacgtaaatatgctgaaaaggtagcaattgtagagaatggaaactcacattcttatagcaagattgatgagttgtcttcgcgcttaagtggctatttacaagctcagggtcttcatcgtggtgatagagtagtactttgtttaggaaataaagtagaaactattattgctttttggggtgtactgaaagcgggctatgttgtatgtaatgtgggcttagatacaaccaccgataaattaaattatattatcgagaattctcaggcttcaattttgatcaccaatgaacaaaagtttcaagaagtatctgtagcgtctaaaagtattctatttaaaagtgttgttgttaccaattcattagtggatcctgatgtagattcatgggagctagcaacttcttacaatgaagtagaatatctgaataataatattctcgatattgatttagcagctattgtttatacgtctggctcaactggaacacccaaaggtgtaatgctgacacatagaaacatgtgtgcagcattagattcattgaatacttatctaggttatcaagaatcagatcatattctttgttcactgccattatcatttgattatggtctttaccaaatgattatgtctatgagtaaaggtgcaacgttattcctcgaacaggaacttacatggccgttatttttaattaaaaaaataaaacaacataagataacagtcattccatttgttcctacgatgctatcgcttctctatgaatattcgcatagatcgggcgttacctttcctgatgtccgaatcgtaacaaatactggtgcagcactgaaatctcatcacatccaacagatgaaattactctttccgaacgcacaaatattctctatgtatgggttaacagagtgtaaacggtgcacatatctcccaccagaccaaattgacaataaacctgatagtgttggtatcgcaattccaaatacagaaatgtggttaatagaccctcatggaaacaaaattaataagccaaaccaaatcggcgaacttgtgatacgtggagcaactgttatggcagggtactggcgcgatactaaagcgactcaagaaaaacttaaaccaggacctttgcctaatgaatatgttttacatactggcgatttgggccttcttgatgaagatggttacttgtacttccgtggtcgcacagatcacgttatcaaatctcgtggtatgaaggttagccctgttgaaattgaaaattatttctatagtttgcctaatattgaatcagctgttgtcgttggtattgaggatgagaacttaggtgggactttacatgcttttattcaaatagctgataataaaaatattaacgagcttgagctcttagaaaaatgtagaaatgatttggaacctcatcaagttccaaatacgatcagattcttaaattcgtttcctcgtacttcaaacggtaaatttgatttaatccacttaaaacaaattattgagagcgaattagctgacgaaacaacctcaagatcaaatgtcgctgtttaa

SEQ ID NO: 66603 - DNA, 918 bp, Acinetobacter baumannii
atggatatgatgagtttaacttttaaagttttacctgctatagagcgtgaattcacgatgaatgttaatggcttagatttagcagtaagaacttggggggataaaaaaaatcccccaattctagcaatacatgggtggttggacaattgtgcatcattctcacgaatagctccctacctagatcactactatattgtggctcctgaccttgctggacacggcaaatcagatcatagaaaaccaaatcaagcatattacttatgggattatgcaattgatttatctatctttgtcagaaaaatggggtggaacagttattctattttggctcattcaatgggtacaggtgttgcatcaattttaaataccattagtaaaggaataaaacgcatagttttcattgatggtatgggagctccttttaccgtctcggctgaagatgtcgtgcagcatttgaaaacatcgcttcgactttctgaaatagcacatttgaccaaacttaacgggttttcagaaaagaaccaacctcagttttcaagtatggaggttgcagtgaaaacccgccagaaagtagttggtggatttatctctttagacagtgccagacggcttgcagaacgtgatcttcgagcagtcgaatcaggctatcggtggcgacatgatcctcggcttactataccagaaccaattcagttgactgatgcacaagctggtcgctttctaaatcaaattgattgtcctttgactattctgcttggaacaaatggtttatttgttggtgataaatttcattcgaaatcagagtatttaggaaaaaatgcaaaagtaagctggtacgaaggtggtcatcacttacatttagaaaacttaagtcacgagatgattttggatatcaaatcttcttttgcaaatcattga

SEQ ID NO: 66604 - DNA, 678 bp, Acinetobacter baumannii
atgaatgacatttggatcgctccctcaattctagcagcaaatttcgcccgtttaggtgaagaggtgaagtcagtattagattctggtgcagatatgattcaccttgatattatggacaatcactatgttcccaacttaaccatggggccccaagtttgttctgcacttagatctgaaggaattcaagcaccgatagatgtacatctgatggcttcacccgtggattccttgatcgttgattttgcaaaagctggtgcaaactatatctctattcaccctgatgccactattcatttggatcgttcaattcagctcattaaagacttaggatgcaaagctggtttggtgttcaacccagctacttcgcttgattcatgcaaataccttatggataacatcgacttaatgctcattatgtcggtaaatccaggttttggtggacaaaaatttatacctgctgttcttcctaaaattgctgaggcacgaaagttaatcgattcaagtggtagaaatattcgtcttgaagtggatggtggcgtgaatgtgagcaatatcgctgaaattgctaaatggggcgcagatacatttgtagctggaacggcgatctttaatacttctaattatcaagaagctatttcagaaatgaaaaatgctgcgaatcataatcgaattagctaa

SEQ ID NO: 66605 - DNA, 1065 bp, Acinetobacter baumannii
atgacgaaatttgcaccgcttaaaaatactaactttattagagcattacaaaaacaacccgtagatcgaacaccgatctggatgatgcgccaagctgggcgctatctccctgaatatcgagcagtacgtaaaatggcaggaaatttcattaatttaatgaagacgcctgactatgcaactgaagtaactttgcagcctattcgacgttatgatttagatgcagcaattgtattttctgatattttgactattcctgatgcaatgggtctaggtttatattttgaagaaaatcgtggacctaaattcaaaaaacctatacgttctgaacaagcgatcaataatttagagattccttcccaagaatctttatcttatgtatatcaagcggttagccaatgccgtcatgagatcaatgggcaagttcctctgattggtttttcaggaagtccgtggacactggcttgttacatggttgagggacagagttcaaaagattttataactataaaaagtatgctttatagcaacccgaaaatcttacatcaattactagaaaaaaatgccaaagccgttgtacagcatcttaaatgtcaggtggaggctggtgcacaggccatcatgatgtttgatacgtggggagggttactaagccgagctgcttatcaagaattttctctcaggtacattagctttactttagatagcttaaaaaaccagttaggtgagcgtttagttccttcaattgtctttacaaaagggggtggtcaatggcttgaagaaatggcaggatgtggagctagtgctttagggctcgattggatgactgatctggatttagcacgtcagcgagtgggttctagagttgccttgcagggtaatctcgaccctgcagtattacttgccccaaattctgtaattcaaaacgaagtgaataaagttatgacatctttttatgaacaacaaaaagatgatacaggttttgtgtttaacttggggcatggaatttcgaaagaaacaaacccagactcggtatccgtgttaattgaggctgttcatcgtttttaa

SEQ ID NO: 66606 - DNA, 438 bp, Acinetobacter baumannii
atgagttcgatgctagatacatttaattttgacaaaatgctctgttttacactgtactcgacgacgaatgctatgatccgaaactacaccaaaccattatctgaacttggaataacatatccacaacttttggtgttggctgctctttggaatcaaaatcacttgtcatctagcttattaagtgaacaaacgctgtttgatcttggttcgctcactccaatcataaagcgacttgaaaaagcgggttttattgttgtatcagtggacgcgctcgaccgtcgtcgaaaatatatttcattaacggagtcaggtaaggatttaaaaggtccagtaggtaaaatatttgaaaatactaaatgcaaacttaatcttacttcaagtgaggtcgactccactttgaaagtttgtcagaaaattaagaaggagttaaagtactaa

SEQ ID NO: 66607 - DNA, 552 bp, Acinetobacter baumannii
atgaatattattgctggatttcaaaacaatttttcagaaggcctatataccaaatttaaaagttaccgctacagggtatttgttgaatatttgggttgggagttgaactgtccaaacaatgaagaactagatcaatttgataaagtcgatacagcttatgtcgtggctcaagacagagaatccaatatcattggttgtgccagactactacccaccacacaaccctatttactcggggaaatatttccccaacttctcaatggaatgcctattccctgctcaccagaaatttgggaattatcaaggttttcagccgtagatttttcaaaaccgccttcctctagcagtcaggctgtgtcatcacctatctcaattgcaattctgcaagaagcaattaattttgcaagagaacaaggcgcaaaacaactcattacgacttctcctcttggagtagaacgtttattacgtgctgcgggttttcgtgcccatcgtgcaggtccaccaatgatgattgatggatattcgatgtttgcatgcttgattgatgtgtaa

SEQ ID NO: 66608 - DNA, 417 bp, Acinetobacter baumannii
atggttagcataccccctcatttctctatctcaacagatggttttattcgaatgaacgaaaatcaactcatgagttatcctctccaacacatcatctctaccgttgaatctagacatactgaagcgtctcaaattttctattatggttttactgaatgggcaacctcacaaactccagctttaagtaccggatgggattgggaatttattgagcaaaatggcatcacgagcataaagcgaattggcctgcctcgaagcaatatcatgattgttgatctatctggtaaagacattggatatgatgtgactgaaatactaattgaaaagagaatcgatactctgttctgggaaccgtttatttatgcccaaatcaatacgtcattaaccaagtcttcattaagacaaaccttctcttag

SEQ ID NO: 66609 - DNA, 240 bp, Acinetobacter baumannii
atggtttgtccttttagttctttgagcgatgttacttttgagtcaattggaacaacaatcgcattaccgctaccattaatactgcctgacaaaggtgctaaaaatatgctttctttcccagcttttttaaatgccgctaaattattaaccgcaggaaagtcagccattgctcccaaatctaaacgcccagccaccatctcactggtaagcggtgcaccagaggtaaagtttttccattga

SEQ ID NO: 66610 - DNA, 1386 bp, Acinetobacter baumannii
atgagaaactctcctctaaattgtggaaagttaatttttgatattagggtttatgaccgtgatcctgaatcactgttatcattaattaagcgaggaagcctaactaaaaatattgaaaatactcaattagaattgggtgagcctaaggggaagaaaaaagttcaagagtttactaagactgatgcgaaaaatttattagatgaatacaatggtttgggagtttttagaaatggctttcgtcttagacctttaggtgatcctggatatgattggttactattagatagccgacgtgttcaaaatccttcaatgagaatcggtattaaccaagtaattggttatgtaaagatacaatcagaagaagactctaatttaatagaaaaaagtgctcgtgatggtttaaaagataatagagcctatgaggatttaatgaatgctactcagcaagtaattgctgagttagaaacccgaagatttaattatagaaaaattaatggactttcgagacctgctttaaaaattgaacaagagttcgaaaagttatttaattttgatgatttgaagtttgatattaagaaatctttagatgaagagggtgtctctttggagacctctgataaaattttaaaatctatagatgagaaatcaaaagagcagaataaagccgtagaagaaatacgcaaagccgtttctgtataccagactcaagctatgttaggaaaaattataaatcagattttgcatgaaggcagaagacctttaaatttctttaaaaacgaaatacctagttttaaattcttcttacaaagttatattgaaaacaataatgaagatgatttgaatgaaattttgagtatagctgaaggaattaataaaaactcaaaagattttgtagagctttttagcaaaatatctcctctagccgctgcaaaaagagggaatagaaagcaagagtttatctataaatgtattgatgatgctttaaaattattttctaatgatttaaatattttaaatattgaggttaaaattaatataaataaaaatcaaaccttactttgttggaagcaagatatagatattatatttgcgaatttaattgagaatagtatctattggttaagtcagattaatgagtctcgtaaaattgagatatatgaaggcttcgatgaaggtaaaccaataattttatataaagacaatggacctgggattgatgtagatagtattaaatcaaatgctatttttgaaccaggttttactaaaaagactgaaggtactggattggggctttctattgcaggtgaggctgctgatagaaatggtttggagttaaaagcacaagagtcagatgagggtgctttatttttgttgttaggaaaataa

SEQ ID NO: 66611 - DNA, 1164 bp, Acinetobacter baumannii
atgaattatttaaaattagctttaattgaagatgatcaaactacaattgaaacttttgaaagatcttgtaaggtttttgagagacaggttgaagtcaaaatagatattattaaatgcagaaatttatctgaatttcaatcaaaaattttagatattataggttgtgatggattaattgtagacatggcattaacacaggcttcagaaaatgaagaaagtggtttgcaagtaattgaatatttttctaataataaaattattattccaacagtggtctttactggtacacaagatccggtaatatcaagccatccattcattgatataatggttaaaggggaggttgctaatgaagaaattatagataactttctaaaaataaaatcttcaggaatattagatattttaggggggaaaggattgttaaaagaatacatgtataatgtttttcataataacattaataaacaaaagaaaagatggattgaccattcaggaaataacttggaagaaacaaaaaaagctttattaagacatacaataaatcatttatttcaatatcttgaagaagattcaagcaaagtttttgttgaagaaatgtatatttatccgcctatttcaaaaatcataagccctggatgtattgttcgtaaagataaaacagattatttagttcttacacctgcttgcgatctcgtacctagagcttacaaagaaaaagatgaaaatggagaggttaaaaaatcatctgaaggggagcctataattaccatgaaaccaaaaactaattgtgttcttttagctgaaattcaacctttagaaaaatcattacaagaagttttagaaatggataatttgtcccgatcacctaaaaatattaaaaagtgtttagataaaatttttaaagatgtcttggagtactatcactttttaccagatgcttttgattttaaggggggaactgttctatttagatctattacttcagtcgaacctgaaaaattagctaacgaatatagctcaattataattcgagtttctcctttctttttaaataatattcaagctagattttctcgctactatgcgagacaaggacaaccagatattgattattctagttttatggaagaaaaaatagctatgtatggcgtgaatacttaa

SEQ ID NO: 66612 - DNA, 396 bp, Acinetobacter baumannii
atggatgaactgatttcagcagctgcaacaattcaaggtgcacaaattcaagctaattatgctttatgggctgctattgtaagtggaggagctttacttttttcgatatggttaaccgcaagagctactttaaaagcacataaagcagataagttagcagaagctagaagagatatatatttagagctaatcagaaattggtatagttttatattggtttatagctcttatataataattaaaaataacgaagatatagatagtcaaaagaatgagtttaaagatagatttgttgcttcatacagacaattaacaacatcttttcatgaatcaagttttatttccgaacggctttgttgcacaaacctatctctaaaggcttattccacaatataa

SEQ ID NO: 66613 - DNA, 570 bp, Acinetobacter baumannii
atgaaaaaagtttttatttcatatagtcgaatggatgtcgaatataaaaatgaacttgtaacttttttaaagcctcttacatcaagtggacatgaagtctgggattgtggagaattggaagttggtagatgggatgagcaaattcaagaaaaacttgagcaagctgatctagtaatttgtatgttatctataaacttttttaattctaattatattttagaaaaagaacttatccctgtccttcaagcggctgaagaggataaaaagcagattatgtgtatcgttgtaaaacattttccttgggctagcttccatcatcttggaaacaaagctaagttatcaactcaaaatctgaatttgatagaaaatacacttcaatctagtgatattgtctcagctagagctaccattactaattatcaattcttaccttacaaatttcatgatgctagttctattaacaatgagaatattcaacgtattactcctttaagtaatatgtctcctgctgaacgagatgatgtgtatgttgatatttttgaacgtgtcataaaaactttaggtatatag

SEQ ID NO: 66614 - DNA, 417 bp, Acinetobacter baumannii
atgagcatttttaaaataggtaataactcaaagattggcacatttgaattcaaagataatatcaaaatctctgactcaaattcagatgaagggtctatggcatcaattggcgataatattgaaattgaagatttaagagtaagcggcaatgaacaacatacttctgagagctataagacaaagtgtatagaattaagaaaaactgttcttggtgagttaaatgctgctatttcaaatctagataatgagaacgaaaaaaaatccttacaagctttagtaattaaaatggagcagttgcctcaaaatataaagggccagtggttttttgatagggcattagaaaacctcaaagaatttgcaactgatcttggagcaaaggttgttgctgaaattgcaatgaagcatatgggcttttaa

SEQ ID NO: 66615 - DNA, 924 bp, Acinetobacter baumannii
atgatagttatagcctcaactaaaccttatgccaaaaaaatgttgattgatgcttttcagcaatatgctgcagttgggagttattgcctagttggagatgagcaggccaaggatgcgaccacagctgcatgttggtttcctgattttgataaattaaatcagttacctcatttaaaattaattcattcaatgggcgctggcattgagcatcttgatcttaataaaattcaaccttctcatcaggtatgtcgcattgtagataaagatcacaaattgggaatgtttaattatctcaaatggggagtcttatattatcaacgttatttcgatcaatatttacaacaacaaagaaaatgtatttggaaacaatttcctcaattaaccgaatccgatatccaaattggagtcatggggcttggagaattaggagcatttgttgctgagaaattagcaaatgaaggatatcaggtttcaggatggtcaagatcaaagaaaatattgagtgaagttcagtgtttttctggtctggatgagttcgatagtttcttaaaacaaagtcagctacttattaatctattgccactcacaaaagagacttttggaattttatccaaggaaaattttgtaaaactgcctaaaggtgctgtgattataaatagtgggcggggagcacatcttcatattcaagatctaatcgattcaattaagtcgaagcatattcgtggagctatccttgatgtgtttgaacatgaacctttagattatgcaagcccattatggaaaatcccagaaatagttattactccacatattgcttcacatgctcatttagaaaatgtagtcaaacaaatagtggaaaacgatcagcgaattagacaaggtctaccattattgaattgtgtagatataaaaagaggatattaa

SEQ ID NO: 66616 - DNA, 972 bp, Acinetobacter baumannii
atgattgatttcttaaaaaatgttattaaaaaaaatggatatcaaaataagcgaggcgttaccaagagttttagttgggaatacctagctgaaggagtattagaatgcattcctcataaatcttataaaaactccatagtaatatctgcaggaattcatggaaatgaaaccgctccaatagaaattgtagatagaattgtcagtgatttattttctggaaaaataatattaaatgagcatgtattatttatcttaggtaaccctgaagcaataagaaaaggtaaaagatatattgattatgatctaaatcgcatgttttgtggaggatggagtcatttagctgattcgcaagaagctaaacgtgccaaagaaattgaaatgcttataaaagatttttttgataataagaaatctgctatatatagataccactatgacttacatactgctattaaaaaatcattcataccaacttttgcattgttacctcataagatagaaggtcatagtgcaatattattgaaaaatttagaggcagctgaacttgatggtttagtttttcatacaactaaaggtaaaacatttacaaattttactagtgacaattttaattcagctagtgcaacattagaattaggaaaagctaatccattcggaaaaaatgatttaataagtttttcccctatagatctagttataagaaatattattagtaataaagataatctagatagaaaaaaattacctattagtcgtttcaaagttatagatactataattaaaaaggatgagtcttttgtgcttaatattgaaggtgatattccaaacttttcacttattgaaaaaggcacaattattgccttcgataataaggataaatatcaatatttagataaaaatgtttatgtaatctttgtaaattcaaacgtaaaaattggacttagagcaggtttagtattagaaaaattttaa

SEQ ID NO: 66617 - DNA, 1476 bp, Acinetobacter baumannii
atgttcaaagctaacttatttataaacggtgtctggttacaaggcagcggtgcaacatttgaaaaaacaaatccagtcgataaccaaactgtatggtcaggtgccgaggctactgctgccgatgtagagcaagcttgccaagcagcgcgtactgcgtttccagcttgggcgcgtttaccacttgcagagcgtgtagcgattgttgaaaaatttgccgctttgcttgaagaaaataaaaagcatttagcagaagtcattagccaagaaaccagtaagccattttgggaaacattaactgaagttcaatcaatgattggcaaggttgcgatttcgattcgtgcttaccaccagcgtacaggcgaaagctcaactgaaatggccgatggcgtagcatctttacgtcatcgtccgcatggtgtgcttgcagttttcggtccatataacttcccgggccatctaccaaatggacatattgttcctgcattgcttgctggcaacacagttgtatttaaaccaagtgaattaacaccttggactgctgaagaaactgtaaaactttggcaacaagctggtctaccaaatggtgtgatgaacttggtgcaaggtggtcgtaccactggtgaagcgctagctgcctcacatgaaattgacggtttattgtttaccggaagtgcgaacacaggttatcacttgcataagcaaatggcaggtgcacctgaaaaaattcttgcgcttgaaatgggtggcaataatgcattgattattgatgaaattgttgatgttgatgcagtagttaatcttgctattcaatctgcttttgtttcggcaggtcagcgttgtacatgtgcacgccgcatcttggtaaaaaatggtgctgaaggtgatgcatttattcaacgttttgttgaagttgctaaaaacctaaaagttggtcgttggaatgatgaacaacaaccatttatgggtggcgttatctcgtcggttgctgcaacaaacatgatgcatgctcagcaaaaattacttgagcttggtgcaaaaagtttattagcaatgacgcgtcctcaagaagacagctcgctacttactccgggtattgttgatgtaacaggcgtgaaagatattccggatgaagaatattttggtccgcttaccaccattcaacgttatgacaactttgaagaagcattaaaaattgcgaatgcaactcgctttggtttgtctgttggtctggtttcaccaaaacgtgcactgtttgatcaagtacttgttgaagcgcgtgccggtattgtgaactggaataagccattaacaggtgcttcaagtgccgcgccatttggtggtgtaggggcgtcaggtaatcaccgcgcgagtgctttttacgctgctgactattgtgcttggccaatggcttcacttgaaagtgacagcttacccttaccagaaaaattatctccagggattatttttaattcttag

SEQ ID NO: 66618 - DNA, 1206 bp, Acinetobacter baumannii
atggctaatattacacgtaaagattttaatcaatatatggttccagtttttgcaccggcaaatttcattccggtacgtggcgaaggttcacgtatttgggatcaagaaaataaagaatatatcgattttgcaggcgggattgcagtaaacgcattaggtcatgcgcatccagtggcagtaaatgctttaacagaacaagcaacaaaactttggcatgtaggcaatggttatacaaatgaacccgttctacgccttgcaaaacaactcaccgaaaatacatttgcagataaagtattcttctgtaactcaggtgcagaagcgaacgaagccgcattaaaattggctcgtaaagttggtttagacagcggcgttgctggcaaaagtggaattgtggcatttaataatgctttccatggccgtactttatttaccgtttcagcaggtggtcaacctaaatattcacaagactttgcaccacttccaaatggtatcaaccatgttgcctttaatgatttagaagctgcaaaagcggtcattaatgaacaaacttgtgccgtgattgttgagccgatccaaggtgaaggcggtgttattcctgctgacatcgaatttttaaaaggcttaagagcactgtgtgatgagttcggtgccttactgatttttgatgaagtacaaactggtgttggccgtacaggtgcactatatgcctacatgaactctggcgttattccggatgtattaaccactgcaaaagcactaggtggtggttttccagtcggtgcaatgttaacaacagataaatttgctccgcatttctcagtgggtacacatggtacgacttatggtggtaacccgttagcgagtgcggtagcaggtgcagtatttgagtttattaatacacctgaagtacttgaaggtgtaaaacatcgtcatcaatatttcctagatgcattaaataaattaaatactgagtacccgatttttgaagaaattcgcggtgaaggtttattgattggttgtgtattaaaagctgagtatgcagggaaagcgaaagacattacgacttgggcgggcgaagaaggtttgcttgctttaatcgcgggaccaaacgtggttcgttttacaccgtctctaattattcctgaacaagatattgatgaaggagttgctcgtttaaaacgcgcattggcaaagttggctaaataa

SEQ ID NO: 66619 - DNA, 1275 bp, Acinetobacter baumannii
atgtcagatctttcatacgtaaacgaacacagcgatgcatggcaaacttacttggcacaaattgaccgtgtagcgccatatttagaacacttagctgattatatcgatactttaaaacgtcctaagcgtgcgcttattgttgacgtgccaatcgtgatggatgacggttcgatccagcactttgaaggttaccgtgtacaacacaacttgtctcgtggtccaggtaaaggtggtgttcgttaccatccgaatgttgatttgaacgaagttatggcattgtctgcatggatgacaattaaaactgctgttttgaacttgccatttggcggtgcaaaaggtggtatccgtgttgatccacgtaaattatctaatcgtgaattagagcgtttaactcgtcgttatacgactgaaatcggtcacattatcgggcctcaaaaagatatccctgctccagacgttggtacaaatgccaatatcatgggttggatgatggatacttattctactagccaaggttacacagtaactggtgttgtaactggtaagccagttcacttaggtggttctttaggtcgtgtaaaagcgactggtcgtggtgtattcgttacaggtcgtgaagtagctgcaaaaatcaacttaccaattgaaggtgcgaaaatcgctattcaaggttttggtaacgtaggtagtgaagcagctttcttatttgttgaatcgaaagcgaaagttacacacgttcaagaccatacaggcactattttcaatgctgatggtattgatcttgaagcgttacgtgatcacgtaaatgcaaatcaaggtggtattggcggcttcactggcgcgcaatcaattgctgatgaagatttctggacagcagaagttgacatcattgttcctgctgcattggaaggtcaaatcactgttgagcgtgctcaaaaacttaaagctaagttgattctagaaggcgcgaacggcccgacttatcctaaagctgaagacatattagttgagcgtggcattgttgtggtacctgacgttgtatgtaacgccggcggtgtaactgtaagttacttcgaatgggttcaagacatggcgagctacttctggactgaagaagaaatcaatgaacgtttagataaattgatggttcaggctatggatgacgtttggaatacagcgaacagcaacgcttgtactttacgtacagcagcttacatcttggcatgtgagcgtattttaaaagctcgtaaagagcgcggtattttccctggataa

SEQ ID NO: 66620 - DNA, 1416 bp, Acinetobacter baumannii
atggaagtaacaaaaacagaaggtttgaactcccaagaaattaagggtgaaaattatttacagaagaaattggaaaatcgtcatatccaactcattgctattggtggagcgattggaactggtttatttatgggggcaggtaagagtattcatttatctggatcgtcaattattttaacttacatgattgttggtttttttatgtttttggtgatgcgagcattaggagagctgttactttcaaacgctaagtatcattcttttgcagatttcactggagaatatttaggtagttggactggattttttattggttggacatattggttaagttgggtaattgcttgtattggtgatgttgtagttatagggggatatttccgtttctggtttcaggatattccattgtggattcctgcatttggagcattggtattattgatagctttgaatgcaatgtctgtaaaggcttttggagaagcggagttttggttttcgattattaaagtttgtgccattgttttactgttgctagttggattgtggatgatcatgacaggatttgtctcaccaaatggagtgcaagcttctttacagaatgtaattgatccaacagttatatttcctcatggagccttaggttttatctctggctttcagattgctattttttcatttattggtattgaactagttggtgtgactgccgctgaaacaaaagaccctgagcgtaacttgccgcgagcaattaactctattcctattcgaattatgttgttttatgtattatcactaatttgtattatatctgtaacatcatattattatatttcaccagataaaagcccctttgtagagctattttcacttgctggattgcctgctgctgctgcaattattaattttgtggtattaacatctgcattttcttcagccaatagtggcgtattttctactagtcgtatgttatttggtttggcaacgaaaaaacaggcaccaaaccagctaaaaatactgtctaaaactaatattccgttacgtggattattgatttctgggttttgtatgttcgcaggggccgcacttttaatttttattcctgatgtcatgacattatttactatgttgtccacattatctgcaattttactaatatttatttggtcactaattgttttggcttatattttttatcgtaaaaaacgtccagatctacatcaaaaatctatttataaaatgccagcaggtattttaatgtcatatggttgtcttttattctttggttttgtattaatagcaatttttttaaaagaggatacgcgtattgggttgtatttagcaccattttggtttgtttggcttgctattgcatatcaatatagagatcaaattaactctattttttctagtaaataa

SEQ ID NO: 66621 - DNA, 918 bp, Acinetobacter baumannii
atgcaaacaacaaataaagtattaatggtaagacctgcggctttttacgcaaatccccaaactttacaaactaactcttttcaaaagtattatgaacatacaactgattctacctttcaggcacagcttgcttttgacaaatatgtgctagctttgcgtgaagttggtgttgatgtgatcgtaattgaagatagtttgattaatgagactccagattcgattttcccaaataattggtttagtacaactgctgattcaacaatttttacttatcctatggaggctttaaaccgtcgtcgtgagcgacgaccagagatcgtaagtcgtatttgtcaagagtttgttgtcaataagcacatagatttttcgccttttgagcaacaaggttttttctttgaaggaactggggtcatgattctagatcatgattataaaaaagcgtttatttgtcgttcaactcggagtgctgaagtagttggcagagaatatgccaagttatcagattatgaattattttggtttagtgcgacagatcgctttggtaaggctatttatcatactaacgtaatgatgagtataggaactcgctttgccattgtttgcctggatgctattcatgaccagactgaacgtaagcaattgattgctttattagagcagtgtggtaagtcaattattgcagtgagtcatgaacaaatggaaagttttgcatgcaatattttagagttaaaaaatgtaagccaaaaaccagtctatgcaatgtctactcgtgcttggagttcatttaatcctgaacagcaaaaaatgatagcagattatgcctctcttgttttagccccaatagatgtaattgaagatttggggggaggtggtgcacgttgcatgttggctgaaatttttttagctccacgtgaataa

SEQ ID NO: 66622 - DNA, 423 bp, Acinetobacter baumannii
atgtattcaacagacctgaaaattttaaatttattacgcgaaaatgcgagaatgtcgattaccgatattgctaatttactacatgtttcaagagctacagtacaaaagcgtatagaacaaatggaaaatagtgggctcattactggttacactgtaaaaattaaaccaaactttgagtccaattatattcgtgcatggatgaatatcatgattgaaggtacaaaaatgcaaaatattattaaagaattacgtttacagcctgtaatcaaaagcctacatactactaatgggaaatgggatttactggtcgagctccaagccaaagatctagaagagtttgatcaagctctaggtcatattcgtactattcaaggagtatacaatactgaaactagtatcttactttccacctataaaacctaa

SEQ ID NO: 66623 - DNA, 228 bp, Acinetobacter baumannii
atgaacatgaaatttatagcctataatccgaattttcgaaagaagattaagccagtagaacatatccaccaagaaagtaaggggtcttcaaagatatattacacagatgaacatggtaactttgtattggattttgctacaaagctcatattcgatccaaataaatatgaatctaatatggtggtagaaattgagaagcaaccttactatcttattggcgagtattga

SEQ ID NO: 66624 - DNA, 336 bp, Acinetobacter baumannii
atgaaagactattcagaatattttcgtgaagctgttgcttcttttcttacacacacccctaccctacaaaaagagcttgcaagcatcacggttaatgaagcagaaaatataggaactgcggtagaaatacttcgtacacaaatcacgcatgaaagatttgttgagcatacagctcaactaggcatagatacagttaatttggtactgcaattcattgatgtacacaaagatgaaaagaatcagattctaaaaaactatcaccagaagtttgctaattctctcaatattgagtgggaggactacattgtattgaatcctcatttatccgatctttaa

SEQ ID NO: 66625 - DNA, 1101 bp, Acinetobacter baumannii
atgaataacaatgatatagaccatgccagaaatgaactctttttcatgggatttccatctgatcatcaggaagacaaaacgaataatgaaaaaattccttatatcattgaacaactgggcatctatgaaagatatattcttgaccgctatagccatcaaaagcgcgactatatagacccaatctctatagaccctaatcacatcgtcagcaatgtaaataatgaagcattcaaatatgaatatttatacgataaaggagaatacactcgtgtcattactccctatgatgactatttatatcttagggatgaactaataaaaaacccttttgaaattggcaagatgccagaagaacttcttttatcttatttattttgtctatgcaaagatacccgtgagattttatggaatggcgacatccaagcctgcttatctcaaatagaaaaaattgaaaaagtaaacaaactacttcaagggcttctcaaaaacgcatcataccttttattctcaccagaggattgcggtataactaatcgtgagatgatgtatttctatcctttaggtcaacaagcaagatacgtggcagatcctgactttggcgaagacatgattgaattattcaacaaaaataaatctagccaactcaatgaatggcatcgtactttatttattaaagtcattaaagaaataagctgtgaaaagaataaaaaatggaacgcagtcaatgcaattgttaaagacccaatagtaaaaacacagtttcgtgaaatcatgaaagaccaacccaagcagaatttagattatgctttagcagggcgtcgtgactataaacagctatattcacaagccaaggacagacttgaaaaagaactaaaaaagaatgcttggttaaattcttatgcttccaatacggaacgccgttcccatgctcaggaaagactaaaacacttagacaagttaattgctgaacaagaaacactagaaaaaaactttaagcttgggaaatatacttttatcaaaagaaattcatattcagacgatgtgataagagaatggatcgaaaatgatgaagactttatcaaagaatttattcaagcataa

SEQ ID NO: 66626 - DNA, 1146 bp, Acinetobacter baumannii
atgacggagtttaaagccaagaaattgaggacattgatctgtgaaaatcaggtcacccttgcgccatctaatgtttatcagtcacggtttttatacagtgactttcggttagatcggatgctggatatcccctgctttgttcaggaatgtaataagacccagttgccagcagcaacggtcaaacagacagatcaaggtagagaatattttgaatatgaggactggttcaggccatttattaaaacacttgatgacctgataaacaccaatcctgatttcttaaagcctttcgatctgtgcgaagagactaaatgtttcttcaaaacattagatgcaatgaggagtcctccaagcctatacggcttgtttgaaagaaagttgagaggaagaaacccaagtaatttgaaacaacaggtcgagttacttaatgaatttattgaattgttacgtgaagagcttaacaaaccagccgtcaaggaggctatccagaacagagagaagcaacacaaagagaactttacgtcgtgtaagttgctagtgagcaagttattccagaagtaccgtcagttaggggttgtacatatagattttgcctatacgccagatcagcaagatttacaacacaatcatccaactgacctgaaacagcggtttcatggaccttatcagtttgagcgtcttaaacaacagatagaccaactccttgagaaccgacgacgtaataaaaccctaaaacagattaaagggtatctcttttactttggtcatagccttaaaaaaggctgctttgtgaaagtgatcttctttctggatggcaatacttgtcaggctgaggattacgtcaaatacctgtctaaatactggagcaggctgacgaatcaacaaggctgtacatatttctgcgacggcgactcaagccaatcccctactgggattagcctgatcaaagaaacggataaagaacaacgggagaatctcatgttgagtattcaatattactgtcagttagaacagttttttaggctgaaatatctaggagagaactcctataaacggttacagatgagccagcctcctataatcagtaaaggcaaagttaaagcaagtggtttaaatcagaatttgaatgtgaagaagggcgaatag

SEQ ID NO: 66627 - DNA, 1875 bp, Acinetobacter baumannii
atgatgaaaattgataaagtaattctaaaaggttttagaaattataaagatgcgacaataaattttaataataacactttaattattggtgaaaatgatgttggtaaaactaatctcatttatgcattacgcctcatgttagacagaagtctttctgaattggatatagagccatcagagttggattttcatgtacagggtggtgtccagtctgaaaatttagaaatcataattaaattctttgatattaaagaagaagctgcattatccattttgaaagaacacgtaagtgatgatggagaatgtgtttttaaatacatggcttctaaagaaaatctagattataaattatatcttggtcaaaatgagacagacttatctgaaattcaaagtcgttattatttaaaatatatcaatttaaagtatatttcttcccaaagagatttaagcaaatttattgctaaagagaaaaaacaattacttaggatctccaaaacaaagattactgaagaacaagaaaagcttgatcgagaaaacgtactagaaatttctaagcaattggttgacctagacgataaagttgcacaattagaatatgtaaaaactgctactcaagaagttaatttagaattaaagaaattagcttatgcccatgatgattatgatgtaaaactaaatgctagtggtatagaagtggatgattttattaataaattacaattaggggcaatgagcggtggctcaaatgttatgttgggtggtgatggacgtaataatcaaattttaattgctttatggaaggcactgagcgaatttgaacacgattcaaatgatgaagtagtgttttatgttgttgaggagccagaggcacatttacacccacatcaacaaagaaaattagctagttatttatcttcagaattacaaagtcaatgtttaataacaacacactctccgcaaatagcctcaagtttttcgccaagttctattattagattatttaagaaagatttctctacaattgcggccagtaatggttgtacaaaagaactagaaaaagcatgggaagaattaggttataggatgagcattatccctgcagaagcatttttttcaagtggtgtttttttagttgagggcccatctgaagaaattctatataaggaactgttgcttaaaaataaagttgatattgattactacaatttatccgtttttgcagttggaggaattcaatttaaagtatttgcagccgttttaagagctctagaaataccattttcattaagaactgataatgatattagtactgtagaaatgaattgcaaagttcatggttttaataaaaatgactctttaaatccttgctatgtatataagaaaattgaaattaattatacagatgaaaaatgtataaaatggcaatatctaggagttaatagatgctatggaatattaaatagagattccgaaaaatggaagcatagtctttaccctttaaatagagttaatattttgggtgataaacggtggaaagcctttgaaaagatgataaatgcacatggcatatttatgtctaatatagatttagagtgtgatttagtaagtgttgcttctgaagaaattaagaaggcattaggtaaaaaaaataataatagtgcagtagattttctcaaaaaaagcaaagccctaaatatgcaaatattaatggctaaattagaaaagaaaggctttgaaaaaatttatgaaagtgattttggcaagccgattaggtacttaataaatttattattaaaacaatctgacactgacactgaatctccagttcttattaatacgaactctgaaactgccaaagaagtggtcttgttatga

SEQ ID NO: 66628 - DNA, 1119 bp, Acinetobacter baumannii
gtgattgagacaccattatttgaaatttgtcgtccaaaacaatggaagacaatatcttcaaaagatttatcagaacatggttatcctgtttatggtgcaaatgggataattggatttcattcagagtataatcatgaaaagccaaccatcttaataacttgtcgtggtgctacttgcggcactattaatgtctctgtgccattttcttacattaatggcaatgcgatggctttagatgatcttgatgaaaataaagcttatatcaactacatttcatattatttgaaatatagagggcttgccgatgttatttcaggttctgcccaacctcaaattacaagagaaggattgcagtctgtaaaaatcccactcccaccacttgaagaacaacgccgaattgcttctattttagatcaagcggatgagctacgccaaaaacgtcagcaagcgattgaaaagttagatcagcttttacaagccacttttattgatatgtttggcgatcctgtcagtaatcctaataattatgaacaagttgaactagataactttattttagttggcccccaaaatggattgtataaacctgccaatatgtatggtcaaggtacaccaattgtaaggattgatggatttaaaagtggagatattattgataataaagaatttaaaagattatcactagaagagtctgatattgaaaaatataaattaaataaatttgatctagtaattaaccgagtcaatagtcctgagtatataggaaaaactgctttaatcaggaatttagaagaatctacagtgtttgagtcaaacatgatgagattcgctgttgatacttcaaaattagatacttattacttactgttttttttaaaacaacaatttgttttaaatcagatagcgaataagcgtaaagatgctgtgaatcaatctagtatcaatcaacaagatgttaaaagtttgattattaatgttccaccgattgagttacaaatcacgttttctaatttctttcaaaaacttgagaaaaatagaaacttattcaaccaacaagcattaaattttgataacttgtttaaagcactacaaaaccaagcatttaacggcactttataa

SEQ ID NO: 66629 - DNA, 543 bp, Acinetobacter baumannii
atgactaaatttaatgagaagaatcgaaagcttttagcaaatgtacatgcaataaaacaatccgaattgtctagtttctttgatacccgaaaatttataaattcaacattagcgcatcagattgcggtaggtgcagctcatcactacaaatttcatagtgatagtacctacatacagcaaatactttcattatttgaatttggttcaattgattacttaaaagccgttagatggtttgagtatcgtacaaatacaagcttaagtattgtcgatagaaaaattaagaagaatcccgagaataccataaatgatgagaactatcagttatttggggagtttataaaatcatataaaggctctttaccaacgataaaagggaaaggaactaataaaattgatccaaaaagcaaaacattaagtaataaaaaaatgaatgttattagagaatctcgggactctttagaccttatagatggggcatcctcaatgtatattggaggacaacgtgtttatggtggctatggcactggaaaaagaaagtga

SEQ ID NO: 66630 - DNA, 831 bp, Acinetobacter baumannii
atggataaaagtgcttcagctttaagtattatgtttataggtttaatattattatttcttatattcagtattttaagtattttttatttttattggggcgatttaaaggctatccaaaatagcctttcaacaacaggaagcatctttagtgctattgcaactttaggggctgcagcagtagctgtatacttatttaatgattggaaagagcaagcaatttataatgcaaaaaaagaacatgcagatgctatacttgaagttctatctattctaagatacagccttattgaaaaaatagatattgttaatggacttaaaaaagttaaagaatttgcagttataaatagttattataatgaatataataaagaaaacgataattttataaaaagtgaaatttttaaaaaaacaattcacattaattactttaaggatatagccttagatagtattgaaagtcctttgacattttatgcagatttagaacgacaccacagctatatatcacgatactttttagaaattatgtataactactcaaaatactacaatcatgtaaaaagtaaacttaaagatggtcaactaaattataatcatgatcatactaataaaagttacaatatacttaatattaattcggatttcacctataaagaaaatatcttaaatatgcttacatatgttgcaggatttaaggttataggaaatgaatattctactagcgaaacaatagaatatgaaaatttggaaaaaatgctttatgcagctctaagtaaagttgaagttttagaaaattcacttttaaggatttcaaaaaagctagaaaactaa

SEQ ID NO: 66631 - DNA, 261 bp, Acinetobacter baumannii
ttgtgtaaatctattcatggagaagaagcttccggtattaatcttgcgaaatatttggaatatggaacaattaatacaaaagagatggctgttcaggaatatggtttttcacgtgcagcagcaagtcaattattaaaaagttattctgactatctgaattttgatgaaaatgatgaattattatcagtcgatctaaaaaatattattataaactcagaagataatattttattaaatcgtgaagctaaatggttaagttaa

SEQ ID NO: 66632 - DNA, 132 bp, Acinetobacter baumannii
atgaaaacggcttatgccacaattaaaggtattgaggttatgcgtgctctacgcaaagcacaagcttcattattttataacggtaatattctaggagaagtttggctagtaaataaagttttcggtctctaa

SEQ ID NO: 66633 - DNA, 216 bp, Acinetobacter baumannii
atgctcgctgaacggggagtaaatgtcgatcacaccacgatttatcgttgggttcagcgttatgctcctgaaatggaaaaacgtttacgttggtattggcgtaatcctaaagatcgacatttatggcatctggatgaaacttacgtaaaagtgaatggcaaatgggcatatctataccgagcagttgaccaacgtggccatactcttgatttctaa

SEQ ID NO: 66634 - DNA, 1269 bp, Acinetobacter baumannii
atgactgccgttagctcttctttcagatttttagatgtatttgccggtgctggagggctttcagaaggatttattcaagctggttttatgccggtagcgcatgtggaagctgatgaagcggcttgtgctactttaaaaacacgtcaagcatatcattggttaaaagttaataataaaatcgatatttataaagactatctagaaggaaatattacacgtaatgagttttggggaatggtgcctcaagaggttctagactcagttataaatgaatttattggtcctgaaagtttaaaatctatttttgaaaaagttgataaatttttaaatggtaaaaaattagatattatcgttggaggaccaccttgtcaggcatattcagttatcggcagggcaagaggaaatatggaaaatgatcctcgtaatcatttatatatttattacgctgaatttttaaaaaaatatgaacctgaatattttgtttttgaaaatgtactcgggctcttatctgcaaaagatagaaatggtgattcatattttaagaagatgtgtaatctcttcaatgaaatgggttatgctgttgaatataaagtattaactgctgcagattatggggttttacagaatagaaagcgtgtaattctaattggtaaaagaggtgtagaacacaaggaattctatccagagcttttgaaagttgatttaaacgctatggtttgggatgcattggaagatctaccaaaaataaaagctggcgaaggaagtcatttaccttgtgaagtttcccaaaattatagttattggttattacaagcgaatatacatacagatttaccagtaacatggcatcaagctcgtccaaatactacacaagatttggaaatttatcgtatagcagtggatatttggaataatagtaaaaaaagattaaattataatgacttgccaaataaattaaaaagtcataaatttagtgaatcttttactgatcgttttaaagtggtcgctggtgatttaactgcgtgtcatacagtagttgcacatatggcaaaggacggacatcattatattcatcctgatattgagcagaatcgctctttaactccacgtgaggctgcacgattacaaacttttcctgatgattatttctttgaaagtcaaagcgggaaacctagtcgtacgagtgcctataaacaaattggtaatgctgtgcccgttctattagcaaataaaattgcagaaaaaattatggagtatttaaatggctga

SEQ ID NO: 66635 - DNA, 312 bp, Acinetobacter baumannii; identical to SEQ ID NO: 55718

SEQ ID NO: 66636 - DNA, 789 bp, Acinetobacter baumannii
gtggaacataaattaaaccttaagttagttaaaggtccaatatattatttagaaaaagcaaagtctaaaattcccgtaaatcagaatattggtggaattgcggctggaactgcttttgcaggagtcctcgctgagagtagttctctacttaccagcgcacctatattagtgatggcggctaaggctaaagatggtataacttttataggtgaaatagataagtatccattagtagggcaatttacgacagcacgttttgaagaaaatgacgagttgattgctgtaattagcgaaaaacctgtgaatgggcgtcatcaagtttatgcaatcctcgacccgaagtctggtttattatatatgatttatgaaatggggcgatcagtaaaaaaaggttataaagctatttttatgcagacctattattttgctctaatttgttgggggggactttctataattcttttagtcctttatatatttgatgctaattactcatggggttccttttttgatttgatatcttgggttctcctatttttaattctagcttttttatttatgggttttattaattattttgcttatcggaaatcatacgagaattttggtaatttgtctgaacaaatatttgaaaaattaggttttgaaaatcctaaagagcaggatttttataatgattatttaattaatgatggaatcaacatcagtgttatggattatagaaaaaacttaaaaggtaaagacccttatccagaagattattttgataagaaaaattttttgaagtaa

SEQ ID NO: 66637 - DNA, 492 bp, Acinetobacter baumannii
atgaaacttgatctaacagataaagaacgtttgtttttatccaaccaatatgaaatcttgggtaccctgaagaaggatgaccattatttacttctagctgaacaattgagagaaggacataaatggttatatcaacacagttttgatgccctttatgaaaaccttccagatgaagatgctgagttagtactcaatatcctacaagtttatgaagcattaaaagatagttatgatgctctgactgataaatcaggtatttctatccaagaagtaagctttgctggttttgatggaaatcgtgagccagaacttatggggtttgtagatgctttgaacaaagctcaccgcttttcttctacaattgacgctggcgtacttaactctcactctcctaaagcagatagataccagaatatgattcaaaaatggaaagaacttgataaatcaaatactttatcaaaggaacaaattttatatattttaagtcgataa

SEQ ID NO: 66638 - DNA, 1023 bp, Acinetobacter baumannii
atgctgaaaatacatataatagatgcgggacatggggattgtatttttcttgattttgaacataccaaaattttaattgattgtggtcccaaaaaaattaaagtcagaagaaatgttatctcgactttaaatcaagtattaggtgctaataaaaaaatagatctagctattgttacgcacaatgatgacgatcatatcggtggctttaagtatctacttgagcaaggtatcaaaattgagaagatgatttttaatagtttgggtgatattccccatattattaattcagaagtctctcaagtttcatttaagcaagataacgagcttagaaaaaagttattagaagataaatcaataaaactagaaacactaactagagttgatgagagtatagaaattaatgaaattaaaattacagctataacacctactttagaagcattagaaagtctaatgaaagcttatgaagctgatgaaataaagaaaggagaaaaagagtcagtagtaactcaaatttcaaatcataacaaggatgaaacaccgttaattgaatgtataaacaatattcaacagagtaatgatatctttataaatgacttatctaaacctaataaatcaagtgtatcaattatcattgaatataaaggtttccgtgggctttttctagcggatgctcatgcggaagatattattgatggaattaaagaaaaaggatatgagaacacacaatttagtgtaacgaagctatcccatcatggtagtgaaaagaatacgagtaaagagcttttagaagttataggaaaaactgaatatattttatgcgcagataaatctaaacataaccatcctaataatcttacacttgcaagaatattaaattttgataataatccagctattcattttagcacttccgaagagaacttgtcttgtctagtaagagagttagtagattcgagtatttctattcaaagtactttttccgtaaattatatgaatactatactttatgattataaataa

SEQ ID NO: 66639 - DNA, 741 bp, Acinetobacter baumannii
atgaaattaatattttcatgtcctattatttctaatccagatattttatttgaaatttttgatataaaagatggtgctagtaagacagttaaagagagtccagtttcgcaaaatttatactcagtagatataggtgaaacaacttatcaatattttgatattattacaaacaaaattattgatattgtacaagatagaaaacatgaaaatgattttgatttaatatactcgattggaacaaaaaatgattccaatttaatttactcttcgagtaaacaagattgtataaataaggcagttaagtttaaagaatatttattatctattggtgaaactattgtagatgatgaggagcttattagtgaatctgatttgatctctaactatatccataatgaattttcacttgtggaattaattaaatataaagttgccttccatcatgggggattaccgatttttattagaaaacgtattgaagatctttacgctaagagaaaaattaaatatatattttgtacttcaactcttcttgagggtgtaaatttaccgacaaaaaatgtatttatttacccctttaaaataactaataaagatgagagtacaaaattaaatttttggaatcttgctggcagggctggacggtataaaaatgaattaacaggaaatatattttgtattaataatcctagtgatagttttaataaaaaggagattcttacaaaaatgaagttgaattaa

SEQ ID NO: 66640 - DNA, 756 bp, Acinetobacter baumannii
atgaaagatattctaaagaatattaaaatatccaaaaaatcacaagcagaacccattcaagtacatgagctcaaaaaaaaatatgagagcattagttatccattagaatcatttaatattgatcttgatcaattgagtgcagctggactaattttttatgataaaaaaattgcaaatggcgaatatctttggttaaatcccaaacaattagtaaatgagatatatgaaaattttttatctcaagaattaattaggaaacagcctaaacaaggaattataaaaaaagaagtttttgacaaattaaatattaacaagcatacagtagaattattagagttttataatattatctttaaacatcaacccaataaaagcgatcctaatgatattgaatatattatccctaactatctaccattaataaacaaaaatgatcctatttatttcttaagtacatttggttttacgcaacctagtttcactttaaagtttctaaaattcattcctatgggcatgattaatcatctaacatgtttctttggaaaacaacctgatcataaattattttggcgtaatttaattgtttttagtttaagcgaaggacttaagcaaccttttcgtataatgataaagcttgatctatcaaatcttgaaataaaatgttttatacaaggtaatattaatgagctaaataaagtttcaaaatatattttctctgtctcttatacacatctgacgctgccgacgaaggcttag

SEQ ID NO: 66641 - DNA, 456 bp, Acinetobacter baumannii
gtggatgaggcgcctcaaaaagatctggaatattatgaatatcgtacagatgaattagtaatggtcttcaaagatcaagagtatattaataaatttagaattacctcattagatgatgctttggaatttgatttaattggattactagctcaaagctcaattaatcaaatgcttaaacaaaaagccgagagtattgggaaaaacttaaagcttagaatcttagtagctagcttcgatgctctttgttgcatggttcaagctggtacgggaataggcatcatacctaaaagagtatatgaaattattggtaaacctcttgggttagtaagtttatctatagatgaaaaatgggcaactcggaagctttatttagtttgtaaatcagatgaactcttaaatcctgtaactttacttttaaaacaacatttaattagcccttcaaatagaaactattaa

SEQ ID NO: 66642 - DNA, 453 bp, Acinetobacter baumannii
atggatgaggatgaaattaatattatagcctataactatgtgggttatattaaattaaaaaaagatattatttttcctgctgatgataataaaaatgatgttatttataaccaaagtggagtcaataggcgagttttttctggatatgttagctttcccgaagttgaaaagaacactttattttatatgaaagcttttttgcttactcttactgtagatataccttgtaaggaagaaattcattctttaattaaaatattttcatattgtgaaaatcactcttcattaattgaaaaattatcattaggactaaaatctaattcaaaaggtcttgtttttaatgggcttaaagaagtaataggtgatttttacttgttggaaaaaattgatgacttgtttttctatgatggaagagaggagttgtacaataatttttttaaaaatgataaataa

SEQ ID NO: 66643 - DNA, 186 bp, Acinetobacter baumannii
atgcatgaaaatttacgtcaaaaaatactctatttaactgacttaaaaactaaagcatttaataggcaaaatagtttaactcctattcccatttttcattatggagatgtaatctctaaattaccaagcacattaagtgaacttttcgctattgaacaacaaaaaattgagtctaaggaagcctga

SEQ ID NO: 66644 - DNA, 171 bp, Acinetobacter baumannii
atgaatggatttccgcaattaactgggattgtaggtaaacagtttgatgctttctcggttggcgtactcgtccaaaacatcacaagcggtttggaatggcataccctgaacgactgtggttggcagttcatccttgatctctatatcatcccaagtgattttaggctctga

SEQ ID NO: 66645 - DNA, 318 bp, Acinetobacter baumannii
atgaaagcactctcggtaatagaacttgctaaactttatggtctaaaccgccaaagcatctacaagcgtataaataaaggcgatataagtaaaaacagtgatggaaaaattgaccttgcggaagcaatacgtgtctttggtgaaccgtcacaacgaaaaactgaaaacgtcacgctacagtcacaggcgacacaaaagtcggcagaactagacatcatgcgacagcaggtagacatgcttcaaaaacagcttgagctggcacaagagcgtgaaaaatttcaacgtgaacaattacaggctaaagacgggaacggctga

SEQ ID NO: 66646 - DNA, 528 bp, Acinetobacter baumannii
atgtctaatgctcggattaagaatgcttttgacgaagctatttttttaatggatcaaagtatagcttattttgaaagcgccaaagtcttagttgatagcccaagtgaatatacttctatgcctatcattactttgcaatcttttagtcttgagtgttccctcaagtcattgttacttttaacttgtggtaaatatccatcaagtcatgatgtcttggatcttttcgaacgtttaccagaagatgagaaaaaagctttgttaggagagtttctagatcttactgaggtagatttaaaaaatgctctaactgagattcgaagagatttcattgggtcacgttattactttgaagattttagaaagtcttatgttggtagagcattttctacaggttatttagaagctgtggcaaatttttttattgattacattaaggataatggtgattctatttatcaacaatatggttctggcagtagcgttacatgtagtcctcatgtaatgttgtctactaaactagaacgataa

SEQ ID NO: 66647 - DNA, 546 bp, Acinetobacter baumannii
ttgaatgttgttctcattgttgtatatatgtttgaagctccaccactttataaatctctttatctttcttcatctcaacttagtacgttatctgttgaggatattttggataaacaaatttctttgattagcctaaacttagattcgaccgttgctcacttgttcagtaattggttagaaagaaatcctgagttaattctcggcgaatcttcttctaagaatgatggcaggtgggggcttgaatggaatattaccctgaatacagcattctttagcttggattatgagtactcagatggatgtgtgaatgggggttcggtaagtccaaattataatcctgtacctgaattgtcagagtatcagttaaagaatacccctacgatattagagctttatttgggctttttgaaaaagtatccaaagaatatgaatgccattacagcaaagcctgaacctgaattagaccgttttacatatttgtccaggatccatccaaaatctctgtatattgatggcaagttgaattataacctttaccgttcttaa

SEQ ID NO: 66648 - DNA, 138 bp, Acinetobacter baumannii
atggctgaaattttgattacacgcattcctaactcacgcgatgcagataaagtaggtatcgaattagaaagcattttagatgctttagctgcaaaattctacaggaccatacactgcaacagtagagataaccaatga

SEQ ID NO: 66649 - DNA, 198 bp, Acinetobacter baumannii; identical to SEQ ID NO: 57969

SEQ ID NO: 66650 - DNA, 726 bp, Acinetobacter baumannii
gtgcctgctgtagctaaattttttttagaaaatggacaagtcaaccttgatcttacttctagaattttaaaaagtgtagcaagtcaaactcttaggtgggataaaactaatacttggaatacttattgtccgataactgcacgtaatgagaatttcaatgttcatgatgcatatgatgttggaagaccaacaataatttcttcaactggttctagaccagagtcaagtgaaatgtttgaattatcaacatgtttgaaagatggcagtatttattatattggaggtggatggacatctggaggaactaccgatttaacagcagatgttttttttaactatgtatctgataattggtcaggtggggtttctacagataaaattaggatttattcacaagatggcaaattgatgtggtctgatagtactctaaaaagttgcccaatttatattagtactttggaattcacatcccttaaccaagttaaaacaatttcaagtccaaatgaccgcagattatatatcaatgaagcttcagtatttgtatctggaactattgtaatagatgaaggaggcagcttttttactacctctgggttacaagtaagatggtcaaatcaaggaaagacattagaatgttgttatatttcttcaggagatggcgatataacagaagtattaagacgggtgggtaaaataactgtcgagatatttgagtttccgacctaa

SEQ ID NO: 66651 - DNA, 351 bp, Acinetobacter baumannii
atggcattagcgaagcttaaactttttgaacaagatggaaaactatactttgacagttcccgagatagggtgctgtcatttataaaaacaattaggtggtctcaatattacccagctaatcatactaataacggtcagtataaaatttatacttataatgtctacgatgctgaaatatctccaaatggaacttatgcaagatttacaaatataaatcctgaaattcaattgcagcaagttgtttccactttcaaatatttttctggttatttggagatgacattagtagttaataataactttacgaacgccttcactttgaattttgatctcaaaatttatcggagatag

SEQ ID NO: 66652 - DNA, 390 bp, Acinetobacter baumannii; identical to SEQ ID NO: 58026

SEQ ID NO: 66653 - DNA, 627 bp, Acinetobacter baumannii
atgtggtgtaagcttctagctaaacaaaatttggtcgttcaagacaacggcggtggtgccgcatcttctgctgctaaatcatcaccaaacccaatatctcaaaaacaaccaacaacagacagctttgtaaaagatgagtacgagaattactacatagagaacactaaaaccacaatggttccgtttaaaccttggctatatccatacgatcaagataaagcaacgttattcggtttagctatgcaggctatgtctggtgcttgtacatttgaagtctcatataaagttgaaaaacaaaatctattcgtgactgcaactttactaccccctgctttaaaaggagatgcaacaatttaccctcaagcagcattgcgtctgtttaaagataaaaagcaaataggtgatgttgttagattgaaagtggaaaagggatactggaatacggaaaatgataggcaacctgtcggtagttgcgaaattaaactacctcccccagacttatcagtagtcacagttcaattgacaatgaaatatgatgctaaatttgatggtggaacagttgttacaaatccacctcatgtagtgcatgaatttacaattacatcagcagcaagacggaagaaatga

SEQ ID NO: 66654 - DNA, 1158 bp, Acinetobacter baumannii
ttgcccaaaaaaaactttatctcaccgaatgactttgctgatacgacacagtttgggcgcgtaaaaagtgctgtcgattttgtacggattcaagggtacggaattattgagctgggtattgataaagaaactaatgcgaatctctggattttccctgaagctttaactctacctactaactgttggatttacataaataattcaattgttaaaaggggtgaccaagtctttgacaatatatttagaaatgaaggtattgttccagaccctgacccgtttaaggtagcaaaagagctaaatcctaatgcaaacatacgtattttcggtaatgataagacgctttctattattgatggcaactacaacaatgcttacaaagctcctcacccagttaaaggaggtgatccagtgccatgggtatcagacttctacggttggcgggcccaatcaatcttgttcgcaaatactgtagggcacagagtccataatttaacattaagagattcgacaaactggactatttctaacgaacatggctgtgcatacgcaaaatttcatgatttgcatttcagaactattgctaagaatggtgacggtgtcgatttgagacaaggctgcaataatattgaaatttacaatatttcgggcacaacttcagatgacatggttgcttgttctgcattaaaaaattttgtagagacttttccatctggtgactacatttttccgacacaagttggtggatatgcagaacgtggctttggctcagatattacagatattaagatttggaatattcgaggggatatgtctgctggtggagtaagattgttatggacaggtggttcgaaaatgaaaaacatcagtgtgtttgacattgcagatactgcacgtcagtttatgtactatgccgtttacatacacactggccagtacggacgacctgctgtaatgggagaagcggaaaatattactgttaacaaggttgtttcaaacaaaagtgatgttgtaataagactcgatgctccaattaaagattgttggattaacaacatagagcagaggaagaatacaacaacaccaatccttaaaactgaggagttatatgccgaagagaatgttaagaaaactaacattcgatttaatttagtcacttaa

SEQ ID NO: 66655 - DNA, 1269 bp, Acinetobacter baumannii
atggcaaatttacctaaagccgaagaattaattggtagtaccgtaactgagctccaatttaaaggaaagttgaagcagttagtggaggctattgatcgttcatataacacgcttgaggaagcaaatgctgacatcagttctatttctattggagcaaaaattgagattctcaatgaactggaatatggtatctactataaacctttagctacctcggcagagttagtgaagagaccttttgatcctactgttaaatcgattaattttactaatgaagcaatagaaaggctatttgaggcagatggtgaaaagataatcgaaataaagccgatatatggttatggcattaataccgattctccttcaacagcaatatttactgcacctggtccggaacgtgcgtatttaaaactagatgtatcggctatatctaaattaatcgttacgaatgctacttctgcttattctggatggcgttgggttttcagggacgaaaacgatacatatatatcaatgagtacagctattggtagtggcgagtatcttgtccctaagagagcaaaatgggcttaccgaacttatcagatcgttgaccctaataataatgctagagagaactcaaatttagaaatagtcggagtacaaagatataatttaaaaaatgttattcaagatacaattgagacaaataatcctattattgcatctcaaattcgggattatacagaaaaaactctatatggtgaggcagagccagaagtagtcttaatacctatatcaggttattcagtaaacaccacgccttctagtccaaactttctctcaccaaataacaatgatgcacggaaatatattgtttttgatgtatcagaattttctgtaataaaagtaacagggtcaattcaagagtctggagttgcgagctggtactgggtttttgagacagatacaggtggtaagttaatttcaaattatcactacaacggtgaatttattgtacctgataatgttgtaagagcgtatagaagtgtttactactataagtcggacacaggtattggaccttttgatgatattgctcatggtcttaaaataactggtgtcccaagaaagcctagaatccaaccacaaattaattatttatcacagcagatcaacgaaattattgataatggcggtgcaagccttgcggcatttgtagcattagattcaatcattaagaaaatggaagatttgtttgcccaaaaaaaactttatctcaccgaatga

SEQ ID NO: 66656 - DNA, 285 bp, Acinetobacter baumannii
gtgattgatcaattgaatagccatattgttgatgaaatacaacaggatcttgaaattgttgataaacatacaatgcatggactaccgactattgaaaatgaaattagtgtatatgcttttacaggtactaatgcttcaaaaaatcaggttttacaaaatattggatttctagtagaaaaaacggaaaaacaagaattacgtatgtctggaaattttgaaccgaaactatcttattttagaacaggcctttatcttgatttttatctagaaattattaaagagtaa

SEQ ID NO: 66657 - DNA, 1314 bp, Acinetobacter baumannii
atggctaggattgttaaacctttaactgttactcaaattgatgcttcacaacctaaagaaaaagattacaacttatctgatggtgaaggactttacttacgtataagaacctcaggaacaaaaacgtggatatttcaatataagaaccagcaagatgttcgagtagtgattacagtaggaaactacccacaatataaactagccttagctcgtgaaaagaaaagagattacttaagtatcttggcagaaggtaaagaccttaaagaatatttagactcattaaaaaagaagtctactcaagaactttcacttgaggtcataacacgtacatggttagaacaatatgcagttaagaagtctctagatgaagaaactaaaaggaaaagaattaggaaatttgaaaaccatatgtttccttatattgggtatttgcaaataacagatattcggtccagtgacctaagactgttattaaataagatttatgagaaaagtgctgataatgcacaacggatacgttctgatctaattctaatttttagctatgctgttcaatatggctacattgaggtcaatcatgcaagagagatggagagtcttgatttaacagctcctaaaaaacatagaccagctttatctttagaaagattaccagagttaatacggcgtataaaaggtgatacagggcaaccgttaaccaagtttggaattctattaggtctacacatctttatacgttcttcagaattacggtttgctagatggagtgaaattgatttagtaaaaaagcaatgggtacttcctgctaaaagaaacgaggtaagaggggctaagcattctgaccgtggagccaaaatgagaagtcagcacatagttcctttatctgaatatgcaattggaatacttaaagaaataaaactcattactatgggaagtgaatatatttttcctagctcatataaaggtgctcaatttctaggtgagaatacattcaatgatgccttaagaagaatgggatatgatactcaaacggaactatgttttcatgggctaagagctatggcacgttctgcattaggtgagtgtggtttatttcagaaagatgctatagaaaagcaaatgagtcaccaagaacgaaataatgtagtaggggcttatacacacgttgctgagtacttacaagaacgaaaggaaatgatggggtggtggagccaatatcttatagatattgaaaaaggcggatatgtttcaccttactactatgttaacccagaaaaaaataatgtagttagctttcaaagaaatatagcttga

SEQ ID NO: 66658 - DNA, 513 bp, Acinetobacter baumannii
atgaaagcgttatcggtaatagaactcgcaaaactttatggtctaaaccgccaaagcatctacaagcgtataaataaaggtgatctgagcaagaacagtgatggaaagattgacctttcagaagctatacgagtctttggtgaaccatcgcaacgtagtaacgcaaatgtcacccaattacagtcaactccggtacaaaagtcggcagaagttgacatgttatcgcgacaggtagacatgcttcaaaaacagcttgaacttgcacaggaacgtgagatttttcaacgtgaagaattgaaggcgaagaatgagcagattgactcactacagcggctacttggtgcacctaaaccacagcaacaagctgaacaggtacaggagccgacacctgaaccaattcagccaatacctacaccaatgccagagcctaagccgatcgttcaggaaacacagcctgaacctcagaaacgccgtgggctgtttggtcgtgtgatacgtgcggtattggattag

SEQ ID NO: 66659 - DNA, 669 bp, Acinetobacter baumannii
ttgggaacttttcttgttcttctaatcatcggggttggaatttatttatttttaaaatctcaaggtaatgaaacatcaaacattcaaactcaacaaatttcagctgagtttagaaatctcattgacgaacttcttgatcaccgctgtgtgattctcgatacagaaacaacaggattgaacaatacagcggagatcgttgagattagcctgattgattcaaatggaaatgttcttcttgatacgttggtaaagcccaagcgaaaaatgcgtgctgacaataaggcggtagctattcacggtattacaaacgagatgcttgagaatgccccaaagtgggatgagatacacgataccttttgcaatttgatcagaggtaagcgtgtcgtgatctacaatgctaaatacgatgttcgtttgcttgaacagaccgcagacaagtatggtttgacgattcctgaatttgagcctgaatgtgcaatgatgatctacggagcttgggaaggtacgaaaagcaaatatgatgctgggtacaagtggcacaagctagatgatgcggttagaactttaggtgttcaagttcaaggcaaaccacatagagcattgactgattgcttaatgacgcttggagtgcttcaaaagttaagagatacaccgccaagacttaggtaa

SEQ ID NO: 66660 - DNA, 969 bp, Acinetobacter baumannii
atggaatatacaaaaagtcactcagcagtgacgaaaaaacagcctgaaacgctcagtaagcatcagcttgacctattcgagagcttaccgaacaagccgtactgcatggacgaaaaacctgggtacatgcttattcgcactaaagctattgcggttaaaaagccatatatccaagtaaatccccctcttacaacgatttactttgtcttcgacgatgacaaagaagactcggctttgtcatggtttgatgcaggtttgccacagcctttttggacaacacagaatccactcaacggtcattgtcaccactgctacaagctcgaaataccactttgtacaagcgagtttgcgagcattaaagcaatcaagtatgcacaggcagtctactacgcttatgcgctcaagttaggcgcggatctgagctattctcaactcatcacaaagaatccactgcatcctcaatggcgtactacgttttggacagatcaagcctattcccttgattaccttgcggactttgtagagctaccgaaaaagctgccaaagaaactcgaagttgtcggcttagggcgcaatgtaaccatgttcgaaaaaggccgtcattgggcgtataaggcgattagagactatatgcaccacaactctagctatgagtgggaaaaggccgtatacgcgcaaatagacgcgattaacagcggttttgagcaacctttaccgcttagtgaagtgaaagcgacagcaaagagcattgcaaagtgggtatggcaacggttcagctatggagagttcagcgagatacaggcgaagcgtggtgcaaaaggtggtaagaaaggtggtgttgtacgttcggctcaatacgcagaattacgtgtcaaagcgaaggagttgaaagaaaccggcttgagttacacagaggttgctaagcagttaaatgtgtctcgtagatcggtaattgggtggtgcaagtga

SEQ ID NO: 66661 - DNA, 246 bp, Acinetobacter baumannii
atgacagaagtaattctcaaaaacggaaaaacagtcgaagcagcagacgttctagaaaatctgattgcgtctgaggtaagcaacacaattgctaataatacagatgagttcgatttggtctctagtgatggcattagaaccgcagctgaagcaatcgctgattacttagaattggtcactaaagaaagcattgatgtaagcgccgtcgaaaccgaattaaaggttcaattatatttgaatcaataa

SEQ ID NO: 66662 - DNA, 351 bp, Acinetobacter baumannii
atgactatttctgaattaatatccgaatgttcccaataccttgaactgaaaaaaaagtttgaacctgatcagaatgaacagggtgtttgtgaatggttgggggcagatattgcgatccctgcagaaattatcgaaggcaaagattgtgatgaacaagaaatagacattcatattcacggaaaaacgtcttcagtgactcgtgtactgtctcttgaacaggcaaaagaatttttagaagagttgttggaagctgttcgtgctttcgagcctgattatatgtctgataaaaatgaagacagtactgtaaaaaataccttggaaattgaaccagtttctctattaccgtcttag

SEQ ID NO: 66663 - DNA, 597 bp, Acinetobacter baumannii
atgactgttcgcatttatgttcgtgcatcgacaaaagagcaagacgctgaaagagcgctcagtgacttgatcgagttcagcaagagctatagcactgaatacgttgcatacattgagaatgaaagcggtacaaagctaaatcgacctgtccttaatagacttttagacgaagcaaagccggacgatattttacttgtggaatcggtcgacagattgtcacgattaaatcagtccgactttgaaacccttaagcagcaaatcaaaggtaaaggaatgcgtttgattgttgcggatcttcccacaacacatgtgcaaatgaatgcaaacgatagcattacgagctcagtgttggaactcattaacaatatgctgattgatttactcgcaacaatggcacgtttagacaatgaaaagcgtaaggagcgtatcattcaaggtctaaagcgtagcggttataaaccaacaggaaagaaagcaaatacagctaaacacgaacgcattaaacagttacttgaaactggaaacatgaccaaagaagaaattgctaaggcggtgggatgtggtgtggctacagtctacagagtaatgaaaatgtaa

SEQ ID NO: 66664 - DNA, 231 bp, Acinetobacter baumannii
ttggtatttaaaatccaacagaatgggctgttaggtcaaccgcaagtttataaggccaatggtattgaaccacgtgctttttcatttgatgagtcaggtaaatatctgtatgtgacgaatgtttatagtaataacattagcttattccgttttgataccaaaaatggctcattaaaacctttaggcgatgcagctaaaatatcgactccaactgatatcaaattcttttaa

SEQ ID NO: 66665 - DNA, 1035 bp, Acinetobacter baumannii
  misc_feature (984)..(993): n is a, c, g, or t
gtgaaaatagatactgatgtcaatactggatacggcaaggataccgacaaaaatggatatgcaaatattaagtatcgtgagctaattcaaaaattaacagcaacattatcattgacgcttttgtcatttggatggggctctacagtaaacgcagcacaacaacaaatcgctttagtaggaacctggacatctatcccagatgcaccgcttgtgcaaaaaccagaaaaagccagtgaaggtctgtaccagctacaagttaatgctgacgggaccttaactcctgttaaggtattgcaaatgaaaagtccatcttgggttgtaaaatcgaaagatggccgttttgcatataccactaatgaagaaaatgaaggggcggtaacggcattatcggttcaaaacggaaaggtagaggtattgaacacggtaaatagtcatggcgggcaaccaacacatgcatccatcagtttagatggtaaattcctatttgtgtcgaattattctgcatttgataaaggacgtggcggtgtcgctgttttgccaattttaccaaatggacatttgggtgaaatggtacaaaatattgttttttcggagggttctggtcatgttaaagggcgtcaggatagtggccatgcccattcgacaacttttagcccagatggtaagtatttatatgcaagtgatcttggaaatgacaaagtctatgcttttcgttacaacccaagtaagcctcaaccacttgaagcggacaagagccgagatgtgagttttaagcatggttctggtccacgtcatatggtcttttcaccaaatggtaaacaggcatacattaccgcggaaatgcgaagtgaaattgtgacgtttaacgtacaagatggccatttgaaaaaagtcgctgagctaaaactggttcacgaagacaaaacacctgaattcaagagtgcaagtggaattattcttagtccaaatggtaagtatgtgatnnnnnnnnnncgctgcaaatcgtggtgcggacaacaaacttttggtatttaa

SEQ ID NO: 66666 - DNA, 1371 bp, Acinetobacter baumannii
atgagtcagtttgaattgtctgaagtttgggaaacttccgagttagctagcattgttaattttattgattatcgtgggaaaactccaacaaaaacatctgaaggaattccgctaattacagctaagaatattcgtgatggctatattaatagagagcctcgggaatttattgctgaggatgcttatgattcgtggatgactcgtggatttccgcaacttggtgatttggtcatcacaactgaagccccaatggggaatgttgctgttttagatattcaagaaaagtttgcattagctcagcgagccatttgtttgagctttgttgaggagcctcgtctttcaaagtttatttattattatttgcgttctcagagcttcaagagtgctttggtagagaaagccacagggacgactgttcaaggtattaaagctgcagagcttaagaagattcctgtaccaatagcaccactagctgaacaaaaaatcattgcagataagcttgatactttgctggctcaagttgaaagtattaaagctcgtttagagcgtattcctgagattcttaaacaattccgtcagtctgtgcttgccgctgctgtgagtgggaagttgacggaggagtggcggataggggcggaagtagggttaggtagtacagttcctattaaagatgtagctgaactgaatccaaaaaagccaaagatagaagatacaatcgaagttggcttctcgccaatgacaatggcttcagagggggttagctctgacttagggtttgaagtccgtacgtgggcggaagtaaagaaaggattcacagtattccagaacgaagatgttttattggcaaagatcacgccatgttttgaaaatggaaaatctgcgattccacaaaatttacctaatggatacggcgctggctcaactgagtttatggttttacgttgctctaaaaatcaaatacttcctaaatatttgtattttaatttaggtacgacttcattcttggtacagggtgaggtaaacatgacaggatctgttggtcataagcgagtgcccaaagagtttgttggggattggcaaatttatctaccaactcttagtgaacaaatagaaattattagaaaggttgagttgaactttgctagtgctcaatctatagaacaacttgttcaatcagctttagatcgagtaagcaacctcacacaatccattctagctaaagcattccgtggtgaattaactgctgattggcgtgaggctaatccagagttaatcagtggtgaaaacagtgctgaagcattattaaagcgaataaaagcagaacgtgaatcagctaaaccgactacaaagcgtggtagagctaaaacataa

SEQ ID NO: 66667 - DNA, 1563 bp, Acinetobacter baumannii
atgacaaataatgatattgttcaaaaactttggaatctgtgtgatgtattgcgcgatgacggcattaattactcagattatgtgactgaactggttttattattatttattaaaatggttcatgagaatactgaagctggcactttaaagagtcatcctttacctgaaggatgccgttgggaagatttaaaaggaaaatctggtctaaatctacttaatgattacaagcgcatattattgagcctatcaacaggtaaagaccacgatggaaagcagattcatgaagaccctctaatttcagctatctatgcagatgcgcagacacgtttgcgagagccgcgccatttagaacaaatgattaagaccctagatcagattgattggtttagtgccacgaaagatggtttaggtgatttatacgaaggtttattagaaaagaatgcatctgaaacaaaatctggcgcagggcaatactttacaccacgtccattaattaacagcatggtacgttgtttaaaaccgcaggctggagaaacaattcaagaccctgccgcgggtactgctgggtttttaattgctgctgaccaatatattaaagaacaaacagatgatctatatgatctaaatgcacagcaacaaatattccaaaagaataaagcttttattggtgttgagcttgttccaagtactcgccgcttagcactcatgaactgtctattgcatggcatggaaggtgataatgaaggtgtgattcatcttgggaactctttaggacaaatcggggcaaatttgcaaaaagtggatgtaattttagcaaatcctccatttggtacatcaaaaggtggcgaagcaagtattactcgtgatgatttaacttatccaacgagtaataaacaattagcattcttacaacatatttatcgtggtttaaaaccgggtggacgtgcagcagttgtattgcctgataatgttttgtttgagtctggtgctggtacagaaattcgccgtgatttaatgaataaatgtaatctacatacgatattacgtttaccaacaggaattttttacgcacaaggtgtaaaaacgaatgtactgttttttactaagggtagtgttgaagacaaataccaagaagaaaattgtactaaacaagtctgggtctatgatttacgtacaaacatgccaagttttggtaaacgtacaccatttacagagcaacatttaaagccatttgaagtggtatatggtgatgaccctaaaggtactagcccgcgacaagaaggtgagtacagttttgatgctttgtcggtagagttagcaaatgacgatgcaaatcaaaacgtagataaagagttggcccatagccgttggcgttgctttagccgtgagtggattgctgagaacaagggtgattcattagatattagctggcttaaagataaagatagtgtagatgctgctaatttgccagagcctgaggttttggcacgtgaggctaaagaagagcttgtagctgctttggctgagctggattcgctattagctgctttaggggctaattaa

SEQ ID NO: 66668 - DNA, 3516 bp, Acinetobacter baumannii
gtggcacttgaatcgacaaattttagttttttagctgaatatgacccattattcgtagaattgggtgaggctgctgaaagagttttttatagtgatcctaataccactttaattaagctgcgccaattaggtgaagctatcgctcaacatatggcggtaacacttggtattgagtttaatgagcaaaccacacaagctgatttaatatataaattaagtaatgaattaaaactagataaagttgtacgtgatttatttcatactttaagaattgaaggaaataaggctactcatcagtttaaaaccaaacacaaagaagctattagcggcttaattgtagcccgtaatttagcaatttggttccatcgttcttttggcaaagctgggccagactttaagcctgagccttttgtgcctcctgttgaccctagtcaacaattgcgagatttacaggctgaaatatcggaattacgaaatgatctgcaaaaagccaatgttcagctagattctagccagcagttaaatgatttaattgctaaggaaaaatcagagtatgaagcattagctttagcaatggatgaagctgctcaaaaatttgccgctcaagctaaagcacatgaagatgcgcttgcaaagcaacaacgagaatatgaagagaaagttaaggagttacagcaacaactttcaaatcaaaatgaaaaagaagtttctgttaaacgtcaacaaattggtcgtaatgcacgcgctgcgagtcaatctattgtattagacgaaaagctaactcgtattttaattgatcagcaattacaagaggcgggttgggaagcagatacacaagaactggattatcgtaaaggtgctcgtccagaaaaagggcggaatatggcaattgctgaatggccgatgaaaggaaattttaaaggtcaacgtgctgattatgtgctctttgtaggattaacaccaattgctgtagttgaggcaaaaaaagaaaatctgaatgtggctggcgctattactcaagcggaacggtacagtcgtggaataaccatagaagctccattacaaggtgcgtggctgcttgagggactatcacaaccttggtctgatggtgttgatagtttctatcgtattccatttgcatattcttgtaatggtcgcgagtatttcaaacaatcggcagaacagtctggaacttggtttagagatgtacgcagtgtgagtaacactagtcgtccattacaatccttccatagtccagaaggtttattagatatccttaaaagaagtaaagaagaggcgcagcaaaaattaaaagatgaaccatttggatatctaaaagttcgtgattatcaacaaaaagcaattattgcagttgaaaatgctttgtctcagggtgttcgttcagctctgttagcaatggcaacagggactggtaaaacaagaacaattattggtttaatgtaccgctttttaaaaacagaaagatttaaacgtatcttatttttagtagatcgaagagctttaggtgagcaggctacagattcatttaatgaagttattttagagcagaacctcccattaactagaatatataacattgcagaccttggcgatatgactgctgaggcagagacacgtgtgcaagtggcaacagtacaggcaatggtaaagcgcatatttatgagcgataatccaccttcagttgaccaattcgattgtattattgttgatgaagctcaccgtggttatacccttgatcaggaaatgacagaaggggaaatagcaactcgtgatgtggggcagtatctatctagttaccggagagtattggactattttgacgcagtcaaagtgggtttaacagcaactcctgcaaaacatacgagtgatatatttggtaaacccgtctatacctattcttaccgagaagcagtcgcagatgattggcttatagatcatgagccaccgattcgttatgaaactttactttctcaaaatgggattaaattttccaaaggggaaaaggttcatgcgatcaatacgcagacaggctcaatcgaaagtgctgaactagatgatgagcttaatttcgaagttgatgcttttaaccgtaaagtaattactaaagactttaatagagtgatctgtgaacaattagctcaagaaattgatccatttggtgatgagaagaccatgatcttctgtgcgaccgatgctcatgctgatatggtagtgcatttgttgggagatgcttttaaagatatttacaatggtgggtataatcaggccgcggtcgccaagattacaggtaaaagtgacaaggttgatcaactaattcgtcaatacaaaaatgagagatatccgagtattgcggttactgttgacttacttactacagggattgatgttcctaagatttgtaatcttgtgtttatgcgccgagtgaagtctcgtattttatatgaacaaatgattggccgtgcgacccgtcgttgtgatgagattggcaaaactgttttccgtatctatgaccctgtggatatttatgctgctttgcaagatgtaaataccatgaagccgttagtaaaagacccgaatgtaactctagaacaactcgttgaagagttaacagatcctgaaatgttagacagagccttaaactgcccaggtgagcaattaggggaaacacatgcgcatgttgtccttagtcagctaagccaaaaattaatgagagttttgcgtaaagctgagaaaaaagcagaaaataagccgttattaaaacaaaagttaaatgaattgcaggaacagtggggtgttgagcctaagacacttcataagcatttacatgatctaggccctaaaaaggctgctgaatttatgatacagcattcaggcttagtcaatcagttagctaaagttgatgaacttcttggttctgacagaaagcctattatttcagagcatcaggatgagttggtcaatcgagaacagacttatggtgcaaatcaaaaacctgaagattatctagatcaatttaatcattttattaaagaacagttgaaccagtctgttgctttaggggtagtagtaaatagacctaaagatttaactcgagaacagttgaaagaagttaagttgttgttggacggcaatggatataatgaggccaatttgcggagcgcagttctccagcaaaccaatcaagatattgctgcgagtattgttggccacatacgccgtgcggctttaggcgaggcattaattccatttgaacaacgtgtgatgcaaggtatgcagcgaatctatagtatgcattcttggacattagcccaacgtaaatggctagagcgtttagcaaaacaacttgtacatgaagtcattattgaccgcgagtttgttaataatcgctttagtgatgagggcggggctaagcagatggataaagtgttaggcaatcagctcgatactgttttagaccaattgagcgaagccatatggctttcgcaaagtgcgtaa

SEQ ID NO: 66669 - DNA, 711 bp, Acinetobacter baumannii; identical to SEQ ID NO: 49722

SEQ ID NO: 66670 - DNA, 1227 bp, Acinetobacter baumannii
atgcttgattttctgcggttagctattccaatcatacctacgcatgttcgtagcttagagaataatcactggtttactggtgatattcgcgattttggtattcctgctgcgactcgacatgttggtaaattggatgatggaactacaacgacaggggagctttatcatccttttgagtctcttcctagtgattacaccgacatggctatgaagttttatacgcatacaatcaatagaacaccttatgttgagattaaggcatctccattgaagttgttacaaggtcacaatgtgtatggttttgagtctatagaattaggttctgatcatatgcttggcatgttactcgaagcctttccccagttagccccgattttggacttggaaaatactgaggtcttacatctagatacgacatatttatttagattgcctcatcagaatatggttcaaccaactttggattatatggctaacttggcttcgggtcaccgtaaagctagacagattaagtacgagaactacatcacttggggtaatgatggtgcatctattcgacctaaggcttatggcaaatttgaagaagtaaaaagccaattacataagctacagaagaaagcagataagggctgtatgcgctctaaatcacttgttattgctatgaataatgccttgccatttgctaacgccattcttcgtttagaagcccgtatttgtaaaacttatttaaccaagaatggttatccatctaatttattacagctaattaagctgcaacatgaacagccagaattattgctacgcctctggcacgtagcgtttgaccccatcttaaatactatgaagggtaaatacatgaatttcgctaatgatgatcaattacttgagttatttaaatctcaattagttacgtataccaagacaggtaagccaagttataccaaagctaaaaatgctatgaaattttattctttaatgcgtcagcttggctggaagaagacagttgatttatataataaaactacattccatgatgctcttaagcatttgcttgattgtggtatcagcaaatcacatcttcagaaccttgctaaaaatccagacggcaaagttatcccatttgtccgtttatttgaactcaagatggctgatcaattaccaccagattacgttcaaccagtttcacaatacagcccaaagaatcagggtttacatctagttgcctaa

SEQ ID NO: 66671 - DNA, 303 bp, Acinetobacter baumannii
atgcaattatcatttaacaaacgcacaatttttccatctgtttaccgtggtgaaaataagaaaactggcgaaccaacttgttatttgtctacaactgtattttcaccagttaaatacaatttaaaaccagctgctggaatgatgccaattgaacagattcaagcgattcttgaagagtgtgcagacaatggccaagaagtagaaattgagtttacagagcaacaaactaagtatggtgcagagatgcaaattttcagtgttaagccattaccgaagaaaaacccaatggaatcaaaggcttaa

SEQ ID NO: 66672 - DNA, 618 bp, Acinetobacter baumannii
atgtcatcacaatctcaagtcgcttctactcaggtgacaaaacgccaaaccaagccagcagaagtccgaattgatgagctgatgaatgctgcacaaacgctttttttagcaaaaggtgtggaagctaccaccattagcgaaattattgccagtgtgggcgttgctaaagggactttttatcattactttgaatcgaaacagcatattgttgaagccttaaaaaaacgttatatcgatttttttatcgcggccttagacacggcagttgcaacatgtgatgctgaagattgggtcagtcaatttaaggtttgggtctcggccaatatacaaacctacctcgaaagttatgcagtgcatgatattgtttttggtgcacatcaccatgaacgtaaaaataatgaaaaaaatatgatattggaacaattgctgcaaatcttaaatggagggcagcaggcgggtatttggcatttagaacagccaagattgactgcgttattgatttattctggtgtacatggggttgcagatgaagcaattgccaatcaactgcacgatagcacagatttttctcagcaaattgcgctgcaatatttaaaaatgctccatcatgatggctaa

SEQ ID NO: 66673 - DNA, 1224 bp, Acinetobacter baumannii
atggaatttaaagttattcgtacaagagagcagtatcaagcttatcttgacgaagtgcattctttaattatgctaaatccggctataggaagtcctgagagtgatcggttggaattattatcggttttaatagaagattatgaaaataaacaatatccgatagaggcgcctgatcctattgatgcaattctatttaggatgcatgagaaagggttaaaacaagctgatttggccccatattttggtactactagtagagtttctgaagttcttaatcgaaaaagagctttaaccgtagatatgatccgagcattatctgtagggttgggactgtcggtagagacattaattggtttatcaaattcaaagaatacattagataaaaataatattgattggtctaaatttcctgttaaagagatgaaaaatagggggtggttaaaaacatttcttgctgatacggcagcatcaactgagagtattatccaaaaatatattgctcaatcagggttacaaatcggctcagcttcttttaaacgaaagttgtctggtgatgcccaaacacctaatacgatgtatgcactgtatgcgtggctagctagagtcattctccaagctagagataagaaagatagtctaggaaaatatgaccctaatttaataaatagtaattttttaagagagttagctcaattaagctggtttgagcatgggccaatattagcaattgaatacttagaaaagcatggaattgctgtagtcattgagcctcatcttaagggtacgcatcttgatggagcggcattgaaggacagtgacggcactcctattattgggctaagtttacgatatgaccgattggataatttttggtttacgttactacatgaatgcgcacatatttggaagcatgttgatgaaacagaagcatttctcgatgatttagattcatcaagtatggaggatcggagggaggctgaagcaaatcgattggcaagagaggcatttataccaagaggagttttgagacgtacagaggcatttatctcaccaagtaaagaatctattgaaaagttggctaaagagttgagagttcatccagcaatcattgcagggcgtattcgaaaagagttgggaaattacaccttattttcagacttggttggtcaatatcaggtcaaggcattattaaccaattctcatttattaagtgttgaggagtag

SEQ ID NO: 66674 - DNA, 1293 bp, Acinetobacter baumannii
atgcgacgtttttcttgtattgttgggtctgtatttttggcgatgacccaggctcaagcagagctggtaattaatggttctacaatatctagtaatgcgactgttccagtaacgaatagtgatacttatacgcctaataataatttccagagctgtttggcaaatttacgttcacaggctattgctgctggtgtttcaggtagcacttatgatcgctatacgcaaaatttaacaccagattactcggtgattgataagttaaattaccaaccagagttttcgacaccgatttgggattatttgtctggtctggtagatgaagaacgtgttgcacttggaaaacaaaaacttgcacaacaccgagatgttttaaatcgtgcttctcaagtgtacggtgtgcctgctgaaaccattgtagcggtatggggtgttgaaagtaattttggtgatatctctggaaaatatcctttattacaagcgcttggaactttaagttgtgaagggcgtcggcaaagttatttccgtaccgagttttttgccacaatgcgtattttacagcgtggtgacttaactgaagatcaacttaaaggttcatgggcaggagcatttggtcatactcaatttatgccatcaacttatgaacgcttagcggttgattttgatggagatggccgacgcgatttagtatcgagtactgcagatgcattggcttcaacggctaatttcttgaataaagcaggttggcagacgggtatgccttggggctttgaagttcaaattccagcaggcatgtcaattgatggagaaggacgacgctcgaaaaaaccattaagcagttggagtgcgcgaggagtaacacggattgatggttcgccactaatacaaggtcctttgtctggtagtacgccagccggtttaatggctccagcaggaccaagtggaccagtatttttagtatttaagaattttgatgctatttatagttacaacgctgcggaaagttacgggctggcaattgcacatttgtctgatcgcttaagaggagcaggtccatttgttagctcttggccaactgatgatcctggtacttcacgtgcagagcgtcgcgaaattcagcaatttttgattaatcgtggttatgatattggtgctgttgatggattgattggcgataaaacccgtgttgctattcgtcaggagcaaacccgtttaggtttaaatccaacaggacgggcagggcaacaaattttacgtgcattccgccaagaacaagcacgaaaaatgatgcaataa

SEQ ID NO: 66675 - DNA, 597 bp, Acinetobacter baumannii
ttgactactagaatttatgtccgtgctagtacaaaagatcaagatgctgaaagagcactagatgatttaagaaagtttgctaaaacaattaaagatgatgtaaaggaatatatagagaatgaatcaggtacaaaactagatagacccattttaaatcggctactagatgaatcagagaacggcgatacgttgttagttgaaagcgtagatcgcttatctagacttgcacaggctgacttcgatgtgttgaaaggacgtataaaagagaaaggattaaaactagtagttgctgatctgccaactacacatatgcttatcagttcaacagacactattacaagctcaatcctaaatctagtaaacaatatgcttatagacttattggcgactatggctcgactagataatgacaaacgcaaagaacgtattaaacaagggttagaaagaagtggatataaacctgccggaaaaaaagcagataaaattaaacatgatagaattagagaattaaccaataaaggcttaacaaaagaagaaatatccaaagtggtgggatgtggtgtagctactgtatatagagtattaaaaggtaaataa

SEQ ID NO: 66676 - DNA, 630 bp, Acinetobacter baumannii
gtgaaacttaatgaaataactttaggcgttattgcctgtacgttaggcgcgtctatgtatgctcatcaattgcatgcagagaatagctcacaattacctaataatagctccagtaaagatagccaaaattataatctagcctttattcatgaaaatcaaaaaaaggctgatcgtcctccacagcttgtgccttctagcttaaatatctcagcgaacacctttactcaaagtgaaaagggatatgcacctataccttatgaatccattttaagagctgtgaattatgggcagattgattattgggtagaaaaaggtattcgtgcttatcaaccctcagagaaaacagaaaagttttttacatggaaagtaaaagagacgaaaatttttggtttagatgttattggcattgagcgcggtgtttgtgacacaagtggaaatgatagatgtggtgatgcaagtcttaccgtcattatctttgacgctagcacggataaaacaagaaaagaaatcaaagaaaaaacacgtattgattatggaaatttaactactgaccaaaagaaatcatatccatatttaggttcaattaattttgaaggtaaagaaaagtccgctttatattttttaaattaa

SEQ ID NO: 66677 - DNA, 348 bp, Acinetobacter baumannii
ttgaaaaaaagaggtattaaaattactgataaaaatattaatctattctaccaaacagaagagaatggatatcacgccagaagttttgaggattcatttataagtgtcaattatgaacttataaaaaaacataaaaaagatatttttggtttgaaaaataaatacaaaattaatgataatcctgaaaatttttatgaccttacagatagtattataaaaagtaaatcagaatttgcttcttcgcttttgtttttagctctggttaatggcgacaaagaaggtgatgaaaaaattgaatggaaaactcctaaatatatttatgaggcattagaatggatcaatcaataa

SEQ ID NO: 66678 - DNA, 468 bp, Acinetobacter baumannii
atggatcaatcaataaaagcaattgaaagcgttaaagagattattataaataatcaatttcagaaagacggttttagaaattttgtattgcaaggtggggcaggtagcggtaagacagagtcacttaaggaagttattgaatttatttctaatagttatccaaatcaaaagattgcttgtattacacatacaaacattgctgtcgatgagattagatcacgtattaagaatgctaatctttgggtttctacaattcactcttttttaaatgaacaaaccaaaaattttcaaaagaatttacaagaggttttaccttatattttttatatagataatagtgatattaatgattacgaagattataaaaaaagatatgaaaaattatctaaactaagttataagcttaataatagaagaatggataaagttgtaggtaagagagattatctgtctcttatacacatctga

SEQ ID NO: 66679 - DNA, 489 bp, Acinetobacter baumannii
gtgggttatgtaaatgtggatcttttggaagtatttccttctacaaaaaatctaactgcaataaatcatgtgacacgcggtacaaagttattaattttcgatactaaaggtgattgggctaatatttcagcagatatcgagtatccatattgggttaatttggcaagtatttgttttacagaaagatgttgggttaaaacaaaaagttattcatctcaacatagcttaatgaaaaatactaaaaatagtactcaaacgattgaagaaaaaacaaaaacgtatacatcatcgaataactacagtagtacaaaaaatatagttaatggtagggggtataaaaatgtagatggaaagtacatatcaagtccaaagaaatctaagacgcaaccggcaggtgcaactgcacaatgtagagatggtacttggtcttttagccaaaataggagaggaacttgctctggtcatggtggtgtagctgcttggctttag

SEQ ID NO: 66680 - DNA, 504 bp, Acinetobacter baumannii
atgccaattcaagcaatggttttatctcgtgctcagttcgagtctgccgtaagagcctattggttattgttttgtgcatctaattttcaaatttcaaaattaagttttggctatacttttgaagagcagtttgtcaaagatacatgcccatccttaagtgaaatgttagaaatgcttcataaagctgatttgccagctaaacctgtaattaatatgtttgttgagtttaaaaagtatcatctcaaccaactaaattcatttgtccatacaggtaaacattcttttactcgtgatgtaatgggtttcgatgtaaatctagttctgactttgataagacaatctaataatttaattacagcatctgcacaaattatgttggcacatacagttccagataaacaaaaattcatccatttattgattaaaaagtatcgcgaatgcttttatttgcaagaagatgtcgattcaattttgaaatcaaagttggaaaattattttaattaa

SEQ ID NO: 66681 - DNA, 291 bp, Acinetobacter baumannii; identical to SEQ ID NO: 58034

SEQ ID NO: 66682 - DNA, 258 bp, Acinetobacter baumannii; identical to SEQ ID NO: 60406

SEQ ID NO: 66683 - DNA, 363 bp, Acinetobacter baumannii
gtgaaaaataatacgccatgcttttatattgatgatacagaacaaagaggggactttagtattgttgtattaggcttaactcatggcagtaaagagtactggaattatgatagttcgttcgaaaagagctatccagtgaaaaataaatgtattgttctaaatgaaaaaaactttaagaactttaaaggattaaaagagaatactccttatagtgtaactttaggaggagtaagagaagcctataacaaagacttctgtatcacaaagagatcaggaatacttacagtacaaaattttaaaggagcgaagtgtgtagatgtagaacctagtttttgggataagttgaagagattatttaattaa

SEQ ID NO: 66684 - DNA, 243 bp, Acinetobacter baumannii
atggaatttattttaaaaattttcgcacatagtaagtggaataaaaataaagctcaaataatttttactagtcatgctattaatattattaataatttggaaaaagaacaaatttatatggtagagaagtatgattgtgacagcgaattatggcgtttagatcaaatagaaaacgttagaagagaagataactttgctgcaaaatatttagcaggagcttttggtgctttaccaaatatataa

SEQ ID NO: 66685 - DNA, 150 bp, Acinetobacter baumannii
atgtattatgaagggagaggaggaagtaaagatattgaaaaagcactaaatttatatcagttcgcagctgatcatggagaccaagaagctgctaaaaatatagaaattataaaaaaaaatgttggtgttgataaaaatttattaaattga

SEQ ID NO: 66686 - DNA, 879 bp, Acinetobacter baumannii; identical to SEQ ID NO: 62590

SEQ ID NO: 66687 - DNA, 831 bp, Acinetobacter baumannii
atggctcaaacagcctctaaaaaatggctaggcataggcttagtcgttgtagtcctttttgttgctttgttcttatggaataaacatcgtcaaagtggctcaaatgaacttgtgattggcattagtccaccatttgcaaaacctttacaagctgctgccgatgaagcaaagaaacaaggtttaaatgtaaaactggtcgaattttctgactggaataccccaaatattactttaaatcatggggatattgatgcgaactttttccagcatcaacctttcttagacaacgcaattaaagaaactggctttaagttaaaggcatttgcagtgggtgcagcctcacatgtgggactttattcaaagaaatataaaagtcttgatgaattgccacaaaacgcacgcgtagtcattccaaatgatccggtgaaccaaggtcgtgccctacttcttttacaacaagctaagttaattacgcttaaagattcaaataatcacttatctgcactcaaagatgttgtttcaaaccctaaaaatttgcaatttattgaggttgaaggaccacagactgctcgtgcaattgatgatgttgacttggcttttggttatccacattacttgcgcttagcaaaaacagcagaccctaatagtgcgcttttactggatgacaataccaataaacgttatgccattttgtttgtagtgcgtgatgactatgaggataagggcgacaaattaaagaaatttgttgagatctatcaaaactcgccaaaagttaaagctgtgttagacgctgaaattgggccaaaactttggttccctggctggaagtaa

SEQ ID NO: 66688 - DNA, 342 bp, Acinetobacter baumannii
atgagtgagtttaaagtcggggattgggtcaagatgaaggatgattcttctgcatggatgggtaaggtagcagctatagagtacaagccgtgtttcgattcaaagtggaacagatatgagattgagattcttgtttttgaagatggcacgaaattgggttctggatgggcaattcatgttgttaaagcagcaggccaccgcattgataaaacaataggaactttggaggaattgcatcccgagttttcaaaagttttgcacgagaactttttagagttgctcggagatgatgcccacatagaaaaccacatcagcccacattgccaatcgaaggatgtttga

SEQ ID NO: 66689 - DNA, 147 bp, Acinetobacter baumannii
atgcttgaaccttggctagtaatagagttctcagctgtcgttacccggttggctaggtttgtaagtgctgaactatctgccttcgttgataaagtgccattaatggttgtgatgctgttgtttaactgggtaattgaattaccttga

SEQ ID NO: 66690 - DNA, 585 bp, Acinetobacter baumannii; identical to SEQ ID NO: 50795

SEQ ID NO: 66691 - DNA, 216 bp, Acinetobacter baumannii; identical to SEQ ID NO: 48566

SEQ ID NO: 66692 - DNA, 186 bp, Acinetobacter baumannii
atgattcagaataaatattcaatcaagcaggctttcattgatggcacatcaggcttcttattgttttggattgttttcttcttgtttgttggtcttcttcgttcatgtgccgacgagcaacacgtcaacgaactcaaagcaaaacagaacatgtatgtgcgtgttcaggttgagggggtgaagtga

SEQ ID NO: 66693 - DNA, 546 bp, Acinetobacter baumannii; identical to SEQ ID NO: 46200

SEQ ID NO: 66694 - DNA, 408 bp, Acinetobacter baumannii
atggtgttaggccagtgcgaaaaagtcatgttcaatgttggtggctggcgtaaagctcgacaagagcaacagatgcgtgattggtttggttttgtacctacttatttaataactgtcgacgcttctttctgtgagcgtgcaaacgatacagagttctgttacttacttgaacatgagctttaccacattggagtgatgagagacgaggacggagaaattgtttatagcgatagttctggtcttcctaagcactatcttgctggtcatgacgttgaagagtttattggcgtagttaaacgttatggaccaagcaaaaatgttaagcgacttattgaagtcgcaaaaaatccgccgtttgtttcgaatcttgatatttcaaaatgctgcggcaactgtgtaatcaattga

SEQ ID NO: 66695 - DNA, 246 bp, Acinetobacter baumannii
ttgcttgaacatgagctttaccacattggagtgatgagagacgaggacggagaaattgtttatagcgatagttctggtctgcctaagcactatcttgctggtcatgacgttgaagagtttattggcgtagttaaacggtggggaccaagtaagaatgttaagcgacttattgaggtcgcaaaaaatccgccgtttgtttctgatttagatattgcgagatgctgcgggaactgtgtaatcaattga

SEQ ID NO: 66696 - DNA, 390 bp, Acinetobacter baumannii; identical to SEQ ID NO: 65834

SEQ ID NO: 66697 - DNA, 210 bp, Acinetobacter baumannii
atgaatatgttagccaatatctcgtttgatgctgctgaatcaaagcttttgaaggacttaagcaaacaccctgagcttctagctggcgcagttgaatatgccttccaacgtggtgacatcgactctaaagaataccgtaactggcaaagcaagattgcagaaatggagcgtctacacactgcaaaccttttagcaactattaaagcgtga

SEQ ID NO: 66698 - DNA, 162 bp, Acinetobacter baumannii; identical to SEQ ID NO: 46255

SEQ ID NO: 66699 - DNA, 171 bp, Acinetobacter baumannii
atgcaaaagtttatgaacggttgggtgaatggttttattggggttgcaatttttgctggttcattaccggctacccgtgttgcggtaacaggttttgagcctggtttttctaacagcagcaagagctgtcattgcaggagttttgggtttaattcttatctttttgcttaa

SEQ ID NO: 66700 - DNA, 246 bp, Acinetobacter baumannii
atgtttggcatggcaaagtttttatttcaagtggcgaacttagatgaaaatgatccggccgttttaccttgtattttaagcgtgatgaccccttgcatgatgcttattattgccgggcctaatgctcaagcacctgagccacttaaaaatattgctcagatgccattacatgatttagttgaacattttaaaaaattttcattagctggattaaaagcaattagccaatcaaatcttaaaaattag

SEQ ID NO: 66701 - DNA, 240 bp, Acinetobacter baumannii; identical to SEQ ID NO: 50842

SEQ ID NO: 66702 - DNA, 858 bp, Acinetobacter baumannii
atgacaacatttctattaaattgtttattgatcctaccttatttaattatttcaggttacttcttctttaaagtacgtgatagttatttctacaagtctaggagtagtgttcaattactttatgtatttttgcttttgacaactgtaatttttgaattgctgatctggaaaggtttttttgaagaatataacttcttaaatattagtttagtaaaggaagtaaatgatagttactactttcagcaacataccatttttggattattgagtgaagccccagcaggttcaggtaagcttacttcctttgtagcttttctttcggcaattgctgcgattgcagggtggatttttacaagtcggcttcaaataattaatgcaaccaaaacgcatgctatgcaagtgctcatgaatagtagaacttctactgcatatgtcgctaaagtagatgatgctatgaagttgagagcaaaagtaaaagaagataacggctggacagaaaaagatagaatatatgtctcaaaagaaagatatttgaagttgcaacctgaagaaagatcagcagtacattatcttctaaatttccttgaatttattgcggttggtattcgacacaacaatctagatgaagagatgttgaaaggtagttttaagactattttaactaataattatcttctttttcatccgattatccttcatatccgtgagcaaactcctagcaattacactgagcttgaggttcttttcctacgttgggatcaaggtgagcatcaaacatgcttgaagtgcgaggaatggtacaaaactaaagagttagataaaaactctaaaaggtgtaaaacctgccttgaatcctga

SEQ ID NO: 66703 - DNA, 822 bp, Acinetobacter baumannii; identical to SEQ ID NO: 59049

SEQ ID NO: 66704 - DNA, 744 bp, Acinetobacter baumannii
gtgattgaaacagctcgtcatcaccgtgaatttattcaagatccgattttaaaacagcgtgttacatcgctgattggtcaagaagccatccattcaaaattgcataatgagttcaatgatgcaattaaagagctggaatatccggtcgatttttatcgtttcttgggcgaaaacttctttaaatatgtgtttttgaaatttccgcaaccgcttaaattatcgatgatggctggtattgagcattttactgcggtacttgccgaatacatgatgaagcacgaaaagaatttctactattcagatgatgccaaaagccgtgctttatggatgtggcatatgcttgaagaatctgagcataaagatattgcctatgatgtatatcaattactcaatggtagctacccactacgagcttctggcttcttcttagcattcttcactattttaggtctaatccctgcgactaccttgtttattccggttttaagaaaaccgcaggaaatgttgactagaaaattctggaaagacgcgcgccgtggtgtaggacttatttttggtccaaaagatggtgtattcggtagcaccattggccagattttcgattatttacgtcctgacttccacccaaatgatcatgacaccactgaatatctagagtactacaaagacaaattactcaaagaaggcggcgcgattgcaccttactttgtgaaggaatttaccccacctgtacgcttgtcttaa

SEQ ID NO: 66705 - DNA, 744 bp, Acinetobacter baumannii
gtgatagaaacagctcgtcaccaccgtgaatttattcaagatccgattttaaaacagcgtgttacatcgctgattggtcaagaagccatccattcaaaattgcataatgagttcaatgatgcacttaaagatgttgaataccctgttgatttataccgtttcttgggcgaaaacttctttaaatatgtgtttttgaaatttccgcaaccgcttaaattatcgatgatggctggtattgagcattttactgcggtacttgccgaatacatgatgaagcacgaaaagaatttctactattcagatgatgccaaaagccgtgctttatggatgtggcatatgcttgaagaatccgagcataaagatattgcctatgatgtatatcaattactcaatggtagctacccactacgagcttctggcttcttcttagcattcttcactattttaggtctaatccctgcgactaccttgtttattccggttttaagaaaaccgcaggaaatgttgactagaaaattctggaaagacgcgcgccgtggtgtaggacttatttttggtccaaaagatggtgtattcggtagcaccattggccagattttcgattatttacgtcctgacttccacccaaatgatcatgacaccactgaatatctagagtactacaaagacaaattactcaaagaaggcggcgcgattgcaccttactttgtgaaggaatttaccccacctgtacgcttgtcttaa

SEQ ID NO: 66706 - DNA, 774 bp, Acinetobacter baumannii
ttgttagccgataaaaagctagtcgcggtaaatggcaaagtcagaacccgtaactggcaagatagtattttgactcgttttattgcgattgaattcatctttttccaatggatctttcaaggtggacgctggcaacgttttgaactatcaacattaatgggaacaaattatgtcatctggcgcgatgctctagagactttgggcggttttgatgaaaaatcgctagtcgatgatacagaaatgagtttccgaatttttatcggacaaaaacgaattaaatgggttccctatgcaatcggttggcaacaggaccctccttcgttaagtgtattcgttaaacagcgctcacgctggactcaaggtaatttttatgtaacacgcaaatatttacctgtagcactcagaaccccattcccaatcggaattgaaattctaaataacattatgtgctatatcctttttgtaccggctttattctggagtcatattaccttaacgcttggcttacttgatattgcaggtatttcagttcctggtccatttacactactgtggggactctcattttgtctctatgtagcacaaatgtggtttacgctttctttagaaaaagttaaaccagaactttacttttactcggtcttatcttacgtaagttactcacaaatcttcttatttattgtgtttaaagccgcattcgacatgctaaaaaataaaatacagggcaactcccttcaatggtacaaaacggaacgtagcaaggagaaaaaataa

SEQ ID NO: 66707 - DNA, 411 bp, Acinetobacter baumannii
atgcaaatgattaagttgatgtcagaaaaaccttgtattacccctatacagattccaataaagtcttggggtaatcttgtggcattgtcatgtttagtaacgttttcaccgtcaccccttgcactacgaaactttcgtagttatagttcccttgctttgagcaaaatctcaaagttagctttggtcggctatgaatatctagcgcatacagtccgctttaagggctttttttgtatgcgtaatatctctatgcattcgcatgttatggcgaagctggagggggacactttcgagtgtgccagttacctagattactggtcgaccaacccctttcagctttgccaccttaattacttggtcgtaattggcagagcttctaaatcaaatctaggagcgcattctcatgcctaa

SEQ ID NO: 66708 - DNA, 303 bp, Acinetobacter baumannii
atgcctaatcaaatcaattctacaaatacacctaaaacttatgatgcaggcgatatggcggacgtgtatagcgaaatgctagagcgcagtgaatccatcggctatatgctgcaagttctgcaaaatgaaataaccctactgccaaaactcacaggattggaagaagtctattttcaatcaataacgcggtgctttggtgtacttgagcaattaagctacgacaacatgcagaaattggcacaaggcgagaaacgactgagtgcagaatgggagaaaatgaaagggggtagccacaatgcttga

SEQ ID NO: 66709 - DNA, 270 bp, Acinetobacter baumannii
  misc_feature (251)..(260): n is a, c, g, or t
atggcagcaaaatatactgccgagcacccagcaatgcgagaaattaatggtcaaattgctgcaattaataaacaaattggcgagctgaacagtacattaaaacaacttcccgatgtacagcgccaatatttacagctttatcgtgaagtagaagttaaaacccaactatacacagcacttctcaactcttatcaacagcttcgcattgccaaagccggagaaattggcaatgttcgtattgtagatactgnnnnnnnnnnctgccgttga

SEQ ID NO: 66710 - DNA, 360 bp, Acinetobacter baumannii; identical to SEQ ID NO: 60465

SEQ ID NO: 66711 - DNA, 681 bp, Acinetobacter baumannii
atgaaaaagaatattagtttactaattttaagtattggcatagttggttgtgcttctccatcctacaattatcaagctgtccctaaaaatataagcaagcccccaattggttcagttaataaagcatttgtaggggatcaaatgcttgaacaaggtatagtggttgatcgtgaagttctaaacgtacctgaaaatattaaaattagctttgcctattcccttacttcaggcatttacttaaaaacgggccaaaatgaaaaagggcaatattttcagccattcaacactgtaagcggaggggggatggttcagaaaaaccctttagctgacccatttaaagtagttatgtttgataatgaaggtaagctttgtgtagtaacagtatttaatgcaaaaaactgtactgataaacatcaagctactatgaagactgtagtaattgcatcagataattccttccaacaaacattaatttatagtggaaaatttggaaataaaattaatgtaggctaccgtgaattttcaagtaatcaagcgcgtcctgcatttaataatgatgttgaatatgatttaagccaatctaagcaaataggatataaaggcgctttgttagaagtaattgatgctactaatcaagatatcacttacaaagttttgaagaactttaacaaggttgattga

SEQ ID NO: 66712 - DNA, 741 bp, Acinetobacter baumannii
atgagtcaagacgaacttcaagaattgtcattagaacaattatctgcaaagaaaaagaaatttaatctcgataaattccttcagcaatttaatacgctggatatgaacaactacggtagttggccaatatctgtaaaaattacgtgttggatttttattttctttgctgtgttagctttggggtatttcattgttattcaaccgaaattacaagctattgataatgctcaagctcaggaaagcaatttattaaacgaatttcgtgaaaaagactcgaaattacgtaacctgcaacagtatcaggtacagcttcaagagatgcaggcaaatttcaaccagcaactagagcagttgccaaaagaaactgagattccgagtttagttgaagatatcaacttaacaggagtgaactctggattgaaatttaaaaatattcgcttagaagatgaagtaaagcaggaaatttttattgagcaaccaattgccatagaagcgactggggactatcacgcatttggagcttttgtaagtagtatcgctgctttgcctcgtattgtaaccatgcacgattttactgttgatgtatcgccagctaaagataacaagtctgatattcctgtgctgaactattccattaaagcaaaaacataccgatacgtaggggcaacagatacatcggagcaaacaggcaaagctccagcagcatctgcttcaacgaacactactgttcagccgaaatag

SEQ ID NO: 66713 - DNA, 162 bp, Acinetobacter baumannii
atgaatgctaaagtgaatatcacaaatcgtgcaggggcaagctttcctgtacgtcgtatgaactttgattttaatgatgtgccagaatactggatgaatggttccgctggacttacacattttatgacagcgttatccgcgctatttccagctggtgaatag

SEQ ID NO: 66714 - DNA, 357 bp, Acinetobacter baumannii
atgaacatacaaattaaaagaatttatgacgatgtaagcggtgatgatggtaagcgaattttagttgatcgactatggagtcgagggattagcaaagaaaatgctcatttagatttatggttaaaagaaatagctccttcaaccgaacttcgtaagtggtttcatgcagagtccgcagaacattgggatgagttcaaacaacgttatttaaaagaactagaaaccaaccccgcagtaaaagagttattagaaatcgtttcacatcataaagtcacacttttatattcggctaaagatgtggaacataaccatgcgattattttaaaagaatacttattagaaaagagcaaaagttaa

SEQ ID NO: 66715 - DNA, 372 bp, Acinetobacter baumannii
atgggcgaaaaagtcaaaacttatgcagtcaggttagatccacaagtagcagaattctacgatcaattggctaattcagaaggaatcagaaccagtaaattattcagtaaaattttgaccaatgattttcaatctattgctgttaaacagcaagccgatcgtattgaggatctggtgaatcgattagaaaagcgaatagatgattttgaggaagataataatttttctgaaaaatactatgaagattttagtagtacttacatgatgcttttatggctgttaatgaaaaatggtgcttctaaagatgaaattagaagtatgcaagctaaggccgctaattatgcggaacaaaacttttctaaggaatcttaa

SEQ ID NO: 66716 - DNA, 414 bp, Acinetobacter baumannii
gtgaaatactcaaatgaaaaaatagtaaaagctctcttactttctcctttaccactactttttttcacagcagtccggtttatcgtaatgaatcaggaatacagcctatactcgattttagtggttcttgtagggcacggtcttgtctacttggcttattgtattttgactgtacctttcagcttcatattctcaattcttttaaatcgttataacagtcttaatttattaactatctgtattgcctctataattattgctactccattttttattctttttgaatggagtcacacaggagaaatttcgaaagagtggtggaaaatgtataccaatacatggactatttttatggctctctttcctggcttatgttattggctgtttttaattaatttaaaagataaagaatag

SEQ ID NO: 66717 - DNA, 375 bp, Acinetobacter baumannii
atgtcagatattcaagaaaagaaagatgcagttttaaagaagctcactaaagcacagcagaagaagttatctctacaagagcaaattgagtatttgaaaaaagaacaagagcagatcttagaacaggcaaaacagaaacagaatgagcttaaacttaagcagcaaaaacttttaagtgaagccaaagctcaagaacggaaaaatgaaactagacggaaaattttgcttggcgcttgggttttgaataaatttaaaaatgatgaatcttttaaacatcaatgggctgattttgagcagtttttaagtgcggaaagtaagacagaagaaaatagacagaaagataaagagctttttaatgatctttttaagggataa

SEQ ID NO: 66718 - DNA, 1752 bp, Acinetobacter baumannii
gtggcaatttttcatttgaatgaaagcaacatctcacgaagtgacggacgttcagccgttgcttgtgctgcttatcgtgcctgtgaaaaactagaggatctgacttttggaaagactcaggactacactaaaaaaaagggacttgaatacaaaaatatttatgcaccagaacataccaatacaaaacttttagaccgtcaaacactttggaatacagtagaaaaaaaagaattcaatgccaatggctcaatgaaagccaatgcacgactcgccaaagaatatatctgtgctttaccacatgaattaacagatgcagaacgcataaaaatcgttgatgacttttgccgagactttgtgaacaagcacaatgttattgtcgatgcctgcatccatgcaccacatgaacataacgatgaaaccaataataaaaactatcacgtacacatgatgttcactaccagactcatcaatgaaaaaggcgaattaggaaagaaacaaagaatcttcaacgaccatggtcccgagatcctgaaggacagccgagcaacttttgccaatgttgtaaatacagtattggaaaatgccgggctagacgaacgcatcgaccaccggagttacaaggatcagggcttagactttcttgaacccactcatcatgaagggcatgaagctacagcacttcgcagacaatatgacgaggaacaaaaaagaccgcttgaagaacgtaacactgaaattgtgctaccaagaattgcacttgaaaatgatgcaatcaaagccaaaaatttagatgctgcacgagaataccaacagatcatcaagggccttgatcaagaaattattgttccaagtcgattagaagatcagattacccagctggaaaacgaacttcagttaaccgaagcagaagaaaaagagcttttagcagaattagtaaatctcaacctagaagaagaacgcctgcaagaacaacaggttcaacagatcgacaacgcatatgatgacttcattcggtgccaggatatttatgcagaatttgccaatcagttttacaccattcaaagcaatgctgctgataatcaaaagcagattgaatcaaatctcaccaagacaaaacgatggttagcagaaaacaaaagcgatttttacctacataccaataatttgttttatgactcttatcatcatacttacagagatataaaaaaacctgatttttatgcgactgaaaaatcagtagaacaggcaaaaaatgagaactggagagaatacgcaaccgaggtcgaacaacttgctaaagaatacgatattgagaatgttgtccagcgcttaggccaatgctcagagatactggaaaataatgggattgaacgaccaacgataaaaccctcgttttggcagaagctaaaacgagagtacgttcattcattcgataccctacatgattttaatgatgatatgagtcccctccttaaagcaaaacgggcagatgatctcaaaattgaacaagaaagaatgcagcaagtacgccaagcggaagtagatcgccaacgaagaattgaaaatgatcgcagagaaagtgaatttagagagcaattacgtaaagaacgagagcaaaaagaacaacgctatgaacaagaaagacacgaacgagaacatttggcatttttaaaacgccaagaattggaaaaacagcagaaaaatgagcctaaaaaaccagaaaatgaaaataacaacgattaccgaccttga

SEQ ID NO: 66719 - DNA, 405 bp, Acinetobacter baumannii; identical to SEQ ID NO: 60449

SEQ ID NO: 66720 - DNA, 1587 bp, Acinetobacter baumannii
atgaaatctaatcaatggttgactctcggctcgcatcttattttaaaaaaatggtgtgatacatctgaccgtaatttccaaaaacagtttaatgctttagagaccacgcaacgtcaaattttgcattcgattttacagacctctactttggccaaagataaacaggttcaaaactatgagcagtttgtaaaagcttttactgcaactcgctatagcgcttggcgagaagacattcagcgttaccgtgaacaaaagctttcactctctagcagtaaactggttcgtttccagccgaccagtggttcgagtgaacaaatcaagtttattccatataccaagctgtttttagatgaacttgaccatgcgattgcaccgtggatggcaagtttataccgtaagtgtccagagcttagctctggtacacattactggtcggtgtcgtggttgcctgaaagtcagcgtgaagttttaaaagacaaaaacctaaatgatgacagtgcgctacttggtataggtaagcgcattttgtctaagtttacccaagcggttccaagtaacgttgcttttgcagccaatgccgatgatgcactgtttgccaccatttgttatttggtagcaaaccgaaacctagccatgatttcggtgtggagtccaacgtttgctttgcaattgcttgagcgtttggagtcactacaacaagacgtggttgaggttttgcaaagtggtaaatggggcaggcgtcaggcttccttaaaagaagtcactgcaccgcatagctctgaaagtgctcaagccttaattgcaagttcaaacggcgaacagatcgactttaaaaaactttggccaaaattaagtttagtgtcgagttgggacaccgcaggctcaaaagcgtgggccgaaaaattaaaagaaaaattacccagtgttcagtttgaaggcaaaggactatgggcgacggaaggtgtagtgaccattccctacaacgaccaatacccattggcttaccaaagtcacttctatgaatttgaatatttagaaagtgagaaacaaggtcaaatcgttccttcatggcaacttaaacaaggtgacgtggtcagcccgctgattacttcgggtaatggcttactgcgttactgtctagatgactgcttaaaagtgactggctttttagagcaaattccgtgttttgagttccaaggccgtcgttttggtgtagatctggttggtgagaaactcgcacctgaaactgctcaacaattactgtcacagttaaacgaaacggaatcgaaagcgatttccttactggcgattgatacccaacaacaagttaaaccattttattgcgtgctttttgaaggtgaaattcatcacagcattagcaatgaatatatcgacagtattttacgtcaaaacttccactatgaacttgcacgaaacttgggacagctcgatcagcctcaaattcgccaagccaataatggctggaatgcgtacaagaagctagtcatgtttgatggcattatcgaaggcaatatcaagcctgagccactcaaaaaagtcaccctgaatagtttggaacaactatga

SEQ ID NO: 66721 - DNA, 1392 bp, Acinetobacter baumannii
ttgattgaacgattatatcactacgataaaacaggtgagttaacgctcattaaggatactcgtcgtggggctattcattataaatatgatcctgttgggcgtttattagaggcaactagtaaacttgggaaagagacttttaattttgacccggcaagtaatattttagagcgatataacagtaccaaagagcaatcttcacagcatatttctgatgaaaaaggttatggctataatcgcttagtcaataacatcgtacaggaatatcttgaccaacaatatcaatatgatgcttttgggcaactgattcgacaaaagtcatcacaaggtgatttaaatcttgagtgggatgtattggggcgtcttgttcgtagccgaaacaatcaatatacagcagagtatcgttacgatgctttaggtcgacgtattcaaaaaagaagtaagcatcaccatacaggtcaagagcagaacattatttatggttgggatggtgatactttagcgtatgaatctagtactgatttaacaaaacactatttctacgaaaaagatagtttcgtgcctttgttacaagcggcgtatcatcaccccattgagctacatcaaacccaagactggtcagataaaacatatagtatttataaagaccctctttggaatacagtaaaacaaagtcaaggttttgatgatatatggtactatcactgcgatcatttaggcacaccgcaagaaatgaccgaccatacaggtgctattgtctggaaagctcaatataaagcttggggtgagtgtaaggtagaaccggctaagtcagatttctttgaaaattcagaaattattagtaataacatccgtttccaaggtcagtattttgatagggaaacggggcttcattacaaccgttatcgttattattcgccgtatgtagggcggtttattagtaaggacccgattggattgctgggtggatataacctttatcaatatggtcctagtcctattgggtggattgatcctttgggcttaagcaatgagacagaccaaaaaaaattaaaaagaaaattatcggctgtggagtctgctcaaaataaagctgttagaacacgagagttaagtgatggtagaataagatattatgagaaagaggctttagctaagactcaaggtccaactcgaggaagatcccatgttacagaaattaatcctaaaactggtaccgttagagtatgggaggaaacatatgatcataatggtaatgtaaatagggtacatcctaagatgataaacggtgaggttgtggatattccacattatccaccaacaaaagcagatatagatcaaggtaaagcaactccgtcagggcgagctatcaaaaaagggtgtcctctataa

SEQ ID NO: 66722 - DNA, 627 bp, Acinetobacter baumannii
gtgtttggcaaaacgcaacgcggtgtatctgaaagacctaacaagcctaaaaagcctttaattcctaaatggttagggacacttgtcgctattttagcggtcttatgtatcgcagtaatgctcatgctttggaaaccgtggcaacctgtttcctcaaaaaaccagattacttctgagcactataaagaagaagaaaccaataaagattaccgcttttatgatctattgcctcaacagcaggtcactcctattccggaacaggcaattccagaaagtaaaaatcagggtactgctatgattgtagaagcacctagtacagctcaacctgccgcttctgaacctgcaagtgtaagcactgacgacacgactgactcaacagctgctatacctcaacaaccaaattatattttacaagttcgaagctatactgaccccgatcaagcagatgctcgacgtgcagaaatcattttaaatggcttatcggctgatgtaattaaaagctctgagaatggaaaaacttggtatcgtgttatttctggtccatatgacactcaagaagctgctctcgctgctcaacaaacattgcagcatagcggtattgactctattgtgattaaacgcaaataa

SEQ ID NO: 66723 - DNA, 1791 bp, Acinetobacter baumannii
atgaatacggcaatacaagcagctctcgaccatgcagtgcaaacccttcagcaagaaggtgtgcttccttcggattggaataattcaagcaatttaacacgcaccaaagaccgaagccatggcgattttgcttctaatattgccatgatcggctctaaagctgctggtatgaaaccacgcgatttagctgagaaaattctagcagcgctaccagaagttgcagacatcagcaaagctgaaattgcaggccctggttttatcaatttctttttaaatgcagatcaacgttttgcaattcttgaccagattcaagctcaaaaagaaagctttggtcgtagccaatcaaatgcagctaaaaagattcaagttgaatttgtttctgcaaacccgacgtctagcctacacgtaggtcatggccgtggtgctgcttatggtatgactgttgcaaacttgcttgaagcaacaggtgctaaagttgaccgtgagtactacgtgaatgatgctggccgtcaaatggatattttggcgacttctacttatttacgttatttggaattacttggacaaaaccttgtattccctaaaaatgcatatcaaggcgattacgttaaagaaatcgcacaaggcatcattgataaagatggcgatgcttacgttcgtgaagttgcgaatgtttataaagatgtaccagaagacgtgcaatatgctgaagagctagatagcgaaggcaacaaagtcgtattatctggtgataaagaaaaacacattgacggtcttattgccaactcacaacaattattaggtgaaggctaccgcgtattccatcaagcagcacttcatgccattttagatgatattaaagatgatcttgctgacttcggcgtaacctttaaccaatggtttagtgaagcatctcttagcgcaaaaattgacgaagcgttagaaacacttgatcaacgcggcttcttatatgaaaaagatggcaacatctggtttaaatcgactgaatttggtgatgaaaaagaccgtgttgtgaagcgccgtaatggtcaaacgacttactttgcatctgacattgcatatcacttaaataaactacaacgtggttatactgaccttgttgatatttggggttctgaccaccacggttatatctctcgcgtaaaagctgcgattgatgcaatgggttatgactcgaaaaaattaactgttcttttagttcagttcgtaagcttatggcgtggtggtgagatggttcaaatgtcatctcgttcaggtcagttcgtgactttacgtgacttgcgtaaagaagtcggcaatgatgcagctcgtttctactacgtgatgcgtaaaagtgaacaacacattgactttgaccttgaccttgctgtttcacaaagtaaagacaatgcggtgtattatattcaatacgctcatgcacgtatttgccgtatgctagaaaaagcagcaagcactggcttacaatttgaagtaagtgctgctcgttcacatgctgcacgtttatcacttgatgcagaaactgaaattcttgctaaactggctgcatatccagacgttgtgttacgtgctgctaatgcatatgaaccacaccaagtaggtaactacttaaaagaattagctgcgctattccacggttggtacaatgaacacaaagttttaagtgatgatgctgaacttacacaagcacgcttattactttcaatcaatgtacagcaagtattgcgcaatggcttagaattactcggtgtttctgcacctgaagccatgtaa

SEQ ID NO: 66724 - DNA, 1110 bp, Acinetobacter baumannii; identical to SEQ ID NO: 45116

SEQ ID NO: 66725 - DNA, 216 bp, Acinetobacter baumannii; identical to SEQ ID NO: 61237

SEQ ID NO: 66726 - DNA, 384 bp, Acinetobacter baumannii
atgggcatggatggctatttcacagatatgggttatgaaggcaatgctggagatgggtatgttccaactcactcagcaggaccaagagcctatggcattaaaggcactggcgactcaatgtttccagcaattcgtaatggctggtatgttgtatgcgaccctgatgcagatcttgtgccgaatgagtttgttcaggtgtgcttgaaagatggaagatgcacaattaaagaatttgtcggcatcaatggtggggttttaagtttgctttctgtgaatggtggtgagcgatttttctttgaaatggatgaggtagaaagcattacagctattactgacatcgtaccaccaagtcagcacagacaagaacatccttattcgcattaa

SEQ ID NO: 66727 - DNA, 273 bp, Acinetobacter baumannii
  misc_feature (216)..(225): n is a, c, g, or t
atggaagaaagtctcttgagtatcattgttgcgttggacgctaaaagccaatatgacgctttaaaaattgttgaaaaacttgatcctactttatgtcgcgtaaaagtaggtaaagagctttttactcatgaaggcccatctgttgtaaaaaaacttcaagaagaaaatttcgaagttttcctagatttaaaattccatgatattccaaatacgacnnnnnnnnnnggctcaagctgtatgtgctgccgcagacttaggtgtatggatggttaa

SEQ ID NO: 66728 - DNA, 375 bp, Acinetobacter baumannii
atggcagagtatttcttaaaacagcactatcctcagttaaatatcgagtctgcgggtatttctgggcttacaggccatcaagctgatgaaaaagcccgactttgtatgcaacgtctaggcatcgatatgcaacctcatattgcaagaaagttaagtgcagaacatattaaaaaagctgaccttattttggtcatgagtcacaaccagcaaaagcatattgagcaaacgtggcccttcgcaaaaggtaaaacttaccgcttgggtcattggcagaatcgaaatgtgcccgatccatatcagcacgaccaagctatttttgatgaaacttgtcaacttattcaacagtgcattgctgactggaaaccttatatttaa

SEQ ID NO: 66729 - DNA, 180 bp, Acinetobacter baumannii
atgattaatatttttagtctcttgtctaagacaacaaaatcaaaagttgggattgttactttaattactttgattaattcaagtatttcttggttttcatctaatggatctagctcttcattaaacgaattaataattgtggaagattcttctttacttcggaaaacatatgaacgttga

SEQ ID NO: 66730 - DNA, 405 bp, Acinetobacter baumannii; identical to SEQ ID NO: 65570

SEQ ID NO: 66731 - DNA, 861 bp, Acinetobacter baumannii
atgagtattaaacatttccgtgtcgcccttattcccttttttgcggcattttgccttcctgtttttgctcacccagaaacgctggtgaaagtaaaagatgctgaagatcagttgggtgcacgagtgggttacatcgagctggatctcaacagcggtaagatccttgagagttttcgccccgaagaacgttttccaatgatgagcacttttaaagttctgctatgtggtgcggtattatcccgtgttgacgccgggcaagagcaactcggtcgccgcatacactattctcagaatgacttggttaagtactcaccagtcacagaaaagcatcttacggatggcatgacagtaagagaattatgcagtgctgccataaccatgagtgataacactgcggccaacttacttctgacaacgatcggaggaccgaaggagctaaccgcttttttgcacaacatgggggatcatgtaacccgccttgatcgttgggaaccggagctgaatgaagccataccaaacgacgagcgtgacaccacgacgcctgcagcaatggcaacaacgttgcgcaaactattaactggcgaactacttactctagcttcccggcaacaattaatagactggatggaggcggataaagttgcaggaccacttctgcgctcggcccttccggctggctggtttattgctgataaatctggagccagtgagcgtggatctcgcggtatcattgcagcactggggccagatggtaagccctcccgtatcgtagttatctacacgacggggagtcaggcaactatggatgaacgaaatagacagatcgctgagataggtgcctcactgattaagcattggtaa

SEQ ID NO: 66732 - DNA, 819 bp, Acinetobacter baumannii
atgcatacgcggaaggcaataacggaggcaattcgaaaactcggagtccaaaccggtgacctgttgatggtgcatgcctcacttaaagcgattggtccggtcgaaggaggagcggagacggtcgttgccgcgttacgctccgcggttgggccgactggcactgtgatgggatacgcgtcgtgggaccgatcaccctacgaggagactctgaatggcgctcggttggatgacaaagcccgccgtacctggccgccgttcgatcccgcaacggccgggacttaccgtgggttcggcctgctgaatcaatttctggttcaagcccccggcgcgcggcgcagcgcgcaccccgatgcatcgatggtcgcggttggtccgctagctgaaacgctgacggagcctcacgaactcggtcacgccttgggggaagggtcgcccgtcgagcggttcgtccgccttggcgggaaggccctgctgttgggtgcgccgctaaactccgttaccgcattgcactacgccgaggcggttgcggatatccccaacaaacgatgggtgacgtatgagatgccgatgcttggaagaaacggtgaagtcgcctggaaaacggcatcagaatacgattcaaacggcattctcgattgctttgctatcgaaggaaagccggatgcggtcgaaactatagcaaatgcttacgtgaagctcggtcgccatcgagaaggtgtcgtgggctttgctcagtgctacctgttcgacgcgcaggacatcgtgacgttcggcgtcacctatcttgagaagcacttcggagggcactgttgcaaatag

SEQ ID NO: 66733 - DNA, 525 bp, Acinetobacter baumannii; identical to SEQ ID NO: 57041

SEQ ID NO: 66734 - DNA, 342 bp, Acinetobacter baumannii
atggtaaaagatgaaaatgccaagctttaccacgagcttttaatggatgcatgcgcggcccacttaatcgaagactggaaaggtgtggtatttgccgaaatcgtagacggtaaaactgttgagtccgaaaagccatatacacctgagaatgcctcaaagcttcttaatcttggtgatattggtatttcaatctggctattcattaaagaacaggcccagaagattcaggaagacgcagacaaggacaaggctttaattctgggaaagtcatggagctctacaaataccaaaaaacgtatgcgtcgaaaacgccgcacgaaatcgagcaaatcaagttcttag

SEQ ID NO: 66735 - DNA, 618 bp, Acinetobacter baumannii
atggttgttggttacgatcttgcagatgcattggttgcaggccgattagagtacagtttagcttctttaaaagctgctatttctagtaatcccgatatggttgcgaaaggaagtatcgttgttgatggccgcaaagcattaactcgtggtatgcgaaagtttggtgataagtttggccgcattggcttatgggtgatgaactcagatacatatttcgatattgtcgatgatgcaatcactaagcaaatttatggtgaatctgaaatcgttatctatggtggtttacccggtacattaggtaagccagtcttggtgactgatgctgtaggggataacgatgcttttggcttgcagtatggtgctgtaacagtaactgaatcacaagtaccgggcttccgagcttatgacatcaatgatgaagaaaacttagcaatcggtatgcgtgctgaaggtgcatttaacctagatattcttggttatagttgggatacatcgaaaggtgaaaatcctgaccttacattacttggttcaagcgctaactggattaaatatgcaaccagcaacaaaatgacagcaggtaccttacttgatttatcgggtacagcgacaactggttaa

SEQ ID NO: 66736 - DNA, 312 bp, Acinetobacter baumannii
ttgttatctgagaattcacgattaaaagatgcagcagtcttagcagataaagctctcaaagatgctgaagctcaagtggtcggtataaaaactgaatttgaagcttttaaaaatgatattcctgcaatgcaggcacgtattgctgaattggaagctggaaaagcggcagaaaacccagctacagaaacggcagctaatgattttgaaaactggtcaaatgatcaattaaaagagtatttggctagtaaaaacattggttacaagccgtctgcaacaaaagcagaacttcttaaattaatcccgaaggaataa

SEQ ID NO: 66737 - DNA, 507 bp, Acinetobacter baumannii
atgtcaaatactaatttcccttttgctttagcagaagaaatgttcaacaacaatgttgagtttcatacgattctacatgttccaacgttaactgtaggtcaatcagttcctgaagcgtttgaagaatttttaggagatatggattctaagaatgctgaagatttggttgaacaatatcctcagcttaaagagtttatagataacgtaaatcaatattctgatcgtgaatggaatgaagaacacgccactcatttgatccgtcatcacagcaactttgaatttttaataagtattcatattgctataccgtttaattttaaatttaacgaagaaggtaaatacgtctctaattcacttggagggcggtaccgttgccaatggatttttgcaacctccatgaaagatgcagcagatcaaggaattaagctttctgaaatgatccacgctgaagaagaacaaaaagctcgtatagagcaaggattggaggaaaattctaatgaatcatga

SEQ ID NO: 66738 - DNA, 435 bp, Acinetobacter baumannii
atgcaaaacgattctaacgtagaaacagtacaagcggaaattccagcttacttacagtgtgagccacgtactttcaaagtcaaatatgacaaatggagtgatgtatgtgatttggagttcacaattgttattaaatgcacagatgacgaacttcatgatcacaataatttttggtcaaaccatgaaagtcgtcttaaagaaaataatggagatattgtatctgtcattctaaaaatgatttccaaaagagttttttgggcttgttataacggcaaagatacggttgccacagatcatggggctagttggggaattaactcaatctttcatagcgaaggatggaaccacaactgttttgaaattactaaaatctctttcgaaaattatgtaagtggagatgattttgaatttgaacctgtagtggtggagggataa

SEQ ID NO: 66739 - DNA, 588 bp, Acinetobacter baumannii
atggccagacctattccctatacagatgaacaattagcgttcattaaaaaaaattgtcgtttaactcggaaagaactgacaactcaggtgaacgaagttttcgaaactacttataccgttgatcaaattagtgggctatgtaaaagaaataaatggttaacgggtcgtaacggttgttttgaaaaaggctctataccaccgaacaagggtaaaaaaggtttagttggagccaataaaactagttttactaaaggccagtcaccgtggaattcgaaacctattggttatgaatataaagactccaaacaaggatatatccacgtcaaagtggcagagccgaatgtttttaagcttaaacaccgagttgaatgggaaaaagagaatggaccagttcctgaaggtcatgtaatcgcattcaaaaattttgatcgatcagattgtcgtatagagaatctgatgctgatgaccagatcggaaatggctcgatataaccaactttatttaaatcacgcgaagggagatacaaacgaaagttatctattactggcaaaagtaaaagctaaaacacatcaattgatgaaaatttaa

SEQ ID NO: 66740 - DNA, 243 bp, Acinetobacter baumannii
atgagcactttaagtaatttaaataatcatctttttgaacagttaaatcgccttaacgataacaccttaaaaggtgcgagtttgcaagaggaaattgatagagcaaatgcgatgaccaacatcagtaaacaagtcatagcagcacacaatacacacctcgaagcagtaaaacttattgctgaacataaagggcttagtgatgaacagccagcaatcctcagcccaactttgaggatcaactaa

SEQ ID NO: 66741 - DNA, 252 bp, Acinetobacter baumannii; identical to SEQ ID NO: 56364

SEQ ID NO: 66742 - DNA, 567 bp, Acinetobacter baumannii
atgaattttaaattacttaaagtacgactagatagaattaaaactcaaaaacatacacttactccagaagatatgttgatgttagttactcaagaaaaagctgatcttaattcggggtttttctctcgcttatttagtgtgactattccacaaaaatgggaattttctatcaattcatctgaggaaattggcgttgctttagaattggttgaattgattgaaacagtatttatccctcactatcaggggcatgcaaaaaattatgcttggttagagcaatgtattttattcaaactcaagcatcaagcgtcgatgaatatttctgaattagtcagtcggtatttatcgaagattgaaaaaagtgaacatttacagattagtcgagagatcttaaaaattttatttgagcgtgagcctagcaatgctgtcattaaagcacaggcgatagtgtacaaacgtagtcaaatctatactagcgctatagaaaagtttgagtactattttgagcattgttcttatcaagaaacattatattttgattctactattcgtctggtttgttgttag

SEQ ID NO: 66743 - DNA, 882 bp, Acinetobacter baumannii
atggctcaaacttattattctgtatttacccaagctggtttagcacttttaactgaatcaattagaacaggttcaaaactaggcttaacacatatggcatttggagatgggaacggtaacttgcctgaaccagactcaagttatacaaaattaatcaatgaggtataccgtacctccttaaatgctcttaatactcatgacaataataaaaactggttggtatcggaagccattattagtagtgcaattggtggttttaatattcgtgaactaggcctttatgcaggtgatacacttgtcgcatatagtaattatcctcctacttataaaccaacagccgaagacggcacggctagagtcagtacctttagaatgattatacaaattgataactcctcaaactttgaactcatcgttgattccgatgtagttttggcaacacgaaaatatgttgaggatatagcatccacaaaggttaatcatgttgaagacatcaatgctttattaaaagaaccaacattacaggggaagattgtatatatgcagtcttatagaaaggatcagaatgttggaggagattactttaaatatgatgaaacacaaaaaaatattaataatggcattacaacttttaatggttgggtacgacagtataaaagtttagacatttttgatgctggagcttatttagtagggaataatgtatcagctgtggaaattgctaataatttcgcaaaagaaactgggaataaaattacaattcctgactggtttactgtacaggcagacaatgctgatattgatactaaaaactttattggtggaaatttaaaacaggcttcgacaccattaacttcaaatatttttttcaaaaaaaaatga

SEQ ID NO: 66744 - DNA, 609 bp, Acinetobacter baumannii
atgaatttacttcctccaaataccacagcgtttgaaaagaaaattgttgagactacagctaaaacttccgagctcaatacgaatttatcaagcttaatccgtgttgatgatgcccctgcagatttcttatctattctcgcatggcaattttctgtagatcgttggcaagatgattggcccgatgaaatcaaacgtgcacaaattaagaactcaatcaaagttcatacatataaagggactaactttgcccttcgttcaatagtagaaagtttcggttattcattgactatccatgaatggtggcaagaaacaccaatgaatgaacccggaacatttcaaattaccattgaaaccaatggaaagcctctttctgaacgtgatgaaaagacattagttgatctcttaaatgatgcgaaaccgcttacaagagaattaaaaagtattgagctaaatgttatttcaatacaaggagaaagcaatgtgggatgtggtttttatgatggtgaagaggtaattatttttcccgaacaagcaaattcttatccaaaaatgaattcaatttttttctatttcagttacgacgaaacaactatttttccgagatcttaa

SEQ ID NO: 66745 - DNA, 261 bp, Acinetobacter baumannii
atgccacaattcttaaaaaatactaaatcccgttctcggcgggcggttgtccccccaccacacctgggcagtaaatatgtcgaatactctacaaaaaatcagaccagcggttttgtagtcaaagctataccatatacagcctataagacagaaaagagtaaaaatattccttctacaaatttctacatccccccttcaaaattctacagattaaaatttgtatttctaatggtcttaaaaatcagtggcaaaacaaattaa

SEQ ID NO: 66746 - DNA, 1587 bp, Acinetobacter baumannii; identical to SEQ ID NO: 60592

SEQ ID NO: 66747 - DNA, 5577 bp, Acinetobacter baumannii
gtgaggaactcaatttttgttgttatagatcgagcaggtaatcgcagtatcgaatttaagcaaaatgctttaattgataccattgcaccaaatccgattgaaaatatcatcttcaacgaaaatggccaaagttttacagctcaggcagaagccggaagttctattgatgtattagatcagactggaaataagattggttttggttacaccgatagctcaggtaatgtatcgggttattttcagcaagtttacttacacggtgaggaacttacttttgtcgtgatcgatcgagcaggtaaccgcagtgcagaggtcaagcagagtgctttgaatgatgacgttgcaccaaatccgattgaaaatattgtattagatctcaatggtcagaactttacagctcaggcagaagcaaatagccaaattgaaatcaaaaataataacggtgacgtcgtaggttatggatcagcagatagtgcaggtaatgtttcaggatatttgtatcaagtgcatttacatggcgaagagctcacttttattgtagttgaccgagcgggtaaccgcagtacagaggtcaagcagaatgccttgattgatgatattgcgccaaatccgattgaaaatattatattagatatcaatggtcaaaactttacagcgcaagcagaagcaaatactcaaattgaagttaaaaatgctgttggtgagattgtaggttcaggttatgtggatggcgctggtaacgtgtcaggttatttatatcaagtctatttacatggagaagagctcacttttgttgtcgttgaccgagctggtaaccgcagtacagaggtcaagcagaatgccttgattgataatatcgcaccaaatccgattgagaatattttacttgatgcaaacggacagaactttacagctcaggcagaagcaaacactcaaattgaagtcaaaaatactgctggtgaagtcataggaactggttcaaccgatagcatgggtaatgtttctggttacttctatcaggtctatttacatggtgaagaactcacttttgttgtagttgatcgagtgggtaaccgcagtacagaggtcaagcagaatgccttgattgatgacattgctccgaatgcgattgaaaacattatctttaatgaaaatggtcaaaactttacagcgcaagcagaagcaaatagcaaagttgaagttaaaaatgctgcgggtgaggttgtaggttctggttatgtggatagtgctggtaatgtgtcaggttacttgaatcaagtttatttaaaaggtgaggagctcacttttgttgtgattgatcaagctggtaatcgtagcattgaagtaaaacaaacagcctttcttgataatacagcaccggaaaatgcgactaatttagtatttagtgaagatggctcatatctaagtggtatggctgagccaaatgcgacgattcaaatatttgatcagtatggtcaattattaaatcagtggaataataatgttaattgggacggaacatttaacatctatttaaacagtaactacatgcatggagaagtatttaaagtagttgtagttgatcaggctggtaatttgagtggtgaggttactgtaaaagcaccgcttgatgatattgctcctgtagctgcaagtgatctggtctttaatgaagatggttcatccctttctggtgtagctgagccaaataccttcatccagatttttgatcaaaatggtcagcagatgaatacgtggagtcagagtgtaaatgctgatggtacatttactatttttttcggtacttacaatttacagggtgaagagtttacagtcattgttaaagaccttgctggaaatgtgagtgaagctgtttcagttaaggcgccgcttgatgatattgccccaaatccgattaaaaatattgtatttgatgcaaatggccaaagctttacggcacaagcagaagcaaatagtcagattgaaatttttgactcatttggtagtcagataggttggggttctaccgatagcactggtaatgtgacgggttacttctatcaagtgtatttacatggagaagaattaacgttcgttgttatagaccgagtaggtaaccgtagtgatgaaatgaagttaaatgctttgatggataccattgcaccaaagccgattgaaaacatcatctttaatgaaaatgggcaaaattttacagcacaagcagaagcaaatagttttattagtgtcaaaaatgctgcgggtgagtttgttggctatggttatgtcgatagtactggtaatgtgtcaggtcacttcaatcaggtttatttaaaaggtgaggaactcacttttattgttatagataaagcaggtaatcaaagtattgaatttaagcaaaatgctttaactgatgatattgcaccaaatccgattgaaaacatcgtcttaaatgaaaatggtcaaaactttacagcgcaagcagaagccgatagccgaatcgaagttaaaaatactgagggtgaggtcgtaggttctggttatgtagatagtattggtaatgtgtcaggttcttttaatcaagtctatttacatggagaagagcttacttttgttgtagttgaccgagcaggtaaccgcagtacagaggtcaagcagaatgctttgattgatgatattgcgccaaatcaaattgagaatattgtttttgatgtaaatggtcagtactttacggggcgtgctgaagcagatactcgaattgaagtactagatcaatttggcaaccgcgctggttggggatatgttgatagccaaggtaacgtgataggttatttcaatcaggtttatttacatggagaggaattaactttcatcgttgtagatatagctggtaaccgaagtgttgaagttaagcaaaatgctttaattgataatgttgcaccagcagcagctacaaatattactttaagctcagatggattgctttttggtgaggctgagccaaatgcaacgattgaaattattgatcaatatggtgcagttatcacaacaactgatgttggatatggtggggtctttaatcaatggatcaatttgagtcaataccagacacaaaatttaagtatcgttgtcaaagatcaagcaggtaaccgcagtgaagttgttaatgaaatagtacctttatttaccaactcaccaattgctgcaacagagctaaaattggatgtaaatggccatattcttacaggtaaggcgacagcaggaatgacgattgttgtcacatctactgatggtcagatcattaatggagaatggagcagtatagttaatgaagatggtagttttgctattaagttaaatagctattatctacatggacagacgttactaattcgagtttatgaccagaatacatatcaatacagcccaatcactgaacttattgcgccattagacaatattgctccagtgattaatgaggtagcgattagtaacgacggtcatgagataactggacatgctgattcaaaagtaattattaaagtaatagatgcggatggagatttacgagcagaatttcaaatggaggaagctggatatttcaatgttggtatgtatccacctgtattacgtggagagcaattatttatcacggcaacggatttagctaaaaatataagtacgccatttaatattacttttaatgcagatattaatgcaccaccatcagcagatcatgttgttttatctgaaaatggtttcttcattgagggaactgctacaccaaatagtgagatgcatatttttgatgtgtatagtaattatattggcggtggttctgtagatgaaactggatattttaatatccagttatactcacctcaggtgaatggacaaactttacgtgttgttgtggaacataatgggtatcaaagcgtttatacagaaattaaggcaccgatagacatcgttgcgccaaatgcagcaacacaacttgtattggaagaaggaaatatactttctggggaggctgaagcatattcaactgttaatattttcgatgctaataataatttagttggtcagactactgtgggaagtagtggtactttctgggtgcaattatggtcacaatattggcatggtgaaacattgacagtaaaagtagttgatgccaatcaaaatataagtgtgggctcaacgattgttgctacgaatgatacaacagtaccgaatgtagccacacaacttgccataaatggattgggagagctcgcgggacatgcagaaagtagagctatccttgaagttatatatcattttgctgatcaagaatcttctgtaacttctgtaataagtacgacggttatggttgatggaactttctctgtttatatgtatgagaatgcaacatcatttgatcttactgttattgatcgtgctggaaatcgtagtgaaactatcaataaagcaattagtgatttaactacaatcactgttgatcagtttaaaggtgattctgctgataatacttatatagttgatcatataattgattttgttcaagaatatattgttgagccgtatgcaatatataaagatgtctggattgataatagctatacatatccagaatgggtcactgaaggtcattacgaacagatatggtttgttgatggttattatgattcccaattggtcacaagtggttattcaactgtacaaaatgtttatcaaaatcagaatggtataacttatattgataatggcatggcagatggcgattatagtcgatatgaacaacaatattatgattttgcgaatggacaatggcaagaaggttatgaattgacctatatacgttcagaagaaggctgggttgatactagtcattatgaagacgtttatgttgatacaagtcattatgaagatgtttgggtagatactagccactatcaagatgttttcgtagaaagcggttattgggagaaccaacttgttgaatcaggctatcgagatgttgattttggtggacacgataaaataattagctctgtgagttatagtctggttggatattctgattggtcgacaggtctagaaagcgggcgttatgtagaagacttggaactggttggttctgctcatctaaatgcaacaggtaatgctttagataatcttttaacaggtaactctggtaataacgttttgaatgggcgtgaaggtaacgatacctatatgactaatgaaggtactgattccatactgttccaattgctaaatagccaagatgcgactggcgggaatggacatgacacggtgttagattttactttaggtgatatcagaactgaccttcaagctgataaaatcgatttaagtgaactattaattgactattctagagatgtaagcgcattagctaaatttattactgtagagcaagatgctgggaacacgactattagtcttgaccgagatggcgagggtacaatgtttaatagtgtgtcattgataactctaaatcaagtaaatacaacattagacgaattactaaataaccagcaaatcattgtttaa

SEQ ID NO: 66748 - DNA, 2724 bp, Acinetobacter baumannii
gtggttgtggatactaccgcaccgcaagcaggtaaactcactttatctgatttgaatgatacaggtgtttcagcaacagatcagattacgcaagataatggttttactttaaagctagctcaaccgattgtgattggggaacaagccgctttactagaccactatgaagtttcaaaagatgaaggaaaaacttggcaagagacaacagctgatcaaaaagatttagctgatggtatttaccaatataaagctatagtgacagacctcgcaggcaatatctcagaatctgctatacaaaaagttattgtagataattccttaaatgttgaatcaaccacagtgattgtaaagccgattactgaagacaatacaataagtctagttgaaaaagatcaagttatttctataagacttgaaatagctaatttacccacagatttaaatagctcactgacatcagtaaatacgacattagacaatgttacttataattttcattttgatgaagtcacgcaagaatgggttactgaaattccagcagagtttctttggtcagtagagccgcaaaccaatatatcaattgagattagtcttactgatcaagctggcaatacagccattatcaaacatacccaaaattataatgtggatcatactccgaattcaccaaccctagattcactgactttcaacaatatagatggagctatcatttcaggtagtgcatataaaggaagtaaggtcgatatctacaataaaaatggtgattggcttgcaagtacaataactaatgaagaaggtaaatttactttacaagatctttcaattaactcaaatcaagaagtttacgcagtcgctacttataatggttatagtagtgaaaattcatcaattgggctagttactgaagttccagctattagtattacacgaattagtccagaaggcgtgattagtggttatgcgactgaaggtagtcattttattgtaaaagatcagaatggaaatattctacaagaatttaattctaatgtatttgatagctctggtattacaccatttagtgtaatggcattaggcgaattaagaccatttattttgtccctcgatcagcctttagaggaaggggctcaaattattatcactacagataaagataatatttcaggccatccacaatatattactgcagactatactccagcagtatttttagaaactccacaatttgatattagtggtgaaactttatcagtacatgttaatgaacctaacagctttattcgtgcattttctggagaaggcaatttaattgctaccggttttaccgatgagcaaggctttgcaagtttacaagtgttccaatttttaaaagaaagcgaaacggttactgtacaagtagtagataaaaatcaaaatacgagtgaaaccctaatcgaggttccaaactttgcttatattccacatattgaacgtattacacaagaaggcttaatttcaggagttgctgaagataatagtacggtaattgtacgtgatgctgacggcaatgaattaggaaaggttacattaggtgatgaaaatagttggagtgactttagtcattttagcttgaatgtaaaccgccctttaattgatggagagaaaatttccgttcaaattattgataataaagggttaatgagtcctgagcaaaatatcatcgtagatctgactcctccatctgctccaacggagttaaatttcaatgatgctggtgatttagtttatggtcatgcagaacctttctctgaaattttagttaaagatgggcaaggaaatattcttaataaatggttttggaataactggaccgatgagagtggaagtttctcaatagaactaggtacatttttaaccaatgctgagacagtttatgtcacggctaccgatgtaaatggaaatgtaagtttagcagctcagatacaagcgcctaactatgcttttgccccccatgtagatagctttacttcggatggcgtgataagtgggcaagctgaaaataatagtactctcactgttaaagatgccaaaggtgacgttgtagctgaaattaaagttggtgaagataacggttggaatggatcaagttattttaaactccagcttgatcgtcctcttgtcgatggtgagcagtttttcttatcaattaaggatgcacgtgggcaagtaagtgctgatactgtaattaccgctgatacggttgctcctacaccagccagcaatttagttttctcagaagatggttcatatcttacgggtgtagcagaactgaatactacgattcaggtttttgatcataatggtcagctagtgaatatatggaataacaccattaactctgacggtacatttactatttacttaggtagtaacaatttacatggagaagcattcacagtcactgttaaagaccaagccggaaatgtgagtgaggctatttcaataaatgcgccgcttgacgatattgcaccgaatccaattaaaaatattttacttgatgcaaatggtcaaaactttacagcacaagcagaagcaaatagtcagatcgaagtttttgattcattgggtaatcagacaggttggggttctacagatagtgcaggtaatgcttctggttctttcaatcaaacttatttacacggtgaggaactcaatttttgttgttatagatcgagcaggtaa

SEQ ID NO: 66749 - DNA, 477 bp, Acinetobacter baumannii
ttgttaggtggctataatcattatcaatacggtcctaaccctattagttgggttgatccaacggggttgaattttaaatctgtcggaaaaattaaagaggaaagagcaagaaggcagacttcaagttcagccccttatattaaacatacgatggctaaatgtaaaactcaggcacaaaatatttctaaaaaagaagcacaatattgggatatgagtaagtgtgaatctaatgtggcacaagttactgcctttagaaatagactagaaaaagaaggtctgaataaaggctataaagtcgatttaggtgataataaaggttcacattattatatttatgatgctggaagaaatattggttttaatgaaggaaaggaaactcaatatatgagaattgaagtctcatcaacaaatgagtttcatggacatcctatatcgaaacaacgttatgaatcttatatgaaaaaggctgtaaaatga

SEQ ID NO: 66750 - DNA, 3348 bp, Acinetobacter baumannii
atgtcgtttgaagagatttggctttcttatttggtaggtgcaacgttgtggattgcaccgaagtcacttgtcagtgaccctgagcggttatgccaaaccttaaagcatgaacaaattacagtactgcatgctgttccaacgttacttgccttatttcctgaagacgtacctaatttaagaattattaatttaggtggggaaatgtgtccggattcactggttgaccgttgggcattacctcatcatcaaatgtttaacacctatggaccaaccgaaaccacggtttctgcaagtcttgagttattagaacgcggcaaacctgtcaccattggcaagcccttaccaaactacggtatgttggtcattaactctgaaagagagttgctcgagcaaggtgaaacaggggagttatgtatttttggtccaagtgtggcacaaggctatttaggacgtcctgatttaaccgcagataagtttattgaaaacccttgggcaatgagtgtagaggaagagttactctaccgtactggggatttggctaaaattgatgagtttggtcaagtacactgcttaggtcgtgccgatgaccaagttaaaatccgtggtttccgtgtagagcttggcgagatcgaagctgcgctttgcgatattgacggaattggtacggcagccgttattcttcgtcctgaagacggcattgatcaacttattgcgtttattgcaccagaaattgatgcaaagcaagctatagaaattaaagaactacgccataacttgagtcagcgattaccgccttatatggtgccaaatcgttttgagattattgaagaagttccacgtctattatctgggaaaattgaccgtaaagctttaaaagcaagaccgctcacaagtgtggtagatcgcagtgaatctgaccagccacagaacccggctgaagaaatcctatttgaaattttgaatcgcttgttcccgaacatgccgattaaactcgattcagatttcttcgatgatttaggtgggcattcactactcgccgctgttttaatttcaaatctgcgtgagcatgcggaatatagccatctgaccattcaaaacttatatcaagcgagaagagtaggcgcgattgctgcactcatgttagaacagcctgaacctactttatttgatagccaaattggacaagataaccctcgtaatcagacctataaatggttatgtggtattgcccagctcgttactattccggttttaatctcgattaatattttgcagtggttagcgccattctttacctatcactactttaccggtggaacccgcgacagtattccgtatgcgattgcgttgtctttattggtgtatgtcagtgttattatgagcagttttgtactgtcgattacggtaaaacgactactaatgttaggaattggcgcagggcgttatccattatggggattaacctatttccgttggtggctagcagaccgtattagtaatatttcacctgtttatcttttatctggctcgactttacttaacttatatttgaaagcactgggcgcgaaaatcggccacgacgttaccattagttccgtacatattcgtatgccatctttactgactattgaagatggcgtgagtattggttctcaggtgaatttagaaaatgccaaagttgaacatggccacttggtattaggttcaattcaccttaaacaagacagttatgtaggttcgtatgctgtattagaagaaaatacagtgttagaaaaacaggcccatgtaaatgccttaacttcaattgaatatgacacggttgtacctgagggcgaaatttgggatggaacacctgctcagaaaatagggcatatagatgagcaagctaaattgccagagcgtcctaaactatcgtttatacgtaaaattgctgaatatggatactatggcgttagcgcattaattattgcctgtcttttctttattccaatttttccaagcttccttttggtcgactggttagatgtaaatgtatttaatattaacccgaacaaccatttgcaaatcgcgctttactatttcattttagcgattccggctagtgcaatgatgatgatgattactgcggtgatttcttcaggtctgcgtaaaattgcattgccgcgtcttgaaaccggaacctatgcggttcatggcagcacgtattatcgtaaatggtttgcggcccaaattttagaaacgagcttacaaaccttacatggcttgtttgccaccatttatgcgcctacatggttccgtatgctgggagcaaaagtaggtaaaaataccgaaatttctaccgcaaccggggtcattccagaaatgctgactttgggtgaagaaagctttattgccgatgctgtaatgctgggtgatgaagagattaaaggcggttggatgtctttaaaagcaaccaaaatcggtaaccgtagttttgtgggaaatagtgcttatattgctgatgggacagtgttaccagacaatgttttaattggcgtgcaatcaaaaacaccagataaccgtgaaatgtatgacggacaaacttggtttggttctccggcgttgctgttacctgcacgtgaagctgctgaaaaatatcctgaccatttaacctttaaaccaagtattaagcgccgtttaatgcgtggttttattgaagggcttcgtattgtattgccggccgcacttgcgattggggtgggttatatgatcgtgctagacgttattgatgtgattaatacctacaatattgagacgggtctggttgcattaacgctcgcaggactgctttatggtgttggctgtttccttattgttgcgctattaaagtggattttgattggtcgctatcaaccgcgttcggcacctatgtggaccatgtttgtatggttaagtgaagggattaccagcttatatgaatcagttgcgattcctaacttcttaaactacttaagaggaacaccaatgttgccattcttcctgcgtattttaggggttcgtattggtaaagatgtttatatggatacggctgatattaccgagtttgactgtgtcagcattggtgatcgtgccgagtttaatagcttttcaggcccgcaaactcacttgtttgaagaccgcattatgaaaattgggcaagtaaatgttggcaatgatgtagtggtcaatgcgcgcagtattattttgtataacgcaaacgtgagcaatcatgcagtgttaggtccattaacactggtcatgaaaggtgaaaatattccggctaaatctgcgtggattggttcaccggctgtgccttgggttcataaataa

SEQ ID NO: 66751 - DNA, 363 bp, Acinetobacter baumannii
atgaaaagtcatgatcatttgcttgataagcaatacgatgaagaagactacaactgtgttcattttgctcatgaagctgcattggatctatacggaatagacagaggcgaagcactcgaactctttatgcaacctaagggcaaaattactttcctgccatcacggttaaaacttttaaatccgctgcccatgcccaaggaaggatgcatagtcgccttccacccgaaacaaagaaacaagcccccacatgtggggctttttcgtttgggccgtgttctacatttgatggaaggcggagttacttatttagcggaagacgtcattaaagcgatggggtttagtcgggtcagttactatgattaa

SEQ ID NO: 66752 - DNA, 393 bp, Acinetobacter baumannii
atggaaagtagttctttattaaaaaatcaaatagataatttaaaatcttttcaaaatatcgtctggaatccggagggctctaaagcttatctagatcactttccttcatccggcattttgcttaaatggaatggtgaaattattcccgcaataaatgaagtatgtgaaaagtatctaaatgcaattgattttatggatgaaataacaatttcaaatttggtagaattaatacaagaaattattgatttaaaagaagaattaattatattaattagcaacaatagtcagaataatcataatatttttataaaaaattttaacttactttatgaaaatattaacaagttagctaaaactagtatttacttagatctgtctcttatacacatctga

SEQ ID NO: 66753 - DNA, 576 bp, Acinetobacter baumannii
atgtttgagcatccaccgacattgcgactggttgtggtttctggcggatttggcatgcaatccaaaaccgaaacattggtgcaaacgattgccgatgaaattgccaaacgactttcagttgaattggaatttgttaaatttagtgaaattggtggctttattggtcaaacatttgatcgtaagcaattacctgaacatgtgcaaatagcgttgcatacagtagaaacggctgatgccttaattgtgggaacacctgtttaccgtgcgtcttaccctggattattcaagcacttttttgatctgatagagcaatttgctttggtgaatgttcctgtcatccttgctgcatctggtggcagtgaaagacattcactggtgattgaacatcaattaagacctttgtttagtttttttcaaactcaaacaatgtcattgggtgtgtatgcgacagacaaggatttttccagtgattataggattattaatcatgaattgttagagcgtattagcttgacaatccaacgtgccttacctattttacgagccataaaattaagacattttatgaaaaactag

SEQ ID NO: 66754 - DNA, 537 bp, Acinetobacter baumannii
atgaaagaaattgtattaagtgatttgatcaatcagcagaaagttggaccttatcaaaagtttattttggccacctgcttattactaatgattatggatgggtatgacattcagtccatggcttacgcagccccactgattatagaagaatggggtgttcaaaaatcgatgttgggagttgtgtttagtgcaagtttgtttggtttgtttgttggatcatttttattaagttcactttctgatcgttttggtcgccgtccgatactactgatctcgacctttatattctccatattaatgctgttgacaccacatgtaggcaatattgagcaattgaccgtaatccgttttgttacaggaatttttttaggcggtatcatgccaaatgtgatggcttatagctccgaaattgttccatataaatctcgtatttttaccatgatggtcatttcttgtggctatacggtaggggcaatgttggggggcggaatatcagccttactagttccttggggaggatggcagcacattctttaa

SEQ ID NO: 66755 - DNA, 243 bp, Acinetobacter baumannii
atgagtctaggcgaagaaatgtttgaatggcgcaagcagatggttgagaaactactgcttcaggaaagtaatattgatcaactagaagaaaaagttgatcgtgctgaaaagattctttttggtgattgcacagccgctttcaaaatagagtgcacgcttcggaacgcgtatgcgctgaaagctattcttgatgactttgccaccaagaataactgcaagctgagtatagtagagtgtgagtaa

SEQ ID NO: 66756 - DNA, 138 bp, Acinetobacter baumannii
atgataagcgtgcctgaaataaacgctgttcctgagctagttttaataaccctaattcttgctgtttttgctgttccagcaattcaatggcttgcttctgctcagacttacttaattcaatgtcatgagctgcattga

SEQ ID NO: 66757 - DNA, 723 bp, Acinetobacter baumannii
atgagtgaatcaactttatgggcggttgcaatgcgacctgaaggttacagcccttttagacaaacaccagcagcttctaaagagatagctgagagagctgttgaacgttatagaaaaatgcatgaaaaggaaggcaacaactttttcttagaaatcttcgatgatgttatcaaagtccagaaatggcacggttcccgcaaagatcatattaaaaatctattttatgtagaaagttggtttagtgaacctatgtaccaatgctttgatttgaagacagctgaacgtgtttttaaatttgatgaaatagtaatttgctataagaaaggttctgcccctcttgtaaccaaaagctttgatgaagcaaaactattttatggatctagtgagacgggttttaaatatcagatccagccaatagaaccacctgaaaaccttttcaattggtttcatccagatattgaattgtttgacaccattgaagaaggagcagaagcctatacaagagaacagtgggcacaacttcagatgaatcttagagttgaaattgaaactcaactattagattacgatgaaataccaaatataccggaagatgcagtagtttggcccaactggaagccagaaccgccagaacaaggattctttttaattgcagcatttgattcagaagatggccctgtactttggtgggcaaatcctaaagcggaaagtaaggagaaataa

SEQ ID NO: 66758 - DNA, 534 bp, Acinetobacter baumannii
atgtatacaaatagttgtaactattgcggaaccagattttctacggataactataataaagtattttgttcaggtcattgtgcggataactataaaactacaatgcaaaataaaaacacttcagcaactaatactcatactcgacatgatcataatgttacatctacccaaggaatctcaattgaagctgtaatagttattgcagtgggtggaatagcttggtcatcaatgaaaaattgggatgaatttgaaccagtaacaagtcatattttacttgtatttaattatcttttttataaaccccttcattttacttccactatttatgattattttactagtatagagcaggatcacgggcattggatatctgttgttaagtggggaggatctatattttatgttctttttgttttttcattttatctagcaattatctcaatattaaatgaaaaaaagcttacatgggtttgggttttgtttttagtatccccactaataacacatggagtgtggtatttctttatttcatga

SEQ ID NO: 66759 - DNA, 258 bp, Acinetobacter baumannii
atggcttttttaattaaagaaaaaaacattttatcaaatcaatatcataactatataaaatgtcatactgaaatggttgcactatctacatatattgtagatatagagaaaataaaaagtgaagatttaaaaatccgtttagctgaaaaatattttactggctatctgcctatagaaaaagaaataaattcaaatgctattagcagtgatgcaataaatcaaataatatctttaattaaagaaagtcagaagaaataa

SEQ ID NO: 66760 - DNA, 567 bp, Acinetobacter baumannii
atgttattaatgcacaataaaaatgcttatttctggttaaaagatctagcaaaaaattctgacttcctgaatacattacctatttctgagaagcaaactgaagaatgctatgatcaagaattagcttttcgtttttttgttcaaagacatagtgatggcacaactcgtaaagaacattcggatgtaggtccatacctcaatgctgagttaaccagactttttgatgaaaaaagtggctttaactatgatgaagaacaaggaattttcatcaaaacttttaaaatagctaatcaggctctaggtgaggatgcttttaaaaaatttaatcattcaaaaggaaaatatgaaggagcaatttcattaccagtttatgaagccatgtctgttgctttatccaacctcattaaatctagtaaatatgacgatgagcaattgatagatttgtataaagataaaagtaaagagttaactgctcacgaagattttaaaatctctcaagaaagaagagttcgacctctagacagaatggtattaatgtcaactatagggcaggaaattctaaaatga

SEQ ID NO: 66761 - DNA, 195 bp, Acinetobacter baumannii
atgggcttcattgtaaagctattagaatcaggaaattattttattggtgatgaaggagaaatcatcacaacttcctctagagaagaagcaatttctgaagggcaatttgaggaatatgaagaagcaaaagaaaccgctgaatattggtctaaacaagtggtactaggtgtaaattacatcattgaatcagtctaa

SEQ ID NO: 66762 - DNA, 162 bp, Acinetobacter baumannii
atgtctgctgaaactgtgcctgtacctggcaatgaagtgttgcctgcagggtcagtcgctgttgcagtcactgtatcgccatccaccaggttacccgggtttggtactgaccaactaccatctgtgcctgctaccactgttgcagttgtgccatcaggataa

SEQ ID NO: 66763 - DNA, 372 bp, Acinetobacter baumannii; identical to SEQ ID NO: 58557

SEQ ID NO: 66764 - DNA, 699 bp, Acinetobacter baumannii
atggtaggaggtctctggtttttctttaaaagggaatatcatgagcagcaactgcctgagccatcaagtgaagggtgcagtattattattccttgctttaatgaagaagctcaggtccgacaaacgattcgttatgcattacaaacaaaatatccgaattttgaagtcattgccgtaaatgacggaagtagtgacagcactgcagaaattcttgatgaactggcagctcaagatgcccgattaagagttgtgcacctggcagaaaaccaaggtaaggccgtagctttaagatcgggagtgttagtaagtaaatacgaatatctagtttgtattgacggagacgctttattacatcctcatgcagtactttggcttatgcagccttttttaaattttccaagaattggtgctgtaactggtaatcctagaattttaaatcgctcaagtattttaggtaaattacaagttggcgagttctcttcaattattggcttgattaagcgcgcacaaagaacatatggccgtatttttacagtatcaggcgtaattgcagcttttagaaagaccgctttggttcgcgtgggcttttggtctgatgacaagattacggaagatattgatatctcttggaagctccaaatggaccattgggacattcaatatattcctcaagcactttgttatatctatatgccgtaa

SEQ ID NO: 66765 - DNA, 1500 bp, Acinetobacter baumannii
atggacttggttagattgaatgcaaaagtctatagaagtaaaacaggtgtctacactgaaattccagtccttttaacggagtatggggtcatagactcctttgttgagtttttccttgatcatagccatatacgtagtagaagctggatggaaaaacacataacagccataaaattatttttaaattttttagaagtaaactttcaaactctcagtactccaaaagaattattcaaagtttttgttcaacaattatacactggtagtattggtttagatggatttgatccatctaaactttattggaaacctagaaaaattacgacagcaaatagtctgattaattcattaacagattattttgattggatttcagaaaataaaaatcttgaaagtattaatccttatatacctaacagtagctatgaggaaaagttattttggggtgcatggcatcataagcataatcgttcctttttagcacatacttgggataaaaatgcagcacaaaccctttctgaaaaaactagattttctcaaaaagctcgcaacatatcctcacacttagatcctgtgaaatttttccccgatcaatatttcactcaattattgtttgagggatttacaaattatggaagtgaacaatcattatcagttttcgaaaaactaaatattagagatattttaattacattactgctcaatggtggtggtttaagaactagtgaaccattccacctatatttatcagatgtaactttagatccaattttatacagagaaaaacatatcgaaactgctcttgtaagaatctatcacccctcagaaggaactgcaccagagggttggagcaatgccaatcccaagatacaaagaacacatagagaaagttatctcaaaagcaagtttggtctattgccccgcaataaggtcagtgatagaacttatagagcaggctggaagattcgtaaattagatagtgaaaaagaaaaatttataacagtgcaatggtttccccaaatttatggtcagttgttttataaactatggaaattatacctaatacaaattagagagattgaaaagaaccatccttttgcctttatcacattatcaggcgcaacaataggttcacctttatcaatttctgcctattatcaaaaccatgccaatgcagttaaaaaaattggactaccatcagctaaaaatagtggcactagcccacatggtcataggcatgcatatggtcaaagacttaaagatgccaatatagatccgattattagaagaaatgccttgcaccatgcaagcctagagtctcagcttgtttattgtgaacctcaagttgaacaggtatcaaaaattttaaactcgatcgaagataatattgcttcaagtaaagcatcaaacccgaatattaaagtgtttttagaaaactgcttcaaggatgtagatcctaatgaactattatcaggacaatcatggttattaaagggataa

SEQ ID NO: 66766 - DNA, 2550 bp, Acinetobacter baumannii
atgggaaaattacatgcaagaggtaatggcattacagaagatatcgactttaattggttatatcaattgtatggcatggaatataaaaattggagcattttggcacagagatggctgaagctacaacccaaagctctttcaagtagaagaaattcgctcagccgtttttttcgctcctttttaatcccattaaaactaccaactaacccattaattttcttcgatcgtaatacaaatattcctgacttttttgaggaatgcattcatccaagccgagatgatcaaatctcaattactcatagacaggctgtaacctataacaattatgtacgtgaatttttagatttttctttacaagaattagtcggaattgaagatgattttggtcacaacacaattccaaaccaatatagaaatccgttaaagaaaaaaactcgttcaggtattacggtttcagaaactataaaaactcccttaccttataactatattcaagaattacgagaaattatttgctctgctgaagcgaccagtttcaaggattggaaatgggcgcaagaggctggtaatgcgataagtttaggcaaatctggcggtgactggtacgaggtaacttctgaggatattaatttcgaagatcctaattgtgtatggcgtaaacgtattatcccaaaaggaaaaatgtatcaaggtttaaaattatataaagatcgatcagtcctagagatgtggtgtcctgctaatgctgttgccttatatgtaaaattagaattaccgcttagaacctctcaagttcgttggcttgattcaggagaagctgatttatggcgttacgaaaatggtaattggatacttaactctcatcacctagctccagtaactaaaatagagcgagccaattattccataggtcgtggagtatttagaaaagtttctgatcttcaaaataattcaacttctttatttatcaatacaaataagacagcggatgtttataaagatgggatgtcaaaaggatacacaattccgtggcagcacgaacgtgtcctaaagtggctagaggctctccgtaattggcaagaaaaatataatccaattgaacgaccaacgagatggactgaattaaaacggaaaaatattggtgatttaaagagtgaacaacaactaaaagagatgcctccaacgtgctttttatttagaaatagagctgttgaactaagtgaagattttgcatttcctgtttcagacaaagatgttatgcgtttatggttcaaattattaaaaaatcttgaacaacgatgctttaatcgtggtgagaccttaacaaacggagagcccattcaatttgtcaaaccaagccaaggtatttttaccaactacactacaacattctttcctctgcactctctaagagtgtcattaattacgagttttgctcttgaaggtggtgtacctattccgatcctttctaagctcgttgctggtcatagtcgaatcatcatgactttgtattacacaaaggttggacaagcctatatgcaaaaagttatgaatgaagcagaatcaaaactagaacttacatcaaaagaaaaatttaaagaatttcttatcaattcagaatatgaacaaatcaaaaactcggtagcttttcaggatatttcatctctaaatgcaattgctacgaaaacagaagtaagttggcaaatgatggatcgagggatctgccccgttggatgtcaaggatgtgaaaatggtggagaacaatttgctaaacttggaaatgcccctattagttatagtccagtagctcgtgattttcagggaaactccaaaaattgtgttcgttgcagatggtttattacgggacctgcttttctacccagtttaattgttcattttaataatctaagttatgagtcaagttgttcttcagatcgatatagaaagttcgagtctgaacttgaagaactaaaactaaataaatttacttctgaagatcgaaaagaaattttctatgatgaacaaaaattaaaaaatgctgaatttcaatatgaaagagaagcaacaaaaatagattcaataatgaatgatatgcatgcgacctacaaactcatttctcagtgtattcagattatgaaccaaaattctgataaaaaaattcaattgattggcaatcaattacctgaagatatcaccatcaatactgaagaagtaagtgagttttcacaattagaaattatttgtagacatgctgaattttacccatcctatgatgcgaccaaagcagctcttaaacgtgggcaagcgattgatttaatgcttaaggcgaatcaacaagatcctattcttttatacttatcggaagaggaacaattgaaagttggtaatcaaattatgattttaattgaaaatagagttggatcatttgaaggggctatcagattcatcgagagtcacggtaaattatcagaaatcaatcttcttgatattcaaaggctggcgctcaattcaaacagtccaaaacatattcaaattaaaactatttcataa

SEQ ID NO: 66767 - DNA, 636 bp, Acinetobacter baumannii
atggaaatagagcaactttttgaaaatcttatgaatgaggctagttcaagaaaacaaacctcgcttcgtattattaataatatatgcaatgagcaaatattgagaaatagccctgatttttctatagcaactattgggaaaatttctaaattacaaggtggtccttctgaacaagccataagaaacaaaaatggtgaagcctatcgcttactcatatccgcttggtctaataaatctaaacagaagaataaatccatttctaaacccgataattttgatcttttacagcatatccaaaatccttctatccgagccgaagtcggcttactgctcgctgaaattaagcaacttcgaggcgaaaatagaatcctcaaagcattgaacaaagataaaattatcattgatcgcagtatgcatattgctaatcacaacacctctaatattgaatttatacctaatttcacattagatacagccgaaaaacatgctttgcttcaagcaataaatcctcaaattattgaagacaacggttggtcaattcaaaaaaatggttctatcttgaatgaaaatggtcgaaagattttcgaagcctattttgtttcagccatcaaaaaagttctagattctaatcattaa

SEQ ID NO: 66768 - DNA, 594 bp, Acinetobacter baumannii
atgacgacaagaatttatgttagagctagtactaaagatcaagatgcagaaagagcactagctgatcttaaaaaattttccttatccattaaaggtgacgttaatgagtatatagagaatgaatcgggcacaaagcttgatagaccagttctaaatcaactcctggatgactcatctaatggtgatactttattagttgagagtgtagatcgtctatctcgactttcacaaaatgactttgaagtgttgaaagagcgtattaaggataagggcttaaaactagtagttgctgatctaccgactacacatatgcttgtcaattcagccgataacatcactagctcaattctgagccttgtcaataatatgctgattgatttgttagccacaatggctagattagataatgacaagcgtagagaacgaattaagcaaggtttagaaagaagtggatataagtctacaggtaaaaaggcagatacagccaaacatacacgaatcaaagaactaaataataaaggcttaaccaaagaagaaatagccaaagccgttggttgcggtgttgctacagtttacagagtaatcaaacaatga

SEQ ID NO: 66769 - DNA, 273 bp, Acinetobacter baumannii
gtgaatgctaatgttcctgcgttgccagaatttaataagactaactggattgcgttagaacatttggatgtagataatcagccatttgctaatttgggttataaaatattttttgaaaataatcaggtcatagaaggtaaattagatgagcaaggtaaagctcatcatgaaaacgtgccagataaagcaattcgagtagagtatcaagaattaccagccaaaccagatacttccttgggatacatacgatgctgttctaaaagaattaaatag

SEQ ID NO: 66770 - DNA, 1197 bp, Acinetobacter baumannii
gtggtgggtttagagggtgaaagcattcatgtcgaccagtggggacgcattaaagtccgtttcctgtttacccgagctgatgaccacagtcatgatggtggagcaggaagtaacgacaatgacactgactccgcttgggtcgatgtgctgaccccatgggcaggggcaggttatggcgcacgtttcttgcctcgcgtgggcgagatcgttgtgatcgacttctttgacgggaacattgaccgcccgtttgtggtggggcgtattcatgaagccgagcgccacccgacccagtttgaccagaaaggtcagctacctgacactaaaaaactcagtggcatccgctctgaggaagtcgacggtaagggctttaaccagctccgttttgacgacacgacagggcaaatcagtgcccagctacaaagtagtcatgcggccagccagttaaacttgggtaacttaagccatccaaaagacaaggcggaaagcgatggtcgtggggaaggttttgaactcagaactgaccagtggggcgcggttcgagctggtagcggcttactcattagtacccacaaacaggatcaagcacaaggtgtacaccttgatgcaagcgaggccaagcaacaaatcgaaggcagcctcaataatgccaaggcactcagtgaagttgctaaaaatcagcaaactgatccattggaaatgcttgagaacttaaaaacgttcatagagcaaattgaagagaaagatcaagacaaagctgctgcttttaagcaagctttgatgattttaactgcgcctaacagtattgctctagccagtaacgaagacattcacttaagtgcagatggtcagctcaaccaaactgccggagatagcattaatctgtctactcaaaagaacttgattgcacatgcccaaaataagattagcctttttgcagcgcaacaaggggcgagactgtatgcaggcaaaggtaaagtcgaaatacaggcgcaaggcgatggagctgatttaattgcccgtaaagctgttcaggtgatttcgactgaagacaaaatcgaagcgaccgcagccaaagaaattgttcttaccgcaggcggctctcaagtcaaaattaccggttcaggtatttttatgaccacaagcggcaagtttgaggtgaaggctggacatcatgtgtttatgggaggcggagtgtga

SEQ ID NO: 66771 - DNA, 714 bp, Acinetobacter baumannii
atgaaaaaatttttgctaactgtgattgctttaacattgattggatgtagtaatcctaaatctacccagattcctacagatcctgacaaatgggaagagttgaaaccagcagttgataaattaaatgaagaggataaaaaacttttaactcaatatttagtgagaaaaggtatggggaccgcatttggaggtgctggtgtagagcctgggactacaattgatgaggctataaaagaccaacaaaaatggcttgaagataaagctgctacagaaaaagcacaagaagagttaaaagcaaaaattgaagctgaaaatgctgctgtaaaaaaacaaatgaatgaggtattaaccacagcaattataagtaaagaaggttattcacgttatgactatattaataaagttactaatataggtttcaaactagcatttgagaatcatagtgctaaagatatttctggttttaaaggcatagttatatttaaagatatgtttggagataatattaaagagattaacctgtcttatgatgatggggttaaagcaaattcaacttcaacgtatgaaggtagtattgattacaatgagtttatggctgatgatgttaaattgctcaatacatctttggataaaattaaatttaactttgttccttcggtaattctttttaaagatggtagtaaaattgaattaaaacaaactaatgaaagttga

SEQ ID NO: 66772 - DNA, 822 bp, Acinetobacter baumannii
atgttcgtaagtgttgattcagcaattgaaaaaattgagaatttaacaaagcaaaaatgcaatttttataccctattacattatgtatcaaatggttatatgaatgtgtattttaattatcaaggtgaactttatgaaaaaagttataaagctatccttgaagcaaattacagtgagaaagattttacaattattggcacagagtatttctcaggaaagctaaaacttggtcatcaggatgcaatcaaagctttaagaactattctgctagataatgaaaaatatttggttctaaatgtattgaaagagaatagtaaaagtatttttcgagccttgaaagatggtaatcataagccagatttatcaaagagccgtgaagaagttttagcacttttagaacttctgattgaacaaggcgagatagattctactgaactttttaataagcactgttctgaggtagaaataagcaagataaatagaagtgttcatctagtcgcttcggacatattgtttaactcgaatgaaattgaacgtattcctttatctcaccatgctttaaatcctgatggaaaattttatgctcctgagcttgggcttgctttggagttgtgggaagaaatttatttaacaatgaaaggtacattcccagagggtaaaaatttggaaaaagtgattaatgaattgctagaaaattatgaaatcacttcttctaaattaaaaagcttaaaagccgatactgaggagacaggacgactcaaagctaggctcaaagttttcttgaatttaagtggtaagaataaaattaaaaaaatagtttaa

SEQ ID NO: 66773 - DNA, 210 bp, Acinetobacter baumannii
atgcctttccaagaaattctccctcaccaaatttcatacaaaaaagtatgtcaaatgctagatatctctagagatacattgcgagtgctaattcgcagagatcctgcatttcctcgcccaatcaagcttggaaatacacgtcagagtccagttttcttttcgagatcagatttaatcgagtggcataacaatagaaaggcgcaatcatga

SEQ ID NO: 66774 - DNA, 225 bp, Acinetobacter baumannii
atgattcctgaacatacatggtatacccgcccacacgcatctgaatatttggcaaacaaattgccatttaaaacagtaaagcaatggtactcatttctttcaaataatcgaacttcaaaagaagtttacaccctaaggtttgaacagcgttgtggaaaaattttctacagccagcggacgttggatgcctttatacaagcttccacttctattgctaaacactaa

SEQ ID NO: 66775 - DNA, 261 bp, Acinetobacter baumannii
atggacgtaaaaactcaagtagctactaaaattgcattaaaaatttttgatgatgttaaatcatcagaaaaatgggatgacatttttgtaggtgaatttgattgggatgaattcgaaaaattcatgccgaaatatgatctggacgaaatgatcaaaagtttaggcattaatcagaaatcaattgatcagatgattgaggagcttaacgacaaagttgatcatcaaattgagatgctacaacaaagtgaaattcaatcttaa

SEQ ID NO: 66776 - DNA, 1002 bp, Acinetobacter baumannii
atgagtggatataatcttgaacaaaaattggttataggtctagcttcaagtgctctttttaatttagaagaatcagatgctgtcttcagagaaaatggagaattagcttaccgagagtatcaaagaagccatgaaaatcaaccattagaatcaggtgtcgcctttccatttattcaacgccttctaagtttgaatgacatttttccaccagaaaaaccatttgttgaagtaattctactttctagaaatgaccctgatacagggttaagagtcatgaattctattgaacatcataaattaaatattaaacgtgccatttttttacaagggcgtacgccacataaatatattaatgctcttaatattagtttatttctatcagctaacgaaacagatgtgaaccaagccattaatgctggctatccagcaggcttaatcttaaaaggacaaatatttgatattgctcatgatgaggaattacgtattgcttttgactttgatggcgtcattgcagatgcttcttcagaacaggtatataaagaaaatgggttaccagccttcattgaaaatgaatctaaattagctaatcaaccagccaatgccggtccactgcataagcttctacaacagctttctacacttcaaaaagcagaactcaactttttaaaaaataatacaacttataaaagccgattgaggatttcaatagttactgcacgtaatgcaccagcacataaacgcgtaataactagcttacgtgcttggggaatcgatactgttaatgaagcatttttcttaggaggtattgaaaagagaaaagtgctagaaatattacagcctcatattttctttgatgatcaagttacacatgtcgaaaaaacagccgatagtattgcatcagtccatatcccatttggtattgctaataaacaattagattcaaataagcaatctgctaatttgaaaattaatgaaaataatcaaactttggaattaaattaa

SEQ ID NO: 66777 - DNA, 132 bp, Acinetobacter baumannii
atgatttcagcgctattcatgcgtaataaacccttaaaaaacgaaaaatctacttttggtttattaaccaatttcaagtctttaaaaaatgaatgtaattcaagaaaagtacaacaactggatgaactttag

SEQ ID NO: 66778 - DNA, 870 bp, Acinetobacter baumannii
atgtcaattaatggtttctctagctttgatcccttagacgctaaacagattcaaagtactgaagtagcagccttggcacagaaaagagagttgaaaaatattttaggtagttatgtaggatggtttgatcctttttgtgagttaatacaaaattctttagattcgatagaaaaaaagttagaaacagctcctgttgaatatagacctagtttgtatataacgcttaatctacaagataattctttgattgtgacagataatggtttaggcctagatgaaccacgctttactcagtttttatgtccaaatatctcttttaaaacaccaggaaaaaaaaatcgaggacataaaggtgtaggggcaacatatatagcttatgggtttaatgatgtgcaagtatcgacaaaaacaaactctttcaaagctattggtcgaatgcaaggagcaagacgttggctggatgatgaaagtccagcgggtaatcctcaaatgtattcagaccatgaagctggatacttggatcctgactttgaagagtttgatacaggtgtatctatttatctgaaatttgataagcagacccatcctagtgatttaaattattatcaaacaaaaaaacctgaacaatggctcaaaatattaaaagttaaaacaggtataggtgctttttttgaaaataaaaaaataaatatcagaataagtataatagataaaactggtaataggtctttccaagactttcaaggggtggaatatttatggccagaaaatgaggttgtaaagaaggttagattacgcgatatattaactaagcaagatgaattatatgacaaagggaaggatataaaaaagatcttccttcaaaattaa

SEQ ID NO: 66779 - DNA, 390 bp, Acinetobacter baumannii; identical to SEQ ID NO: 47328

SEQ ID NO: 66780 - DNA, 711 bp, Acinetobacter baumannii
atgagccatcgtgatcggcgccacgcgcaggctgccggcgcgcggcatcgctggctcaatcgcctgcaaaccgcgctgttggtgctgaccctgctcgggattgccgccgtcgccggcagcctgctgttgggtgacagcgctctgtggctggcgctggcggccgcggggttcaccctgctgctcgaaccggcggcggcttccgggctgaccctgcggctgtatggcgcacgccctctgcacccgaatgaagcgcccgatctttgggctgtgttgcgcgaactggcggcgcgggccgggttgcctgccgtgccggtaccgcactacgtgcccagcggggtcgtcaacgccttcgccaccggtacgaagcatcacgcggccatcgcgctgaccgacggtctgctgcgtagcctcacgctccgcgagttgaccggcgtgctcggccacgaaatcgcgcatattgcgaacgaggatttgcgtgtcatgggcctggccgattccatcagccggctcacccatcttctggccttgttggggcaaatcatgctcctcttcagcctgccggccttactgtggggcacagtcgctatccagtggccggcgctgctgttgctggccgtttcgccgcagctcgcgctgctggcgcaactgggtttgtcgcgggtgcgcgaattcgacgccagagcgcatccaacgcttgcgggaattggctga

SEQ ID NO: 66781 - DNA, 366 bp, Acinetobacter baumannii
atgaacggcttaaaggaaaccaatgatcaacttggccatgatattgatgatggtttattacgtcgagtaggtaatattttaaatcaggcaattatgaatactgcttatacagcttctcgaatcggtggcgacgaatttgtaattttaatgcctggtgcagatgaagcgaatgttttgatgatgctgcaaaccattcaggagctttttaatatagataatcaatattattcaagtcatcctattagtattgcgattgggcacgccacaacaaaagaaaatgaacaagttgaagatatgctaaaacgcgcagatcatcatatgtatcaaaagaaaaaaagttattatcaagaaattcttctacgataa

SEQ ID NO: 66782 - DNA, 177 bp, Acinetobacter baumannii; identical to SEQ ID NO: 55697

SEQ ID NO: 66783 - DNA, 315 bp, Acinetobacter baumannii; identical to SEQ ID NO: 54445

SEQ ID NO: 66784 - DNA, 273 bp, Acinetobacter baumannii; identical to SEQ ID NO: 47774

SEQ ID NO: 66785 - DNA, 1038 bp, Acinetobacter baumannii
atgtcacttatcaaacgcaacaacatatggtgggtcgacttcaccacaccgagcggtaagcgaattagacgtactactgcaacggaaaataaagtcgaagcacaagaattccatgatcgattaaaagctgaattttggcgagtacaaaagttaggtgatagaccgacttatacttgggatcaagctggtatacgttggttggatgaaactcagcataagaatacccaccaagatgatgtcagtaaattaacttggttacagcagtttcttcgtgggaaaatcctaatagacatttctcgcgatgaaattatttcgataggtgaagttaaaaaacgagaatcgagtgctgcaactgcaaatcgataccttgccttaattcgagcaatccttaataaagcttgtaacgaatgggaatggattgataaagcaccgaaagtaagaatgtataaagaaatcaaacgccgtgttagatggattacagctgagcaagttaagcttttacttgatgagctacctccccatcagaaaacagtaacggtatttgctctttcaactggactcagacaagctaatattttagatcttacttggcaacaagttgatttaaaacgaaaaacggcatggatttacggtgatcaagcaaaaggtaaagaagatatccatgtttcgttaagtgaacatgtagttaatttacttaaaactcagcttgggaatcatccagaatatgtttttacataccgtaaaaagcctattgcaaatataaatacacgggcttggcggaaagctttagaacgagctggaatagtcaactttcgttggcatgatctaagacatacttgggcgagctggttagtgcaaaatggcacacccttatatgatcttcaggagatgggtggttggcaaagttctgagatggtcagaaggtatgctcacttagctcctgcgaatttgagcagacatgctgaagttgtaagttctatgctttatggcacaaatacgccacagcctgaaaataaaaaggacttacacttactgtaa

SEQ ID NO: 66786 - DNA, 2469 bp, Acinetobacter baumannii
atgatgagttttaaatccatctcgaatgcgactcaagctgcgcaatattacgagaatttggcagtggaagactactacgaattaggcggtgaacctgcaggttattggttagggcagctacaatctgtattgtatcttgctgatcgagtacaaactggtgaactaggaaaaatgctacaaggctatcacccgattacgggtgaggccttggcctcaaatgctggaactgaccacaaggcggggtgggacatgacattttctgcaccaaaaagtgtctcagtttcttgggcattagctaatgacgaaacaaaagtagcaattcaaaatgcacaacaaaatgctgttaaagctgggattagattccttgaaaaatacgcatttagtaaccgtgatcgtggagaaatgtcgggttcaatcaatcaggttattgccgctgcatacgaacacagtacgagtcgctcacaagacccacaattacatacccatgtccttgttgccaatcttggtttacgagcagatggttcagcgtgtgcaattgattttgattcaagatggaagttggcaacaggtgctgtttatcgtgccgaactggcatatgaattacagcaactcggttttaatattgaaccagagatgaataagtcattttctattaatggcataccgaaaaacctatgtgatgccttttctaaacgtagaacagccatccttgaacaagccgaaatacatagtgtaactagtgcgcaaggtatgcaaattgctacttttgctactcgtgaaaacaaaacaggtgaaatttcacgttctcagctatttgcacaatggcaaagtgaagcaatgcaattgggctatcaatctaatttagtgcagcaatgccaaaattttcgatcaacagagcattcactacttactccaatggaaatatttagcgaattgcatcaacaaatgtctacctttacaccacagcaattgcatcatgctgtagccgttgcagcccaaggtcataagaattttgagggtattaaccagtatgttgatgagatattgaaaaattctgaattggtacgactacaatctataaaccctagattagatcgagggcttgatcaaaccgagttgcgttttaccacgcgaacacaaatcgctttagaaaagcatttacttgaccaagcaaaacaacgacaacacgaaacgcagcatcaaattgttgttgatcccctcttgattgaacatgctaatttgactagggagcagaaattagctttagaacatatcacaactcaatctggcggcgtgaaaattatccaagggatggccggcacagggaaaggctatttgcttggtgttgctcatctatcgtgggaacaagtaggtttagacgtacgaggagcaactcttgcagcaaaagcagctcaaggcctgcaagaatccacacaaattccatctcaaactttgcattcattgattcatcaactcaatactggaaaaacggaactgactagtaaaaccgtattggtgattgatgaagcaggtatggttggttcaagacagttggcacaaatacttgatcatgcagaacaagcacaagccaaagtggttttggttggtgatcaccagcagttacaaccaattgatgcaggtggggcttttcgtttgctggcacaaaatcttggctatgcatccctgcaaaatattcagaggcaaaaaacgctagaagacagaaaaattgtaatgcagctcgccacaggtcaaagtgagcaagcattagcagtcatgcgtaaacaaggtagtttacatatacaatctacgcaggaaaaagctatagaaaatttaattgaggactggtggcaagccaaaactaaagagccatccgcatcagctttgatgctcgcaggaacgcgaagtgatttataccgactcaaccaagctgcacgtttaaaaatgaatcgatcaggacaattgggtgcaagttgtgaggttgaaaccgttcttaatgatgtgcattcctttcgtgaatttgcagtgggtgatcaaatcctattttgcaaaaatcaacgcaggttggggatcaccaatggtgatgtcgggatactgaaaaagattcagatcaatcaagatggtcattggcaatttcaggttgaacgagaagatagcaaaatagttgaattcagtttaactgatgatgaaaacataaaatcagcttataccgcaattgaccatgcctatgcaatttcggtgcataaagcacaagggatgactgtagaccatgcatttgtactctcttcagatgcaatgatggatcgagaatggagttatgttgcagctagtcgtgccagagagaaaacccatttttattgttcagcagaaattgaaacactgattgaagtgaatatgggacgatcaagacaaaaagatacgagtctagattatgccgtaagcatggaagctcaacagcaacttgaactataa

SEQ ID NO: 66787 - DNA, 1797 bp, Acinetobacter baumannii
atgacaaatggtctaaataaaaagccagaatggcggtttgaggaaggcttggtaattacaggcgttacttttttggctacatctatagcacttgagtttctctcatggcatgtacaagtgccaatgacacgggacatcgtgtggacagattggccgttgttaccaaaagccttattgggatgtacgttgtcaacattaggtatggagaccaaatcatggttagaaatttcagcaatgctcaatgtatctggctataaaaaatggttcctttggcatttttacatgccattagttatcgcattacccacctcatgcttctttggttatctatctgcaaaacctcgtgatcattattatgccagaggaaatgtgcttttatcaggttcagatgctgtaacctacgcaaaaaagcaagctaaagcgattaataaaaaattacatgtttctgatttaccacaaggtttattgactcatccgaaaatacgcttgcctattggttctgacaccagaggaacactatattggggtgcaccaaatgcaggtaaaactcaaaccttgatgccagcaatattagatgctttggaacaacaaccaaacgctaaaacatgcatactcgacaacaaaggtgactttacagaaatttttgatgaaaatcagtcaattatattagcaccttgggatgcccgttgcatagcttgggatattggacaagatatacggacagaattggatgctggacttttagcacaatctttaatcaaagaagtcaaaggtgataatgctgtttttagcgatgcaagccgcgttgcattaatcggttttattgtttgtctacaacaaaaatatggtatgaattgggggtggaagcatttagctgaatgcttggagtggtcactcgaacatacgattgatgaattccaacgcttttaccgaattggtcttgggattttcaaagaaggtagtaaatctagtgatagcgtttattttagcttaattgctaatctttcatttttgcgtcaacttgcccaagcatggcctaagtcggtcggtggattgagtttaagagaatggattcgtgatgattccgatgagaaaccgattcttttattgcaagcaagtaaagcatttcctaccgtgagtgatgcttatatttgcgcagtgttgaatgtactaatcaaactgattttatccccaaattttatcgactcatcaacacgacgaatccattttgttttagatgaaattgcacaaattccatatattgagcagcttaaaaatttggctgcattgggtagatcaaaaggcgcttgcatttggttaggcattcaagactttgatttgcttgtagataactatggacagcatgaagtcaactcgctcattggtatgatgcagacaaaaatcattttaagcatgggatcaggcactggtgctgattttgcatccaaattgattggtgatcgtgaaatcttcacacaagattttgatgaaaatggcaaccgaatcccattgacgcaagcacaacgattggttgcaccgtctgaaatttcacaattaccacaacctacactacaaagtggcatccacggatggatgacgattactggctggaatgctgtactgagcctaacatggccgattacaaaattccccaaaatccgtgaaggtgtggaaatcgctgaatggattgatatcccccctgttgcagatgtaactgatgatgtggttcaaacttctggttcttccagtacaaaacgcttaattaaaaagtctaaaaaattgggggacgcatcatga

SEQ ID NO: 66788 - DNA, 246 bp, Acinetobacter baumannii
atgaaaactaaaccaattgcggttcgagtaccgcatgcgcttgcaatttctcttgagagacaagctgaacgtgaagcaataaccctagctgatgtggttcgtcatattttggctactagccaatcaagtcacaaggatcagctcttagaaaaactggtagcgattgaaacccaaatgaaattgttacgccaaggtcagaatcaaattatcaacaaactttctgaattcgatgttgaagggaactaa

SEQ ID NO: 66789 - DNA, 675 bp, Acinetobacter baumannii
atgttatctcttagtggatgtatctccctacagaaggagcctattagctatcctatcgagaaaatctaccctattgagcaatacgaagaacaaaatcagaacttgcatacaaatgcagatgattctattagtaagcttgtccaagaactaccagagccagctcctcaattagaagtaaaaatagtcggctatgtaaatacagatgttttagaggtatttccttcccccaaaaaattgaaagcaataaatcatgtgactaggggaacgaagatatttgtctttgatacaaaaggggattgggcaaatatttctgcagatgttgaatatccatattgggtcaatctagcaagtatatgttttacagataaatgctgggtgaaaaagaatacttatacatctgacccaagtatagatacccagagcaagggcttggttacactcagggagaaaaaaactactcatccaacagtaaataaccaaagcaagataaaaaccacttcgtatagtgggaaaggttatacaaacgtatatggaaattatgtgcctagcccaaggaaatcaaataaaccacccgctggtgcaactgcaaaatgtagagatgggacttggtcttttagtcagagtagcagaggaacctgctcacatcatggtggagtcgctacatggctttattag

SEQ ID NO: 66790 - DNA, 288 bp, Acinetobacter baumannii
atgcttggcatccaatttaacacgattccgattgatcaaagaaatgcttaccaaagaaatactggagcatacgttactactgtattgaaaggttcgaaagcttatcgtgctaacgttatacaaggtgatgtggttattgctgttaatgaaaaattgatagaagaaccagagaacttcaataaagttaaagaaactgagttagcaaaaactaagattttgaatcttaaaatcattcgcttggtgaataacgaacctaaggaaattcagattcctgttagttttgaataa

SEQ ID NO: 66791 - DNA, 504 bp, Acinetobacter baumannii
atgaaaattatcgctttcatcattctctttatcatttttatactttttttagctttaaaaggagttttaaaattagcaaatagcaaaaatataattaatctagatattagaaatattgcacatgaatggatagcttccatgccaaaggctaatgtttctcaacaaatagatgcatctaatgagttaataaaagcgacattttctatgttagatgctgcaaaattagcagagtataacaaactcatgtcaattactgataaatctgggtttaatccatctaattttgttcaacttacgttcaaagctgctcttggtttacaaaatcagcaaaagataagtctagaaggctttgatttaagacgtaactttgaaaaagaaatggttttatttttttcaaaatgtgtttcagcagtcttattgaacactgaaatggatggatatgaactattaaatagaatagccctagaagctaaaggaagtcatataccttggagtaatatttaa

SEQ ID NO: 66792 - DNA, 303 bp, Acinetobacter baumannii
gtggataaaacagagattcatcattctgtcattaccatggatggtgggccaaaagttgctaaccaatatcgcttacgtttacatgaacattttcaaggcccatttgggttcggtacgccagatgatgctgaggcatgggagcgtgtacagcatggtgcaaatgcaggtaatgacttatggattatgttaaaccgaggtttaccaggtgaagtgaaaactgaagatggtctgaaaagtgatgtcagtgctgaaacagggatgcgtgctgcttatcagcagtggaaaaagttaatgatggcttaa

SEQ ID NO: 66793 - DNA, 1059 bp, Acinetobacter baumannii
atgaatcaaattgcaccgattacaaatcagcccgtacagagaaatattcgaactgtaatcaatccactgactaccaccaagcgagcaacttctgcaaaacgattagtgaataccaaagatatggcgtatcaagattggcttgaagttcgtaaacaaggcattggtagcagtgatgcttcaacggcgtgtggattgaatccctacatgtcgatgcttgaactatggctgatcaaaacagggcgtcaagctcagtctattgaagatgaaagctcaggtgttgcaccactatattggggcaaacaacttgagcctttagttgctgagtattacagcatgcacaccaacaataaggtacgtcgagtcaatgccgtgttacagcaccctgatcctgacaagtattttatgttggctaacttagattacgctgttgtcggtagtgatgaagtacagattcttgaatgcaaaactgcaggagagcatggagctaagctttggcgtgatggtgtacctctgtatgtcttgtgtcaggtacaacatcaattggcagtcactggaaaacagtcagcacatgtatgtgtattgctctgtggacatgaaactaaaatcttcaaagtgactcgttctgaatctgtgattcaacacatcatcaatgcggaacgttatttctgggagtgtgtggaaaaggatataccactatctgttgacgcgagtgaatctgcatccaaagcgattcagcagttgtatccaatgcatgtaccactaacagttgaagatctctctcagaatgaaacagccaacctcatgttcaataagctgatcaaactgaaagaagaaattcagcataagcaagaacgcttcgatgagctgaaacatcagatccaaatgatgatgaaagatgcagaacgtgccactttcagtcgaggttcagttgtctggaagaaagctaatgatagtgtcagtttggataccaaatcattattaaaacatcagcctgatctcatagagcaatatccactgaaaagacaaggcagtcgtcgattcaatatctatcaagactaa

SEQ ID NO: 66794 - DNA, 432 bp, Acinetobacter baumannii
atgaagttaaaagatgcgtttgactatatacttgataaaaataatgctttaagtgattttagtgcatacatgataggggtggcatataaagacaatgattctttcttattcgttaatctcaccatagatgatgaagaaatagaaaataatacgctttactaccatgcccatgttacaagtggaaaaattcgaagttcagagggagaagaggatttttactgtgcagagagtattgaagaattaattgctcaattacccttgattgcttctgatttaagctatcatgtttataagctacaagaggatgtcttagagctaagtagtgaatatgcgttaaaagcactttttcctaggctacctaaccctgactttcacgatcttgatgactttaaagtagaagctattaagttggtatctgcgcttaatcattaa

SEQ ID NO: 66795 - DNA, 375 bp, Acinetobacter baumannii
atgaaagacgaagaattaagaaaactttataccattgaagcttttttgaaacacggcgatctacctaaaactatgcgtgatgattggacacctagttttgggctagaacaaggcaaatatggtattaaagatgatgataaagctcatgcctatatcagtctaaacggtaaacttaaaaaaagtaaatgtgagtttattgaagataaaaatttagctcaaaaactcctagagcatgtagaaccaaaattgaaaaagctatatccgagcatcacaatcaacctaagaaatattaaatcaagtgaattagattacagaagaaagaaagcactagaggaagctattgctaataatcttaaaattcaaaaatcactttaa

SEQ ID NO: 66796 - DNA, 402 bp, Acinetobacter baumannii
ttgaaaacaactgttgatgcaataccaactttaggtactgctacttatacaggtaaagcatttaatggtgcttatattgatacgacaactattgattacagcggaatgatcccatctatttcgacaacatcgaaattagctgaaggtactttagattataatattaactttactgatcgcttaggttcaggatcaatcactggcttaggtaatactattagcctagaacaaggttctatttctggaactggaatcacttcaacagctaaacaattaactaatactggtacatattcattagacttttatggcaaaaaagctgaagaaattgctggtaaagtcatttttaatggtaaagataccgttggctttggcggtacacgtggtgaaattactaaataa

SEQ ID NO: 66797 - DNA, 1401 bp, Acinetobacter baumannii
atgaatatcaaatatttagtaattctttcagtaacattttctagcactgcattttctcaagaattaccaccagctcaaacagtattttttgagcaagattcatttattcaacctgaattattacttaaaaaaacagtagataaagatttaaagctttctacactacctccaaactcaagtttagaagattatattaatcaagccattattcataaagactggaaagaacttgagaaactactagataaatacagaaaaactgataattacgatcacattttatacgaatatggcttaggtgctttatatcgttttcaaggaaagcaaaagaaagccatagaaatgtaccaagagattattacaaagaatccaaatttatattatccccgttttgatctagccatgatgttatttgaaaataaacaatatactgaagctaaaaatgaatttagagtagtaagaccttttcttcctactcagatccaagcattaatagatcagctattgagtactatggaagagtctcaaggatggcaaccaaacgtaaattttaatttcgaaaaaacagataacgttaatcaatcatctagtataaaagagatttctattggagaagcaactttcatacgtgatcaggaatcactaccacaaaaggcagaaggtatcggttatacgctgaatgcatcacgtgaacaaaatatgatgagcaatcattatgtatattttaatgcaacattaaacggtattcattattgggataatacagaatttagtgagcaaaccttacgtatcgatactggttacaaatataaagatcttaagcaatccttaggcataattccatttattgggcaaaatatactaggtgatagtcgttacagtcataactatggtgcaggattagaatataaccgattattatcagatcattggcaagtttctgctaatacatctcatatccaaaaacgatatcaggattcagatcttgcacaatattataatggtcatgctaatagtcaggctgcattgatgctgtatcaaccgaaatcaaaattactcatatatagtggcttagactggatgcaagatcgcttagcggacgaagcagaatcatccaataagaaaggtatacgaagtggttttttatactttggggactcattgggtattagtagcaacatacgttattctaagcgtaattttttagcagataatatttggtatggtattcaacgcaaagacagtgaatatgaatttggtatagctacttggcgtaagcaatggcagtggaaaggttttactcccaagttaaactatagatatcaaaaaattgacagcaatttaccactttatgagcgtaataacggcacatggtttatcacaatagataaaaaaatttaa

SEQ ID NO: 66798 - DNA, 927 bp, Acinetobacter baumannii
atgaaattactttacgcaagcaatgctcaaaatgcggatcagatggagactaaaattttatccaatatcaatagctacgactttaaggctatgaacattaagatcagagcgagagtggactttatagatatttattttgaaattacaaaatcttctactcggcatgatattaaaaagtttttaaccgagaaaacaggtattagacactacatcaaagaaagctttaatggatatgtaattcgattgcatgacatgaattctctaaagattttagatgagcgatgtggttatttagatcattttggtttgattaaagagagcatgaagattgtggaattggaagtagctttagacttctatggatataagcatttagggcttgctacggctcttctaaaggcactaaggcttccaagtactgtaaataactttagggtctttaaagcgcaaacaggcgtatttacagctattcctgttaatccaattgtactccacagaaagttaacagatggtttcaatatcggcatcaatcataggttagctgatgagtattggcatatataccaaaagcagacggatcaaaatggtacgccgttgaaagaaagtgaatggcgagttcgtgcggagaaaaatattaaagcacccatgctcacacgattgaataattcattttcaaacatcagacaattgttgttggaaagctttaaagggcttcgatttacccatctaaaagcaggagtaccttgtcatcaagtagatgtctatatgaataaaattgatgtctatgggatggagaaagagccatattttgattcacatcggaacttaagaaagttgactcctgatatagaaatgaatgctgaattgaatagattggtgatgaatgcagtttgtaacttggctaagaattttaagcattactcgtaa

SEQ ID NO: 66799 - DNA, 714 bp, Acinetobacter baumannii
atgatatctgaagttactttttctaaactatatacgtctttttggaattctttattaattaatagcaagaactatgttcggcttgttaatggtgcacttattgaagatatccacaaaccgatttcaagttattctagtcaatataatgcttacatcaatattctctcgtttgagctttatgagcagtccttagacaagggaagcctagtctttactcaagaagaaattgaatccgcatgtaaattttctttcgataaggttagctcatttacttctttctacaaaaatgctcaagtccccccctatagcgaaattaaaagtgaagtaagctttattcttgaatcattaacttcacaataccaaaataagtcacctatcatccgaacacctcttgagggaataggtatattaaatccttctgaagtggacttaatgtattcatcaacactagttgaaataaaatctggggatagaaaatttaaaactcttgatttccgtcaagttataacctatctgacacagaatcattattcatcaagccctgtgactatagatagaattgaattatttaatccacgaatgggaattctttttaataccgatattgagtccatgatatatgaactaactgctttaactcctaatgaggtttatgaagaagttaagaattatctatgcgaacataatctattagtgaatgacatcattaaataa

SEQ ID NO: 66800 - DNA, 708 bp, Acinetobacter baumannii
gtgattaaattaattgccttatctctattatttttttcctttcaggtagttgctttaactcctgaagaggcaaatatcaagatgactcaacagaatagcgaaattgataactatttgcttgatatgtataaagtccttgattataaaagagattcattaaggattgatcgaaattttaatgctcttcaagcgaagatttcaaaaacttctgataaaagtgagctaacaagactatattgcgtggaataccgtaagcttcaacaacagagtttagatactaataagaagttcaatatagctacttataagacagatgaaatatatactgaatccttgaatgagctaaaaaaactagcagtagcttgccaaaacagtaacattactaagtttcatacagaagcaaatgatagatacttaaaatttggtaagtatctggtagcaggcttcgataaacgacaggcagaatataatcaatataatgctacaaaaaacttatttgaagatatgcaaattattagaaaacgtatgctggaagaaactgatgcggtggcagctcaagacatactatgcattgattacttagggaaaatgaatgagttaaataatatgtccttagtatggaataactctccactagtacatctgagaactcagataaaagctggcacagctaaattgaaagtggagtgtcaagaaagaggatattaa

SEQ ID NO: 66801 - DNA, 528 bp, Acinetobacter baumannii
atgattggtgttgctcttagaatgagatactacaatgtacaagttgattccgataaaaatggaaatgctgacttaagtgttcaattaaattcttttttatggatcggtgaagctaagattgttaataacaatactaaaacagattttgaatatcttcatagtgggcttacccagcttttgacaagatatagtaaaggtcaaggtaatgctacaaatggagcacttttaatctacattaaacctaatagcagatttacaaatgagcataacttcatgaatgaatggattgaatttatgaagatccatgagccctcttatcaatcacattttatatgcccacaaaaaagtacatgtcttaaatcccatcatacacatcctacatctggacatgactattctgttaggcatatgccaatgaccctttttcacattccagaagattcaagcggtaaaggagcacaaaaatatgcagaaagacgtagtgcatatgaaagtgcaagtattggtccaagcaaggaaattctttaa

SEQ ID NO: 66802 - DNA, 456 bp, Acinetobacter baumannii
atgactgatgtaaaaattaaatttattcaaagaccagctcctgtttttgttgaacatcgccctatttataaaatcgggcaaattcttcttattttatacttatcttcaaggagctataaatctagtttaaacagacttcagctattcaattgggcttttaaagaaaaaaatcgtcagaaaaaaatcattgaaagctctgtgaaaggaaaattagatatatatgcatggggatttgatcctgcattaactgtcggtttacgttttgctatagcagaaaagcttatagttgaagatgtaactacctttcgacttacagcccaaggcattaaattttgtgaaagtatcttagaagatgaaaatatttttcttttagaaaaatatttcttaaatgaagttaaaaaaaatattacggaaaaaatggttgactcagtagcaaagaattggagaacacaatga

SEQ ID NO: 66803 - DNA, 222 bp, Acinetobacter baumannii
atgaaaatcttaagattagtgggagagttcgaacatacagttattgaacagagtactacgtggtatggcactgctgaaggtttaattgaaaaactaaaatcactattagtagaaagaatcattaaagatttacatcctagctttgattcaacaacagctgatgaaatagcaagacgtatgatagccagatggatagctatatgtgagttggattatgactga

SEQ ID NO: 66804 - DNA, 708 bp, Acinetobacter baumannii
gtgaataacttaattgcagatccacgatttgaaggcatgcgattagatttaaagagtatacgttcgacccttattcgaaaccttgctctagtaaattttaaggctccatcttcagaagaagtcgttaactttttagataatgatggcgtgattacagtggagagtttaagagcattaattctagaagaactagagttttatcaaaatgacctccgaggaggagatacaacatcaccttcgcttttttatcataagcaatatgatggatcgactatttcagaatatattcatttaaatgaagtagatgctaccaaaattgttgcagatagattgaaattaagactctcaaacaaagggattattgtaaccttagagcatcagatgcaacatgcgaatcgttgtgacataacttttgctaaagtaattgataatcaaagaaaacttttagtactagagtctaaaggccaatggcacaaggaattatataatgcagcatcaacgcagctagctgagagatattcgattcatccagaagcagaacagcagggaatttatttcgtattgtggtttggtatgaatgaaaaagtagcgaataaaaccaatcatggtattaattcagctcaagaattgaaagccattttagagaacgaactaccaagtgatttaaaaggtcgtattgatatatttgttttagatgtatctttatga

SEQ ID NO: 66805 - DNA, 162 bp, Acinetobacter baumannii; identical to SEQ ID NO: 47960

SEQ ID NO: 66806 - DNA, 192 bp, Acinetobacter baumannii
atgactaataaaggcttgtttgaacaatatttttcaaccttagattttactgaagatcaagatggtaattaccttaatgaggatacgaaaactacttggcaagtatttcaaaaactgcaacaagattttctatttatcaaaagagacaatttacctaagcccttgttagaacattttcaggctatgagttaa

SEQ ID NO: 66807 - DNA, 1509 bp, Acinetobacter baumannii
atgaaaatagtagtaaaaaaaacttatttttcatctactctaactcttttggtatttattctattcttattaaatataattactaatattgctcatgcagatacagttaacactgctaatagttgcggagggctgcatgatcaacaatcttggagcttatgggatagttatgggaaaaaacgtatcatagatatattaaataatcgcctcataaagcaaggtgatacctatgcgctttatgatacacaaattttatttaataatttatttgatttagctgtccgttgtcattatccacgtagaattcgagaatttgccgatattatccaaataacctatcaaaaattggaaccttcatctcaaatagctggagagaccacagtatggatatgtcatggaggtactcgctgtcaaaatgcaaatttactagagaaagaagtacagttaaatagtgcacagtttttaggttttgcttctgaagtggctaatgagctagatcgtgtctatccgaaggattcagatgctcagcagtttgttttgcgaaccgcaaaaatatctgcaaatcgattaaatgagtggtctacgaatacgtttccaaatatttctaaaagaataatagcaagacctaatgatataaataatggttcttccagtatgtttactgataaagacttatggcaaattgtaatttttagcaatatcgctggtatcgtagatagacatccagattatcttataaagattttcggtaatcagagtaattttgagcagcaaaaaaattatttgtcagcactatcatctttaatgaaagctagagtaagtaaaactccaatcatatataataataaaaaaattagtattaatgatcttgataggggcttttggaattctattaatgataataaatatgcaggttactctagtctagaaatgccagtgacttgtgaccctaataattcaaaaaaaactaaacctgtagttaacttagtggatatcaaaaaacaactaaatcttggttgggattttagccatgcacgtagattaactaatttatttttttccttggatagaaatcgtactgcaatcaaaagagtatatggtaataatattagtaacattctaccttcggataccgatagaataggttttataaaccaattaaaatccaatatttggaatcaagataagcaatatccattattttcaaattattataatggtgcaaatgggtggtatagagtgggatataataaaggaggaaagacttgtgatgcaggggttcctccttatggtttgagtaattcttatttatctggtggttatattgtatgggggaaatatgaccccttacttctagagcttggtgaaaatatatataagttgatgtcttctactaatattcaagaccaaaaatttatgaatagatactattctggctatttactaaattcatcagcatataaaataaatgctattggctttttaccaactttagttgtatcaaaataa

SEQ ID NO: 66808 - DNA, 1104 bp, Acinetobacter baumannii
atgaaaattgcacatttaacttctgcccatcctcgttttgatacgcgtatttttgttaagcaatgttgttctcttacccaaagctacgatacttatttagttgtggctgatggaaacgggaatgaggtcaaaaatcaggttaatattcttgatgttggtaaatttaacggtcgcaaagatcgtatgcttaatgctcctaatgctgtatttaaaaaagcacttgttttagatgcagaaatttatcatcttcatgatcctgaacttattccaatcggtttaaaactaaaaaaaatggggaaaaaagttttttttgatgcccatgaagatttacctaatcagattatgtcaaaacattatttgaatcctatatctaaaaagattatcgcttttttagttaaagcttatgaaaaatatgcttgtgctaaattagatggtattgtcgcagctaccccttttattcgagataaattccttaaaattaataaaaatacaattgatattaataattatccgaaactagaggaatttagttcaatttccacagataccttaaaagaaaaccaagtttgttacattggtggtttagcagatgtacgtggaattgttgaaatggttcaagcaataaacttagcacaaagtaatgcaaaattggttctagctggagactttgccaacaagagtttagaacggtcagttatggatatgatgggttggaaaaaagttaaatttctaggctatgtgggccgaaatgaaataaaaaataccctagccacatctattgcgggcttagtcgttttacatccaacacgaagctatttagattcattgcctgtaaaaatgtttgaatatatgtgtgcaggaataccagtaattgcttcagatttccctttatggcgttctatcatagatgatgcacagtgtggagtttgtgttgatcctttaaatccgcatgagattgctaaagctgtagattattttataaagaatcctgatgaagctagattcatgggtgaagagggacgagctgcggttttggaaaagtataattggagcattgaagaaaataaacttttgaatttctattcaagtattttggatatttga

SEQ ID NO: 66809 - DNA, 1407 bp, Acinetobacter baumannii
atgagaaatatagttaactattcaaatgataaaacattattgtttcttatttttcctatcgctcttatttttattataggtgggtttgtttcagaattttatgcaacaacaccctttatatcattagtagcttcttttttatttgtaataattgtttttgcaaatatagcttatggaagaaatatgcttattaatccattaagtatattttcatttatgtatttaggatatgtatttggttcattctattatgcttttagtgatggtgattttggaaagtttttatcttatttaaacttaagtcgatttgaaactgagttgtatttattttattctattttgtatgcagtagtttgttacttgttttttgtatttgggtttagtattttttataagaaaaaaaatgttgttctgagaggaacatggagcggctcttattatgatagtttattgattttatataaacccatttgttttcttcttataaccattggtttggcttattgggtatggatgagttatacattagcaggaggtgttattcctatgctgttgtattttcaagcttttaggcatcttattgaggatgctcaactgtcaactctaccatatcatttatattacgctggcgtttttttgtggttaattgcatcagttgttaaaaacaataaggttagtttctattttgtgttgtttagttttattggtttggttatcggtttatctacaggccgtattactttggcttttacgtatgtaatggcgcaaatgattttctactatttttgtttccctgaaaaaaggagaaaaattataatttttcttttctcattaatgagcttgggatttgttgtttactttttaaggatattaagcaatcagtattttatgggcgttgatcttgatctctcagagaagagttttatcggtactattattggtgatggtaatattactgatttacagcaactagtaatagtttttaaaacatttgatagttctaatatgttattaggaaaatcttatttagatacttttagaaatactataggcacacaatttggttatgaacctcattcaattggattacttattaaggagttatatattcctagtacgtctggtgcaccaacaccaggagctattggtgaggcgtatgctaattttatttttttaggccctgcaataatgttttttattggcagtgtattttcttatatatatatgacggttttagattcaaaaaatccattagtaataatgatttactctatttttttggcgcgatttgtttttatgtaccctaaggtagattcgacgatgatggtcaacttcctttggggagcagggcctttgattgtaatttggtttttcctaagattaacctttaatttgattaaaaagtaa

SEQ ID NO: 66810 - DNA, 1419 bp, Acinetobacter baumannii
atgaatataaaaaaaatattacactttagtcttggtccgatcggagcagcattgctaggcattttgaccatacctgtattaacttggatgtttacagtagaggatattggtcgattcagtattttacaaattgtgctgagcttttcttgtattctgctcacattaggcttagatcaagcatatgtaagagaatatcatgaagttgataataaggctgttgtatttaaaacctcaattctaacttcagttttatttagtatatttattactacgctgtttataatttttagtatagattctatttcacaaaatgcatataaaatatcatcatattatttgtcttctatgactatagtttgtgtaattttgactatgttgcttagatatgtcacgttgaatattagaatgcaagaaaaaggtttgatctattcgataagccaaatttttccaaaaatatttcttcttatcgctgttttgggtttattttttttaggatccaataaattagattttaataaattaattacaattcaggctatttcattatttttagtattgataattttttgtgtatatattaaaggtgatttgattgatcttttaaaagtaaatttagattataagctattgaaaaaaatgcttatttttggctttccactagttgttagtgggttggtcttttggttaatgcaagcatgttctcgtatatttttattaaactactccacattattagaggttggactttttagtgttgctgttagtatagcagctggttttagtgtcttaacaaccatttttaatacaatatgggtcccaacaatttataaattagttaaagaaggcgatccagttaacgaagtggagcgtgtaagtcaaattattgcattagcaatttcatttatattatttgctgtctgtatatgtatgccactaattccaaaatttttaccaaagacatataatgaaattggacatataattttgttgtgtgttttacagcctctactttatactttatctgaatctacagctataggaatattagttaaaagaaaaacaattatatctatatttataagtattattggcttacttgctaatatgattttattgtggcttcttgttaaaagtcatggcgctataggcgcggcaatatctttagctatatcattttggatttatttcattcttagaacggaagtttctagtcgaatttggaaggactttaaaagatataaattatacttacatagtttgctttccgtagtattttcacttttaatttctttaatgagtttgaattatatttatcttattctcacagcattattgtttctgatatttagtattttgatgtttttggatatttttagaaatattttgagaaatatttcttcatatatgagggtgttatga

SEQ ID NO: 66811 - DNA, 1086 bp, Acinetobacter baumannii
atgaaaatattaatgcttgcaccctattcttcacctattgttcaacgcttatctaaagctttagaaaaaaatggtggatgtgaggtttgggttgcaagctttaatgtggaaactgatttagaaaaaagaataattagtttaggggaagttaatagttttattgattattttaaatttcacaaagttaataaattagtaaaaaaactaaatcctgatatagttcatgcacatattattaatcattatggaattatggctgtatttcaaaaaaagccattaatagtaggattatggggttctgacgttatgttagcaccgaataaaggctcaattttaaagagagaaatttttaagctaattaatgctatagttataaaaaaagcaaatttgatgcatacctcttctaatcatatattagaagagcttataaaaaaacatggaaaaaatattaaaaataaaattaatgttttttattggggatttcctgtagaagaaccttcagctgataattatcaattgattcaagcgatgttaaaaaatgaatacggtattgaaagtaatgatcatttgatggtttttcctcggggcctatcaaaagtatatgatccagataatgttgtaaaagttattaataagctctcagatattaaagagttgaaaattgttgttttgcgaggtttttcatccgatgaagatgttaaaaaatttaaaaataaattaggagcagcagagagtaaaattatttttattaatagattactaaatacaaatgagttatttgttctttatagtcaagctaaatatcatgtatcgatccctatttctgatgctttaggaggaggggtgattgaaccatttctaagagggagttttcccatattaagtaatataaaaccatataaaaattttgtagagcaaaattcaggttttatcttagaggattattctgaatttagtttgaataatttggagcagaaaatcttaaataatcaacttgaagtagaaggtttatcgttaaatagtgattactcagcccaagcaatagtaaataaatttaaaaaactctatgaaatagtcttaaaatga

SEQ ID NO: 66812 - DNA, 192 bp, Acinetobacter baumannii; identical to SEQ ID NO: 57217

SEQ ID NO: 66813 - DNA, 285 bp, Acinetobacter baumannii; identical to SEQ ID NO: 57978

SEQ ID NO: 66814 - DNA, 405 bp, Acinetobacter baumannii
ttggtcaatacgcccaataaaaatgtgattcaattatttgaaagttttgacgtaaatttacatctttcacatccagttaccccattagcatttgaatatctgagtactcaggaacgaatagttttgctttcaatattggatcagattatggatattccatgtgatttattggtacagcgatcaaatgaatatggagtaagtcgtgcaaacttttgggacaagcgcaagaagttgcctgttcagcttcaacagatgaaagatttaatgattaagcctacaagacgttatcctgtctctcgtgtagcaataactgttactaagccaaaatctaaagcgactgtacaacgtcaatggttaaatttattaagaagaagcaataatagtggagcgaggcatattgactga

SEQ ID NO: 66815 - DNA, 162 bp, Acinetobacter baumannii
atgtctgcagagactgtgcctgtacctggcaatgaagtgttgcctgcagggtcagtcgctgttgcagttactgtatcaccatctaccaggttacctgggtttggtactgaccagctaccatctgtgcctgctaccactgttgcagtggtgccatcaggataa

SEQ ID NO: 66816 - DNA, 405 bp, Acinetobacter baumannii
ttggtcaatacgcccaataaaaatgtgattcaattatttgaaagttttgacgtaaatttacatctttcacatccagttaccccattagcatttgaatatctgagtactcaggaacgaatagttttgctttcaatattggatcagattatggatattccatgtgatttattggtacagcgatcaaatgaatatggagtaagtcgtgcaaacttttgggacaagcgcaagaagttgcctgttcagcttcaacagatgaaagatttaatgattaagcctacaagacgttatcctgtctctcgtgcagcaataactgttactaagccaaaatctaaagcgactgtacaacgtcaatggttaaatttattaagaagaagcaataatagtggagcgaggcatattgactga

SEQ ID NO: 66817 - DNA, 258 bp, Acinetobacter baumannii
atgtcatttgtcaacactgctaagtatttggtggttcatgaaggtgaaattgattttacagatgaaatcaagcctcaccatggcgaacgtgtatttgagcgtgatgtggtcaatcgcctcatagagtctttggatttggtcaagaagcttggtggcttacaaggtgcaaaagcatatgttccagatggttacaaatcagatcgtttgaagcaagcaatcaaagaccacgaatcaatatacggaggcggggatgagtaa

SEQ ID NO: 66818 - DNA, 1113 bp, Acinetobacter baumannii; identical to SEQ ID NO: 46111

SEQ ID NO: 66819 - DNA, 606 bp, Acinetobacter baumannii
gtgaaatttgtcgtgtacagaggtggtttttataaaacgccagaaattcactatgatcaggtcaaccatttagggcgtccatttttctattatgcctatggtgcagcggttagcgaggtcgcaatagataccttaactggggaaatgaaagtattacgtgctgacattttgcatgacgttgggcagtcaattaaccctgcaattgatattgggcaaattgaaggtgggtttgtgcaagggatgggatggctcacgacagaagagttgtattggcagccgcagggtccacacgcaggccgattatttacccatgcaccttcaacttacaaaatcccgaccagtgtggacattcctcatatttttaatgtcaaactatttaataatcaaaatcaggcagacaccatctatcgctctaaagcggtaggtgaaccgccatttatgttggcattatcggttttctctgcaattcgtcaggcagtacaggcggctattccagaaaatgcaccgctcgtactcaatgctccggcaactcccgaggaaattttacgtgcaattgctattggacggggacaagctttggctgctcgcccacaggctaaaatgtag

SEQ ID NO: 66820 - DNA, 918 bp, Acinetobacter baumannii; identical to SEQ ID NO: 58010

SEQ ID NO: 66821 - DNA, 957 bp, Acinetobacter baumannii; identical to SEQ ID NO: 56988

SEQ ID NO: 66822 - DNA, 1152 bp, Acinetobacter baumannii
atgggtacagttacagaaagagttctgtccactggtgtgaaaaaatacagggcgcaggtgcgcgtgaagcgacaagggctgccgaattttacagagtctaagacatttagtaaaaggtcattggctgaagcatggatcaaaaagcgcgaatatgaacttgaattgaatccggaactgatgatttctgcaaatatttcaaagggcatgaccttagctgctgctttagagaaatatttaaacgaagttgaaggttttggaagatccaaacgcatgggcatccgctttttaaccaattggccaattggaaaggtcaaaatttcagatttaaccaggaaagattttactgatcatacatatttaaggcgaacaggttacccagagatcggtgcagatccgattgaatctagtactgccttgcaagatttgcaatatttaaaggtggttttgacccatgccgacttagtttggggtgaaaaagtgaacctttttgagctggaacaggcgatgaaaggtcttcgcaatgcacgtgtgatcacaaaatccaagaaacgtgaccgtttaccgacatcaaatgagctgcaattactgactaattatttctataaacgttggaaaaccagtaaaacgtctatgcctttgcatttgattatgtggttggccatctatacctgcagacgtgaagatgaattgacacggctttttttgaatcaatttgatcagcaccacaatgaatggaaagtatttgatttaaaaaatccgaacggcagtgccggcaatcataaaagttttaaggtgactgaacaggctgaacgtgtcatcaaagaattaatgaagccggatgtccgtgatcaaatgcttcgtttagattctgcagatccgtcggtgttgttgccgttgaatgcaaaatcatttgcatcacgttggcgtgaagcgatcaagatgacagggattgaagatttacgttttcatgatttgcgtcatgaaggcattacccgattggctgaagatggtttgactattccccagctgcagcagatcagtttgcatgaatcatgggaaagtctaagacgttatgtgaatttgaaaagccgtcgtgatcgattggattttgtggaagccatgaaagtggccaaagaaaaagccctcatttga

SEQ ID NO: 66823 - DNA, 1356 bp, Acinetobacter baumannii
atgaaactaaatctgaaaaacaatgaacttataattgacaattttgcaggtggtggcggtacttcaaccggactcgaacaagcatttggccgtccagtggatgtagcaatcaatcacgatccaaaggctcttgcgatgcatcgtatcaaccatccagaaacagcacattattgtgaaaacgtgtgggatgtagatccattacaggttactgaagggggtcctgtcggtttagtttggttatcacctgactgtaaacatttctctaaagctaaaggtggcaaacctgtcgaaaagaaaattcgtggtttagcttgggttgcattacgttgggcagcaaaaacccaaccacgtgtaattatgctagaaaatgttgaagaatttaaaacatggggcgatcttggtaatgatggaaagccatgtcctaaaaataaaggaagaacatttaatagtttcgtaaatgcattaaaaaaacatggctatgcagttgactggcgtgaattacgtgcgtgtgattatggctcaccaactattcgcaaacgtttcttcttaattgctcgtcgtgatggattacctattcaatggccaagtcctacgcatggagcccctaattcgcacctggtaaaaaacggaatattaaaaccgtggcgtacagctgctgagtgcattgattggtctatagactgccctagcatttttgatcgaaaacgcccactagcaacagcaacaatgaatcgtatcgctgcaggtataaataaatttgttattcacaatcaaaatccatttattgtagataatattgcaccagtattaactgagtgtgcaaatgcatcaaatagacgctcaatgtcagcaaatgaaccattaagaaccatttgcgctcaaactaaaggtggccatcatgcgattatcgcaagtcatttacaaaaaatgaaaaataactgtgtcggccaagacatcaatacacccattcatgcaatgaccacagtaaatcaattcgctgaagtacgtgcatttttgactgcattttatggcaatgaaaaagatggaaattgcataaactcaccgttaagaacaattccaacaagagacagattcggattagtgaaaattcatgggcaggattatcaaatcactgatattggattccgaatgcttcaaccggttgaattattcaaagcacagggatttcctgaaacatatattttcgacagaggtttagatgaaaatggcattgaatttagattaactaagaccgaacagacaagaatggttgggaattctgtctgtccacaactatcgcgtgctttagttgaagctaatttcaaacatgaaaatcaattcagaaatgttgcttag

SEQ ID NO: 66824 - DNA, 279 bp, Acinetobacter baumannii
atgaatgctgcactgaatcaatttgattcaagtttcttattggccatgaagtatcagtctccagtggttccactggaggtgatcgtaaaggactttttaccgcatcttaaaattgaaacagccaagaagcgtgcagccgttcaagacctgcccttcccaacgttcaaggcagaagattcaaacaaagccccttacatggtgaacattgttgacgttgctttatggctcaacaagcaaagtcaaatttctaaacaagattggacaaatatgcacgcctaa

SEQ ID NO: 66825 - DNA, 354 bp, Acinetobacter baumannii
atgcgtggcgtaaataaagtaattttggtcggcacgctaggtgccaatcctgaaagcagaacctttccaaatggtggttcagtttgtcagttttcaatcgccacttctgaaaaatggcagaacaaacaaactggtgattggattgaacaaaccgaatggcaccgcattgtggccaacaatcgtttgggtgaaatcgctcagcagtacttaaaaaaaggttcaaaggtttatatcgaaggttcacttcgtactcgtaaatggaatgaccaaaacggtcaggaacgttacagcacagaagttcgtgcagacaatttacagatgctggattcagcaccacaggcaaatgcggtttaa

SEQ ID NO: 66826 - DNA, 492 bp, Acinetobacter baumannii
atgaacgctcaaacacaaaaagaccaaagctattacaccatgatcgctgaacaccaagaactgtcagcacgtgtacttcgtttgcacagcattttaaatcagcatcattgcgttcaacacatgccaacagaagcatgcaccttgatcaacgaaatgaaaaatattgtcgacacaggcaaagcacatcctgatggcttggaaacttcagcactgaattttgatgatgccctaccgttcacggatcctgaaattaataccgttcacgacttccaagtgggtgacaccgtttggatacctgatgaatttgcacgctacaaatttattgtcagcagtcatcagcgttttgaagtgacgcagatcgttggtacagatcagctgtatgtctgccacattgaaaatccagacattccattcaccaacaatcagaaatgtttcacagcacatttcagtcattttgcaaaagttacaggagaagaatcatgcgtggcgtaa

SEQ ID NO: 66827 - DNA, 198 bp, Acinetobacter baumannii
atgagtgattttcaaaccggtcagcaagtggtttatatcgatgctttcatgcccgacacagttgaagtgattacagacatcaaagatggatgggtaacttttaataatggttcgcgtggttgtatcgctgcaatgattcgcccagcaactgcaacagaaattaaaaatgaaaaaagatcattggagcaaaacgcatga

SEQ ID NO: 66828 - DNA, 243 bp, Acinetobacter baumannii
atgatgataacacttcaagatttaacgaataagcgcaaaacacatcttaaaaaccgaaatggtacccaagcattgttgcaacgtattcaagaaatgcaaaaagaacaaggcaatcaacgcatgattgctgcaatcaaactcaaaggctacatagaagccctttatgaccagaaccacatgacttacacagatgcatgcgactggcttcatatcgttgaaactaaatatcaaggtgtgaattaa

SEQ ID NO: 66829 - DNA, 195 bp, Acinetobacter baumannii
atgtctacagtcaaagaaaaccgaacagaaatgagtggcgcacattttacccagcccgaaaaagactacatgcgtatccatgctgcaaaaaaccgcacgactatttctaatgtgattcgtcaagccgttgcaaatgaattatcaaaaattgcagaccctgaaaacccttttttcattgcgaaaaataacacctaa

SEQ ID NO: 66830 - DNA, 258 bp, Acinetobacter baumannii
atgggagagcttttaggggtagcagtcggatctatagtccgttatgaaaagcagggagatccgctgaatcagaatcagcttatagctttgcaagatgttggatttgatactttttatataacatttggccagcgtctagctaacctgactgaggatgaataccaggtacttgaggcttttagatctataaaagaagaagccaaacttggattcattggcatggccaaagcctatgcacaaacaaatgccgcttcttaa

SEQ ID NO: 66831 - DNA, 204 bp, Acinetobacter baumannii
atgacagaaacaattactacaacagacaatcaagaagaaattttaattgacctaattcaattaaaagattgtttaagcctgtatagcaaattcaatatcgcagatggtgaaagtattacaccagacgaaatgcatgcgctatttaactccctaaagatacaggttgagggtattgtcaaaaaggttgagttcacattgcactaa

SEQ ID NO: 66832 - DNA, 843 bp, Acinetobacter baumannii
atgaatgcacttatccaaattgacgatgctgtttttattcaagatcaacaggtcaaaaccaccagtttaaaagtcgcagagagttttaagaaacgacatgacaatgtggtacgtaaaattgaaagcttttttgaacgaaaatctagcgccctcaattttgaggtggcgaattttaacgaacttaattttacgcttgtagaatatttggatgaacaaggtaaacctcgtccaatgtacgaaatgagcaaagacggctttatctttttggttatgggctttactggggaagaagctgctcaaaccaaaattgcctatatcaatacctttaaccaaatggcagccatgctctacaacttgcacggccaaaatgaaagtatccatgtcggtgcagtagtgcaactcaagtcaggtggccccatttacacagtgagtcagatccactatgaccagaatggcttcatgcaagatgctgaagtcatttggcataataaaacgactctgtgccgtgacgtattgcctatcgcctgtttatcactagaaaccaagaacatcatcgacagtaaaatgctgaatgacttttggacaagtgtgaatagctatggcttacatagactcaatcacagtcgtaacccaaatatcttagcacttaatatttctcagatttatcagtgcatagaaggtttgccactcaagccccagctttttgccatacttatgcaaagtcaaagccctaacccggtgtttatgcagcacaataaatctattcatagtacgcttttagcaaagaccataaagtgttggctttttaagcctgtatctttacggaacttaggtttgagctaa

SEQ ID NO: 66833 - DNA, 252 bp, Acinetobacter baumannii
atgaaaacattcacttctacgcattcgtgcactctgaacgagggaaaagtaaagcaacgctttacccgagtgcaagacgagagctatgctcgagtaaacgtaaaagaacactccccgatttacgacctagcagcgtatgaacaacgccagcgcaaacttaaacgtaaacaaattttaaaaaacatcttagacaccaccctgttcttttcagcatgttctatcgtcttctcattattgttttggggagtatga

SEQ ID NO: 66834 - DNA, 180 bp, Acinetobacter baumannii
atgtttaagaaagtatgtctgattatttgtttgagtttgtcttttgtaagtgttgctgaagcaagaggaaataagccttgttctggtaaaaaaggcggtataaaacattgcacatccgatggcaaatttatgtgtaatgatggctctgtaagtgcttctaagcgtaaatgtacacgataa

SEQ ID NO: 66835 - DNA, 582 bp, Acinetobacter baumannii
atgaaaaaaatatactctatattattgtttatttttactttaattatttttcctattcttattgtgattgatattgtatcgccccgatactcagaaaaaataaaaaaagctttattgaatttagagaaaaaaattgaaggtgaagcgactcaagttgagttgaaggatagtgttgaccacgttccagtatcttctgcatataaagaaccaacggtgtatgtacccaaaactgagcctgaatatcaaccttggaatcagattccagattttagtaaagacgatgagtttgatgatgttgaggaagatgatattgatttagctggttttcgatatgtacttgactataaagataagtatggaaatgtaactacaagaggtgtagatattcttggagtacacaaggtgtatggtaataatcgttggtactttattgcagataccattgatggagaaagaacatttaaatctcagcgtgttataagtttaaaagatcaatggtttaataataaatataattctgcaaaggcgattagagagcatttgttgtcagagtatgatgtgattgaggatgttgaggattaa

SEQ ID NO: 66836 - DNA, 468 bp, Acinetobacter baumannii
atgaacaaaattgtattaatcactttaggtttaattttgaacacttcagtattagctaagtctgcagaagatatttttttagatatgtccgttgcagataatgttggtgcattatatgcatttaatgaagatgatgaccctaataaacagcttggtagacctaatcaatatgtgtccaagataagttgggccgatgaacgtattgatctacatgatttttctgaagaaaatgaagaggaaattaatgatttagatccaaccgaatacaagggcgggactattgaaggatttaaaaatgtagccgatttaaatagacgttatacctacataaaaaatattactttgaatgcaccgatgttaaatcaatatatgtataaaaaaggtctatttttgatgcgtttagataaggatttcacaccttctcaagctaaaaggtatgagaaagagtttaatctagcagttaaataa

SEQ ID NO: 66837 - DNA, 171 bp, Acinetobacter baumannii
atggaccaacaaactgctctaattttaattgttgtaaacctattggctgccgtggtactcatcatttggtacttgttcgaccgttataccaaacgcattgaaagcttaattcagcaaaataacaaaccaaactgtgcatttattcaagcgcaaaccaaacgtaaaggataa

SEQ ID NO: 66838 - DNA, 201 bp, Acinetobacter baumannii
gtgtctgaccccatcgaccgcgcacaagaaaaccaactaaaccaagtcaaagtaaaaccacgtgattacagcacaccatcatttgctgaatgtgaacaatgcggtaatgacattccacctgaacgacaaaaactaggtgcagtcactttatgcattgaatgtaaaagtttggaagaacgtcatgccaatcgttatcgctga

SEQ ID NO: 66839 - DNA, 2610 bp, Acinetobacter baumannii
atggctaaattaaaactagaagtcctttttaacggtgtagataaattatcaggacccatcgcaaaaatcgtaggtggatcaaaatctatgtctgctgtcttaaaaaaaactacggcagacctgaaagaactaaatgcacaacaacgcagaattgaaagcttccgagatcttcagtcgagtataaccaaaacatcagacacattagccaggtatcgtaatgaacataagcttttaaaagatcaaagtaagcttggcccattaagcgaggaacaagccaaaaaattaaaaaaccttgaagcaggaatacttcgtacaaaaagtgcactaaaaagtaaatcagcagaactcactggcgttgtccgtgacctgaatgtcgctggtgtacgtgtagatcagctggcagccgatgaaaacaagctaaagcagcgtacttttgaagctaacctagaactaaacaagcaaagagatgcactaaaccgattgacacgggcacagcagcaatatcagcgtcatcgtgacattgcccgtaatgctggtaccgcaggtatgactgctggctttggtggtgtcggtatgttgtatgctatgcgctctcctattgaagaaagcaaacgcgtcgatgttgaaacagccagaatttttgcccttggcttaggtgaaaaaatcagtaaagaagctgtgaaatatgccagggcaatggatactttcgggacatccacttatgacaatatggtgctgttgcgtgatggccttaccattttctctgacttgcaccatgcagaaatggtggcaccaacattagccaaaatgaagttcgctaaccaggctatgtttggccatgaaaaaggtgaagaaaacgaaaaagccttcatggacatgctgaaagttatcgaattacgtggtggtctaaaaagtgagaaatcattccaggatcaggccaataaaattcagcaggtcatcacagcaaccggtggacgtgttcaaggtggtgaatggctcaatgccatcaagacaggtggtattgcggtcaaaggcatgagtgatgaagccttgtattacaagatggaatctattgtccaggaatggggtggtcatcgttttggtaccgctgccatgtctgcctaccagaacatttaccagggccgaaccaccaaacgtgcagccaacaacatgctaagactcggactgatcgaagatccaagcaaactgaagcatgataaagccgggcagatatcctatctggatgtcggagcaatcaagggatccgacctgtttaaaaaagatcagttcgcctggatggaacaggtgcttttaccgcaactggccaaaaaaggaattactgaaaaaggcgatgttctagatgccattggcagcatctttaccaaccgtaccgcatccaacctgtttggtgacatgtacctgcagcgtgacatcattaacaaatcagcgaaaatgaatgctggtgccgacaatattgacgcactctttggcaaggccaccaataccacagccggtaaagaagctgaagccaaagccaaactgcatgatgcctatttgaaattcggtaccaccattctgccggtgtataccagtgccattgaaattgccaccaaagccatgcagggattcaccggatggatggaacgcaacccgacagcagcaaaagcattgggtgttggcctgattactgtagcggcgagcctggtggcgattggtggaacgctggtggtcctgtccccgcttattttggggattgcaagtctacgttttggcctatcttctctgatcatgagtggacgcatgtccatgactgtattccaagcattgccaacggtattcaatatcgtgaaagctggattccttgggctgggcaaagcattcatgttcgttgcacgcctgttcctgatgaaccctatcggcctggccattacaggcatcgctgttgctgcttacctcatttataaatattgggaaccgattaaaggctttttccttggtttatggaataccgtcaaaactgcatttaatggtggtattcaaggcatttcagcactgatcatcaactggagtccgattggtctgttttatatggcatttgcaaaagtactgtcttggttcggtgtcgatctcccagcgaagttcaccggctttggtgccatgattctggaaggactcaagaacggtattttatccaaaattaatgcggtaaaagaagcattatcaggtgctgtcaccggcgtgatcgataaagccaaaaaaatattagatatccactccccgtctcgcgtgttctttgggatgggggaatacaccatgcaaggcatggcgaatggcattatgcattcaagtattctgccaaaagtcgccacagccaccgcaactcaaggcttaatcaaaagtgcaaatgtctcgacacagacagtgaaaccaatcaatgttggtcgtaacaatccacggtcatatatcagtcaagacaccattgaagtgcatattcatgtcaaagatggatccgtggtcaaaggaacggctgaagcaatgcgtcaggaactccagcgagtggctgaagaacagcagatgaaaaaacgtaaatttttaacagacacggagtaa

SEQ ID NO: 66840 - DNA, 372 bp, Acinetobacter baumannii
atgaatactcaagatcaagaattaacaacacaaattactgaagaccaggctttaaaccaggcagcaattaaaaatccgaatgaagaagtggtcgaactggactatccaatcaaggtcggtgacagccagattactgctgtgactgtacgcaaaccaaatattaaggcactgagcggtaccagcctgcaggaaatcttcaattacgacgtaaatgcactgatcaaggtactgccacgagtcaccacaccggctttaacgccacaacaggttctggacttggacccaagtgacttctctcagctgggggcacagctggtctcttttttgtacccgaaggcagcacagcaggccattcaggaaatgatgaattaa

SEQ ID NO: 66841 - DNA, 2280 bp, Acinetobacter baumannii
atggcagcacaatatttttcagttttcactgaacagggattagctctattaagagagtctattcaaaatggtacgaagctcggtatcactcgcatgtcatttggtgatggtggtggctcgcttcccgtaccggattcaagtgttactcgtttagtcaatgaagtttatcaaacttcattaaattcacttgcgccagatccgaataactcaaactggttacgtgctgaagccgttatttcaagcgcagtcggtggctttaatattcgtgaattaggtttatggtctgatgatattttagttgcttattctaattatccaccaacttataagccaaatccatccgatggaactgcaagaatcatgaccttccgcatggtccttcaaattgacaatacagctaactttgaactaaaaattgatgccgatattgtgatggcaaccattcgaacagttgaagaagcaaaacagcaggcaatagaacatgcggagaaccttgtaaagcatcaagtgagttatgttgacgatctggatgactttctcactccttcaacaggacaagttgtctatgttaaagatgtcggtgattttgaatttgatggtgataactgggttcctaaagtacgattagactcatcaactaaaacagtacttggtcgctttttagattctaaaaatctagaaaatgtcagtattaaagattatggagctgttgggaatggcactttaatcccaatttctgattggtggaccattggttcagtgtattaccgaggatacacagaccttgcttcagtaaaagatgattatccatttgttaccagtgcaacagattccgtggattgggctgcgacacagaaatgcgtaaacatgaaagttaatgtctatgcacctgctggaaattatattttaagtagaagtgttcatacacctcattcaggaagtccaaaccgagtcgattcttgtggaaaacttttcggagatggtgtttcgactaattttagtcgagaaaatgctgttccaatgactacaagcacaactggagaaatttcagttagtgatattaataataatgaaagctgtttttcattgcatggatcttactttcatttaaaaaactttagtatcagtcggtcaccaattggaatttattttggtcaagatctaactaaatctgaattatcagcttgttaccgtaatgttattaaagatttaattattcgaaatgtaggaacaggtgttttatttgatgctgcatatggcaatcattacaacaccatgagaaacattcatttcgtccaatgtcaaattgattgtttaatgcgaaatagcccaagaggtggaactatttcaaacaacaaccgtaaccatttccatgaaataaggtcaaaccgatcaattataggcttgtggatcaagtctgccgacaccacaagaattgtagaatgggatggtgaaggatgtggagaaaagccaaccaataatagtttcccaacaccagaaggactaccattattacctgatggaataacacctctaaaaacttgtgttcatttatttgaaggtgttggccaattacaatctgtaattaactgtaaaatggaagggaatgaaatcgaactgtataacaagcagtttggtaatatgttcttatataatgggtatcatgaagctgaggtagaaattgaagataaaggtaaaaaggtctatatgccagaaaaaccaagaagctttatttctcaacacaccttttgctcaaataaaattgtagagatcttaaatgtcaatcggcattcttttccaggtttcacaaatgcaggcctatattttgttggagataacggacctagaaacgtcacaggatcctctacattaaaagagtccttagaagccaaaccatacaaaaaagaatttatagaaagccttggaaacgtccctgcttcatctgttcatcctatttcaatctgggaaaatatagatgcttctagttctgcgacctttaagattctgatcgtagggaatgcacaagcaaataatatatcttttgcaagtgagttattagtaagtgcattgcgtagctcaacacgtgcattgtctcgatatcatatggttgaacaagtgggtatcagagcaacggggcaaggggctggagatacaggaaaaattacagctcaacttgagttgggtggggataccacacgagacttgatgttaaaactgacaatgccggcctatgaaatgagtaacgtcacaatttttgtagaacgtgtagttactttttaa

SEQ ID NO: 66842 - DNA, 612 bp, Acinetobacter baumannii
atgaatttactccccccaaacactacacagcttgagaaaaagcttacagatgtagcttcattcgctcaaaacctaaatggaaacctttctactttaattagaattgatgatgcacctgcagattttctatccatattagcatggcagtttagtgttgaccgttggcaggatgattggccagatgaaatcaaacgcgctcaaattaaaaactcaataaaagtgcataggcacaaaggcacgaattacgcactacgtcagattgttgagagttttggttattcacttcaaattcatgaatggtggcaagagttacccatgaatgaaccaggcacttttcaaatcaccatcgacaccaatggaaaatctctaagcgagaaaagctacaacacattagttgagcttctacatgatgctaagcctttaactcgtgatctaaaaggcattgaaattaatgttatttctgtccaaagcgacaccaatgtggcttgcgcaatgtacgacggtgaagacgttacgatttatccgaaacaagaagactcaacccctctcatttatccaatttttgcccactatgggcatgacgaaacaaccatttttccaagagatgaatag

SEQ ID NO: 66843 - DNA, 906 bp, Acinetobacter baumannii
atgagtgtcgattttaattcacttccaaaaccaaactttgttgatgttatcgactttgagtcgatctttaatgaacgtaaggaatattttatttcgttatatccgcaagaccaacaggacaatattcgcaaaactttgaatcgagaaagtgaacctgtaaccaagttattacaggagaacgcctatcgtgaaatgattctgcgtaatcaaattaatgaaaaagctttagcaactcaattggcatttgcgaagaaagaagatctcgatgtttggggtgcaaattatgatgttgcacggcttgttatttctgaagctgacaatacaacaaccccaccttcacctgcgatctatgaatctgatgaagattaccgataccgtattcaaaaaaaattagatgctttgagtactgctggtcctgaatcagcctatgaatatcacgcactttctgcagatagccgtgttgctgatgtgaaatgcagctcccctgcacctgcacacgcattactcacaatcttacagcgtgatactgagaataatgcgtcaacacctgagttgaataatattgttttgaattatgtgtctggagaaaccaagcgaccgaccggagatcgggttcaagttcaatcagctgagattatcgaatttcaagtacaggccaaacttcacattaataatgtcccagaaactgacaccgtatttgctgcagctatggacagcatatcttcttacgtcaatacatcaaaacggctaggtaaaggcgtttacttttctgatctttactctgcgcttaaagtcactggtgttgatcgtgttgaacttatctcaccgactgaagaaattattttaaataattttcaggctgcaacttgcacaagtattaacttaacgattgcaggtgaggaatga

SEQ ID NO: 66844 - DNA, 348 bp, Acinetobacter baumannii
atgatgtcacgtgaaagcggtcgtgaactcgaaactgaaattgatcaaattcgtcaatccattcaggacattttgaccacgcctattggtacccgaattatgcgtcgtgaatatggctcattgctgccacagctcattgactcccctttcaatgaaatcactttgcttcagctttatgcagccactgcgactgcgttactgcaatgggaagaccgcatcaccttgaattcagtgtcgatcaatcaggttggtcgtggctcatttgaattagaaattgactgcaatgtggtcgacaacaatcagcaacagtctttaagcattccacttaattttggatctacgttatga

SEQ ID NO: 66845 - DNA, 624 bp, Acinetobacter baumannii
atgaatgcagatgctaaccgtcgtcttgaaaatattgttcgatttggaaccgtcaagaccatcaatccgtctaaacctattccacgtgtcatcgtcaatttaggcgatatagagacaccggaaatccgttgcctaaatattcgttctggtgacgattcgacctgggatatgccatcgacaaacgaagaatgtgttgtcatttcaccatgtggcgatattggtccaacaagcttcgttttatatggattttataacgacgaccaccctgcaccctctgatgatctaaacaaaaaaatccgtatgtttgccgatggctgtgtcattgcctacgacgtttcatcacatcacttgtctgctgttttaccttcaggtggcacagctgttttgactgctgatggtggtgtcactgtcaacggtgatacgaccatcaatggaaatttacaagtgaatggcagtactgccatgacaggaaacaacaccgttggtggcagtcagttagttcaaggcagtagtcattcttcaggaacatttagttcagatggtgatgtcactgcaagtggtatcagtctcactggccatactcacccaggtgatagcggtggaaccactggaggaccacagtaa

SEQ ID NO: 66846 - DNA, 450 bp, Acinetobacter baumannii
atgacgaacaatgttgaagaacttgctacctacttacagccgtatttagaacggttgtcagtgggtgaacgtgcgaagctttcaaaacagatcggtcgtgatttaagaaaaaatcagggcaaacgtatttctgcacaacagaaccctgatggttcaacatacaccccaaggcgcaaacgcctacgtgaacaaaaaggcaaaattaagcgcaaaatgttcaccaaattaaaaaacactgctcatttaaaactgctcagcaatgcggatgccattgcgattggctttatgggtcgtgttggacgtattgcacaagtacatcaggaagggttaaaagatcgtgctgaacgtggcgcaccgagtgtggtctatccaaaacgtgaacttttaggcttcacagatcaggatctaaaactgattgaagactcattcttaaaacatatcaatctttaa

SEQ ID NO: 66847 - DNA, 528 bp, Acinetobacter baumannii
atgaaaaagccaaatcaattaagaaaatatttgctcaacgcgattcctgatctcagccctgatcaggatcgtttattgatcttcactaacaatggttcacttcgcagtaccatggtcagtggttttagttttgaaatgtcatacacattggatctggtcatcacggactatgccggtgatgtcgatgttattggtgtcgtgctgttcacgtggattgcagaaaatcagcctgaattgatggccaaccatgaaaaaggaaaacaagccattagttttgaagctgaactgattgataacagcaaatatgacattaacttccaaattccactgactgaacgtgtcgtcgtgaaaaagttgtcagacggtaaattagaactcagtcatcctgaagaaccgaagtacacagaatatgaacctgccactgattttgaagtcatcgatccatcgggtgaagtgattgcttcatggaccacggttgacgaacaaggctggtcattagacatgccaccgacaggtcgaaatccatga

SEQ ID NO: 66848 - DNA, 858 bp, Acinetobacter baumannii
atgagaattttaaaattaggttcaaaaggttcagccgtcactgaattgcaaaaactactgattaaaaatggcatgactggtaaaaataagaaaccactcattgctgatggtgactttggcgaaaatactgaatatgccgtgattcaatttcagaaactgaaaaatctgaaagtcgatggattggtcggtgactacacactaaaagccctacgtggtgaatgcaccagtaaacttttaaaagaaagtgatttagtcgaaggtgccaaacgcttgggtgtgcctgtcatcgtaatcaaagccattgctgaagttgaaacgctgggtgaaggttatttgccaaatggtaagcctaaaattctgtttgaacgtcatcgcatgtatttctatttgaatcagaaattcggcaaaaccaaagccaatgcactcatggccaaacatccgaatattgtgaataccaaaacaggtggttatcacggtggatctgctgagtacacacgtttaagtcaagccaagcaacttgatgaatcatgtgcattacagtcggcatcgtggggacgtttccagctcatgggtgaaaattggaaagccttaggttatgcatctgttcaggaatttgtagcacagcatgaacaaagtgaaagccttcagtttgaagcattccttcgctactgtgaaaccaagtctggtgaagtggatgataaagattggaagttgatcgatgctttacgtcaagaaaattggcatgtagttttttcactgtataacggcaaaaactataaaaaactgggctatgacactaagtttttacgtgtgatgaaccgcctcgatccaaactataagagtgcaaaagctgcatga

SEQ ID NO: 66849 - DNA, 294 bp, Acinetobacter baumannii
atgatgcaactcatgttgtcgccattggcacaaactattttttccatcattgccgtgctgtgctatgtggcatgtgcattccgtcttttatgttttgatcgtttgcatctgcaaaaatgttcgtttcgactatttgcagtggtattgatcggtgcatttttggcacaaagcattcatataattttcattaaagatccggtcacgatttgggatgccattctcgcggtgttcttagtggtctttatttttcaaagtaaaggcaatgtcgtttcaatgctaaggagcacaccatga

SEQ ID NO: 66850 - DNA, 393 bp, Acinetobacter baumannii
atggctgaaccaaccacatcaacgactgtcgcaattaccgcttctgccggcttggtatcactccttccattcgtgaatggtgatgcactgtttggtgcagtaattggtgcagcatttttggcatacacccaagtgtcactgagctacggaaaacgtattttttcgctcatgttgtccgttgccttgggctatgccttagcccccgaaatttccaaccgaactggtgtgaacagtcacacggtcattgcttgctttaccagcatgtttgccttgcctgttttggtgaaggtcatgaaatgggtaaacaagtcgacattgactgagatcttcaacaccacttcaaaattcttttctgccctgtccaacacttttggaaaggagaataaaaaatga

SEQ ID NO: 66851 - DNA, 210 bp, Acinetobacter baumannii
atgaaaactgtttatgccattcagaatgacacggttgacgcaatttgttggcgcaactatggacgctcatctggtgtggtcgaagcagtacttgaagccaatccacacttgtctgaatttggtccatttctcccgatggggacaaaggttcagttaccagaacttcaaacacaacaaaataaaacgcaaagcattcagctttgggactga

SEQ ID NO: 66852 - DNA, 465 bp, Acinetobacter baumannii
atgaccggactaattgcaaacggcaaccgcaacaatgaagaagttgtcatcaccagcgattcatttttccctggcatatcgagcaaagccattcgtgaagcattgcgctttgatggaagtatcacagatcagcgtttaattcctgcaattgaatcagccatcattgaagtcaatgatcagctcgaatccttgacatcaaaagcagcatcacttgctgaaatcagtctaaaaaccatcaccaccaaaggggtggcaaagccaatcactgaagttctgtatttccgtgccgtggcagcagcggttggtgctgaactgactgaaaaataccgggcttatgacaccaacaacaatggtggccaaaaagcggatgaccttaccccaacgattgatgattaccgtcgagatctgcgatttgcaatccgtgacttaaaaaaaattcgtcgtttgaatgtggagctggtctaa

SEQ ID NO: 66853 - DNA, 564 bp, Acinetobacter baumannii
atgccttatgtgttgggtattgttcagtcaggcgcaaaagttgaacaagatgaagtcattaccaccatcatgctgtggtgctttgactgtggtctattcgatcaaggtttaagccttgctgaatatgctttagagcaaaacttaaaaatgcctgattcatttagtcgcaatactgccactgtcgttgttgaagaaattggcaatgcagcacgtgttgcacacaaggcaggtgaagatttcagtcttgaaactttagaaaaagcatttgagctgacttctgatcatgacatgcctgatgaagtacgtgcaaaactttatgtcggtttaggtcgttctagccttaaaaatgaaaattacaaggcttccgttttttactttgaaacggctttaaaactgcatgaaaactgtggttgtaaacaagaactacaaaaagctgaaaagcttttgaaagaacaaatcaaaccgatcaatgcagaaccattgctcaatgaagatggaacacctgttttgaatgaacaaggtcaaccaatgcttgttggtcaaattggtcatcaatcggtttaa

SEQ ID NO: 66854 - DNA, 846 bp, Acinetobacter baumannii
ttgaaaagtataaaaaataaaggaattacaagttattcagaaaattttaaaattagagccataaaatttaaggttttaggtttaataatcgggtgtattagagagaaaagggttcatgaggctgtatatggccttttctgttttttattttatagacctagtccttgtcaacaagagaatataattgagcctatcaataaatcttttaatacttttcaagtgaacatacaaaatattttaattaatagtagggaagaaactatttcaatggtaagcgatgataaatttgttctcggagagtatgacaatcctgggtcaagaatcgcatatattgaaaatactgttatttatctttaccaaccctatcaaaatgattcactagtctatcatatccattgtatccatcacataaatgatgatttttactatgtaactgtgggggatactgccaaatatctagatattgtaaaaataaattctactgaatgcactatcgtgaaaagagtgatgagtaaattagcaggatttacagcaatgatcactcttaatgatgaaacctgggctggaactgatttctcccatcgtccaaattatctcctcaatctcgaaactggcgaaaagatattcctacctagaccagcatttacggaatacatatcagttataagaaaatttacagattgtaaaattgaaattatgacaaaaaaattatcatttaattcaggatgtcaattgattttcaatacaaaaagtaaaaaatttgagtcttgtaagtcgatctcttatagtaatgagaccataatcattaatgacatagaagaactaaaagctgttaacaatacctaa

SEQ ID NO: 66855 - DNA, 213 bp, Acinetobacter baumannii
atgtcaatcagcaaattctttgatcgtttgaaaaaaaacattccccaaattattactatctttgtatctgtatctatcgcctactactttgagttaaagctgaataaccctattgatattggccactttgtagttatggcagcaatctattcagcactaggcttaattagcctaaaatttggcatgggctcctctaagaagaaaaatcaatga

SEQ ID NO: 66856 - DNA, 951 bp, Acinetobacter baumannii
atgaagttgaaaattatattttgggttgcggcttgtagctttacatctagtgcatgggccaaatttattgaaaacactgatattacatcttatgtaaatcaactcattaaacatcaaaaagtagtatcgatacctgctggcacttacaaaattgatgccaacaaatcaatcaccccaaaagatggaactgaaattagattaaccccacagaccaagcttgccattattcccaccaaacatggaagctaccgtgtttttcaggttaaaaatgtgaagaacgtaaagatctctggcggctctttaacaggagataaatatactcacctaggtaaaactggtgaatggggcatgggaatcgaaatacgcgactctcaaaacatctcaatatctgatatgaatattgataagatgtggggagatgcgatttatgtcggtacaagtggcaggaactcgacgtataacatcagcttaaagaacatcagaatgaacgataataggcgccaaggtatttcaattatctcagtgaataagttgcttgcatcaaatattactgcaacaaatacaagtggtgctatgccagcgagtggcatagatatcgagcccaacaacggatctatggtcttaaaaagtattgttttgaagaatattaaaacatcaggaaatcagggttcaggcatccaaattggtttgagcagatatgacaactcagcaaaacccgtatctattacaatagagaatcatcaagactccaattcggggcatgggcttttgcttggcgcgataaataaaaaaactgtaggtgctgtatctatacaatccaatgcatccagaaattgcttcaattcctggagtaacaatactgtgaaagttaatattgtcggtgcaacaagcatatcaaactccaaaggatgtaatgggcatcttaaaaactcaagtatctctctaaaataa

SEQ ID NO: 66857 - DNA, 966 bp, Acinetobacter baumannii
atgaactttgtaatcaaaaagaaaagtgcatatagcttttttttagcactattcgccactttcataattgtgcttgtaccttgggatgcgcttcgaagttcagagtatgtcgatagagcaaactacgtaagttatatagatcacactctaaataaaaccctatggtttgattatgacaccctgctttcaaaaataagttttgaatggggttggcataaattactatatatagctacagaaaatggtctaaactctagcaatattttcatgattgttagctcattgatcatgtttttttctatatttctagtcataacaagaacaaaatattatggttttttatttctaataaacccggtctttatagacttttgcttctcgcaaatgcgtttagcattcactatgtctttagtgtatttagcttatatactttataagcgaaaaaatattttatatattccaattcttctttcaacacctttttttcatacgtcggccgtaatttttattggtgtttttcttattgctacaaagttggagcaatgggaaaaactcaattttatgtttaaaaatacagtcgcgataatggttggcttagtacttgcgattgtcaccggccctcttatgtcacaaattttaggtcaactcggagatcgacgagcagaatatgaagacatgtcttcacccgttctttacatgagcttctgggtaatttactttgtttatttggcaattaaagcatatacagaaaagcttgaaagaaacgctttcttttacatcagcttaattattttgggaatggtgttttttaatgtgttcttctcgggttactcatcacgcttcttagctgcgtgtttcccgatcattatcatcgcacttttgcagctcaaatcaagagaaaaacaactgttgattttggggtatgcgatatacacattaatgctttggttcttctgggcaacataa

SEQ ID NO: 66858 - DNA, 1908 bp, Acinetobacter baumannii
atggcaagactcgcaccaatgatgcaactgaaagcacattttgaagataagtgtggacacccattggtgggtggaaatgtgtttgcatatgaatcaggaactaccacacctaaggccacttttgcagatgcagaaggaacaacaccaaatacgcatccaataattcttgatgaacggggtgaggcgccaatctaccttttatctggtcgttatagatttattgttaaatcaagatatggtgtaacgatttatgatgttaatgatattggtgattggttaggggtagtaactgctgaagaagtaatggatggcaataagacacaacatcaaattaatgcagagcaaaatgagcgaaaaagcgttaagctctggtcttccggtctagcagatgctcttggtaagtttgacgcggtagactttgataaagatgaaactgtttccgctccggtactactagtgtcggggcagattgttaattctaatgggcacgaactaaaccaagttacaccaacaactatcgtgctggaaggtcagtacggtgcttccgatattgttattgatggacttagtatccagcaagacaagtcaggagtagtgagtggtggtactaataataatcatgcggctattaaaattcgcggtggactgaggaacaaaatcaagaatttagttctggatagccagcttggtattagtcttggtatgggtgaggctggtgctgcggaccgccgcagcatgtttaatgttattcgagacatcgtatttaagaatacaaacattggtgtcgagcatattggagcttcttataaccagtccatgaatattgttgtagaccctcaagacaaaggttctttcatgggggatcgcggtactggttacgacaagattgagaatccagatgaaatagctcatgcaccatgccatgcaaacaacggtgtgaactggatcattcgcaatatggctaccgggatctcgtctcagaatagctctaagtttgaatcgaagatcaattactttatttcagggtgtgatcgagcgattcagataattaaaggcacagtccaaggaaacaaccccactctaaataactatcaaattatttccgagaaatgtaagcagttgattgttaacgatggaggcaatcacaacattttccgatttattgctgatggatcggcctttacggatcagggcattcaggaaatagcaggatttttaggaaagggctttaaccagtatctaggaactattaaaaattctgcgaaaactgccgcgcagttacgctattcccacaacttgtacggcttgcaagtcagcaaggcaacagggaatggagctaacgtaaatggtaattacggtggtggcttaattattgtagacggcgcaactggaacaggtgttgctttagcgggtaactacaacaacctgcaagttgttgctacagagtgtttgaatgcgttggttgtttcaggatctgggaacactgtaaatattcaaacagatggtaatgtgcagttatcaggctcaggaaataccattattggcagaattggcggaagcttgacggttacaggtaacgataataaatttatcggagaagtggccggtactgttacaagaacaggcacaacaggtaatgattttacaggacttaaggggtggtcgggcaatattgtattatctgagcaaacaaccgatgggtctggtcgtgttactgttgcagttccaaagcacactagcgcacagattagaaatatatatgcaaccattccaaccaatacatcaaagtggagtttaaaggttattagtatttcaggtggaaatgtgatgtttgagctacaagacaactccggaaatgcagtgccaagaacagctgtagcttttaattatacttatagttgttcataa

SEQ ID NO: 66859 - DNA, 921 bp, Acinetobacter baumannii
atgtatccattaatgaccaacgtcacagcacaatttgttgatgacaacgggaagcctttaacaggtgggcaggtgtggacctacgaatcaggaacaacaacgcccaaagcgacttatgttgatcctgatgggggagccaagaacaccaacccaattattctggatgaagcagggcgtgccaatatctatttagatgatggggcatatcgagtaagggttttatccgcagatggggttcttattgctgatgcaaacaagctttctcgatatgtaacaagcaccgaactagatgaatttattcagcaagcacaagacggcttggatgaattaaatcaagtcaaagagtcgctaaataccattgttgagcaaggcattaaatcccaaaagggtgttgctggtggactagctccattggatgaaaatgacaaaatagatccgatttactttccagctttgccgaactccagcattccacaagctactgaagaagaaattggcgtagcagagatcgccacacaaaccgaagtaaatgccgccactgataacactaaaattattacgccatcaaagcttttagctggtgttaaaaatcatttaaatgcatctagtgaggctccaatgttcgcttgccgagcttgggttaactttaatggtacgactggcgagataagagggtcaggcaatattgctagtgtagttgcggaggggggtggtgtgtatgcaattacttttacaaccccaatgtcagatgcaaactatgctatttcaggcgtgggaagtgcgcgtggtgatgcaacggctctagcacctgtagatggtacatttacagtaaatggtttcaaagtgagagcgaactttggtggcgataacacagctggtagttattcgcccttgatttgctgtgttgctgtttttagataa

SEQ ID NO: 66860 - DNA, 150 bp, Acinetobacter baumannii
atgatatattttgctttaattctaataattttacttttttataagattcacaaattggataacatttttaaaaatgccgtctcttcacttgaagaagagataaagaatttaaaaaaagaactgaaattagaattagaaaaaaaacagtga

SEQ ID NO: 66861 - DNA, 1335 bp, Acinetobacter baumannii
atgcttgatccaagtatcattactcgcggagctgagcgtgctcaattacagcaacagcaaacaaacgaaatgctcggcaatcttggtggggcattagggcaaatggttctaggtcgtcgaattaatcaaatgcgacaacttggaacacctgatgaacaaaaagcctttgctaacaattctattttcgctccacagttaaatcaggttcttaagagtgatcaagtaacagcacagaaaaatgcactcgatttgcttaaagctcaagcggaaataggaaaaacaaatagtgaggctaccaagaataatgcccaagcaggtggttttacgttagataattctcagaagaagtttggggctattcaaggtgtcatgcagcaagccgcaatgactggcgataaaggtcaagttttgcttgggttggatgctttgcaaagatccggagtgatttcaccagatgattatgctcacaacttttcaattattcaggcaatgacacgagatgaggtaaaaaattatgccaaagggatagtatttactaataaagatacagcaccactcatctaccaatctgcaaacaatgctgctgataatgccgcatccgaagccaataatatccggaccacaaatgcaaccatgcgtggacaggatataacagcagatacagctgaaaagaatcgcattcaacaagataagcaattccaaaaaaactttgagtatcgagctcaacaagatgagttaaaaaatgggcaaggcgaactcaaagagtttggtggcaaagtctatttggtttacaagaatgggacatatcgtccagcaattggcgaggatggacagcagatcacctctcaacaaaagggcggtggaatgactgagcaacaatcgaaagatgcgttgttcggtgccagaatgcaacaatccaattctattatcaaccaacttgagaaaagtgatgttagccgcactttgttgagtagagctccgattgttggtgaggggttatctaatgttttacctagtttcttaggtggggcaaacccccaacaacaacaatatatgcaggctcagcgagactttattaatgcggtattgcgtaaagaatctggcgcagttattgcggatagtgaattcgaaaatgcccaaaagcagtatttcccacagattggcgattcaccagcagtaattcaacagaaagccaaaaacagacagttagcggttgatatgattattaatggttctggtaaggttgggcaagagaatattcaaaaggctacccaacaacaaggacaaaacccatcaaatcaagctaaattgaacaatattctgtttggcaaataa

SEQ ID NO: 66862 - DNA, 264 bp, Acinetobacter baumannii
atgaaaggcaaagtctatttcataggcggtgaatacgatggcgaatcatgggagcatccagttcgtttaggcgaaatagtacctcgtattaagcgtcaatcagtttatgatttagacacccctccaacaataacatctgaacttgctgaaattaaatacgaggctaagctttactctgttgcaggggataaaagaatatttctagtagatcctgacttgcccagcgatcaagccctaataaagattgaaaagcactttttctaa

SEQ ID NO: 66863 - DNA, 306 bp, Acinetobacter baumannii
atgggcaatacttggcatgctgatcaagataataatatgcgccctgatattgaaggcttgccatgtcctttttgcggatgtacacatggcttagctgtagattcagattctcatgacttaaaagaacatggtaaaggcaagggcattaaagcagatgataaatacactattccgttgtgccatttctgccatcaatggtttgaccagtatcgagggatgggacttgtagaatcaaaagaatggttcagcaagatgttagaaaaaacagagcggatgcttaaccttaaagatggtgaggttttttga

SEQ ID NO: 66864 - DNA, 1398 bp, Acinetobacter baumannii
atgagtacatcaaatacatcgtctcctatggatcagaacgtatttgatccacaagccgctgctcaggcacgtgatcgccgtaaaaaagtgattgaaaaatcactggctaaacgtcaccgcaaagaaaaagctttccgctttgcaggtttgtcagcagttgttattggccttgcattcgttgcgctactgtttggcagtattttggcaaaagggttaccggcattctggcaaaccagtatgaatgtaccggtctacttcgatcctaaagtaattgatgcaggtccagtgccggtacgtacacaaggtgaaacacctgcacattaccaagaacgttatgtcgattggcaaacaaaaatgggtatggtcgattgggatagcctgatcgtaaatggcatgattgctaaagatccttcacttgcatcacaacgcgattatttaagtagcctttatgcaagttctgaagcttatcgcttacgtgatatggtgtttgctgacccatcactcattggaaaaaaagagaacctaactttcttgggtgatgccaatgtagatgtatggctgaagggtaatattgaccgctcattaccagacgatcaacaacaacttgatccggaaatccgcaagctagcagatgaccttaaagcaaaaggtgtacttgaaaatacctttaataccactttatttaagaatcctgactctcgtagttcaccagcgattagtggtcttgcaggcgcattcatgggttcattattcatgatgctgattgtgatcattatctcgattccaatcggtgttgccagcgcaatctatcttgaagaatttgctccaaagaatgtcattacagacattattgaagtcaacattaataaccttgctgctgtaccttcaatcgtgtttggtttgttgggtgctgcaatctttattggttggatgcatttaccgttgtcagctccttttgtcggtggtttggtattaagtttaatgacactaccaacagtcattattacaacacgtgcttctttaaaagctgtgccaccttcaattcgacaagctgctctaggtttaggtgcgtctaaagtacaaaccgttttccatcatgttttaccgttagcgttgccgggcatcatgacgggtgcaattattggtgttgcacacgcactcggtgaaactgcacctttacttttaatcgggatgagtgcattcgttgcaagtgttccaaccaccccatttgatcaagcaactgctttacctgtccaagtttatctatggcaaggtaatgagttgcgtaacttcttcgaaggccgtactgctgctgcgattatcgtacttcttgcattaatgattggtttaaacagccttgcaatttggttacgtaaaaagttcgaagtgcgttggtaa

SEQ ID NO: 66865 - DNA, 1263 bp, Acinetobacter baumannii
atgaaactcaacaaatctaatgttgatgctattccattgtctgaatctggtcaaaagatttatcgtgatcaggagctgacagggtttgctgtccgtgcaacaacaaaatctaaaacatatattgtcgaacgtcgatacgctggtgagctttaccgggtggtgcttggcaagaccaatgaaatttcagctatggctgcacgtgccaaagcgcaaatgattctggctcaaattgctaatggtgaatacaaaaagccggtgaagggtaaaacctatgatgatccgatggacattactgtagggcaggctttggaaatttatatcaagcgcaacgacttcaagccaaaaaccattcgacaatacagaaaatatttcgacctttatctaggctggtcaaatcgcaagttgttcgagataaccaaaaatgaagtgctcgataagtttttgactgtttctgaaattagcaaatcatcagcgaatggatctgtatcgcttttgggtacgctttggaaatatatccatgtcctatattcatctgatgaaaatccaattttgaaaaccaatccggttgatgtgattgccgttaccaaaggctggaatgtgattgagcgccgggagcgccatttgcataaagatgtcattcataaatattacaactgtgttctaaattaccaggatgaacttaatctggaaaatacagccagatccaatacacaccgggacatcattctatttaccatgtacaccggctgccgtcgtcaggaggtctgcggcctgaaatggtcggacgtgaattttaagaatggcacagtaatgtttcgggatactaaaaatggcaatgaccatttattcccggttggtgaccacttattgcgagttttaaaagatcgctttctgctacgtgaaaatgattgggtatttccggcaaccaagataccaacatcagcaaacgtgcatgcaaccaaagtggatcgtactttaaagattattggggaccaggtggggtactacgtgtcgatgcatgactttcgccggaccttcgccacgatttgcaacttgctgcgcttcaatatttatgtgactaagcgcttattgaatcatacattccgtgcgcgtgttgatgtgactggtggctatgtgcaaattccaatggaagaattaaaggcatctatgaatatgattgaagcggtgtatcaaggcaagattgattgctttaattatgaaagcgtgtgggatgaaagattgaaacaaataaaggcaggttaa

SEQ ID NO: 66866 - DNA, 267 bp, Acinetobacter baumannii
atggccttgcgtaatttaaaagaagcaaatagagagcaacagaaccgcatgctaaaagacttcattgatgcgcctttagatcaaaacttcgggcatgaagtggtagccatgtatttaggttgctcaccctggacactggcgcgcatgcgctgcaacgggtcagaattgccgtacacaaaaatcggccggcgcattgcatacaagaaacgtgatgtgctgagctatgaaaaaagccgcaccacaacgtgtacagtgcagtacacataa

SEQ ID NO: 66867 - DNA, 276 bp, Acinetobacter baumannii
atgacaaataagcctatgctggttatcaaccacatcgaatctgttggcttgattgctgaaagcggatcagagttagcaaaagcgtttagcaatacttatttcaaccaagcagcaaatgagattgctgatcaaaatgagattgaggccctgcactttatgggtagtgtagctggtcatgctttatgtcaaatgttcagccagaatattaatatcaaggagcttgattcggttttggcccagatacgcagctatgtaattcaggcacaaggaagttaa

SEQ ID NO: 66868 - DNA, 294 bp, Acinetobacter baumannii
atggatattaaagaagttgtaaaaacggcaattttgcgcaactcccatgaatggggtgatgagcaagcagaagcagttttgaaggcaattaatgaagctggttttcttgttgttccagccaaagcccaagcggtgccggaaggttacgtgcttatgccaatcaagccaactgaaacaatggttatggcggttgtaaaagaacatgaaggcgatgcctttctaccatatagcctgtatgacgcttatgtgaagcaagccatgatcgaagcccaggagcaaaccaatgacaaataa

SEQ ID NO: 66869 - DNA, 282 bp, Acinetobacter baumannii
atggatgttcaaaaaatcaatgtaacaaatgttctgcaaggtactacggaagatgtagtggaacaaattttcaagattttcattggtcagatacatgacaagatacagaaagatgatccagctcaagctttagactttgcatttttagtcgctggcaatggtatcgctgccctactgaatcaagtagcagatcaccagattgatgatatggctaaattgcttcatgagatggtggacgaagctactgaaaatttgaaagcaatgcaaatcaagaaaagttaa

SEQ ID NO: 66870 - DNA, 1494 bp, Acinetobacter baumannii
atgaatgctcaaacacaaatctctactgcaccgcaaatgaactcagttggcctgttaaacctggaagctttcgagctgtcgcaacgtgtagcaaaaatgctggcaagctctaccctggtaccggaacagtaccgcgcttctttaaaggtgaaagccggtaaggatcagaacggcaactgggtgtatcaggatgtggaaaatccgaatggcctgtcgaactgcgttattgctttgaacatggctaaccgcatgggtgcagatccgctgatgatcatgcaaaacctttacctgatcgaaggccgtccgtcttggtcgtcacagttcatcatggcatctattaacagctgcggccgcttctcatcattgcgctttgatatggaagatctgggcgaaaaggaagtcgagtatcaggaaacttcatgggctggtggccgtaaacagaacgtgacgaaaaaaatcaagatccagaactttgcctgcaccgcctgggccattgagcgtgaaaccggtgaacgtctgaactcgtcaaaaatcaccattgaaatggcggtgaaggaaggctggtatcaaaagaacggtagcaaatggcagaccatgcctgagcagatgctgcgctatcgtgctgcatcattctttggccgtgtttatgcacctgagttgttaatgggtttacgttctgctgaggaagaacaggaacgcattgtcgatgtcacaccagatcaggacgttgcagccaaagccgatattgggcagttaaaacgcaacatcctggcggctaaatcccctgcccaattacaggcgctggaagaacaggtttttgatattgccgatgaagaaccacgtaaggagctgatgaaactggtgaatgcccaggcgcaaaaattccagcctaaaaatgtggttgaagcgccagctggtgaagtagaagaaaagccaaagcgctcacgccagcctaaggttgtggaagcagaagaagtaccagtgcaggaagttcagccggacatgccggaatctgcgaactcaatcagtgaattgcgtcgcctgcagcaagaagctgaagccatggttgagcaaaagaaacagcaaagcccggctgacctgaaaaaagaatatgccaaagcactgaacaccgctaaatcactggctgatgtgctggatattgaggaacagattgaaaacgatgcgcgcctgaatcaacaagatgctcaatacctgcaggccaatattgagcaagtgcgcgccaagtttgaaaagccgcagcagcagacaccagctgtcgatcctatcaaaagccaggcggctaaaattgaactgatccgcaatattaccgacacgcctactgtttccgatctggtacagaaagttgcaccggttatcaacgagtacaagccaaagctgaccactgaagatatgaatgaagtgatgaatgcttatgcagcacgcaagaagcttttagaagatcagcaagatatgttcgacggcgtacaaggctaa

SEQ ID NO: 66871 - DNA, 882 bp, Acinetobacter baumannii
atgacaacaatcatcactccaaacaccagcgcggccatgattgaaaaaatgagcaatgaagactatcacgcacgccctgagttcagctcaagccagttaaaagacatgctgcgttctggtgctcacttctactcaaaccacattttgaaagaagttgagcgcgaatctagcgccgctatgaacttcggcaccctggtccatacgctttttcttgaaccggatcagtttgaaaatgaatttgtcattgcgccgaagtttgataagcgcaccaaagcaggcaaggaagaagccgcagcatgggaagctgcacaccagggcaaaattctgatcaccgaagaacagaaaaccgatgctatgcggatggctgaaaacctgaaacagctcagctcatacgccgacatgcaaaacaactatggcatggccgaagccagtattttctttaatgatccggtctatgacctggctttgcgtgtacgccttgactatcacattgcaccatgtaaagcgtttacaaacggcctgattctggatgtgaaaaccacaaccgatgcacgtccgaccgagttttcaagaagctgcgccaagttcagctatgacctgtccgcggccatgtaccgcgaaggcttccagcagtactaccagactgcagaaaaaccaccgtttatttttctggtggctgaaagtgcaattccgttcaacgtcaagcagtacaaggcatctgacctgttcctaagcgttggtgaagcacgttacaacaaagccaaatcactgctggctgaatcactgctgatcaatgaatgggatggttacagcacagacctggaagaaatttatttaccgtcttatatgaccaaacaagctttagaaaacgattttaactaa

SEQ ID NO: 66872 - DNA, 252 bp, Acinetobacter baumannii
atgaatcaatttccgtcacacagtcaaaccccgaagtttgactcaaacaaatctcaaacatctcaaatcctctatcaagagcctacgccagaggaaatgaaacgccgttcaaatgcgttcagtaacttctttgcattcctggtcctctttgctctgttttttagtctgggctgcatgatcattgtgaccgctgagcgcgaatcggctaatcaggtggctgctgtagctaaagttgtggaggatgcgaaatga

SEQ ID NO: 66873 - DNA, 174 bp, Acinetobacter baumannii
atgaatgcaaccgaattattagaatggcgtaaacaagtcgtaacagcaatgcttacacaaggttattgcattgagcgcattatccctgatgtcatgactgctgagaaattcataaatacaggggaatatcctgaagaatgggaaaatactaataatcagaatgctgacgaatag

SEQ ID NO: 66874 - DNA, 201 bp, Acinetobacter baumannii
gtgaataatgaaattaaacaagctgtcgcacttgaaattactaaaatgaaaatgacagcgctacaccaacatgataaaaaccttggtattaatgctgacctttgggttgaagaatttcacaaagctttacaaaaagtggacgaagcggagagaaactacgctagagaaaaaagggctattcgtcagcattctgattattag

SEQ ID NO: 66875 - DNA, 660 bp, Acinetobacter baumannii
atgcttttttggattatcgctggtgttgttggattgggtctttatttcttaagtcaaaacaaaactgaaaaaagagacaaaacaactatcactcataagcgcgtcattcagacacacgatggtgaagttcatatacacagaacccaaaccattgatagcgtacaaacaacctatagcaagcaggattcaacgtctcaagctgtaaaaaatattgttgatgccctaccgcatgccaatcagactatcgcagccccagtaagtcaggaaataaaatcaaaacctttgattatttcagaagatcaaccacaccgttttgcacactatcaacaagaatcaaaaccagagtcatttgctttaactcaaccaaaaaatgacattcagcaagatttatttgagaagaaacaagaaagtaagtcgtgcccaaattgcgaaagggatttgccttttcagtcttttggcaagtctggaaagtacccagacggcctaacgaaatggtgtcttgattgccttaacaatcatcaatcaaagctgcctaaaaacaaaaagcactgcccaaagtgcaataagacaaggttgaaatcaagcttttataaaaatagcaaacaacccgatgggcttactaagtggtgcaaaacctgcatggacagttcaagaaaataa

SEQ ID NO: 66876 - DNA, 345 bp, Acinetobacter baumannii
atgaaaataattaatgctttagtggcttactttctgtatttttttgccccaaaaacattaatgcggcgctcatttattggaactttattacattttaatatcaggctacccagcgaagccaatgatgaaatcgtgtcttacttatatgatatttacgaaaaaaataaaaaaattgataaagttatgaatagaggtggtatgacagtaaatatggagaggatgttaagtctaattcagtgcgaggcgttttttataaaagattatttcagcaaccaatacacactcacatctggacatgaagaagtggttaatgttttagaaaaatacgattatttgaaaaattga

SEQ ID NO: 66877 - DNA, 690 bp, Acinetobacter baumannii
atgagttcaattagagatcgaataattcaaagaatgactgatctaaagctcagacaggtcgatttaatggatgcaacaggtgcaaccaagggtgctgtttcaaaatgggtttcaggaactaatgtacctagtactgaattcatgccagcacttgcagcaattctaaagacttcagaaaactggcttttaacaggcaatcaaacccccgaatttagacaagtcgagccatgggatagcaatacccctcttgatgatgacgagattgaaattccattctttaaagatttttcttttgcttgtggtggcggctctattggcgaggctatcgctaatgaaacgcgcaaattaagaatgtctaaagcaacactacgaaatctatccattacaaaagagaatgccgtagcagcgactgcaatcggcgattcaatgagtccaaccattaaagatggcgatacgatccatgttgatcttggaagaaagaatataaaagacgggaaaatttttgctatttgtcttggtggcttgttctattgcaaaagactatacaacctgcctttgggcggtgtgcgcattgtttctgataattctacagagttcccagaaatacatttaaatgcccaagaagtagttgatcagcaattagaaattatcggttggatttggcaaatatctagtttagaaagttggtga

SEQ ID NO: 66878 - DNA, 192 bp, Acinetobacter baumannii
atgaccgttgatgatttaaaaaaccacttctgtgttgaaaaagacatccagctaacaaaaacagtcctaggtgtaacaagaggaacaattagtaagtggcgtcataaagggattcctttggatacacaagcgagaattcaggtcttaaccaaaggaaagttaaaagcaaatctgctggaagcaagagcttag

SEQ ID NO: 66879 - DNA, 318 bp, Acinetobacter baumannii
atgtctgaaaaacttacggaaagcatcactttcaaatgcacgtatgaagaaaagcgtgaatttgaagcgatagcaaaagccgaaaaaaccgatgtttctaaattaagtcgtgtttgcatgaatcaaaaaatctcggaagtgagggaatacctaaattctctcaaagcctttgcacgtcttaccacagaaacaatgaatacagattttgtgctgacagcgcagccacgaattattgatgtcaccccaaaaccgcaggcacaaaaaaagctcaactgttgcgaccagatgagcttctttgccgttcactcagaaaagtaa

SEQ ID NO: 66880 - DNA, 900 bp, Acinetobacter baumannii
atgtcgaatttagcacacgaacaacaccacccacaagggcaggttgttcaatttcctaaaaaagagcgacaggctatgtctattaaaaaggatggtttcaccggcttgcctaatttcatctgtgatgaagggtatttgtcggctctaacaggcgaagccatcaaatgcttggtgtttttaaatcgccatatcagcggcttccacatggaaagtaaagccataggtgagcctttggttatgaagattacggggatcaaggataaacgcacagttcggaaatatatgtccgaacttaagaagtaccaacttattgagatcgaaaaatctaaaggccgcagcaatacttatattcttacttttgataatcgtttatccgtcgaagtagtagcatcgcatgtacccagtacatcagatgtggttacaccacatgtaaccacagtagtagcatcgcatgtacctagtagtagtgacatggcatgtcactctgtaaaagaaatagatttaaaagaaaatattaaaataaataatggtaataacccgccggcaaatttcgaaccgcaaaaccgaccgatgctgcaattcgtggaataccatcccgaagacaaaaaaatctactcgctgcgagaactcaccagaacgtatccagcacaaagcgacttcactgcgcaggcaaaagtcagcttcccaaaactcaccgatgatgaaatctggcaaaagctgtgtgacatcgcacagtggtccgtggatcagcctgcacgtaccgcacaaaaatggatgagcacctggctaaccagctgcaaaaacatcggagagaaaaaaccggctcagcctaaggcgaaagccaaacaaccggagaagaaaaaatatcaccgctatggccagggggtaatcaatccatga

SEQ ID NO: 66881 - DNA, 627 bp, Acinetobacter baumannii
atgagcaacattcaaaaatttcagtctgtgttcgatgtgacgtttccagcagaaattgcagatcaggttttaggccggatgcagctgctctacggtgaagcgttcgataaaaaatacggtgatgctgaacaccagaagcttgtattcaccacttgcaccgtgctgaacggattaagtgagcaggatctacgccgtggcttagagcgtatgaataccgaaaagtggtgtccgtcacttccagagtttcgttcctggtgtgtgcatgacggcgactggtggacagctgaacaggcttgggcaaaagcactgaatttcactgctgatgaaagcgagaagatcacgacactggctaaacgcgcactggatgaagttcagaacattctgaaaaccgaaggtcagaaagcagctcaccgggcattttcggatatttacaacgactatctggccaaagcgaaaaaagccggacgtgtgcaagtcatgtgggtaaaaccgaaagccattgcagcaccgcaagagcagaacaagacaggcactaaaccgcctgcagatttagaaaaacagattcaatcaatttaccgcaatgccggcaaattcgggaatacgcaacgtgtagggggtggggtgtga

SEQ ID NO: 66882 - DNA, 456 bp, Acinetobacter baumannii
gtgaacgagaatttacgcgaatcagtcagagccgtccagatcgggaaagacaacacttacgctcagatggaagctaaacgcaacttacgtgagcagctggacacagaactggctgaatttctggccaaaggtggagaaattaaacacatcccaacagggcaatccggggaaccgggtgcattgtttaacaaccgactgacaaaaccgaaaaacgctcagaaatctatgcgtgcagtcatgtcggcagccgtggccagtgcaaaagccagacgtgaaacaccaagcgccattgcacgccagaaagcacttgatagtggcgaaaagcgttttaacggtacgccatgcatcacttgcggtggaacacttcgctataccagcaccaacagctgttttgcctgcaacaaggcttcagcatacgccagaacgcagaaaagacgtgcggagaggtacctatga

SEQ ID NO: 66883 - DNA, 513 bp, Acinetobacter baumannii
atgaatctccgttggagtgaaaaccagctagaagcacacctgaataggcacaaaaaacgcaaggatttagccgtagcgcgatttaaaaaggaaaatgatgcaaaggtacatccgttaaataaaaacttaacacaggggattacagagcgaaatagcgaaggtgatgaaaaaataattctggattgtgaaattgccgcaattccgccgtccgtaaatcactactgggagaagtctggtcggggtttcaaattaagcaacaaggcccgggattttcacgatgttgtgagcatcctggtcccgcagctaaataccgctgcacgactcaaactggatgtgacgtttcattttccgaatcgtctgcgccgtgacatcgacaattatctgaaagccaccatcgacagcttagtgaaatgcgggctgtgcgtggatgacgagcagttcgatgagctcatcgtaagacgcggggaagtggtacgcggtggattaataaaaataaaagttctggagatttag

SEQ ID NO: 66884 - DNA, 426 bp, Acinetobacter baumannii
atggaaagtttggttgatttagtaagttcaagcgctgaccctcgcgcgcgcgcgcgttttcagaatcttcaattaaaaaagaaagttaaggcgttccgtgtgcagatgcgcggctacaaacgaccagacttcaacagaatgatcctggacttatgcaaactcggttggacacacgaaaagattgcgtttgttctgccggttgctaacgccagtaccgtgtctgaatgggcacggggtggcaaacctaattacgaaaatggagaggcatttgtgatgctatggaaaaccgaaacaggtattgagcgtgtaccgcgcgaaggcgagtggacaacgtacagctacaccatcggtcagttagatatttttgaagacggcggcctgtgtgatcaggtcattgaggaattggatcgggagttaggattatga

SEQ ID NO: 66885 - DNA, 258 bp, Acinetobacter baumannii
atgagtacaagaaagattaaatcagcactaaataagaagggcattcctttcatcaaaattgaatggattcgccctgatgcttgttgtgaaagtgaatggtttattgagttcacagaaggtacaaaacgcgaccttattgaggcatcaaaaagagatggagagggtgaattaacggctgaccattttaattatccaggtggcaatgctgatgcggtgatggaattcatagatgaattgccaagtctaaaaggtggttga

SEQ ID NO: 66886 - DNA, 144 bp, Acinetobacter baumannii
atgccacctgactacacccacatcgagaacgacggcacgccgtggaagaacgtcgaaggtgactggtttttctggcgtgacggctggggctggattcagtatgtcgggccgaagaatagtaatttttttaataagtttaggtaa

SEQ ID NO: 66887 - DNA, 318 bp, Acinetobacter baumannii
atggcaactcgcaaagtacaaaccccgggtgcaaaacccgctgatacagcaattgaaacaccggtggatgaagcaccagtggtcgaaagtgctggtgaaacacccgaagcaccacaagaccagtctactaatgaaaccagttcagtaagtgaaccagtcatcacggctgtgcaattggcgcaactggatcaggtccttgaaaaccaaaaacgcattgaaggcaagctggatcagttactgaaggccggcggcattgaagcaccgaagaaaaagcgctgggtacaaggtaagaacggctacgaacaaaaggaagtctga

SEQ ID NO: 66888 - DNA, 234 bp, Acinetobacter baumannii
atgtgcggcggattcgttggtaaagcgattggtggcgtgaccgattttctgggcctgactgacaccaaagcagcttcaaaaggctatgacgctcaagcagctgaagcacaggcgcgtaaagaagcccagacggcagagaacgcagccaaggcacagcgtaaaaagcgtgcagcttctactgttctttcatcttccgctgacacggaagaaaagaaaaacaccttagggggctga

SEQ ID NO: 66889 - DNA, 219 bp, Acinetobacter baumannii
atgtgcggtggaaaaatgcagggcttgttcactggtggcatcaatatgcttggtaaaaacctacgggattggggagccaagtccaaagaagcagctgaagccgaagtggaaaacaagcaagccaaggaagaaaacgcagcagtggcagtccgtaaacgccgtgcttctgaagttctgagcgcaacggataacggcaagaaaacaactttaggcggttaa

SEQ ID NO: 66890 - DNA, 1662 bp, Acinetobacter baumannii
atgaatgaactagcaaatcgactttgtaagcgcctgaacgagcttcgtgcagagcgtgcaaagtatgaagcacactggacagagtgctacagatacggcgcacctgaacgccagcaatgcttcgccagcggtgaagttgacctgagttcaacacgtgaaaaacaacgtgctgatttgctggattcaactgcagctgaagcggtattgaaaattgtagcaacgcttattgctggtaccacgccagcaaatgcgcaatggtttaaggctgtaccggatggcattgacgatccggcagtcctgaccgaaggcgaacattggctggagcaagtttgtcagttcatgttccgtaatattcacggcgctaacttcgattctgaaaactttgatcagatgattgattttgtggtggccggctggtcagtgatttatgaagacattgatcgtaaaaaaggtggtggctatgtgttccagacatggccgattggtgaatgctttatcgcatcgacacgccaggacaatcaggtcgatacaatttaccgcgaatacagcatgaccgcggctcagctggtcaatgagtttggaaaacacaaggttagccagcgcgtgctggatgcttacgaaaaaacgccggatatgcgttttaaaattgcgcaggcaattgaaccgcgcaaagtccagcagaccaacaccaaccaggcgcaattaccgcgaaaccttccgtttgcgtcttatcacatcgaaattgactctaaaaccgtgctgaaagaatccggttacaacgagttcccatgcgcggtaccacgtttcagaaaagttcccggcagcgtgtatggcatcggcttaatgtcgaatgctttaccagaagcgaaggcagccaatgctttgatgcgtgacaccttgcgcagtgctgaaattgatgtgctgggcttttggattgccgaagatgatggtgttctgaacccacgtaccgtgcgtattggcggcggcaagatcgttactgcaggaaaggttgattcaatgaagcgcctggattcaggcggcggcttccaggttgctgatgctttgcttggccgcctgcaagattcaatcaagcgcaagctgatggccgatggcatggattcgccgtacaaccagccaatgaccgcggctgaaacttacatgcgtttagacatgattcgccagcagatcgggccgctatatggtcgtgcgcaagctgaaatgctggtaccgctgcttgagcgctcattcggtctggcttatcgctcgggcattttgggtgaagcgccggaggatctgcaaggccgcaatatgtcattcaaatttatttcaccgctggcacgtgcgcagcagctggaagatgtgggagcgattgagcgattcatggcttcaatggcaccaatcgcagaaatgaatcccgatgcactagacaacatcgacacagacgcaattccgcaagtgttggcacagcgtctgggcgttccaacatcaatcatgcgtactgatgaaaaagttcaggcataccgccagcagaaggccgcagaacagcagcaagccgcagcacaggaacagcaggcaatgatggcccaacaagtgactggcgcagtagcgcagggcatgggcaagggaattgaagcgcaaatgatgagtgaggtggtgcaatga

SEQ ID NO: 66891 - DNA, 471 bp, Acinetobacter baumannii
atgatgggtttaatcgttggcctgattgtcattgtgctgatcatgggtgcggtgatttttcaaatcaatcaagagcggaacttcgcactggaatgtgttagcgaccttgctaaagaacttgatgaactcaaggcacaaggtagccagccagagcaagacttcaaagaactgatccaagaacaagaggacgaactcggctttggccagcacgtgaaatggcgttcaaccaaaaagccaacttcccagacctatcgcctgcatttcgatattgagcccaacggccagcgcattctggaagaactgaccgcccgatttaaacgaaacgtatttaccgatgatgaacgcgaaacgtgccgccgtattggccgtgccgaagtcgtggatttcatcatcagccgaattaatacagctaacgatcctcgttatacagagcaattagaacttgcacacatggagcaaaacgatgaatga

SEQ ID NO: 66892 - DNA, 645 bp, Acinetobacter baumannii
atgaatgaacaacaaactgcagacacacagaacgttcaaacaactgaacaaactcaaattacaacgccgattgcaggaacagaaacgcaagcggtgccaggtgctgaaacaacacagcagaatccagctgatcaaggcacgcaaacaactcaagttgatccggcaaaagcagtaccagcatctgcagatgcatattcagtcaatgttgaaggcttcgattttgatgcttttaaagcagataacaatgaagttttgaaatcgttccatgcagcaggcatgaataacagccaggtgcaggccgttgtagaagcctatgaccaatatacgcaggtcaatctggaagcactggaacaggaatggggtgcggaatacggcaacaacgtgaatatggccaagcacgccattgaagcaatgggattcaaaccggaggaactggactcaccaacggcgctcattcgatttgccgccgccgtgggtaagaatttacaggaagatttgccgccgcagaacacacagcaaatcggtactgaaacggttgaacaattaatgatgtcggaagcatacagcaatgctaatcatcctgatcacaagtcagtggcagcgcgtgtaagccagtattttcagaagaatttcccggataattaa

SEQ ID NO: 66893 - DNA, 909 bp, Acinetobacter baumannii
atgtctcaagacttcgcaacaaataatggaatgatcaccgctgcgtttaagcgtgaattccattcggcatttgaaatcaagtgtcagcaaacgcagtctgcactgcaagttttaaccaatgaccgcggccagatcggcggcgcatcatacacaatcaatgatctgggtgacatggaaatgcaggccatgggcaaccgtttcgctgatactcaatggtctgtaccggaagctggtacccgtctggtgactatggctgactacggtctgtttgtgccaattgatccgcgtgatgaacctaagctgtctgcaaacccaacctcaagctatatgcagggctgtttggctgccgagcatcgtcagcgtgaccgcgtgattattgctgcggctggtgcgtctattaaccgtaaaactacggatggcgaaacctatacaccaacaccgctgccaacttcacaagtgattgcaacatcagcaacaccaatgaacaaggccaaaattgccaaagcacgtgcattgttccgtaaaaaccactgcgacaacttgccgctgtacttcatctacaactcagaaattcttgaacagattctggtggatgaggagctgaccaagtgggaccgcgacactatccagcaaattcaggatggtgacgtggccaaaaaatggggtggtttcatctggttgccgtatgaagatttaccggacgcggcagactcaaccgaactggcaccagctggccgtaccttcgttgtggctaaaggcggtattcattatggccgtaactcaatttctaactttgatattacggtacgtggtgataaatcaaacgtgaaacaaattggtggtatcgcatcttacggtgctggtcgtgccaatgagcagaaagttgtagcaatcgacttcctgcgctaa

SEQ ID NO: 66894 - DNA, 393 bp, Acinetobacter baumannii
atgacaaaagaactaggtaatagcgtttggggtgctgagattcatactgatcataatggcgtatcagtaactcaccaattatttgtcgatccagaaaaagaaggtgatgaaccaaccaatcttccagctggtcatttttatgatgtgattactggtgatacgattactccaattcattttcaaaatggcccagtaaaagaaaatggtgtaaatggtgtaaccaatgaagctttgctggccattgttattcaccgtacaaagatcctaaatgataaattcccatgcgatgaaaacaaacgtgccatttcctatatggaaaacgctttggcattgtttgagcagcgcacaaaagatcgtcaagcgcgtggcgttgaaggcttaaacaaagtctaa

SEQ ID NO: 66895 - DNA, 564 bp, Acinetobacter baumannii
atgtctattactacaagaacatccatttgtaatttcgcactgagcatgattggtgacgcgaatatcacgtcattcgatgagaatacggcgcgtgctgagcgctgccgcagtctgtatgaccaggtgcgcaaatccattttgcgtgaccatccgtggtcctcagccaaaaagcgcgtgatcttgtcgccagttacgacacatccggtctttggctactctcatgctttcccattgccgcgtgattttatccgcatcatcagcaccaaccaggaatgctacgagattgaaaaccgccacattttggccaattccgagcaaatcaatcttgagtacatctttgacaatgacaacgaagaaacctgggattcaatgctggttgaagcaatgggactcaagatggcatcaaagctatgcaagccgaacacgggtagcgatgcagcagggcaatcagcagcagctgagtatgaacgcctgatcacacgtgcccgggcaattaatgcgcaggaacgtccaagccaggacatcatttatgctgaatcacgttacatcgggagccgctactaa

SEQ ID NO: 66896 - DNA, 2037 bp, Acinetobacter baumannii
atgaaacaatgggtgcttaaaaacaacctttccagcggtgaattgtcgccgttgctctatacccgcaccgatattcagcagtatgccaacggtgccaagcagcttttgaatgctatcccattggtggaaggtggcgcaaagaaacgtccgggtactcgctttcgtggccagttcatgggggcattgcgcctgattccattcattcccaattctgaaaacacctacatgctgattctcggtgttggcacgctgaaggtctacgatccgcggacacatgaggtcgtatttgaatctgcaacgccgtatgacacggcgcaaaaggtgcgtgaagtacagtttgcgcatacccggtaccgcatgtatttcgtgcaaggtgacacgccggtacaccggtttatttgtagcgctgacttcaccaactggcaatttgctgaatttactttcgcgacacagccaacggatgaattgggtaccagtcccaacgtggcattaacgccaaccggtacggaagtgggcaaaaccattgcattgaatgcatcagcctttccgaactggtccaatactgaaacttatctgctaggtgagcgtgttattcatgctggccagacatggcgcgcattggctgacaataccggatcagaaccaagcggggcaagcacggattgggaaacagtaacggcaggagatgctagcgtattcacatctgagcatgtcggggcgattgtttcgatcaacggcggtcaggtcaaaatcacatccattgtttccgctacgagcgtaaagggcgaagtactggtcaaactgaatgccaatgtccaggcgattgccaagtcatggaccttgaattcacgcgcctttactgcagcaaccggctacccgcgcacggtggttttctttaaacagcgcctggtctttgctaacacaaaaaccagtccaaaccagatgtggtttagcgccattggcaatgatggtgactttctggaagccacggaagattcagacgcattcagtattgcgtcatcttctgcgcagtctgacaacattctgcatctggcccagcgcggcggtgtagtggcgctgaccggtggatcagagtttttaatcaactcaactggcccattgaccccggcatctgcgcagatcgaccagcacacgtcctatggtgttcagaaagatgtgcggccgtgcatggtcgggaatgaaatgctgttcgtgcagcgtggtggtgagcgcctgcgggctttgtcgtatcgttatgaggtagacggtctgacttcaccagagctttcagctattgcgccgcatatcccgcaagatcatcagggcgtgaaagaaatcacctaccagcaaacaccaaatagcctggtctggatggtgttgggtgacggcaaggtgggcagcatcaccttaaaccgtgatcaggaaatgaatgcctgggcgcttcatgattttggtgcatctgtgctgtcgatgtgttctttgccaaccggtaccggtgcagaccagtgtttcatgctgacggatcgcaacggcggcctgtttctggaagaactgaacgaatcggctttaagtgactgcgagtttgaagcaacacaggaaaccacaattggcggagcgtatttaaaactggtcaatccgctgtacagctggtccaacgtggatggctatttctattcagaaactaaaccggatggcgtgccagcattctactacggccagccatttgaggtgtccattgacctattgccgcctgatttcagcagcgtgccgaatactgccatgtttcacaagattcaggtgcatgaaattgacctgtggctgaataaaaccattggcggttatgccgggaaatatgagctgcagcacaagcgtaacgaccagtctgcattccagaatttaccatttagcggctatgtgtcggtgtcatttaacggctggtctgcgctgcacgaaatggatttaaaaataacacacaacaaaccgctgccgttccacgtccagagtgtagccatgttggtttcaatgaatgagaaataa

SEQ ID NO: 66897 - DNA, 453 bp, Acinetobacter baumannii
atgtttgtacgagctgcagagttacgcgatgtaccgattctggtggacttcggcaagaagctgacacaggaatcagagcgttttcagcgtcagggctttagcgagtcgaacgctgagcaagtgtttacccggctgatcgagcagaaaggctcaatctttgtggcactgaatgatgagtttgaagtggtgggaaccatcatcggtgcaatggatgttgactggcgtaccggccagacccttgcctatgaacagggcgtgtacgtgctaccggaataccgtaaaaccggtgcagcgcgttcactgatcaaaggttttgaaacctgggcaaagctgcataaagcagaccggattagcctgggcaccatcaccggcatcaaggcagaacgtactgtaagcctgtatgaatcactgggctttgagctggtcggctatgtactggaaaaggagctgtaa

SEQ ID NO: 66898 - DNA, 396 bp, Acinetobacter baumannii
atgtgtggtggcggcggaatcggcgatatttttagcggcgttcagaatctggcaaacgcacagatggcagacgctacatccaaaggtaatgcaagaacggcgcgttctgttgcacgtgctgaagcagaaaaaatcaagcgtgcaggcaaggcgggtgcatcatcggcacgtgcagcagcggctgaaaatggactggatgttgatgttggatcagcagccatgatccaggatgaacacctgggcgatgctgcgtttaatgcggctatgaccgttcaagatgctgattatcaagctaaacagattcggttacagggcaagatgcagcgtaatagctatggaatgaatgcggccagtgatcttattactggtggcgctaagattatggggtggaaataa

SEQ ID NO: 66899 - DNA, 2055 bp, Acinetobacter baumannii
atgttaatcccacgttcacaagggcgtgtgacttcgcgcccaaccatgcagcaacacacaccaatgaccggcctttcaagtatcggcaatgccattggtggagcgtttgaagcgcgtgatcaggagcagcgtgaagctgaagtatcagctaagcgtttagagctgtataacaacgagattgccaaacaggaagccaaagtcaaactggatgacattctgaccacggaaatgaatgaacaggccacactggttaaaaatagcgtgtccaatggcgcgtatgatgccaagactggtcaggaagcattgggtaaatggtcggaagaacgcttcaaacaaattgaaaatgaactaccggaatttgcccggcaggactttaaaaactactggcaggacaatttaaaccggcaatcggcagggctgttgccgctacagcttcgggcagatgcccagaaaggcgttgtgctggcagaccgttacggtgaaattgcttcacgctatgagcgcaaacagggccgtgaatatctggaatctaatttaactgcactgaatttatccgaagcagataaacaggcacgtttatataactatgaatctgcacgtgatttgcaggacattgacgagcgtattgctacggcagtgtctaaccgtgataccgaagcattgtcaggactgatcactgagatggataacggaggttttggttataccgatgccaaagttctgcaacagaagaaagcgcaggtacaaagtcgcattgaagcgattaataaataccacgaagttgaaaaaaataatcgtgagcaattgtcggggaagctactgaatggttatgtagaccaagtgatgacaggtcgtgctttagatagtgattatacaaatgatattgaaacgtctcttaaagggacttcacaggaagttgaattcaatttctataaatcacaatccattagattccagcgctttgcaaacttatctactcctgagcaactcaaggtgattaatgagcaaaaggcattgatggcaaatagcaaaacatccaacgctgtgcttgaggaaaaaattcttggtgtatacgaagaaatctataatagaaaaaagcagactatttcagacaatccaaatcaggcggtacgtgaagcagggcatgaaacacatcagctcacaggcatggagctaaagactaatcctggctcatttgctgacaaagcgattgaaaacgccgtcagtcaattttccttgaaagatcctaatttagctattaaaccgattgcatctgaagatctggcagaggtgaagcagtcttttgaaagtctaagcgtggatcagaaactcagcactattggcgcattcatcactaaatcaaaaggtgtgccgaacggggaaaagatttggaaggccactttaactcagattggtggcgcagataaaacttatcttttggccggaattgctaaggctaagaataaaaagatcaataacgatgatctggctagcaccttaataaatggaaagtatcttgttgataaaggcggttttgtccttccatctgatcttgaaacaacattccgggcacgttatggcaacttaagcaactacggcgcatttgctgatgatctgcttcagtttaaatatgcctatgcagttgtcgctaacagggatggaattcagcatagtaagaaagatgacatttctgatgctaccgcaatgaacaaggcatttgaacttgcgactggtggcgtgtatgtgcaagagcctgactcatggtttggttcattcaaaaccagcggcggtggatcatttaaaagctggaaggtaccaaaaccttacggtatgccagatgatcgatttgaagcacatcttgaaaaaggttatgcagggctttctaaaatgtctggctataccgttacagaacttaaagatttacgtctagcgccacgtattgaccgaaatacaaatacagtaatgtacaacctattgaatgagcgcggcctacctttgcgcagcaaggatgggaagaagactcaattcattatttttgacggggttacacgatga

SEQ ID NO: 66900 - DNA, 2817 bp, Acinetobacter baumannii
atgagcatttgggatgttgaacttgatgatcaacgcacagcctctgagaaagattcattccagaaaactggtttagtccaagctgagaaaaaaaaggaagttggtctgtttgatggtgtacctagtgctatcccacgtggtgctttagcaggtgcggtaaaggttgttgatactgctgctaagccatttgagcgagttaaagaccatttggaatacagtattaaagatactttgaatggtgggcttgaaggctccttagatgtacgtgaagcatcattcacagaggtgcatgaggccaaaaacaaggatcgccgcagtcaattagttatggagattgagcagctacgagatgctgagaactccggcgccgttggtaatttcttgtttagtgcatctgatatgttgacccgtgctgttggtggtggccttgttgctggtccggtgggtgcagcggttgtgactggtgcatccgagggtgtttacagttatgaggagctggtgcacaagggtgtcgactctgaaacagcaatgaaggtggctggtgtggatgctgccgttgctggtgtgtctacagctattccagcgtcttttggttggaaaggatatagtgggcttattcgggatggcatcgtatccacaggtttggcttcaggcgtatctattggtggacaggcagcatcgggtgcaattcttgagtcagaaggttatgacaagcaggcaaaaaagtacgaaatcacaggcgaaagtgtggcgactgatgtgctaattaatatggctttctttggtgctgcgcgtggtgcctcgcgttttctcaatgtgtcagatgccaccccagaacatttagaaacattaaacgacttacgacgggcaaccttattgcttaatgaaatggagtttgaagaaacactggcaccagtgaagccagccgatccgatccaatacaacaaccatttaaaaaacttggattcttcagttgaagcaatccgcatgggccggccggtgaacgtggtgcatccggtgaaaggtgaggaaaagcagaagccggtacgtattgcaccaagtgaatacagtaagattcgttatgatgatccgcgcctggattccatgttgcattcaaaagccaaagaaatggatatggagtgggcaatccctctactgctttcaattcgtcgtgctggtgagaagtcacataactggcaagtatcaccagtgggtgctcagtcgattatgcaaatcatgcctgaaacaaaagctgggcttgagcgtaattataaaaagaaatgggatattaataatcctgagcatgccactgaaatggctttatatcttgttcgtgagatgtcacaacagtataaaaccaaagaccctctggtgttggccgctcactacaatggtggttttgcaaatggtaaagccatgcagaaaaatggtaaacctaaagcacaggaaaccattaattatgtcaatcgtgtaaaggatttcatcaatactggtaaatataaaaattacactggtaataatattaccaccgcttttggcatggatgggtccagctatgaagtggcgtatgaggtcaaatcactgggtgatctgattgcatcaaatgatctggcctatggtgtgaatccactatacccggcagagctgcaaccgcgtgaccggacacgtgaagcatcgcgcatgcagatcgagcgaatggccgatgacttgcgccctgaattactaggcgagtcggccaagctgtccgatggtgcgccgattgtgggcgtggataacgtggtggaatccggcaatggacgcacactggccatcggtaaggcatacgaaagcggccgggcagatgcttatcagcagtttgtagcagactttgctgcatcacgcggcatggatatttctggcattgatcgaccggtgttggtgcgtacgcgcctgactgataccgaccgtacgcagtttgcaaagctggccaatgaatcggacgtggcgcagtactccgcaactgaacgcgctgtatctgactctgatcgcttaccagatgcatcacttctgaagatcaataatgacggtacgatcaaccttgatggatccatggactttgtacgcggttttgtggggtcattgccaaagtcagaacagggcacagtgattaccggtgacggacgattaagccaggaaggaaagcgccgtattgaatctgccatcatgcagcgcacctatgatgatgcaagcctgattgcacgtatggctgaaaatctggatgatgatagcaaaaccgtattaagcgccttgttgcatgcagcgccgcagctggcacagctggatgcattggtcaaacagggtggacggaatcaaaacaccatcgccaaagacttggcacaggcagcgcaaaagctgagtgatttaaaagccaatggccagaatgtgcaggattatttgaatcagaatcagcttattgatgatggactttcacctggtgcgcgtgactttctgaatgtttttgaccagaacaaacgcagtgccaaagccattggtgagaacattcaaggcaagattgacgagattgaagccatgggtgatccgcgtcagggttcattgtttggtgattcacccgatgagcaagaggcgcttaagttagcatttgaaaatccagatcaaccaatatcggtaagtcgtgaaggcgctaatggagagcctgaagtaattacgatgactttgaaggattacattgatgaattaaacaatgatgcaaaagcagcacaagaacaaggcgtagccgctgaagctgctgcacgttgtttcttgagtcacggggcttaa

SEQ ID NO: 66901 - DNA, 2535 bp, Acinetobacter baumannii
atgaaaccacaatgcatacaggctgtggaaacagcaattggacgtaaattaaaagcaaatgaatcagctgatattgatgcaaatattaaaaaagcgatggttgatctggctcgtcaggatatagatcgctggcgtaatctcagcgaatatgaaaagaccttagaagccagtcagcatgtaggaaagatgttggaagccgaagttaaacgtaaaaataaaatcgctgctatggatattattacgctaaacaaagctatggataaggtattaaatcataaaaagctatcttcaatggaatcgctggatcgaatgattgcctttcacggggatatgtcaggtattcagtctgtaagtaaaaatgccgaaagtattgcgtccttacatcaagggcggttacatgatttattttccaaggtggatggctcgttaggcttaattcaagacaaaaaatatgtcagagattttgtgaaagaagcattcggcgaggactcgggaaatccatctgcaaaaaagaatgctgctgactttgctgatgtcgcggcagacttaaaagatcgctttaatcgtaatggtggaaatatccgtactcttgaaggttgggggttatggacttcatggagtccaggaaaagcattagaaaaaggtttggataagtggctcgagctaggtttaaaaaacattgatcgaaataaggcggttcatgaggatggccgagcatttactgaggatgaattgatagatttattaaccgcctcctacaagaccattaaaagcgatggtgcgaataaaatggaagtgggtaaagccaactattctggaaattcaaaagtcaccagtcgacacgctgaaagtcgtgtgttgcactggaaggatgcggatgcgtggatggaaatgcagagtgaatttggtgatatgccattgattgacatcattgatagtaatattaatcgcatggcaaaagaaattgcattagttgaaatgtttggtagcaatccccgtgaaaattataaaatcttaaaagatgctgctgctaaaaaagataaggatgaaagagatatcccgagcaataaagtagaagaaacagcaagccgtatagatgacatgtttgatgattttacgggcagcaatatcggcagtgaattttgggcgaatgttgggctggcatatagatcagtaaatacaggtgcaatgctaggtggaactatactttcatccgctaccgaccaagccatgattgctaaaacagcgcacgtacatggcttgtcatactggaaaatttttggagaaatgattagccaactaaaccctaaaaacaaggaagatagagagtttggatattatttgggcatcggggtgtcagaacttactggctctatttctcgctggacggatgatggtttaagtagtgtgcatggtcgtgctgcaaagattgcaaacggtgcaaataatatcgcgaatcaagtgttacgtttatcaggacttcaagcactgacccgggccagcaaagtggcgtttgatacaatgctgatggctaaatatggagacatgacacgcaataaatcatggaacgacctgcatccgaatgacaaggagttacttgaaggtacaggcttgaatgagcgtgcatggcaggtgatgcaattggctgagcctcatgtagaccgcaagggccgcaagcttatgtctgcgcgtgcaatttatgcgattcctgatgagaaattaaaagcgcttggtgatccacagcgtatccgtgatgaagtagctacacagttccagacccatttgcttgatgaacagggtatggctgttatcgaggcgggcttgcgagagaaaacaaaatttacaggtggtactaagcgcggaactttaggaggggagtttttacgtttaaccactcaatttaaatcattcccaatggccttcctgatgcgtcatggcagtcgtgcgtggtctaaggatggatggaaagggaaagcgggatatgcactccctctagttgctatgacaaccgtgctaggtggactggtggtgcagttaaaagaactggctaatggtaacgacccatcagaaatgtgggatggtgagaagtggtacacagccggtattgatacagactttttaaagcgctcatttgttgctggtggtggcctgccaattctaggagatattttaattgccggtactgacactagtggtcgtgatgcaggtgattttttaagtggtccatttggatctgactttaaagctatattgaatttaacagtgggtaatcctacacaggcattaaatggcgtggaaactaattgggagagtgaggcttttcgatttgctaaaagtaaaatacccgggcaaaacctctggtatacaaaggctgctactaatcgcatgatttttgacgaaatgcaggatattattgcacctggttatcgtgaaaaattattaagaaaagctgagcgcgagcatgatcggacgcgctggttaggtgatgactggggagatatacaaatgccagattttgagaaggtgatagattga

SEQ ID NO: 66902 - DNA, 315 bp, Acinetobacter baumannii
atgaaggttttaagtggggttatttttgtactacttattgttttagtggtcagtattgggctttcttatagcagaatacttgagctggaggactctatagattcgttacattcacaaatgtattcactgcaaaatgatagtccagcagttattgatacatcatccaaaatagaagaattagaatctagtatttctgatttggaatatgaattagggcgagttaagacaattgctagtgaagctgaggaaaaaagcaaagaagcagaaaataagctctattcactttgcatgattcacaatatttgtgacttatga

SEQ ID NO: 66903 - DNA, 333 bp, Acinetobacter baumannii
atggaacaacccgacaatataataatgttttcagatctctctgaggttgctgctaggtcaaagcttagagagttagcaaaagattcaagtaaggtgttttacactgagcatgctcgtaaacgcatgaagcagagaaaaattacaccttcccaaatactttgctgtatggagcatggtcagtttgaagaaggtccttatagagaaactaatggatcttggaaaatgaaattatctgttatttcagcaggtgatgtcattagtgtagtcgtagtactggactatgatgatataaccaaggatcacagtgttgtgatcacggtaattagaggttaa

SEQ ID NO: 66904 - DNA, 450 bp, Acinetobacter baumannii
atgtaccattacaccgaaagcggtttacgcgatgtttggttagtaaatggttacatcgcaaaagatactccctatggaaaggttgtttcttttgaagatgtggaaggcttacatcgtgtgattggaattaacttagtaactcataagcctcgtctatcaggtgctgaggttcgttttttacgcaaagaaatgaatctttctcaaaatggtttagctgaaattttaggtgtttctgaatcaagtgttcgagcttgggaaactcaccgctctaaaatccctaaacctagtgaccgccttttgcgagttatgtataagggtagtgttgagaaaggtagtgatattagaaacatgcttgacaagattgcgcatcttgatcggcaaatgggcgaaaagaaagctagtttttcccatcagaaacaaggcggatggtctgaacaggctattgcataa

SEQ ID NO: 66905 - DNA, 348 bp, Acinetobacter baumannii
atgacagagaagaaaaagacaggccatttaaagccagaaactaaagagaagttacagctctctttggagatggcttcatctgatgctgttgacctgattacagaggcctacggtcaggacttgttcacgaagcagggccgtggtgacaaggtgtggctgtacaaaggggcaaaagaagccttgtcctgtatggagaaaattaagcgaatcctgaatgatgatgagttgacggctggtaacacagatgaacgctcaatcacaccagaacagcaggcggcgaagttactggaaagtgtcgccaaaaagctagaggaacgcagagggcaacgaccagaacgcccgagctaa

SEQ ID NO: 66906 - DNA, 1653 bp, Acinetobacter baumannii
atggttaaagtagattttgctacgttctacctggtctatgccgaagtgctgaactgggtagtccctgattttcatttagaagtctgtgattttttacaggactacggcacgcttggccttttaatgatgccgcgtggacatggtaaatctacaattctggatgtgtataacgcatggaagctatacatcaatcctgatcacctgattctgcatcagggggcaactgatccagatgcctataaagtcagtcgtggtactgaacaggtcatggatcgccatccgctgtgtcagctttttggtgttaaaaaagcacgtggtgaaacgcaaaaatggtgggtgtctggctcaactgatgtgcgtcatggttccatccatgcgcgcggtattttatctaacgtcactggtgcgcgtgccaatgaaattcagaatgatgacgtggaagtgccgagcaacattggtacacctgaagcgcgcgaaaagctgctgtatcgactgtctgaacaaacacacatcttgattcctggcgggcagaaactctttgtaggtacgccgcatacgcatgactcgctatatacgcgaattaaaaagctcggtgcaaaatgcttgattctcaaaatgtttgagaaggaaaagcgctttgagcagattattgaatgtctggtggactataagccggtttatgtttttagcggcatcggtactacatcaaaattattaaaagaaggtgaagattaccaggttgtttataccgggcatttctacaaaatcacctttgatgaatctcattacctaattgacgtttacagtgaagccttgtggccagagcgatttacgccagccattatggaagaacgccgccgtgaatgccgaacaattaacgaatgggattcacagtatcagctgcacgctaaacctgtcggtgatgtgcgtcttgatccagacaagatgattccatacgactgtgagccggtattgatgcgcgctaatggtgaatacttcatgatgctgggcgagcgccgtgtcgtgggtattactgcacgctgggacccatcatctggaaaaatcaaatcggatatttcggctgttgcagtcacactgcatgatgacttgggcaacaaatactggcaccggtcagtggccctaaaaggcgaggtggtcactcataatgagaatggcgagatcattggcggccaagcctggcagctatgtgacttgatcgaaacttatcatattccgcgcgtcgtgattgaaaccaacggcattggcggctttgcagctgcggcgcttaaaggcgcattaaaggcacgcaggctgcgctgtggtgtggttgagcaccactctaccggtgccaaaaataagcggattctggaagcgattgaagggccgttggtatcaggtctggtttgggtgcatgtgtctgtaattgatacaccagaagaaggggaaaacagctcagtacaatataaacaaatgcgaatgttcaacccggccattaccgatcaggaagatgactatttagattcattcgcaggcacactcaccgattcacctgaacgcgtcggaaaaatacacagaacaaacgaagtgaatgaaggccctaattggagaggaaacagtggcgttgttgaagccactttagactttgaaaattag

SEQ ID NO: 66907 - DNA, 2247 bp, Acinetobacter baumannii
atggcagtacaagagcaaacgccgctgcgagaatacacagcaaatggggtaactacctcgtttgcattgggttttgactgtgaagaaaccaatcacttaattgtctcgattgatgatgtagaagtgctgccgactgactggtatttgtctggaagcaatgtgattttctggaatgcgccaagtaatggaaagcttattaaattgcagcgtaatacgccgttcaatcgtcttgccgattaccaatcatataacaattcattccgaccgcctgcaatcaataaagaatttgaccgcatctggtggaagcttcaggaattgggtgttgcagactggattttaagtaatcgtattgatgcattaaaaaactatgtagatgatcgtgatgatgagcttagagcctatcttatggaggagatccgaaagcaaggtgtagctttagatcagctggatgaatattacaattatcttatgcaacggctggcacagattgcggttgataaggggtgggatgcttcatttgttgtggatggggataaaaatcagcatcagattaatgaagaacaaaaacagattaataatggtctgctactgccggttaagacacgtctcgcttcaagcattaatcgtgtcctttatgatcatgttatcgatcaggtgaacgtcaaggactacggcgcaatcggtgatggcacgttgcacacagcccaagagtggattgattcaggtaagttcagcagcttggccgacattcaaactgaatacccgcatgtgactgcattgactgactctgtagactgggcggctatgcagctatgcattaacatgcgtaaaaacatctatgcaccaagcggtacttatgtttttaataaatctgtcgatacaccacatagcggtagtccgaaccgagttgatagttctgcgtacatctttggtgatggctgtaaaacagtctttactcgaaatgcaatcgcagaacctgcaacacgtattctaaagccggatggatcgctggatattgatgctacggatgacattaacaatgctgaggctgtgtttgctatccacggatcttattacaagctcacagacttcatgatccagcatggtcgtgtaggtttctattttgggcaggatttgagaagcctggctgagaaatcggcgtgctacaaaaacatcgttcgcgatgtacaggtccgtcgctgcggcactggcatgatctttagttctgcctatggcaaccactacaacgatatctcaaacattcactttatcgaaaaccagatcgattgtgaaatgcgtaacggtaagcatgatgtcgtaaccattgcgaacaacaaccgaaactatttcacaaacatccgttcaaatcgctcgattgttggtctatggtgtacgtctggtgatacgaaccggattacatgctgggatggcgaggggtgtggcgcaaaaccgacaaacaacccttaccctatgcctgtcggtttgccgaagctggccgatggcgttacgcagatcacaaacggcgttcatatctttgatggtaatggtcagctgaataaggtcctgaactgtcagatggaggcttgtgatgttgagctatataacaaccactatcgcaatagctttgtgaataatggttatcatgaggctgttgcaaacggcacccaggtttacaacctgcaagagcctggtttgtttatctctcacaacactttctttacgccggtattttgtcacctgtcgaacctaaatactaacgccttccctggtgtaactgagctaggtttctacattcgaggaaattcgttcaagaacaatacagggatcgaaaagctaaaagcgactccaacctccaaaaactactcagaacgccgtgtttttgatttgggtgctgcggcagctggctcaaccaagacagtcacgatctggcgtgatgtagacccatcttcgagcgcgaacatcaaggttaaggtcagcgcactttctgcggcgagcaacctgtctttcgccaatgaaatggcggttactgcatacagaacaagtacaagatcgctaacacgctattttatgcaagagctgtataagctgagagcaaccggtcaaggcgcaggtgattccacaggcgttatcgttccaacgattgcaaacggcggaacgtctacacgtgagttaattcttacgttaaccgtgccgaatgcagtggacagtgtttttgttgaagtagaaatcgctgtaagcgcagtctaa

SEQ ID NO: 66908 - DNA, 783 bp, Acinetobacter baumannii
gtgagggattcaatctctgataatatttattactctactgttaaaattgaatgcaaaaattctgttggagaaacatcaggaacggcttttcttatgagtgtctcttttggggattatggtaaagtttttctagtaaccaataggcatgtagttgaaaatacttatgatgccacaattaaatttcatcgtgctgataacttacaaatgactaatttaattggagaatataagttatctttcaaaaaacatcttttatggcaaaaatcttggatatttcatccagacgaaaccattgatttagcaatatttgattttactagttatttagagcaattatataaagagaatattttcctttattataaattaattgatataaatagtattccttctaacgaggaggtcgataatatcatagcactagagcaagtcacctttgtcggttatccagctgggcttaaagatacaaatagcaatctacctatagctcgaaaaggatacttagctacaccattacatgaaaatttctgtggaaaacctgattttctgattgacgcgggtgtatttccaggatccagcgggagtcccgtatttatttataatgatggtacatcgtttaaactggctaatggcaattcttttatgagtggttttagtagattctggttaataggggttatttacgctactcacctcactgcaaataaccaatatctaaatctaggtgcagtagttaaatctgaaaaaattaaagaactaattaattattatttaaatgtataa

SEQ ID NO: 66909 - DNA, 255 bp, Acinetobacter baumannii
gtgtccgaacaaaagacacaggctgttgctgaagttgcagctgctgtttcatcggtggccagcaaaacaacttatgtgggtgcgggtacaggtttttttgcatggctcttatcaattgatgtattgccgctgctggggttcttgctggcactagcgggtttcatagtgaatttggttttcaagtatctggaaaacaaacgcgcgcaagagttacacgatctgaaaaagaaggagtatatgaatgaagttcattaa

SEQ ID NO: 66910 - DNA, 756 bp, Acinetobacter baumannii
atgaagttcattaacgattcaccgctcaagtacctggcatttattctgccgacactgggcgcattcatcatgctggtactgattcctggtctgcaatgggccatggattacaaagtcatcccggttgaatatcacgcttatatcaccggtactgtgatggttattttgtcgtggatcggcaagaagatttatcagccggcactgcacaccagtcctctaggctttgttactgtgactgccggacacagcaataaggacccgggagcggtacgcggcaaagataaagaagcggattttgtggtgaaagtccggaatgcagtagagctttatctcttgcgtgcaggcttgacggtcaaaacagatggcaagggcagcattaatttaccgctgaccaatgctattcaaatcatccgtggttcaagtacggcaattgaatttcatttgaatacgtcagtaaatccgcaggccaatggtgtcgaaacgatttcattaccaaaggacaaggcactggcgcagaaaatttcaaaagccattgctggtgtaaccggtagccggctgcgcggcaataatggttggattgatcagagtcaatcggcgcgcggaaagctcggctttgtaagcaatggtggtctggttgttgagctgggctttatttcgaatgattctgagtttgcaatcctgcaggcgaaatattggctggttgctaaagcgattgctgatgtcatcattgaacatgaaaaggggcttaaatcatga

SEQ ID NO: 66911 - DNA, 261 bp, Acinetobacter baumannii
atgagttcaattacaattactggcgcactgcagaacgtggttgatgctgtagatgttggccgtgaaatctaccagaccacggtcaacgctatggatgctgcagaaaaagagcgtgattcgggtgctgacaagaaagcctgggtgctggcgttcgtgaaatcatttatcacggatctcggccagaactgggagcgctgggcaaagatcatcattacctttattgatttcgctaaatcacttttcaatagcaagcgctattaa

SEQ ID NO: 66912 - DNA, 486 bp, Acinetobacter baumannii; identical to SEQ ID NO: 52858

SEQ ID NO: 66913 - DNA, 1332 bp, Acinetobacter baumannii
atgaaaaatatgtttaagcagtacaattatttttatacacctgagcaatataaagagatttgggaaaatgcattatttgtttttgatacaaacactttattaaacttatatcgttatcaagaagacacaaaaaatgaatttttacaggttcttgataagatatcaaatagaatatggatacctcaccatgttgctttagaatttcaaagaaataggttagaagttatttgtgagcaaaaaacattattttcaaaaaccaaaaatgctttgaattctacctcaaaaaatttaaattctgaattagaaaaattacagttaagaaaaagacattctctaataaaaatagatgaatttgttgaaaaaattgatactttaattaaagattttaacaatagtttagatgatttaaaggcgaatcaacaacatttgtctcatcaagatagtttaaaagaaaaattagaattattatttgaaaataaggtaggtaatccacctcaggatcaaaaagagttagatgaattatataaaattgcagagagtagatataaaaataaaataccacctgggtatttggatgaaagtaaagttgatatatgtgttgattcaaatttaacttataaaaaaaagtttggtgattatattgtttggcatcaaatattagaatacacaaaacaaaatcctaatattaaagatgttgtttttattacaaatgatttaaaagaagattggtggaaaaaatatgatgcgtctggagaaaaatttaatcaaccacgaccagaactaattgatgaagcattaaatgtaggagagataataaattttgtgatgtatgattctgaaaaatttcttagctacgcttcaaattatttagatgttaaagtatctgataatgctgttaaagaagttagagatacaactgagatttataatcaaaatataataaaattaaattcttacgtagcaaaagataatagagcagattcttatgatagtttaaggaaagctattgcttttgcaaaagtcagaaaatttaaaaatagaataaattacgaaatttataaaaatggtggaattgctgaatttcctacaaacgttctgacatgcccagattgtaatcttgaaacaatgatttttgaggattcaagttctacaggttatagatgtacttactgtaaaaatgaagaatctgatgaaatagaggttcaatgttctatgtgcggtagcatgtggcccaattcagaaattgtaagtgttgattggacagatgaaggccatgttgaagatttgtgcccccgttgcagacgagatcctgattatgttggggatgattaa

SEQ ID NO: 66914 - DNA, 228 bp, Acinetobacter baumannii
atgcataccgaagaattatttcaactgttttttaaactattagatcctgacatgcatccaccaaaactttatcaacgtggagatttggaaatattttggcgtgagcgtttttcagaagcattaggttttcaagaaccaaatggtgcaatgatgagttatgtagagttgccaaaaatatttttgaagacttatagagctgttcaggaaaaaatggagtcctctaaataa

SEQ ID NO: 66915 - DNA, 507 bp, Acinetobacter baumannii
atgaatattgctttggcaattaaaaattggaaattcatcgtgatggttgcattggctatctctttggctttttcaatcatcagctgcacaggtaagtcacatcaaattgatttactcaaatcacaaaaaactttagccgaaacccaacgtgatttgcttgcatcgcaacgtgcaaatgaagtgcatgaagtagagcaggcatggtcgcaagaacttttggagtcagaacgaaatgcaaataaaaacttacaagttgcgctggctgctgccagtgacagtgctttggctgttgaccggttgtcaaagcagatcagtgataccgacaaacgtctgtcctcaggttccaatcaagccctcattgaatacgccaagacctgcaattccgtactcgaaacaatggcagaccgtggtggagcaatcgcaaagtcagctgatgcacacgcaattgatgcagaacgactagatcaggcatggccacagcaagtaaagccagataaacagagctga

SEQ ID NO: 66916 - DNA, 828 bp, Acinetobacter baumannii
atgaagaaatccaaatttttccgtgttgctgttgctggatccacgactgatggtcgcgtgatcgaagcaacatggattcaacaaatggctgacagctacgatccaaatacatacacagccctaggcaatcttgaacattaccgtggtttttcacctagttctgaatttggcacgtatgcgaaagtgacagctttaaaagctgaagaagtcgaaatcaacggcaccaaaaaacttgcattatttgctcaagttgatgcctttgatcaattgcttgcattacacaatgcaggtcaaaaattatttacgtccattgaagtcaatccaaattttgctgataccggtaaagcatatttagtcggtcttgcattcactgatacccctgcttcattaggtacgcaaatcatggaatttgctgctaaacagcctgaagcaaacccatttgttggtcgtaaacaagatgcagccaatttatttaccgctgcagaagaagcatcaatcgaatttgaggacggccaagaagccccagcaaagggtctgttttctaaagttttggattggttgaagccacaacaagaagaacaagacaataaaaataaagaccaattcaaagaagtatctgactcacttgaagcgattgccaaaacgtttggtgaaagtcagaccaagttgcaaaaggtcgaaactgagttttcggaacttaaaactaagcattctaaattggaaaaagacttcactgatcttaaagccaaattagaaggtgaagaaaatccaggtacaccacctgcccctgaaaacactggcaacttctctgaacaaatcgagtgctaa

SEQ ID NO: 66917 - DNA, 765 bp, Acinetobacter baumannii; identical to SEQ ID NO: 6031

SEQ ID NO: 66918 - DNA, 177 bp, Acinetobacter baumannii
atgaataaacatttattagcaaaaatcactcttttaggtgctgcacaactatttacgtttcatgcggcatttgcagatatacctctgacacctgctcaattcgcaaaagcgaaaacagaaaattttgataaaaaagtgattctgtccaacttaaataaaccacatgctttgttatga

SEQ ID NO: 66919 - DNA, 363 bp, Acinetobacter baumannii
gtgcaaaaggaaacacctaagacattagcggacatatatcctgaagaagccgtgttcttatcagccatcaaaaaatttataaaaccttttaaagaacagtataaaaaattggctgataagaacagggaaattaaggagcacaatacagttgctcataaaatttatataaaaattaaaaataaggaagcaactctgcaaaagccaacagagtcaaagcctaaagaatctagtccaaagactactgaaaatagtgctgtcccagtagagatgaagcagggaaccattcagaaaaatatggctccacaagaaaagccaattactgtaattaagaagcgaaaatttgctttaaacaaggataagtaa

SEQ ID NO: 66920 - DNA, 279 bp, Acinetobacter baumannii
gtgattgtagattttaatcataaaggactggaacgattttttaaaaccagttctacagcaggtattcagtctgttcattcaaccaagttaaaaagacaattaactgctttgaatgaagcgcaaagcattgatgaaatgaattttcctggatggaaacttcatcctttgaaaggtaaattaaaagatcattggtcaatcactgtgagtgccaattggcgtctgacttttatttttaaagatggtaatgcgtatatcgtggactatcaggactaccattga

SEQ ID NO: 66921 - DNA, 300 bp, Acinetobacter baumannii
atgatgatgaataatccagctcatgcaggtgagttagtgtcagaatggttagatggcttaaaagaagaaggacaagcgatcaccattacagaacttgctgaacgtattcaagtgacacgtcctttactttctcgaattattaacggtaaagcgccagtgaccgcagatgtagctttacgcttgcatgatgctttgggaatcagtgcagacctgttaatgcgtgttcaatctaagtattcactttggatggaatcacaaaaacagcgtccacagattcaaccattttttgctaattgttaa

SEQ ID NO: 66922 - DNA, 159 bp, Acinetobacter baumannii
atgaatactattgagaatatagagaaaaaacttgaattggctagaagagaaagagattcttggaaaaaaaatagccataattatattatggctagtaagctggtagaatctatagaaaaagatattaaagaaaagttaagagagcataagcaaaaatag

SEQ ID NO: 66923 - DNA, 567 bp, Acinetobacter baumannii
atgcaaaaaattatttttatatctgttttagctttaagtttagtgggttgcgaaaagtttgaaaaagaacgtgaagcaaaagaatatattaaatcttatgttaaagaccctagctctgtacaatttaggaatgtgtcaggtcaatgtggcgagttcaacgctaaaaatggttatggagcttatactggatttgaccgatacatttatagaaatggaaacctatatattcagagtgcttgggctgaaaaagaacacaatgagacatactcagatgaaaacttattcataattgcttttgatgaaatttgtacaaaaggcaacactgtatttaacttagatgattgtagatctgaggcttcttatatgtcttcagtatttgaaagacgtttagaaaataagtttggtaaaaagtgggaaatgagcttctttaatgataattctgccgaattaaaggccaaaggtaaaaagctagttgattacgcttataatctccctaaatcagaaacaaatatccagtttgttaaagcacaggctttcagaaaatgtttagctgaaggtgaaatttaa

SEQ ID NO: 66924 - DNA, 156 bp, Acinetobacter baumannii
atgcaactaaaacaggtatggggaaagatcaaagatattatttttggcgtgatcgcagcaccgctactcatcctcattatggtacttgcttcgatattcgatcaaagagcgtttaagaaggaacgcaaccaaaaaaaggaacaggataaaacctaa

SEQ ID NO: 66925 - DNA, 501 bp, Acinetobacter baumannii
atgacacctgatgaaaaaaagctatatgcactgatggcagttgcagaacaacagcagaacctagtcaatcaggccgttaaagagcttcaaatcacgaaagaacacattcaaagcactattgctgggcaaacccaccacactatatcaaaagcggtaaatgatggcttacaggacggtacagcagaacttattaagaccgctaaagcgcttggacgcttgaaaaactcgattgaatcagccagtgatcaattttcatggaagttaatcaccactttcttaggtgttttttcagttttcatactgactatgacatggttatttgcatcttatattaagcctttagagaatattccaaagatcgagagtttaaagcagcaaggtattcagtttgatattcaaagttgtgccgttggagacgagtccaagccttgcgtccgagtgatgaaagagcagtgtggctatgggaagcatggggatttatgcgttattgaccccaaatag

SEQ ID NO: 66926 - DNA, 354 bp, Acinetobacter baumannii
atgttaaagcaatcaagtttagaaagaacagagtttaaggaagaagaacttgcgcccattaaaaagcttgatttgaatgatttgaaagttcctatgcctaaaaatcttgatcagttgctgatttggacatccgaacttgctcaatataattatgctcaattccttgaccaatccgaacagctaaaacttgttgatgaagacaatctggaagaacaggcggaaatcagtcagaagcttaggttctatagaggtaatgcgcttatagaaaaccaaatcaaagatttctatttgaaaaagttacttgatcaaggagaggcaacagtcaaaggttatattatcaaggattacgtttaa

SEQ ID NO: 66927 - DNA, 1815 bp, Acinetobacter baumannii
atgcttatgtattggcttaatgagccaatggataaagcacttaataccccgacaaacttgacctttgataaccgtctcactgccaaatttttgtattggatggggtggcgaatcagctcgattgcagaattcttaaaagaaaacgataaaaatgtgcatgcatggaaagctcgtgacgaatgggaaaaagatgcaccagcagggcgtgttgcacaagccttagaggctcaacttgtaaagctgatcattcttgagaaaaaaacaccaggtgatttcaaggaaattgatttgctcatgcgccagctggagcgtatggcacgtattgacaagtattccaacggtgggaatgaaaccgatcttaatccaaaacttaaaaacagaacttcaggtccacgaaagccaattgctaaaaatcaactgacagaagaacaaatagaaaaactatgtgaagactttgacgacggtttatttgaatatcaaaaagtatggtaccgagcacgtgaacaacgtaaccgtgctgtactaaaatcacgtcagattggtgcgacattctattttgcacgtgaagcattgattaaagctgttactactggtcgaaatcaaatttttctatctgcctctaaagcccaggcacatggttttaaaacatacatcaaaaactttgtcatgcaatctattgagattgatctgcaaggtgatccgatttctatcacattgccatgtggtaatacagttcagctgattttcttgggtaccaatgcaaaaacagctcagtcatatcatggcgatttgtattttgacgaatttttctgggtgcatggctttgctactttgaaaaaagttgcatcggcaatggctgcccaaaaacaatataaaaagacttatttcagtacaccttccagtaaaactcatgaagcacacgcattctggacaggggacgcatttaataaaggtcgcaccaaagaaaatcgagttgagatcgacaccagtcatgcaaatttaagagacggtgcattatgtggcgacaaaatgtggcgacatattgtcaatattcaagatgctgaacgccaaggctgtgacttatttgatattgaagaattaattgccgaaaacagtcctgaagaattcgcaaatttatatatgtgtgaatttgtcgatgatggtcacagtgtttttccactgtccgtcattcagccgtgcatggtcgattcatgggaagtatggtccaaagattttaagcctttggctttacgtccattcggaaataagccagtttggattggatacgatccagcagaaagtggtgacagtgcagggcttgtggtcattgcaccacctgaacctgattatcctaaattcagattgcttgaacatcatcaattcaaaggcatggactttgccagccaagcacaatacatcaaaaaattaacgaccaaatataacgtcaaatatatcggcttagacaagtcaggtatgggtactggtgtggctcaattggttcttgatttcttccctaatttaacgaccttcaattatagcgtcgatgtaaaaacacaattggttatgaaagccatggatgtgattaacaaagaacgttttgaatttgatgccggatccactgacgtggccatgtctattatggcgattcgcaaaacactgacagcttcacaaagacaaatgacatttgaagcctcacgtgcagaaaacattggtcatgctgatttggcttttgccattttccatgcgtttgctaatgagcctttaacccttgatgaccaaacaaaatctaaaaaatcctctatggagatttactaa

SEQ ID NO: 66928 - DNA, 1854 bp, Acinetobacter baumannii
atgctcaaacggagcattgcttttgcattattggctgctgctgggcacgcttattctgctgatattgaagtcacaactacaattgatgaagatgtcgataatacagtatgctcattacgtgaggctgtagaactaataaataagcgtaattcaagtgattctaccgtggttgcctcagtaaaagatgggtatcatggctgcggaaataaggacgcttcatcaaatattattttacagcgcgataaagaatatacgttaaatagcagaataacgattacagcaccccttacaattagtacagcaaaaaatgattctacattagttgatactgatcagcccggttctcataatgcaactatcaaaatggcaggtacagatcagctatttaaaattgatgatgagagtgttgaaaaagcatcattttcggttttgttgagtgatcttaacttacaaggggcaggtgcaaactctaaagtgttaacaggtggtttaattttaaaccatgaaaaattgactattcaaaactctcgtttaacaggtggatatgcgaatcaaggtggagtgatttacaatcaagggtttgcctcaaaaagtgatagaacctttggttttgtttatattgtaaatagccttatccagaataataaagcagcccaaggtggggtaatctatagtgagcaacccttatttctaattactcaatcggtaattcgtgataatgaagttagtaatacaagtggttcactcttcttcagtcaagattcatttgatgatgaaagtactggagaatatgtagttcaacgtgctataggattaagcaatagtacggtctttcataataaaggtggttttattacgaatgttcgagatgggatgtttgttaataatattacgatgattaaaaatgacaaaggattattccttgaagctccacaaggcaatgcttcaatttcaaatagtatattagttggaaatacaattaattgtcaggctaattcaactgataaagcaattatccaaagtaatttagtgactacagaatgtaatcgtaacgcttcagtaaaagttccaaatattctttatcctgccaatcagaaattaattgctggtagtacagatgagggagtttgtgatgtagcttcaaaggatgggttgttatgtccttttaatacgccaaaggatagtttcttgggcttttttaagccacggttacttgaaagttataatactttagctgattcacttattattaataaaggccgtttgtacagtgatggtacttctgtaggcttggcaagttgtgaaactttagatcagcgtggaaaaagacgtactggttatgatgagttatgtgatttaggcgcaattgaatatatcctaaatagtgagatctcttcagttggtcaggatattagatatgggcaggttgcaaagtttagtattttaggctcattaagtgaagcagacttggttacacctgccacgtgtaagcgtttattcggtgaacgtcctgatggtaaagaatggcaacctggctgtttgaaaataaaacaaagtactgatacacctgtttcgaaaggtaccgtaactatagatcagaatggaaatgtaatttatacaccaaatggtaattggcatggtgcagatatttttagtattcaggtagttacaagtatttcaagatttaatgaaggagtcgagttccaatacattactattcctacaagaattgtacaggaacctttgtctggaattgaagataaatctgtcagctctggtgggggaggaagtataggggctggttttattttaagtttactagggttggttgcgttacgtcgctttaagtcataa

SEQ ID NO: 66929 - DNA, 552 bp, Acinetobacter baumannii; identical to SEQ ID NO: 52999

SEQ ID NO: 66930 - DNA, 759 bp, Acinetobacter baumannii
  misc_feature (721)..(730): n is a, c, g, or t
atgagacatgaagataaagtcttttttctcatagatgttaataacatgtacgtctcatgtgaacgagtctttaatccaagtttaaacaataaaccagtcatcgttttgtcaaataacgatggatgtgccgttgcgcgcagcaatgaagcaaaaaatttaaatataaaaatgggggtgccattattccagatcagagacatagtaaaaaaacacaatgttattgttctctctagcaattatgaactttacgctgaaatgtcgcgcagatttcataagattcttgcatcgtatgtaactgatgaagaagttgagaaatattcaatagatgagtgttttgttgatttttcagcttatgaaaaaaattttgacctagaaaaggtcgctcaggatatgcgcctaaaaatatggaaatggattggtttgcccgtgtgcgtaggtattggtcgcagcaagacggaggcaaagatatccaatcatatagctaagaaaaatcaaggctttaacggcgtttgtgatctcgtaaacatggatccgtgcaataaagaatattactttgctcaaatagatgtgagtgaagtctggggggtcggccgtaaacatgcaaaaaagttgcaaagcatgggaattaatacagtgcttgatctagcttgtgctgaaccacgtgaaatgcaaaaacgcttttctattgttatggctcgtactattaacgagctacaaggcnnnnnnnnnnctacaaggcatctcttgcctagaaattga

SEQ ID NO: 66931 - DNA, 183 bp, Acinetobacter baumannii; identical to SEQ ID NO: 46606

SEQ ID NO: 66932 - DNA, 462 bp, Acinetobacter baumannii
atgaaagagttaggtaaaaaagaatttttcttttcaatagaaaaatatgaaccgaagaatgatctctttttattagttgttaatattaatggtacttcttttagcaattatgagactcctataaatcttccaattttaattaatgacttaaacttactgctatatactaaccaacgagaaatagactatctccaagtagatactgttaacgaaaacattgagttaattaaaaagttaataaatttagagtatttagaattagagaataatatctatgattttcaaaatagtaccgtaaggaacggccatgaagtatttttcttttttaaaataccaaatcattcattctatgaatctccttcactcataaaagctggtgaaggttatgtggaaaatattcccatacaaactgttaagtttgcattaaatgagttaattaaatatcaaaattcaattttataa

SEQ ID NO: 66933 - DNA, 192 bp, Acinetobacter baumannii; identical to SEQ ID NO: 57217

SEQ ID NO: 66934 - DNA, 228 bp, Acinetobacter baumannii
atgtataaaatggataaagaacaagcattcgaaatcgtggccaagatcattttcgatagagcctgtactttagttgttgggggaaatcctgcttacgagtcggagcttgttctacgtcacattgaaatgtgcatggtggagtggggctataagtctgccaaagtagcggagtactacgacatgttgaaagctgagaatgataatttccgttcaatggggatttgctaa

SEQ ID NO: 66935 - DNA, 459 bp, Acinetobacter baumannii
atgaatatttcggagcaggctttagggataatctctaaagtttatttccctattctttcgagagatatatcaaaatttaaggaatttttaaaagtaattgttgtttctagtttggttttatttttctttcaatgcttgctaacattttttggtttaacatatatttttcatgaaaatttggatcttgctagaaatttgatgtatatacagactgtagcgcctattatatatggtctaatgatagcctatggtataaacttattaggagctcttggtgaagataaagctttaaggaatataactataattacttcattaataggattcatcatggttacactcttaacatatatatatatggctgtaggagcattgttaggtgttatgtttacttggttagtaagatttgtgttgtgttatttaaattctaaaaagatcgagttttttaaattttattaa

SEQ ID NO: 66936 - DNA, 297 bp, Acinetobacter baumannii; identical to SEQ ID NO: 53024

SEQ ID NO: 66937 - DNA, 279 bp, Acinetobacter baumannii
atgttgttggctccaagtgagtatttcatagcttcatatccatgtttcgcatttttatctgaagatattcaacctgcaagaattgaaacaattcaaaaggttgcacgcattaactttgatactgccattaagaaccttaaacaccaatatggtaagtatatcaatgtttttaaacaggtttttgaacctgaagagttaatcaatattatttcttgctctgatcaattcgcttatccgaagcggttagatcatgtgcttataactgctcggagaatgtag

SEQ ID NO: 66938 - DNA, 195 bp, Acinetobacter baumannii
gtgcaacaaagccctttacaacctgtcactgtgggaacggtacttgccagtgcttggattatctctgaggcagcggcaataaatactttacttgtcattatggtggtgattgcaactttattatctttaattaaaaaggttcatcctctgcatgtcttgattgctggggctgtatttggtgtggtcttactctag

SEQ ID NO: 66939 - DNA, 258 bp, Acinetobacter baumannii
ttggctggtcaagtattgttaagccaaaaacaaattggtggtttacctgcagcacgtgtaccacacttccctgacaatgcacttttaattacgtcttttgacaacctgtcaatctactatcaaaaagatgcaaaacgtcgttacatccaagaaaaaccaagcaaaaaccgcattgaagattatcaatcttcaaatgaagcgtatgtgattgaagcatacgaaaaagttgcattggttgaaggcatcacaatcgaataa

SEQ ID NO: 66940 - DNA, 603 bp, Acinetobacter baumannii
atggataactacaaaatcggtgacgaagttgagcttcttgaagatttttacactagaagtggcgcagaaataattttcaaaaaaggcactatcgcaaaagtaatcgaattacagctttatgatgagattcatattgatgtaaacggtgacaaccgttggtgttcaccggatatattgaagttagttgataaaaaagacccagccttgattagcggtgcggatgttcctgcattaatcaaaaaaggtgaatcggttcagtttcgttcagtattcaacgttcaaggtggtggtgaatgggaagaccttgatcttgaacgggatgaggaagagttctctttaggcgatttgattaacactcgttttgaatggcgcctcaaaccccaaaccatcaaggttgagcttgagctgccgaagccttttgagccgaaggatggtgaagtttattactacttaaaacctagcaatgcatggggttttggttgtggtgaatggggcgatgactcaatgcaaaatgaatacatccaatatggtgcatggcccacaaaagaagatgtgttgaaggtcgtagagcaactcagaaagatacgaggtactaactcatga

SEQ ID NO: 66941 - DNA, 234 bp, Acinetobacter baumannii
atgagtggttttaacagaatcgatccaattcgagtgagcctcccaagagcttgtgagctactcgacataagccgtgaatcattgcgccatatcgtgcgtactgatgcctcatttccccgaccaatcaaaacaggtgaaagcaaacaatccccagtctattttgactatgccgagcttgtagagtggcataacagcaagaaggttgaccaaaacaaggagccctctcatggataa

SEQ ID NO: 66942 - DNA, 375 bp, Acinetobacter baumannii
atgagcaaagtatcaaccgaattgagtgcaagggctagaaatgaagtttctagagttttgcaagcccttgcatcaagcaatcaaagtcaggttgccgaacagttggggattgatccaagcacattatcacggatgaaaaatgatagaaaatccaatggcttgactgagcttgagaactgtttagtgctattggacattcttggatttaagactgtcctcaagaaatatcgaatgattagtgaggaaaagctgaatgcgctttttgtgatgtcaaaagcgtggatggaaagcaagcaaaccattgacgatctttttcaagatgacattgaagatttcggaatgtgttttgagcttggatataaagaaaaagcctga

SEQ ID NO: 66943 - DNA, 225 bp, Acinetobacter baumannii
atggctataattccaaaacaaaatgcaattcagatttataaagacatagaagaaggcaccataatgatttgtgaagaagatggttacttcaacgaacacaatggtgaaactgaaaatgcctgtgtaacagttggtattgcacatatcgaaactcttattgctgcacttattgccgctaaacaagaaatcattgacatgagggaagaacacgatcttccgctttag

SEQ ID NO: 66944 - DNA, 507 bp, Acinetobacter baumannii
atgagaataactgaacaacagctagaagcaattcaaaacaagcgaaataacgcacaaaaaggcacattacagcgcgataaaagcaaaagtgatgcaagggtagcggaacaattaaatgaagctaatacaagcgaaattagagcattttacgaagatggcttaaaagtcattctggattgcgaaattaaaactgcaccaccgtcagtaaatcactactgggtagcttcagggaaaagaagatttctaagcaataaagctcgtgattttcatgcgttggttcgtcaggttgtgccagctcataaatctactgcacgactcaaattagaagtgacttttcatttccctacacgtcaatgtcgagacatcgataactacctaaaagcgactatcgatagcttagtgaaatgtggtctttgtgtggacgatgaacagttcgatgagcttctagtaaagcgtggaaatgtcatcaaaggcgggcttattaaactcaaggttagcgaggtctag

SEQ ID NO: 66945 - DNA, 447 bp, Acinetobacter baumannii
ttgaaaaaaatttcagaaattttaaaatctaaagagcaattttggatattaattattgctgtaataactggtattgcattgtttattgctttgcctactggatatattaagattgttgaggtggtatttaagtttcttgttaatataacaccatttgaatttttgttttttattccattaagtacattacttgcaaatgttgtatttaaattaaaattaaattttatattaatcgaactatgttcttatttatcaaagaaaatagttatttcattgaattgcttagttggattctgtttgcctttatttttgatgaatttggggtttaatcatataccagatgctttgttttttgcaattattggatttactacttatttaatagcaattgcttcacactggattatattagatttagaaacacagtcgaatgagttggcttcttaa

SEQ ID NO: 66946 - DNA, 291 bp, Acinetobacter baumannii
atgtcagaaaatacttcacaagctgttgaggttgtagcaacaacggttggttcgaaagccacatatgcaggagggacggccacgcttgttggttgggccgcttctgtagactggctcgctgtcacgggtgtgctaatcgctttagctggttttgcgcttaatgcgtatttccagattaagaaaaacaagcgtgaagagcttgagtcactgatgcgtatgcagcgtgaacaggaaattcatgagttcaatatgagtcaaaagagggctggcaccaatgtccaacaagaataa

SEQ ID NO: 66947 - DNA, 894 bp, Acinetobacter baumannii
atgaatatagtagcagaaaaaattgatttacaacataccttaactggcgatcaggtacttgatctggttgaggtggatattggtggtaatagacagttcgctgttgatgccagatctcttcacctattcttagaatctaaacgtaaattttcagactggataaaatcacgtttgataaagtatggatttatagaaaatgaagatttcatacttgcttcacaaaattgtgaagcaaaacatggtggacataataagagtgactattaccttactctagatgtggcaaaagaactctcaatggtagaaaacaacgataaaggacgtgaagctagacgatacttcatacgttgtgagaaattagcttttgaagcaatgaaagaaaagttcatgggtggtgcaattgaaactagaaaagtaatttcacctgaacaaaaggattcgttgcagaaaattgttgatgccaaagtgaatggaaacaatggactaagagcacaagtttggactcgacataatcgtcattttaaaattaactcttaccatgagcttcttgcaatccactttgaagattctgtgcaatatttgcttagtatggagctgaaaggaaaggtggaaaatacattagtaccaattcaattaaataatgagccatggaatgacaccgatgtgcagttcttaatgtggtttgtacctaagatttcaaaaattattaagaacgatatttatcctgcattgagtatcttgcgcagtgaatgtgccgcacaggtaataggaataactcaagagatggcggtacatgccaatgctttaaatcgaagagcattgaaacatggtatgacgaactactcacaacttggtgggcaacccatccatacaattgaatggtatttatcataa

SEQ ID NO: 66948 - DNA, 609 bp, Acinetobacter baumannii
atgaaaagaatagttttagtatgtggattgcttgcttcaggttttgcttattccgcagattgggtatatgttactaaaagcaaggatggtgaaaagtattacgttgattatgactattacaagtatgataagaagtctaataattctgaattatggtataaggttgaaggaatcaacaatgggaactcttatactgaacggaaagtcctaacaaaatatagttgtaagtctaaactgtacaaggacttatctattgcaacctatttcccttcagggatggtaaaggacacttactcaagtaactattactcagagtacaggacagtttttcctgacactgttggagaggagttatacaaagttgcttgtgatacgccagaaaagggtttggattttaaaaacttaaatattgaaatgtatgatgactatcaagattatattagagcgaaatatgcttacactcgacaaaaaatgccagataatcatgactataatccagccaaaaacataaagatcgaaaactatgctaactatggtgattatattaaagatgtcaacaaagaactaaacaggattagattagagaatattgagaaaaactacaaataa

SEQ ID NO: 66949 - DNA, 1425 bp, Acinetobacter baumannii
atgattgatccaagcattattacgcgtggggctgagcaggctcaattgcaacaacagcaaaatatggaaatgttggggaatttaggtggtgctttaggtcaaatggttcttggtcgtcgaattaatcagatgcgacaacttggaacgccagatgaacaaaaagcctttgccaacaattctatcttttcccctcagttaaatcaggttcttcaaggcgaccaagcaacggcacaaaaaaacctattagaccagcagaagactctggcagaggtgggcaagattgccgctgaaacaggcaagattggctctgaaactggaattacactgcaaaacaatgcaggatctgtgtggggagcatttttaaatggtggggctggggcagcaaaagcacaacttgaaaaccttaagaatcgtggcttaattgatcctataagctatcaatcagaagcagatgctcttgctaatctgccacttggtgcaaaggaccagtttgactatgctcgtggccgttttgctggaattcaagatcctaaatttacacttcaatcaaaagataatgaagcagacaatgctgcttccgttgctaacaatatccgcacaaccaatgcaacaatgcgtgggcaggatataacagcggatacggcagaaaaaaatcggattcaacaagataagcaatttcagaaaaactttgaatatcaagctcagcaagatgaattgaaaaatggtcaaggcgagttaaaagagtatggcggaaaagtttacttagtttataagaatggcgattttcgtcccgcaattggtgctgatgggcagcaaatcatggctcaaccaaaggaaactcagttacaagtgatcaagcggaaggaatcagcacaaaaccatgcttctgcatctgctcaggcatcttcaggcgcgactttggcagcaaatattgccaacagatacgttcaaggcggttataaccctgcgaaatttgcacttgaatcaaaaatacccggcacagaggcttatggcattgctaaagaccttgaaagtttaaagtctaatgcattcttgtctagagccgaccagatgcgaggtttaggcgcattgactgaaacagaaggagctagattaatttcatctgtctctccacttgatccaatgcagagtagcgagaagtttctatctgatctaaaaaatgtggcaggtacttttagcgatattgccaaatcaaatagagataaggcgcaactttatgctaatccaaatggtaatattgccacttcaaccgtagccccggccaaaagcacagaacaaaatgtcactatacctaaaggtgcttacatgacattaagtgatgttaaagcttcggcaaagaatgctggcattagtgtagaagatgcaatccagcgacttcaaagtaagggcgttacaattagataa

SEQ ID NO: 66950 - DNA, 399 bp, Acinetobacter baumannii
atggacatgactagatcaattcaaatcccaaatactcctatgtttaataatggcgttatggatcaagcatggtatatgtttttctatgcactaagtcaaaatgcaagcaaaggcgaggaaattgacataggacagatcctccaattgtctagtcagttgcctgcagtcacaatatccaatgatattctggctgatattgatgacttgcagcggaatctaccaataagtccaacagcacaaaacgaagatatccaaccgatgccaactgcatcggttttttgttttgagcaagccgcaattttcccaacatcatcaatctgttgtgatgacaagatttatcccttgccaactgtacagatcaccaatgacatgcaggtaattatcaatggcaatgattaa

SEQ ID NO: 66951 - DNA, 1395 bp, Acinetobacter baumannii
atggcgactattatggatgttccttttgtagggccttcataccacatgaaagattgggcggtagactgccagcgtactttaaatctttatccgcaatctgttgaaagtggtaatgctccacaagtttcagccctaatgccaacacctgggttaatctcaaagtaccaacttactggggcaataagaggactatgcccaacaaatatagggatcctagctgttgcaggaaataaactgtttttattgggcgaggaagtgagcgaaataggtgagattgccggatctaacatggttaggtttgctgacaaccgcattgttgtcttgatcacttctgtctcacaaacatatgaatttcacttggaaactaaaactttaaaaattgtggaggggggcggtttccttggtgctgaagatgtcacattccttgattctcgatttattgttttaaatcctaattctgatcaaatccagtggtctgggctgcttgatacaaaattttcggcactcggctatgcaacagcagaagctagttcagataaattagtaagaattttagcccaaaatagtcaactgtggctaattggggagagaactacggaaatatggcacagtacaggcagtgctgatcaaccgtttttacgagtatcgggtgcatatattaactgtggctgtattgcaaagaactcacttgctcaattcggaacaggcctaatttggctttcgcagactgatgtaggtgatggacaaatagtccttacagagggttatcaagttaagcgaatttcaaatcatgctatggaacaagagtttgctagttatgaacggcttgatgatgcggtagcatactcatatcagcaagaaggtcattccttttacatgctttcattcccgacagctaataaaacatggtgttttgatggttcgactggaatgtggcatgagcgaagctattacaacttagattcacaacatgaacgacatcgatcacaagtgcactgtttttacaaaggtaagcactatgtaggtgaccacacacatgggattatctatgaattaagccttgatgctgaaacagataatggccgcatgatcatgcgtgagagaaccacaccagtaataaatcctaaagggcaacgtctcatctttgatgcgctagaaatctttattcaggctggacaacatgtgaaccgtgagccaaaagtaatgcttgattggtcagatgaccaagggcaaacatggtcttttgatcaacaagaaacacttggtaaggtcggggagtggaaaaagagagtcatctttaggcgtctaggacaagcattaaatagggtttttcgattgcgagtaacagattcaagccggctaattattacaggtgctcaggctaaagtgagatag

SEQ ID NO: 66952 - DNA, 612 bp, Acinetobacter baumannii
atgaacgtcagtaagattgtgaccggagcaatgaaacgtgcaggcattttagcagcaagtgaaaacccttcagcacaagatcttgctgatggcatagatgctttgaatgatttattagcacagtgggccactgataacttgcttgtttataaggttgaagaacttaccctaaatctaaatggagtagggaaagtttcacctgaccctttagatagcccagacatattaacgtcaatatcaaagatccctcaaatgggcacacttgatgacagacaagttgaaattgttcgtgatctaaatagtagcttagacaagcctcaaataacctattcagtaaaagggcaattgtgggagttctatgggaatggagttttaaaatttaaagcgttcacattgccttatgaacttgtatctcatgatgaaattgcctttccacctgtttacagtagagcgcttaaatttagtctagcaattgatatttgtacaatgtttggagttgatccacctccgaatcttcagctcaaacaaactgaagcactcaacatattaaaagacagcaatgttactccactatatgtgaaaaatgacttgcctgtaggtgtaggggtttaa

SEQ ID NO: 66953 - DNA, 429 bp, Acinetobacter baumannii
atggataatcaacaactactaatgtttaaagggtggttcatagatagctatccagaatgtaaggactatctagatctaacttactttgatgtagagaaaaacactttcttatcgaagtgttcatataaccctgattctggaaatgctgcaaaggttttgaaaattgcttttggttcatggcagcaccagcaagcgaaaatggaggagcttaaagcatctcatcacggtgaagtgattggtcatgaagttcactttaaaaagatcaagcaagagcgtgacgagctgcaaaccttatacacccaacaaggcataaacatgttgaagatgcaaaagcgggtggatgcggcaattaaatgcgctgatcttaatttttggaatgcaaatacggttaaggcgatggttgaagcgctcaagggggaaggacagtga

SEQ ID NO: 66954 - DNA, 261 bp, Acinetobacter baumannii
atgagtgagtttaaagtcggggatcacatcgtgattgaccaaaagtatgacaagactttcatgccagttctgcaaatcctttcagaaggtaagaactatttctattgcaatgatgggcaagtacataaatcgcaaatggatcaatggcgtaaagctgagccacaagaaatagcagcaggccaccgcattgacaatgacatgggcgacgaccaccccatagaaaaccacatcagcccgctgtgtaaatcaaaggatgtttga

SEQ ID NO: 66955 - DNA, 240 bp, Acinetobacter baumannii
atgaattatttagttattaaaaatctaggtcacggtttttatttaggtaaaggcaacatcagacaaggtggtaaagaatttgttgtttttaaaagcaacaaagaaatgtttataggcgtcgagtcttacaaatacgatgaagcaagcaacaaattgctttgggaaggaatagaggatttagggatgacagttgtaggcttcgcggatactgaagaagatgcattggatttagcattttga

SEQ ID NO: 66956 - DNA, 261 bp, Acinetobacter baumannii
atgatggaatacaagcaagttcgagcaaatcaaaagggattctataacgatcgcttagttcaagaaggcgaggttttttctgtacctgaagaagaaaccgcactttggtttgatgatgttgaaccaaaacaaactgatcccgctaaatcttactcaagtatgacacctgaagaactcgcaattgttgcagttgaaaagggtatttcattaactggttcagaaactaaagcacaaattattaagcttctaaaggctgaataa

SEQ ID NO: 66957 - DNA, 639 bp, Acinetobacter baumannii
atgaaaaaatttaaagtcatatgtgccgcaatctttagctttctgttttgtctaagttcatctatctattttaaacatcaatttaatattgagggtgattatttatcatccttctccacgctaattgcagcaatcgttgcctatcaattattcaatgattggaaggtggaacataaatttaaattacttgaaaagtttcacgatactttaaaagaaagagcattacgacttaatagcatttttgatgcaatgaacttagagtttagatatatagaagggtcgatggttgtagagggtaataaacaccttgaaaatgctttaggaattttgtctcaatttaataaagaaactcaaagtgttttatacttgttacgagaatataagtgttgcttagacaccttaagaaaggatgagtttttaataaataatgaaaataagttaaaacatcatgttgaaaattttaatcagataacagatttttatatggatttaacattaaaaaggttagttgatataaacgttaatactgttaatacaactactttgaattcttggaaaaaaattctaattgaatttgaacactattgttctgttgatctcgcagatttctactttaaacatcttaatttaaataattaa

SEQ ID NO: 66958 - DNA, 945 bp, Acinetobacter baumannii
atggaaaataataataattttgaatcagttagttatcttaaagatcttgtgattacttcagatgaatttatgaatgcctatataggcattcaacaatgcgctgaacgtagtattgcttacaatgaaccaattggaagtatgcttttatctgaaggaggtcttggaaaaacgaccctgtgtcgtgcagtaatcgctcaaatgccaaattccgtcaaaatagagtatgacagaaaaaagagtatcattcccgctttttacgttgaagttccctctccagcaacggtgaaatccttagcgatcacaatgctaaataaactaggtgatccaagttataatactggaacaactaaatacctcacctcaagacttacatacttacttatacaatgtgaaaccaaattggtttttctagatgagtttcatcatctttttgatcgcaaattaaattcaacaagaatgaatattacggttggaaattggataaaaactctagttaacgaaacgggaattagtttctgtcttgtaggccttcctcaatttgcagaacttattcagattgacacccaaattgcaagaagatttccttttcactataaactatctccgctcaccttaggaacaaaagatacctacggcacaatctacttatttcttcatgaaatcgctaataaagtatttgaacacaatacttcttttagtccggaattagatagttatcttttaggtatgcaaatctatgctgcaaccaaaggcaatcactattatgtaatgagccttatacgtgaaagtattgtaattgcattagatgatggaagatctattgtcacgcaaaatgattttagtcacgcatgggcacttggaataaccctatttattagtgattttaaacaagatccatttgttatgaatctcgcccaattaatatcaggcataaagggagtgtaa

SEQ ID NO: 66959 - DNA, 690 bp, Acinetobacter baumannii
atgtaccctttctcacaaatcaaaagaagtaatttgactcaatttatttgggaacaaatagaaaaagcttttcaggctcaacctaatttagcatcaacacttcacgggcaacgaaaaatttatcaagggtgttttggccgtagaacagctttatttcctagtactaaatctggtggagcaattccacttgaaagtcatctcgaattggcccaagcactctgccttgaacaaaacactcaggtaaaaagcttccgtactcaagcaataaaaataccgttatcaggtaatcatttttcctatccagactttttggtccaaaacatcgatggatcatttgagatccatgaagtgaaaccctctattagggctctggcacaagaagagatacaaaagtttgaacaggtctctgagatacttaatcaaatggggatattgtttaagcttattgaccaattcagcttaccaacaataaaacagcttcaaaatcttttatatctttatcaaagggggcataaacgaaactggacacctttagaaattgatctagtaatgaatgcactggaggaatctactttccagaacattgaagcagtatatacattagttcaaaaattgggtttgccttgtgaattaggtgactatttactctttcataaaaagatcaccataggtacagaaggaggaatttaa

SEQ ID NO: 66960 - DNA, 258 bp, Acinetobacter baumannii
atgaataaagtaatcttaataaatgcagaaatgattgagcgtgatctatttgaacgtcatggtccaatgatttcagatgaggcgttaagagttgcattaggatatcgttctatcgatgcctttaggcaagcattaacaagaaaaactgtacaaattcctgttttctctgtcgaaaaccgtcgcggtaaatacgcgcttgttaaagatttagccttctggttagcaaaacaaagaaatgaggctgtccaacaaagttaa

SEQ ID NO: 66961 - DNA, 858 bp, Acinetobacter baumannii
atgcaaatagagaaaatagaaagtacaaaaagacgagatcagattgatactcttcgtacgacaatttggtattcatatatagaaatgaactttacgaacagtacaaactataagattgagaaactgattgagcctgaatcatttagaaaaagcgaggctggtaactattttcacagtaataaatggacgaaatataaaattggaaagcatacaccagggaacaagcttattaataaagcaaatcaacatgtaaaaggaacagctaagattattaatcatattgtatgggaggcgataagggggcgtaaatcattgaaatggtttatggaagatggggttaatcaactctcttgggatgtccaaagaattattttcaaaacaataaatgaccaaaatgaattaatctctgttctacatataagaaaagacttaagaagattagagcgtttagcaaacttagatgcattagcagccttgatcttttttttgagaattgcagatgatcaaaatcaaagaaaaattgctttaagcattggacattcgatttacagaatattattggtaatgtgtgtatttttgcctttagcaaaatttaggtatgaattggcatttttaatttatctatatgtttttcctctttgccaaagtgagatgaaaaaaaataattgtaatgatgtcaatgaattttatgataattctactaagttaaattacattttgttagaggctgaagatgaaaatattattgatttagagcgtaaagggattactaaaaaaatgtacactaattttctatttgatattctagatggtaagcgtggacttaaacttataaaagaattttctccctctttttaa

SEQ ID NO: 66962 - DNA, 456 bp, Acinetobacter baumannii
atgaaaatttggaatagttatggttcagagcattcaatgaatttagtgttaataggttcatttgttcaggcgaaagatgctgaaaatgtagaaaatttagtgaagagtttacaaaagatttctgaacatgaaagctattatttatctggtgagcctccagaaaatcatcgattttctaaagaagttttagaggttcttcaaaaacagcaaatttatcatttgtcacctttagaaatagatcagtttaattctgattattatctagaacgagatggaaataagataacgattgatacagaagagattgatatctctgcatttattaaaatttttgtggatgctggtgcaaaagtagaagtttactccaagcatttttatcctgagaatcctgagaatcctgagaatcctgagaatcctgagaatcctgagaatcctgagcaagttgaggaaaaatag

SEQ ID NO: 66963 - DNA, 3993 bp, Acinetobacter baumannii
atgtctcaacttgattggaataaatttgaaaatttatctggtgctgctgatgttaattttgaaaaactttgtagatcattaataaaaagacactatggtcaatatggttccttcaaagagcttgctaatcaggctggggttgagttccatctaaagttagataaagagtgtgaattgggggattcaacgagatggtatggatggcaatgcaaattgtatgagatcgctaaagcaaccaatattgggacagcaagacgatctcaaattgttgatgcaattgaaaaatctaaaaattccttgaaggaattaaccgattgggttctatggacgaaaaatattttaactaaagctgatcaagagtggttttacggattgcaagctagctatccatttaaacttcatcttcaaacttgtgatgacattgaaagtttattgattgggcctgcattagcattgcgagaggcttattttggtgagttggtaattgatgaacaagtgttaaatcaacattatcaaatcatagcatctactcatagtaagaagtttcaacctgaagtgcaccaaacggttaaagctgaaaaggtaattgaaaaatgtttaggaaggcactcttcttgggactccctagatagcatcgagaaatctataatcaataatttaaaaatagtcaaagatgcagttaatcttgaagatagctatgtcaaaacaaccttgcccgattttatagttgatggggaaagattgagtagttttttaaattctttatatactgagttggcagctggaaactttgaaaaagcaaaagagcttctggttgaagatttaagttgtgattggtctaaatataggaaaacgatagctcgattacgagcgaacagaagctatactgctatgtttgcagcaaatttgttagcagatttttgtgctttttcacaagaaataaaaaaggtaaggaatgccttaaatgctaaggtgcttgttgttgttggtaaggctggtgatggtaaaacaaatcttgctttagacatatgtagaccaagagatagtttgaatgttggagtactttttttaggaaaagatttaaatgcaggcgaaaatttagatgatttagttaaaagttttaagatatatggacgacctgttaatacatttgaagatcttttagaagcagtagatgcagtaggtcaacgcctttgtaaacgtattccaattgtaattgatgggctaagtgaatctgaagacccaagaaattggaaaaatgaagtagccaaagcaaatacattattagacaactatccaaatgtgttactcgtgttaactttaagaggggagttttataaagattgtatacctgaaagtactccaactcttgagttaaatggatttggagataatccaatcgagacgatacatcgttactttgaatattacaaaatagatgctttagatgcagatatacaaatcgagttgcttacacaccctttaacattaagactttactgtgaagcagcaaattcagagaggcgtgtagctgtaggtgtagaggcattgcctcgttctcaagttgctatatttgagaaatactttgagaaagcaattgaacgtattgtagatttatccccatcaaatcaaaggttatatcatgaagatattgaagatactttattgaaaattgctgaagtattatggacagagaatcgtagaaccttagattttagacaagctcgcaatattgctaatgatattgtggattgggggagtaatttaataaaaagtcttgaatctgaaggtgttttattgcggtatagatcacaaactggtaatcaagaaataggttttgcgtatgacttaatggctggttttaaaatagctgaatacctattgaagggtgattttaatacttggatagcgcaagatattagtaaaattcagtacaaccaaccacattcaaatactttagcttatgatgtttttaactcattagttggcttatatcctaaatttaattctagaaaacaattttgggaattgttggataaggattacagggagcaggctcttttaaaaaccacccaagagcaagttgctcttatcaatagagaaacaatagaccaattccagacgtatttactctcctcagagaaatttgcttcccaagcatttaaaaagttgaaaattactcgagcagcgtatgctcatccatttgatgcaaatttcttagaccaatctttaagaaaaatgagcaatacatatcgtgatttaacatggtctgagtggataaggaaaaattctagagaacttaaaattgacctagaggtccttgaaaaaagatggtctgaaatacaaattggttctaatgaaaaaggtcgagctatatgggtccaatggttattaacaactaaccatagagatctaagagatcaagcaacaaaagtactttctatatatgccaaaaaagatcctagagcattctttgagatggcaattaactcattaaacattacagatccatatgtgtcagaaagaacttttgctgcagcgtatggagctattttgagtgctgattttattgatgtagaaaaaataaaaagtaatgttggtggtttcgctcaacaaattatagaaagttgttttatacctaatgcccaatactctactacccatacaattcttagggaatatttcttaggtattattaattatgctttaaaagtgaatcagtattttgttagtcaagaatatttagattactgccagaagccttatactcatttaccaaatttatttgatagtcttcccgatgtaagtgaagagagaataagtgaagtaaagaaagcagctctgcgtatggactttaataattacactattgggcgactaattactaatagagctaattatgatgattcgcatcctgattatattcaaacacgaagaactattttaaaaagaatgattcagcttggatatgaacctgataaatttaaagaaattgatagagatataggttcgagttcttattatgatcgtgatgcaaaaatagatagatatggaaaaaaatatagttggattgctttttatgaaatgtatggatggaagtctgatagaaagcttctagatgattggcgggacaacgaaagatgtagcgatgtgagtattgatccaacgttccctaaaattgataattcttggaatccagaacttacagatatatttactaattctccaaatgatattggtgagtggattttacatggaccaatccctaattattttaatcttttagaaactcagcagtttactcaaaatgatagttggattttacttaatggatttctgcaagaggactcgaaaacagattatcgtgaaatatttacattcatgagaggttttttcgttgcaaatgaatatgtatctacaataagtgaatttgttagtaataaggattatcttggtaataatgcattgccacaaactcctgaaaaccattacaaatatgcaggcgaaatggttttaggaaatacattcttcaatctgcatcaaaatgcaactagtcgagtaagatttgatgaatgggatgaatcaagctttttaatcgaagttcctgtgcaatcttattcttgggagtcttatcatagttcattgaatcaagcagcgggaattgactttccaaatcctgagttatgtcaaagactaaatttaacatatcataatggcgatccagacttatatgatattcatggagtcgcatctattttcagaacattcaagaccgatattgggaatctgaaaggccatttatcatatttgagaaaagatcttttccaaaaatatctgacagaaactggacaaacttttatatggatattgtggggggagcggagacaaaactataagggcggtgttgaagtatatgaatatttcaaaactaaacaatatctgcataaacaagtttatatttggagggatgatcaaatagttaaattagattaa

SEQ ID NO: 66964 - DNA, 390 bp, Acinetobacter baumannii
  misc_feature (370)..(379): n is a, c, g, or t
atgaaaaaaatagatattaccggaattggtattgggccattcaacttaggtttagctgctcttttgtctcatcatcccgaaatcaaaagcgtatttttagaacgtaaaccagaatttcgatggcatgaagggttgctattgcaaggtacgacattacaagtccctttctttgccgacttggttactatggccaatccttgccatcccttaggctatattaattatttacatcaacatgatcgcttgcatcagttttattattacgacagttttttaattccacgccgtgaatatgaccattattgccgttgggcttcaaaacaattacccgattgtcgatttggagaaaacgtaagccatgtggaatatnnnnnnnnnngtggaatatga

SEQ ID NO: 66965 - DNA, 354 bp, Acinetobacter baumannii
  misc_feature (317)..(326): n is a, c, g, or t
atgaaaagattggttgatattttcattgctacaatagccttactccttctatctcctatttttttaatagtgggttataaggtgagaaaaaatttaggttcacctattttctttcttcaagaaagaccaggcaaagacggcaaaatttttaaaatgattaagttccgttcaatgaaagatgctttagataagaatggaaatcttttgcctgatgaggaaagaatcacgccatttgggcagaaattgcgctctactactctagatgaaatgccccagcttattaatgttttaaaaggtgacatgagcattgttggacnnnnnnnnnnttgttggaccgcgtcctcaacttgctga

SEQ ID NO: 66966 - DNA, 285 bp, Acinetobacter baumannii
atgagcaaagttattggtgaagttaatttgagccctagcagtattgaaggtactccggatcaggtagctgttcatatttttgaaaaaatcatttgtccaagtactgaggagcttctcaaaaataatcctgaggctgcaaaggtttttgcatatcacatttttggtttagcactgtctcaactagcagagtttcattcaaccaaaagtctagataaagctgtaactgttactttgcataaccttttgcgccaactgaacaaagaacgtaatgaattgaaaaattaa

SEQ ID NO: 66967 - DNA, 180 bp, Acinetobacter baumannii
atgaccacattcaaagattgcagcaacaaataccaatatcattgggtagaacttgggacaacaaagccaacttacacagcgattgccaaaaatgaaaagcaggctatgaaaattatgcgtgagtttcttaagaaaattggcaaagagaacattgagcttgtaagaattttggagatttag

SEQ ID NO: 66968 - DNA, 900 bp, Acinetobacter baumannii
atggcgaatgaaaacaaaataacggcagcgtttgtacaacagtatcatgacacgtacgaagttgcctcaatgcaaaatgagtcacgactccttaaaacagttgtgaatcgtgggaaaattacgggggaatccttcactgtaaacgatatgggccaagttgaaatgtcagcttcaggtgcacgtttcggtgatactacttggaccattccagatgcaggcgttcgtacagcgcttatgtcggattgggacttgtttattccaattgaaaaccgtgatattccaaaattaaaggcacatccaaatgacaagtatatgaaaaacttagtcagtgcccgtaaccgtaaaacagacgacattatttaccaatctttagtcggtaacgttactcgtactacagtggacgatgcaggtgccaagactgttgcacaagtagctttgcctgctgatcagattattctttctggtttcggctccctaaaagagcaattggtaaaagctaaatcacttttccgtaaaaacgaatgtgatgaacataatggcgaagagctttatgtgctttatacatctgacatgttaatcaaaatcttagcggacactgtgttcatgagtgcagattacatggctgtaaaaatgcttcaagaaggtgctgtagcaagtaagtggttaggtgtgaactggatcccttacgaaaaacttaacaatggtgctggcggtgctacagagcgtcgtacagtgatgtatgcgggaactgctgcacactttggtgatgcagacattacaggttttgatatttctactcgtccagacaagaagaatatcaaacaggttggtggcgttcactcatttggcgcggctcgtgccaatgagaagaaagtggttgctatcgacttcttagtgtaa

SEQ ID NO: 66969 - DNA, 561 bp, Acinetobacter baumannii
atgtctgtgtctaatgtgattatttgcaataatgctctaagccgtattggcgggcgccaaattgctagttttgatgaaaatacagagttagcgcaactctgccgaaataattacgatattacgcgtttatcgttgttgcgtgctcacccttggtcatgcgccaaaaaacggcaaatcttatcgccaatttctacttatccaagctttggctatggccatgcattccctttaccaagtgattacgttcgtgtcttagcagtaaacacagagcgctatgaaatagaaaatagatacattcttgctgatactgaaacaatttatcttgaatatatatttgacaataaagttgagcaaacttgggattcaatgctcattgaagctattactttaaaaatggcctatatcctatgtaagcctgtcacaggtagttctgctgaacgtgatgctttagaccaagaatttgcccgtttaattgcagttgcgaagaatgtaaacggtcaagagcgcccaagccaagacgttcaattcgccgaatcaagttattatgaggagcgcttctaa

SEQ ID NO: 66970 - DNA, 1971 bp, Acinetobacter baumannii
atgcgaattcctatttctcgtggtcgtgaagcgccacaagctcaaatgcaatcttttacgcctaatactggcttgtctgaaatcggccgttctattggtggggcaataaaagaggagcaagacaaaaaagacaaggcggaatttgcattacagtcttctaagattggtgcagacattagtgtgctggataatgatctgctcatcaaaatgcagagtggggaattaacctacgataatgccgtaaagcaaagacaggaaagccttgagtcaatcaagacgcagtataaaaatgtggtacctaagcagtttgagcaaaactttaataattactttgaacagcattcttatcagagtgcctctaagtatttacctatagctcagaaagcagaccagcaacaaggtctggttgaaatgaagagcatgaccagtaattatctgaaagatcgtaatgcgacagaaaaggatgtgtttaacggtctaacactatacgcccaatcaaaaggcttgccagctgcatatgttcagagtgaattcaatgagtacaagaatcaacgtgcttctaatgatgtcacaaccttctacttagggaataagtcagataattctaagcttgagcagatggtcgatccagaagctattatcaagcaatatcctaatttgactcaagaacaggctgtttactggagtggtcgtgcattaacccagattgatcagaataaccgtgcggctgcattgcagcagaagcagttagaagatgatgccaaagacgctgttaatgagatgaaggcggatattgaaactgggttaattccaagtgagacagtaattaagtctcgtttggcacgtgttaaaggaactaaaaaagaatctgagtttgttcagtatagcggagctttggttgaagtccagcagttcatgagactgggagcggatgagcgcgaagcttacctcagtaaaaagcggtcagaggctcaaaatacggcgcaagataatgctaaagacgtgagctggaagttaaaccttctgtctaaagcgcatgagaatatgctgaattatgagaagaataactcatctctagcatattcaattaagactgggcaggagttaacaccagtaccaacagcctcaattattatgggggaccctaaagcggttgcggcattatccaaaaatattaaaacgatccacgctagtaatattattgacggtgtaaatggttcacttaatccactttctactcaacagcaacaagaattgaaggattattggagtaaggcaaagcctggagacaagcttactcttttgaccaatctatttgcagccagtgcaggcaatgctaatgcagcgcgagacatgattaagagtgttgctggtgatagtggggcttatcgtttagcagcttctttaggtcgcagaggattgaatgatatcgcagggcaaattgtcactgggcaagatctgctggataagcatcttgttaaagtggatgacaatgccttaaggcttcaaacagctaattatctgtacggcgttacgaccccaggaaaacctgattttgagatttatttagagtcagtcaaagccaactatgcttatttggttcagaaatcagagaaagtggctgattcaaagggaagcatattaaataaaaccatagacgaggatttgtttaataaagcgattctcaatgtaactggtggcaaattcacttcagggggattctttggaagtaaatcggtagtgttgcgacctcatactgtaggtgaaaaatctttccgtgagcagctggaaacctttaactctcgtaatgccagaacctacggcgggtctgataaagacttctttttggatctgcctttagagcaagaccctaagaatccatacgtctattacttcaagaatggcaccaaatacatcatggatgccactgacaagaaaagacaaaaacgtttagcttttacggttcgatga

SEQ ID NO: 66971 - DNA, 2631 bp, Acinetobacter baumannii
atggattttttagcagatgacgaattatcgttaaatcaggatgaccctcgctacaaacctaaaagccaacgtggggcattaagtgatggcgcactgggtactatttctggtgtggctatggggactattgaggcggctactgcaccggatgccttgattcgtggtgataagaaagcagcggcactaagagcgcaaaaccttgagatttttaagcctgatgatcttgggggagtgggtgagtttacctacggcctgaccaaagacttcacacgtattggctggaacgccgccactacactaggtactggtggtgtacctggtttagctttaaattcaggactttttggataccaaacttatgagactgaaaaggcagacttaatcaataaaggtgccgatgttcagactgctaaagcagcaggtgccatcaaaggtgtgactgatgcgataggttttgcagttccgactcacggtgttgcaaagtcagcattggcagatgcggtcgctactaccgctatagccactggcgcaggatcggcaggtgattacctagaagggaaatatcttgaggatcatcaaaataaggcagttgctcaatatggagaatcactgaaagaaaatgccttaagtccatccactttggcagcaaacggcggtatggctttattactaaacctttgggcgaataaagggaaattacgaccagaccaggtcaaagaacatagcaacgtggatgctatgaatgatgcagctcatattcaagccaatgtcgagcatgcagaaagtgtaaacccattcagtccaacaaatgcaaaagaagctaattcgcactttgcagcattggatagtgctatggaaagcgcgctgaatgatgaactggtcaacttaaaggcccctgtaactggagcaccaaaagcaccgaaggaaattaccaagccattaaacaatgtgatttcaggtactccaaaaggactttcaagaccagatcctataagcacagagaagcatacagctcaggccgttaccaatcctatattggataaaaagccatgggcaaaggcgatagctcaggaggcttcaagccgtggcattaatccggttgatgctctggtcatttctcatttggaaactggtggcacttttgatccaaagattcagccaccaatcgataaaaagacaggaaagccaatatcatctgctactggtttattccaaacccttgatggcacttttgcccgtatgggaggtaagaataagtttgatggcaacgatcagattaaagcaggcttaaactactacagacataactccaaggttttccgtagtcactttaatcgagatccgagcggtctagagctctactatatgcatttctttggtgagggcggtggtcctgtttttatgaaagccaaagacgatgagctttttgttgatgtagcaacacgctggagtaagggctccaagaagaaaacagctcgtcaaattgcagaaggtatcacggcgtcccataaatttaatggcatgactgtaggccaggtaaaggccaagtatcaaaagcgctgggatgatgtagccaagctgtatgaaggcgtaggaagtctttctgatagcggctctacagtggtaagaggaagtgaatctgagttcccagaatttgaatctgatatcgctgcaccaccagcctataaatctcaaaccgatgctgaagttgaggcaatgccatttgtactgactactgatgagcatagtgtcaaatcactccaggaggagtttgaagcgctgtcctcaccattgaccaaagaggatctggagtacttaaaggctacggcgcattaccaatattcagaaggcagtgcctatcgagcgccgtatgtagagccgcagataaatctatctggtccaagtaatagcgccacccgcacattggatacattggattctgacctccagcacgtgatgccagaagagcagcgcgttattttggctgagcctgaagcgaatactgtcgatattaacagccgtcaacctggacaggatattcaacaaaattcaattactgcaggagtagataattgggtttcaaccagatcgccgaactacctgaaacgagagcaagcgctggatgatggtcgggttattcaagagctgcataacaaagcatccaatacaacattccaacgtgaaatcaatcaggatggctctatcagtcctgtgaaggctactcgaaacggaagtgacctgtttgctcaccctgcgaatgggaaagctaatcgccctgaactaacagccgtccagcacaaggcagctcaggcattggagcgcgaattctggaagccaggaaaatcgaaggtcgaggatgcaccggatttaactaaagccagtaagggtgagtacggatcatttaccgagactccagacgggcgtgaagcggtttcaattctggaagcggatccagacatggaagtgacatttacccgtttagacgagaacgggaacgaggagattgtgacaatgtcctcccgggatctactggactatgtcagagagcaagaagaaattgcgaaagatgaaatccaggcggttaaggcattggcaagctgtgcattaaaatttgggagtgaagcagcatga

SEQ ID NO: 66972 - DNA, 567 bp, Acinetobacter baumannii
atgattgtgcttattgctatttgcctaatggtaattgcaggtgtcctgttagctttttattttaaaagttaccctgtgaactccagtgagattggtggaaaaattactaatgctaaagaaaatctgttaaggccaaagcctatacgttttgagcgatatgtagatttgcaacagtatgtctataataatatagactgtgagcttaaacattttaatcctttagttgggaaggtaagcagggtttattcaaaagaagaaaatgcacaaattgctatattaactggggatgttgagcctattaagatggttcaggccaagttattaaccgatcaaggtgtaatagatgtggaattatttatcccaaaacttgatgctactgtaagtattgatgatttaattatcgctattccacaggaactacctcccttgcgatttggtggaggagttgacaagttagcagataaatttgcttatattgcttcagggacaatagagcctatataccttggcaagaactatggatggaagccaaaggaaatatttattgatcctaatgcaaatagttag

SEQ ID NO: 66973 - DNA, 2172 bp, Acinetobacter baumannii
atggcagtaccagaacagacgccatataaagaatatacggcaaatgggataactactgttttccctttagattttgatgtgctagaacaggatcatttaattgttcttattgatgatttagagcccccagttggctcatggcatttagatgcagctaaagatgcagtggtttttaatagtgcccctgtctcaggggctattgttaaaattagaagggatgcccctttctcaagaactactaattatcaactttatgatcgatcttttttgcctgatcctgtaaataaagactttgatgcgatttggcgaaagcttcaggaagttggtgtttctggttggttaataagtcaagaaattcttaaacaaggcgtttcattacaacaactcgaagacttcacaaatcaaatttatgacaatttaaataatatttctatatcaaaagaatggtttgctgaatttattgcagacggaatggaaaaccaaaagcaaattaatgataaaacgacacaaaatgtatcaaatattgagagtttaaaggaactgattgttagaaaaaatggacaaaaagtcctagttaacaatagatatgtttatgaatataaatcagaagctgaaaatgcaattgatgacatttattctattttaccagcaaatggtattggccgttggatattgcaaaagccagtaaatctttttgcttctgacttctgtttaacttccattcagtctgcattgagtcaatcagtaaagttgcagatggttaatgatctatctgttagttttaatgttccatttattgtagatgatgaattcatggttgctcctgttgagtccaaccataacatttgcttttacgttcgaagtaataacgacattactttcacgcctaagggaaactttaaaatcataccaaatgattttacaacctattcaatcctacatattgaaaacattgagaactataaagttctgttcccgcaaattactggtgatagagatcagcatttagggactgagggtgaatggggatatggaatagctaactaccaatccaaaaaaggttacatctatcggccaaaagttgttaatacttggggcgatggaatctatgttggtcgtcgctggggattgataaccgatgatactccaacagatattactatttcagaacccactgtcttaaatgcgggacgaaacggcatttcactcagtgcaggcacaagagtaaacattttgatgccttatgttttcggggtgaagggtaaagcacccgaggcaggtattgatattgagccagaagctgccgaggggttgccgaaatcacatctgaaagactgtattattacctctccaactatcgaaaattgcaaactcggcttggttggatatttttttccaaatgattctacatatgaattggagatttcaggtgtcacaactattaagagttgtgaacagcctcttgtactttgtgcaggcggagcgaacaatcaagggtacattgatattaataagatagttctatctgatttaaagggcaacacattacttcaaaatgcttggcatcgaaatggtagcttccgttgtacgatcaaagaactggtaactgataaatctttaccaatagtgatgacaatgaacggagcctttaatactggcaaacttggtcattttgatatccgtaaaatcattaacaatgaccctagtgggaaaatagggtattacgttccgacttcagtgcagaactatgaagataactcatcttacatgttcgaagatccaaatcgtgcttacatggattttgactttacaactcatttctttggcaaagattttcaatcaaatgtcattacgctacatactggatggacggcctcttcacgaaatatgtcaaatattatttggcaagatccttctatcgatacgtctggtaattctgcaatttatattgctacaaacaatgactatcgacgtttaaaagttggtcttgcaaatacaacaatgattgttggtcaaggatgcaatataactggtcttcgaattagaaaggcagatggtacttattttacagaggctcattcgcaatttattggcgcatggttggattttcaaaacaatttaaatggtaatacagaagtgtttggctcatatggtaactggactttcacctag

SEQ ID NO: 66974 - DNA, 711 bp, Acinetobacter baumannii
atggctagatgtacagcccctgttcgcggacatagttcagcagcagctgccgctgcttgtcccgcatgccgtaatcgtagtagttatcgttatagcggctctggttcaagctattcatcaagaaatagtggaagtagttacacaggcagtagttatggcaacagtggaggaactagtagaataagtagtagttcaaaaccacgttgggcaagagcgggttcatctacttcgtacacatctgctcaaataatgtcacttacgccaatccgccaaaccgttgaaatacgagcagcagaacagccagacctacgtgatgttttcctctgccatgcatgggatgatcgtcaaggcgctgccaaagagctgcatcaattacttgtagcatctggtgttaaagtttggttcagtgagaaggatttggggcttggtgtaccaatgatgcgtgcaattgataaagggttagcaaattctagaatagggcttgttttagtgactccagcacttttagctcgtcttcctaaagaaagtgttgcagacaaagagctctcgacacttttagctggtaaccaattaattccaatcgtgcacaatacaacttatgaagcactccgtaatgtcagtcctatgcttgcttctagaagtggcctagacacttcagaggattcgatggctgtcattgcagaaaaaattgctgagctagttacaatttga

SEQ ID NO: 66975 - DNA, 447 bp, Acinetobacter baumannii
atgacaaaatttttaacggctattgagtctggaatagaagcctccttggataaagaaaaaaatattaatgaaatattaagcatggttaatcaagttaaacatgaagtagaaagtttttctaaaggtaaagttacactagaattagcatctccttacgagggtttaggtacgtttttaaaaacaatagcaattgttgaacataacaaagtcaatagtggaacagacaaacctgctgataaaattttgaaggctgtcttggtgagtgataagtcaatttcagaacgactaactgtaattgaatttggtacgcaaggctatccttgtacaattatggttgatggtgacgaattatctgcgggagattctgaaggtttggaaaggatatttgtcagacttttaggctcgcccgtaactggtaaaaagttaagaaaacttgttgaattataa

SEQ ID NO: 66976 - DNA, 912 bp, Acinetobacter baumannii
atgaatgattatatttatcccatattgtggtggaatactagcttgtctcctcctattagttctaaaagaggggttgctaataatgataaaaagaagttagtagcgcttgtattagaaaaatttatgaatattggatatgaatttatttgcttaggtgaagttagccaaagcgacttagatttttttgatatagaaatttctccccaatcgcttgggtattattgtgctaagggagttgaaaaatctggaagagtttattttgatacatgtatttattataaaaaaacaaacatgctaataaggcatggaaatacagatgttaaaaattttgaaatgtactcttcaactagaacttttaaatatggtcaaaaatatactttccagctaagtctaggagatgttgctattatttatctttcgcattggcctagtaagaggaatgatgtatatctaaaattaacatcaatagcagaaagattgaggattgatgttgaagcagagctagccttgggaagaaaggttataatgatgggagactataatgtggaaccttatcatgatgctctagttcatcatttacagtcgtcgcgagaaaaagaattagtgttaaataaagcggcagcaagagtgttatataacccatgctggaaatttctatcatctattcaaaacagttcagaagtgatgaaagaagggacttattattatccgtcaggggcatttaatcgttggtacactatagatcaagtattattttcccatggttttttagttggagattgggaattaaaagatgaacatgtcaaaatcattgatattgatttattaatgacagattgtaaaaatggattaagctctaatgtatcagatcacttaccaataagtgcaactttaacaaggaaattaccatga

SEQ ID NO: 66977 - DNA, 312 bp, Acinetobacter baumannii
atgaaaaaaatcagtttggttattgcagcgtcaacgatgagtttatctgtttttgctgctgcaccgataacaaataaaagcccggcaaaagatcaatttagttatagttatggttatttaatgggccgtaataatactgatgcgttaacagatttaaatcttgatattttttaccaaggtttacaagaaggtgctcaaaataagaaagcacgcctaactgatgaagaaatggcgaaagcaattaatgattataaaaaaacattagaagctaaacgctcaggctggtgcagcttttctggcagaaaatgctaa

SEQ ID NO: 66978 - DNA, 273 bp, Acinetobacter baumannii
atggtaagccgtatctataaagaaggaatcaaatataagaagtgcggcgtagtactgacatgtttagagccgaagtctggccatacttatgacttgcttactgactttaaacaaatagagaaaaaggaatgtttaatgcaggctatggatggtatccatagtaagtttggaaagaaaaagattggagtcggagcttgttttgtgccgggtcgaaactggtcgatgagaagaaataaattgaataaaatccctttacttgaaatgaattattga

SEQ ID NO: 66979 - DNA, 1266 bp, Acinetobacter baumannii
atgaaatctttaacttcatatgtatttattatttgctcttttgctataactttgtgtatggctagttcatattcatcttctaaaattgaagaattagcaaaagcaaaccctacagaatataaagcgtcatggtttgcaaataaaaacagcaataagttacaaactaaagagctacaagctggctatgattatgctacttcaaagaaagttccctttataattgatggtatttactatgttgatgggcaggctcaaaaatatgattcagcacaaaatagtaaagcttcactaatactccgctcaaactctactttaaagtttgaaccaggtgcaaagttaattactaaaccaaataattatagttcttatacaacactagttgcccgaaatgtctctaatgtgaatattatatcgcctgtacttattggggatagagccagtcataaatattctagaaataatactcacgagtggggatacggtttagctatatatgatagttcaagaaatattactattacaaatccagttatagaggatatgactggagatggaatttatattggacgcgagtggggtagtgccaaagataatccgccaaaaaatgttcagatctcaaatgctaagattagcaaagtaagacgcaatggaattaccatagcttcagtagatgggttaaccattaaaaaaccaattatctcagatatatctgataaatataatactgttgcaccttcagcagcaattgatattgagccagaagaatcatcaaaaacggaaaaatcatctattaaaaatgtagttattgattcacttacagctattagagttaagtcaccaattcaaactaatcttactgacaaacgtacagtagatgttaagttcactggtattacaaatttaattgatagcacttcaagtgccttgattttcgcttatgataataccttagatacaaaaagtattactggcgggataacaattgataatcttataattaaaggtagtgaatttgctccaaacttatctttaaagcaggacaactttaggttcaatataaaaaaccttagttctgaaaaagatatgacggtttacttgattggaaacactaaagatattagtaaatataaaggcttttacatacaaaatattgactcaaaagctaaaataaaagcaaagtataattttgactatgcaactaagaagccacaaaaattagagaaacccaaatatatgataaattatcctattgagattagtcgctga

SEQ ID NO: 66980 - DNA, 231 bp, Acinetobacter baumannii
atgcatattagtattggcagtgatttagacggtgaacttgtaaataaccgtgagggtacattctttgaagccagtgagaaagattctatcaagcaatcaacctacaaccgccagagctatattgtagaatggcaaacttatcgtttttggctttgtgctgaaatgccttatgttgaaacaactaaaatcgctaataactatctagctgaaaaatacccatatctttcttag

SEQ ID NO: 66981 - DNA, 372 bp, Acinetobacter baumannii
atgaaaaattttatacatattttaatatgggctattcctctaattttggtatctcaagaaaataaattacttttctactctgggatagtttgggcttccatttttgtagcttattcactttattcagctcaaaaacaaaatagactaaattttgagactatagccgtcatttttgttgttgccgtcataccaactataacttttgggtatatctcccacacaaaatatagtggtaaaaaggaattcaaagcatatttatacgatttagattgtgaatatgatcaatctcaaagctatgaagaagaagtttatgtttgtagtaatgggaaaactattacttttgacgagtttaaagcaaagtatggtttttaa

SEQ ID NO: 66982 - DNA, 837 bp, Acinetobacter baumannii
atgtgttctgttaataaagataaatacagcaacataatggaagaaattgtcaatgatatattttactctaatgtatcctacagaggaaaaatagccatagctcgtcaattggcagagattatccttcgaataatccttgattacccagctcaaactaacctaatgttaggtgataagcgaaaagttattccattaataaaaagtaaggatttaaaaaataagacaggggattttctttataaaacagttgacgaactacgccagcttggaaatatgaaaactcacactaaagaacttaatgttacaactaaagaagagctagaccaatttttagacattttatatcgattaatggcatatctttttattgattatttttgtagtaaaaataaattctcagacaatccagatgttggcctcttttcagtattaccaccaataatacgctttataactcttgaaaagctctccgaaatttatccggataatgttttcatatggtataaattaggattagttactcttaaaaaaagtaatattgacatagctatagaatgggttgaagaaaataaagatttttttgaaaatatgtcaacaaatcatcctgatttgaatgattataataaagataactttccaaatatgtatttacttcttattaaaagcatcaaagatgttaaaaagaaaagggatttagccatatatcctatatatgaaacatttgaagagtcagtaaaattttataaaaaattgccatcaaatcctatagctcaagttcaaataccattagcgcctgaaatgaaaagcttgttagattttttattttatggacattaa

SEQ ID NO: 66983 - DNA, 417 bp, Acinetobacter baumannii
atgataagtacagattatgtaccaaagtggtatatctcaccattccaacacgtgcagtacacattagctcgaaaccaaatccatatggatctgttattcgaagatatgaataaggttgatccgttcttatccattgaaggtgcagccgctcaagttgacttctattccgatggggcttacgcagttgtccaacttggcgatacttcagaaagaaaattgatagagatctatggcttgcttttacacgaagctgttcatgtttggcagaaggttaaaaagctcatgggagaaaaagagcctagttcagaatttgaagcgtattcgattcaagcaatcgctcaagatctttttgaaatgttcgaagcaagtgaggttaaaaaacatggggtggaagggagcaaggccgagcagctttag

SEQ ID NO: 66984 - DNA, 363 bp, Acinetobacter baumannii
atgttagaaaaacttttatatgcactggggttttctatttttattgtggttttaattagctgcactaaaaaagttgaaataaaaccacttcctccttcagttgaagaggagtatctaacttcaaaacatgaaatagataagatgcttgatgcattaaataatcatgatgtaccaaatgatgagaagcgagaaatattgtgtaagacatatcccgaggtctacaaaaaacactatatgccagctctactcaagctatcacctgatacatatacagaggaaactttattaagagattttgaggctgtgattaaattttataaacaagcttggtcaattaaatgtagtctatatcggtatatgtga

SEQ ID NO: 66985 - DNA, 402 bp, Acinetobacter baumannii
atgaagaaggttgttttattgagtttggttctaggtttgggaggctgtgcagccacaacagatatgatgaataatcaatacatgtctgtaataccaacatcaacggatctcaatggcttttggacgggcaataatggcccatacgctgtgacttactcattcaataaagatggcactggtctaatgtgttccagttggaatggtaaagattctattgaaaagctaaaagtaaatggtaatgaaattattgttcaatcagggttaaagcaaacgattaaaagtaaaactgactctaaacttgagttaaaagttaactactatggtggaggtagttaccagtacagcccagatccaaacttacaaaatgcatcgccatattgtgagaaagcactgagaaattaa

SEQ ID NO: 66986 - DNA, 3165 bp, Acinetobacter baumannii
atgatggttggtggtgcttattggcttggaacctacattcctgcaatttatgcctcaggtgttgctgtagctacaaaaattaaggaattagctgctcaaacagttacgcaatatgctgcaattcaagccgagcgcgcagctgcagctcaacaagtaattagcactcaaacagttgttgcaaatactcaagcaactttagctgctattgcgtctgagaaagctctagaagtacagcgccttaaatctcaaattactgaaaaaggcagaacagcgacattaactcgtatggctgagttaaagaaaattgaggctcaagttacaagagaattggcacttgctgaagaagcattggctgtagctcaatcaagatcagcagcagccggtgcggcaagtgtagggataggatcacggcttttaggtttacttggtggtccagttggtatcgggattacagtagcaagtttagcagctggatatttattaatgcgagacaacacagctgaagctaataaaaagcttgaagaacaggctcgagttgcagaaaagacagacgaagcattaaagaaattagctggcaatgataaaacaaaggcagttgatgatttaacggcagcattcaatgcccaaaatgaagctttgagtaagtcatctcttgctgtaggggctgcattaattgatatagaaaactatgctcgtggcaacagggaagtagaaaatatttcccaagaagcacgcaaaggaactattagttatgcagaagctatcgagcgtttaaataaaattaagctgccaacagatctgtatgaaaaccttaagaaacaagcagcgcagtacgatgagaattcttctaaagcgaatttatctgctgagaaactgaagttatttggtattgaagtaaaccttgctggtaacaaagcacaaaatgctgctgttcaagtaaaaggaaatactgatgagctaaatagcaatgcgaatgcagcagataaagctgctaaagctcaaaaaggttattttgatagccttcgtactgaagttcttaaatctaatgaagagttggctttattaaatcttggctacagtgaagaaactgttaagaagattattgaactgcaaaaagctaaacaggctgttgctcctccaggcaccactgcaattgtcactaaagaggagatggatttagttgcacaagctcaaaagactctcgatgtacttaaagacaaaaaagatgagttaacagctgccgaacgtaaacatacaagtgaacttgagaaacagcaaaaagtactcagcattaatgcaaaagttcaagctaatgcagcgaagtataatttttctggaattgagtctaagtacaacttgccagctgggaccttgtcagcaatccatatgatcgaatctcgaggtaatgcaaaagcttataacaaatctactggggcaactggtggatttcaatttctggaaggcacagctaagcaatatggcgtgaaggaccgtactgatttagcacagtcagcagagggtgctggcaaatatatgtcatatcttttaaagctctttaagggagatttggagaaggctgtacgtgcttatcatgctggtgaaggtaatgttcaaaagggtaagggtattggcaaatacaacaaccaatactggaaagactttcagggttatatggctggtattaatggctatacagctggcgacatttcttctaaagactttgataagctcattcaagacgccaccaaaatggcagaagaacaggctaagttacgccttcaattggaaaacgatgtagccaatgaagtgacaaagatcagaaatgatcttgctaagaagttggaagatgttgataaagctaattttagtcctgagcgtaaagagcaaattaaggctgaacttcaagcacgagctgataacgaaattgcgatagcacaacaaacacttaaaaccaagttggaagactataaacaatttgatttgactgaggaacaacttctcttagacagtttcaatagaaaaaaatttgttgctgctcatgatattcaattaagtaaagaacagcgtgatgaagctattagttatcttgatcaacaatatcagcatgaattgaaactattgcaacttacaaaagctgctcgtcaggcttcatatgagcaatcaaatttgaaagccttacttgaactaaaacaagagagagaaaagtttgcaacacctgttgggcaaagaccaactctttctttacagtttagtgaaagaaatgctcttggtgaaaatgacaactcgttaattaataaaggacgagatctcaagatgcaacttgaacaaaaggaaatcaccgttcttgaatacaacaaacgaattgaagatgcagtaaaaattcacgaagaaaacaaattaaagatccaagaagagcatgctgagaagtataaagatttggtaaatacccaatatcaagctcaattaggtctttatagtgatttatttacccaagcttcaggagtctggggaaatatgacagcaatgataaaagagtctgcaggtgagcaaagcgctgcatataaagcaatgttttttgttcaacaaggtatcgctattgctcaaggtattatcagtactgaattagcagcagccaaagcattagagctaggtcctgttcttggtatccctgcagcagctgtagttcgaggattaggttatgcttcggtaggtctaattgcagcacaaacaatcgctggcttctcagatggtggttatacaggtaacggccttaaacatactccagcagggattgtgcataaaggtgaggttgtttggtcgcaagatgatatcaaaagatggggaggtgttagcgttgttgaaagcatgcgtcaaagcaaaccaagtggttatgcgaatggaggttatgttactaacaacactgctgaggttatagcaacccgtcgggaggcacgacaatttgatgcgattaattctggaagaattgagaagtctcaacccactgtgaccattatcaatcagacttcggaaaaagtggatgctacctctgaatgggatggtaaggagttaacagttatcttaaaagagtatcaaaaacaaaatgaggcaatggtggatgcaaagattgaaaaacgattccgaatgtctaagcgacagggttggtaa

SEQ ID NO: 66987 - DNA, 255 bp, Acinetobacter baumannii
atgactgaaaaaccaaataaatttgttgaagaaattgcaatacagattactgacggagataaagctaatcgtcttttagttggtaatttggttcgttttttatcacagaaaggattgttagatttggatgaatatttagcatcagttgaagagcttaaaaatgaaattaatgtttttgagaataatgattctgaaaattctattgtgaataaatatctggatatccatattaatgattttaaagagccagaatga

SEQ ID NO: 66988 - DNA, 858 bp, Acinetobacter baumannii
atggtattaatatttgctgcagcattgtgcagtgttctggtttctgtactacttaaaaatttaaagaaaaagggatatcaacccatgcaaatgattgcatggaattacgcaagtgccagcttgctatgttatctgtggtttaagccagatattcagcatatttctatacaacatacaccttggtggctaattgtggcgttaggcgtcattctaccgagtatttttttatgccttgctaaatctttagagtacgcaggtattgtcaaaaccgaaattgctcagcggctgtccgtggtactttctttattggcggcttatttctttttccaagagcagtttaattctcttaaattattagggataggtttgggaatttttgctgttctcttaattttattaggtcatttcaacgagtcttccggagctcagtcaaaaaaagcaatttttgctttgatgagtgtttggtttggatatgccgctgtagatatcttgttaaaatatacgagtagcttaggcctacagtttactttgactttaaatctaatttttataacggcctttgttttatcgattatttatttaatatttcaaaaaaattcagcatggcattttaaaaatacttttgctgggttaatgctaggcgtactaaatttttcaaacattgccctatacgttaaagcgcatattttactcaaagattctccggccattgtctttgcgagtatgaatattttggtcgtgttacttggaatagtttgtggcgtagttttatataaagaaaaattaaaattacctaccatcctaggaattattttaggaataagcggactggtgagtttagccttagctatgaaatag

SEQ ID NO: 66989 - DNA, 219 bp, Acinetobacter baumannii
atgtttgaattaataccaattaatcgaaaaagtaagctgcgagaaattagaattattaaagcctttctaatttttgcatttgtattgtgtcttttaattttatatatcgaatatcaaaagtatgcacatataaactggaaatttgtatttattacctgtctatgtatgatttggggttttgatttaaataaacaagctaagtatttgaaaaataactga

SEQ ID NO: 66990 - DNA, 720 bp, Acinetobacter baumannii
gtgacttatctgtttatttcagatttacacttgtcacctgaacaccctcgactcgttcgagggtttttagatttgttggtacattatcaaaataaacaaacacagctttatattttaggtgattggtttaatgcttggattggtgatgactattcagcgccttggctcgacgaaattgtcgaggctttgaaagtatttaaccaaaaagggaatcgcgtttatttccaagtgggtaaccgagactttgctttaaatcaggttttccttgataagtttaatggtgtattacttcctgatatttattatctcaacattgcaggtcaccaataccgtttggaacatggcgatgcgttatgtactgatgatatttcctatcaaagatttaaaaaaattatccgaaatcccttcctagttgcttttttacgccgcacccccttgagtttccgtacaaaactggtcaatggttttcgcaaaagaagtcattcagacaaacagcaaaaaagttatgaaattatggatgtaaatgaacaagctgttgtctctgccctcacagatgtagatatacttattcatggacacactcaccgtccagcaattcatcaattacaacataaacagcggattgttcttggcgactggcgtgaagatcatgcacaaattttagaaattgatccctcttcacatctgcagcaaatcaaactaactgattggtattattaa

SEQ ID NO: 66991 - DNA, 672 bp, Acinetobacter baumannii
atggctattgtggactggcgttgtactccacttattgcgattgatgacccgaaacttatgattgcaaaaccagcaggtttaacggctgcaacaggtatggatgcgctaacccatgcagttgaagcatatgtatctacggcagcaaacccaattaccgatgcttgtgcagaaaaagccatcaccatgattagtcaatggttacaacccgctgtcgcaaatggcgaaaacatcgaagctcgtgatgctatgagctatgcgcagtacttggctggtatggcatttaacaatgcatctttaggttatgttcatgcaatggcacaccagttgggcgggttctacaacctacctcatggtgtatgtaacgcaatcttgctaccacctgtttgtgaatttaacttaattgcttgtccagatcgttatgcaaaaatcgcagaattaatgggtgtaaatacccacggtctcaccgtaacagaagctgcgtatgctgcaattgatgccattcgtaaactgtcttcttcaattggtatcccatctggcctaacagaactgggcgtaaaaaccgaagacctcgcggttatggccgaaaatgctcaaaaagatgcatgtatgctcaccaaccctcgtaaagcaaaccatgcacaagttgtggagattttcaaagcagcactttaa

SEQ ID NO: 66992 - DNA, 459 bp, Acinetobacter baumannii
atgataaggcttagagactttaagattattacaaaatcgaagaaaagaattaagttgttgacaagagaagaactcattaatttaactgagtattactataatcgttggtattctggcaatatctctataccattacatttaatcatgtggttatctatttatacttgtagacgagaggatgaaagtacacgattaaaattagaaaatttggatcaggttcatcaggaatggctattggaagatgtcaaagatcctacggatcaagaaggcaatgataagtattttcgaattgatcaattggctaacggtgttattgagcaatttgaaaaagatattcaggctaataatttggaagaatatatgccaatgttgagtttattacctatgattattgatagtaaagaggaggaggggtatatacatatcttagaagattatttagataaatattacatatag

SEQ ID NO: 66993 - DNA, 366 bp, Acinetobacter baumannii
atgaaaattgtcgctattttctcaatattattgatacttacaggttgtggtaagaaatatacgattacacctgatctacttccaacagctcatgtgaatcaggagtatagacagcatattcagatttctggaggtaaggttgtagataaaaatgctgaattaactacagatataccagaggatcttggcatcacagtcaagccagaaaatgagttatcgagatacaacattatagaaattaaaggaaagccaaaatatgaaggaacttacagtataagtatttatattgacttttttggcggtggtaataatgaaattaaaaaaactatactctcaaagttgagaaataaatattttaaattttaa

SEQ ID NO: 66994 - DNA, 204 bp, Acinetobacter baumannii
atgtttaacctaaatatctttaataagatctctagcgaagtattgaccatcaaaaatgatcttgagctgaattccgagaatcaactgataactaaatataagacttctacttctgaagattataaaaaagcaattattttgatctttaaagaacgtggctataccaggttagaaataggtcagttacttgaaggccaactctaa

SEQ ID NO: 66995 - DNA, 348 bp, Acinetobacter baumannii
  misc_feature (294)..(303): n is a, c, g, or t
atgcctgcatttttaactgatgattggtttgcgactgtcgaaaaattaactgctgaagcaggtgatcttaatttgccaccagctcttgcgaatttggcaattaatttagtagttacagatgcttctggaaataccgaattagcgttagatgggggtaaaatccaaaaaggtttgtcttcaaatgccaaaactacattaaacatggatgctgaaactttacgtaaagtattccttgagtttgatatggcagctgctatgcaggcattcatgactggtaaaataaaagttcaaggnnnnnnnnnngaacaaaaagatttgtttaaaaaagtattagagcaaaccgcttaa

SEQ ID NO: 66996 - DNA, 660 bp, Acinetobacter baumannii
atgaatgcacaaatcaaagcaccgttaataaatagtgaagacaacatgcaactatggaatcaggtttttattaccgatccactagcagtaaaacctatcactggtaaagcatacaaaggtagctcacctaagccatattggcttattgaacaagctactcgtgtatttggtcctgcaggttatgggtggggccacgacattatcaatcaaggttttcagcaatgtgggcctgaagacatgattcattgggcaatagttgaattctggtacatgaaaggcgatcgacgctgtgctgttcagcaaatgggcggaacaaaggcgatgtacaaaactaataatggaaaaatgattgtagatgaagatgcacctaaaaaatcagtaacagatgccttggttaaagctatgtcatctattggttttgcgggagatattttctctggtcgatgggatgacagtaaatatcaacaagaagcttatgatcatcaccacaacccgcaaccaaatgacaatgactttcaaagcgcacttagagccattgaactagctgtaaatagaaaagcactgggcgagatttacaaacggtttataggtactcaataccaaaaggaaattgagactcaatgtggtgctaaatcagataaagaaggatggtcagcatga

SEQ ID NO: 66997 - DNA, 768 bp, Acinetobacter baumannii
atggataactacaaaatcattaatactcacacaaatgagattatcaaggcccttaatgaccttggctatgtatggacaccaaagaagtttgatgaacaagattgcttgctaaaagcacattggattctagctaaagagaaaggtgaaattgcatattcaagtggcactcatattgattctccacttgtatttacagaactcaccctccctcagcttcaagaccttgttgtgttgaagcggaatgatgtgaaggatgcgactcatgaagatcaatatggtgataagtggctttatttggatgaaagacactatgtctatctaaatgatcagtgggatttacctattggtgagttcttagaaagatatgaactaaaaccaatattgccagtaaaaaaccaagacccagccttgtttagcattgacgatgtttggaaggccttctggaagaatcaaaaggttcaatatagctttgatgatgacaataactggcaagatgatattgaaagtctaaagattgaagatatcaaaagcggtcattatcaattccgcctcaaaccccaaaccatcaagcttgaacttgagctgccgaagccttttgagcctgaagttggtcaagaagtttggtttattgatgacaatagcaaatgtggctactcgcgatctgctgaatatgggagtgacatttactcctactttggctggtggcgcaccgaagacgagatcaagcaagtcgtagagcaactcagaaagatacgaggtgcatcatga

SEQ ID NO: 66998 - DNA, 810 bp, Acinetobacter baumannii
atgactcctatcaacatagatgattttgagaaagactcataccaaaatggtattcgctattggtttgcccatgaatttatggttaagttgggctatgaaaattggatgacatttaaaggtgttatcaccaaagcaatggcatcttgttcaaatttagggattgattctgacgagtgttttattcctgaaaatacaactgatgttgcaggtcgccccttcaagacatatcgattaagtcgatttgcttgctttctaattacaatgcaagcggatgacaagaagcctgaagtacaacatgctaaggttattttgtccgcaattgctgcccaattaattgattctcaggttggcgataatgacattgctcgattagaggcgcgaaaagacctcacggccgcgaataaaatattaacaggtgcggcaaaagctaatggtgtacagagtcatcaattcggcttatttcaagatgcgggctttcgcggaatgtacgatatgtcacttgatgaattaaaaaggtataaaaatatcgacagcaaagcaacagcttatgatttcatgggtttaacggagcttgcgggtaatctatttagagtaacccaaacaactgaacgtcttagatcatcaagtgcggatggtgtgcaagctgcaatgagcactgcaaaggcggttggaaaagaagttagaacaatgatgtatagaaatagcggtattttgcctgaagatttagctatagaagataatgtctctgaggttaaaaagcgacttaaagcaagcaatcgtgaaatgaaaaaactagataagaagaaataa

SEQ ID NO: 66999 - DNA, 783 bp, Acinetobacter baumannii
atgtctaattttatttctaatgcattcatgatgccaaatgaccttattgataagggttatatggcaaaaatgaagggtgcagctctaccttgttatttattcatagtgcgaaaaacacgtgggtggaataagtcaaacgataacatcagcatttcacagcttgttgaaggtacgggctataaaaaagatgcagttctaggtggtgttgaacagttaattacaatgggtattgttgagaaaatctctttccaaaatcgcccatcaaaatacaccctaactgacaatattattgctgtcggaaataccgctagcgataattccgctgtcggaaatacagacactgctgtcgatatttcagatagcaacttgtcggaaataccgacacacaaaaacaatataaaaacaactaatacaaaaacaaatgtaattagtgattcaaaggctaaattttcatttgttgaagcacttagaaaacttggtgcaaatgatcaattaattaaagactggttagctgtacgcaaaactaagaaagcatctaacactcaaacagcttttgaaacttttgaagaacaactttcaaaatcaggattcgatgtaaaccttatccttaaaatctgtattgatcatgactggaaagggtttcgagctacttggttacaaaacattgatcttcacgcttatcaaaatcaaatcgtagagaatcaaactcaacaaatcatccctgaacaaccagcaacacagttcaaaggcgttgctaagaaatttaaggggatggatcaatga

SEQ ID NO: 67000 - DNA, 417 bp, Acinetobacter baumannii
atgactttaaaccaaatccccatagttaaaataattttttctctagtttttatctgggctagtatattaactttatttttagttctttgcctattctttctaggtttatacataattggtattttttattgtaatgttttgataaatatagattttgcaaaaacttgtgctttgactggattgttgtggtcattaagtggagtattgcagttagaaatagctggtctttttaataagatttttgaatattatcgagataaagaaaaaataccatcctatattgttagagaaataattgataatcctgatacacctattaaaacttttataagaaactttctttttaaaaatttaatgttcggtttctttttaattgttattggacatgtttttcagatcatttcatgctttatttaa

SEQ ID NO: 67001 - DNA, 402 bp, Acinetobacter baumannii
  misc_feature (365)..(374): n is a, c, g, or t
atggctatttcaaaaatttctacttatctcatgcccaaaagagagagttatccaaataataaaacagactggcaattagatccttctcgagctgttttattaattcatgatatgcagcgctactttttaaatttttacgatgctgaaagtgaattaattaaaacggttgttaatcatttagttcaactaaggagttgggcacatcagaacaatgttcctgttgtctatacagcacagccttatgaacagccagcggcagatcgagcattactgaatgcgatgtggggaccgggtttgccagcctcaacaatcgatcagcaaaaaattattgatcaactttctcctgctgaacatgacattgtttnnnnnnnnnnacattgttttaacgaaatggcgttatag

SEQ ID NO: 67002 - DNA, 567 bp, Acinetobacter baumannii
atggcaaagcttaaaaaactttttcatgcgccatttaccttacattctcagctgttagaacttattgaacaagaaattaaaaatagccttgctggtaaaaaagcacacatcatcattaaagtgaatgcgcttactgaaccacagctcattagcgcgctttataaagcatcacaggctggtgtaaaaattgatttaattattcgttcaatttgctgcttgagaccacaagttgcaggactttcagagaatattcgagtacgttcaatcgttggtcgttatttggagcatacgcgggtttactatttttataatgatggcgatacaaaagtttattgtgcaagtgcagactggatggaacgtaatttgttctctcgtattgaaacctgcttcccaattgaaaataaaaaattaaagaaacaagtcattgaagatggcctaaacaactatttgaaagacaatcgtcaagcatgggaattacaagctgatggaacatgggttcaatgtcatcctaagccggaagaagaactttatattgcacagcaacacttgatgaacttaactgggtaa

SEQ ID NO: 67003 - DNA, 4827 bp, Acinetobacter baumannii
atgccaacagcaccaaaaactatttctcaagcgaaagcaaagccaagtgtgagaacaaataccggacaggtcgcggtagtacctttaaataaattgtatgccgccgatgttaaagcaggtatgaataaaattgattcatggctaaaaacgaatactaaaggttatgtcgatttaaatacgattaaaagtactcttggcacactgccagtcattggaaatgcaattgctttagtcgatgcaatttatgatgttatagacattagtaaaaaacctagcccagcttttacagattggttgaatttgggactggatgttattggtattattccagcaccgccaaccatggcaacaatgcgaatgagcctaagacctacgttgaatttggttagacaaaaggcaaaaggcacaatttctgatacgattctggtcattcttagcgatcatttaaatgaaagaattgctggggaattagaccaatttgcgaaaaatgcccaaccccttgtcaaccagatgttgcaaaattgtggaacaaaaattacagctatcagtaatgattttgctaacggaattcaaaaagtacttaatggaaaagtatatagctctgctggtaatttaaaaaacgcgcagaaacaattaaataaagttaacttaaataatttacaacgcaaccctaaagcaacgatatcaaatgctgttgatgggctcgtaaatatttggaaagcaggtgtaaaagagcaaataaatactgttgccaaaggtgtatctgctgttgtgcctgctagtgcaacacaaccgatccagaatgcaatcacttctattcgtgtttttggtagaaaagcaccttcatatttaatggctttggcagatccagcgaaagcaatgagtatcgcttggctactcaatgttttgcttaaagctgtacagaagttcaaactaaagggtacaaagactgcaaatattaaacctacacaagtcactgaaaaaagaagacaaaaaccaaacggagagcttgagaaagctaatgttcaagcaaagtcaaagggtaatccgagtgaaactgtatgtgcattaaatttaaggggtggtaaaagcaagcccaaatctacctctggtacaaaaagaaatattacctttgctttaggtacagagtgtttaactcatcaagatgcttatgtgtcatcaattttaagctttgtattaactcggaaatatgcatctaatctttatcaactagatcatggtgagtttggtgcaagatggataacaccgtttacaacccgtattgttccacagagtgaatatattgaagagacagaggaacgcgctggatatttaaaacacttaagtggttttgagtttattggagcagatgctcgtccagttaagttaccaaacctgaaagtaggtgagagtttccataataagactgaagatttttactatagtgtaatttctgaaaaagttcagatgatctcttatcaaaaagaagagaaacacttatttgaaaaatatcaggatggttatcgactttcagccatagaatacaagaatgggcttactttagcagtacgttatgaccatcacttcgaaggtctaagttttatttcagatattattattaaagaaaaacaaaaacagttaattcatgtggcatttcaggtaaatgcttctggaagaattgaagatgtgtggctggttgaaaatggtcaacttgctcgaccacttgcgagttataactacaatgaaaaaggcgatttggttgaagcgattaccgaaaatggagcgagctatcattaccaatatgaccatcatcttttaactcgttataccgatcttacaggtcggggtatgaaccttgaatatgatggtgtcgaaccaacgtctaaggcttaccatgaatgggcggatgatggcagttcagatacaactttacagtgggacgagaatattcgtctaacgtatgtgacagatgcttatggagctgagacttggtattactacgatattgaaggttatacctatcgtattatttatcctgatgggctggaagagtggttcttccgtgatgactttggccgtgtaactaagcatgtagacactgatgcagcggtgactatttatgattatgatgagcacggcaatattgtgtctatgacacaaccagacggttcccttctacattatgcttatgatgaaaaccgtcagcttataggtatggtggatgctgaaggcggacgttggtttaaagaatatgatgcggctggaaacattaccaaagaaaccgacccactgaagcgtgaaacacaatatagttataacggtttaggtttacttacttcaattaaagatcctaaaggtggtactaaaaccttaagttatgacgaccaaggcaatttaattagttatatcgattgttctggtaaagaaaccaaatggacgtacgacaaaaaaggtcgagttgttgcaatagaaaatgctttaaagcaaaaagttgaatatttttatagtgatctaacaattgagcaacgtgaaccagttattaaaggtttacctctaaatgcttttggtcaacttgaaaagattaaacatgctgatggcacagaagaacacttcattcatgatgctgaagggcgtttactggcacatatagatccgaaacagaatatcactagatatgaatatgatgcggcaggtttaattgcatcacgaacagatgcactcaatcataaacttaaatatgagtgggataagcttaatcgtctcaagcgcctaattaatgaaaatggtgccagttaccaattcttctatgatgtcgcaagccgactcgttaaagaaattgattttgatggtaaagaaaccatttataactatgacgaaacagacggaaaccttgttagtagtgttgaagtcgcttctatgcatggtcaagatttaagagatcgaattgcgccgaaagatcgtattcaaaagtttcttttcgatagcatggggcgcttagaacagcgtacagcaggctatggctatgttgagcatgatttagagcaacaattagttgaagaatttgcttacgatagtaatggcaatcttattcaggccaaaaatgctgaaagtaacctacagtggtattacgatgctgtaggcaatgtaattcgtgaacatcatcaagactataaaaccaagaaaactggagtctggaaacacagttatgatgaaattaatgatcgaataaagactgtgcgtccagatggacaaaagattgactggttaacttatggttcaggtcatgttcatagcttgatcgtgaatggtcaagatgttgtaagtttcgagcgtgatgatttacaccgtgaaatcgcccgtcactatgccaacggaattagccaagaacaacattacgatacgatgggacgtttaacccagcagaatattgttaatggtcatgagttcggttatccgtcaaatgaacaagttagccagaacaatgcaattcaagaaacccagcagttgattcaacgtttatatcaatacgataaaactggtcaattaacaggaattaaggatacgcgtaggggaaatatcaattataagtatgacccggttgggcgtttgcttgaggctagcagtaagttaggtaaagaaacatttagttttgaccctgcgagtaacattctagattcatatcatagtcagaaagttcaaagccattcacaaaagctagaggaaacaggctttggttataatcgtttggttaataacgtagttaaagaatatctagatcaacaataccaatatgatgtttatggacaacttgtttgccagaaatcaaccaagggtaatttatatcttgagtgggatgcatgtgggcgactgattaaaagtcgtaatgctgaatatacggcagagtaccgctatgatgcgttaggacgccgtattcaaaaacgaagtaaacatcatcataccggtgatgagcataacatcatttatggatgggatggcaatacacttgcttatgagtcgaatgagcaaattaccaagcattatatatatgagaaagattcatttgtaccactggcacaggcggtttatgcagaagaaatagagcttcatcaaacacctgactgggcagataagccttatagtttacaatgtgacccattatggaaagtaaccaaaactgcaaaagattttaaagatttttggttctatcattgtgaccatttgggtacacctcaagaaatgaccgatcatactggtgcggtcatatggaaagctgaatataaagcttggggtgagtgtaaagcagagagagccaagtcgaatttcttcgaaaatagtgaaattatttcaaataatatccgttttcaaggacagtattttgatgaagagacagggcttcattacaaccgttatcgttattattcaccgtatgtagggcgttttatttccaaagatcctattgggttattgggtggattcaatggttatgtttatgcacctaatccaataggttgggttgatccttatggtttaaataataatcctcttgtaggaatagatttatcaaacaagagtagaagtgaaatagaaaatattttaagtaattctagtgaggtaagttataaaggtggttctcctgataagaagttcatgcaatggaaatggaatgataatggtcaaacagcagtaagactagatccaccagataaagttacattatatgatcatgctcatttatatgataaaaatggaaatccattagataaagatggaaacatagttcctcgcgaatccccagatgcacatattcctattggagactgtaagtaa

SEQ ID NO: 67004 - DNA, 363 bp, Acinetobacter baumannii
atgaagttagaacaaattgaaacagcagatatggatgtgaaaagtataaagatttatggagataagttttatattttattttcagctgtttatgatacatgcttaaaacaatatataaaaaatgtggaattagttttttctaattggagttcatttaagattgaaaagtatgatggtaatattgaagaatataaacaacttgatttacttgaaataaatcagagtaaagatttatttactttaatccagattatacatgtctctgaagatgtagttgagttagagggttttaatgatgatggtgagtggaataaagtggtcttttttaacccgtcgtatagcttgaatattattgatatttaa

SEQ ID NO: 67005 - DNA, 1674 bp, Acinetobacter baumannii
atgaagttttttaaatatttcatttttataattattagcttgttttctgtacaagtttttgctgttacttgggaagcaaatgtcaatggtttattaaagactggttctactcccgatgctgtttgtttacaagctcaagcttctgtttcttcttcttatccaaatcagaatactacttactctcatactttgactaaaaaatcagatcaattttatttgtgtttagtctatgcagcaaataatcatgctggaccatgggattttaatgtcacaactaaggatcctattcctactgaatgtcctgaggttggctatccaatgtatgtatattttgatgcaggaggtaaaattccccaacaacgctgccaacctttaggcgataagttttgtgtctttaaagcaaaacctgattctattgttttaaatcactctgacaaccgtcaatcaactgttttatacaatgtacaaaaaactcctgtttcttcttgtactccacttgatgcaggtcagtgcaataaaaatgatccctatggagggtgttatcaaccgcctaatgatggttgtactcgtttagccgatggctctatttcttgtcccgatggtgcagctcctccaagtcctacgggcacttgtggtggtgctacttactgtaatagaccgcctacaggctgtggtactggttatgtttctggctcattcaatggccaagcgttgtgtgttaaatcttctaatacgggtactggttcaggttctggctcaggtactggtacgggtgatggttctggtactggtactggtggtggttcaggtactggtacgggtgatggttctggttcaggttctggtaccccaattgatactggtactggtagtactaatattaataactctggttccggttcaggttcttctacaggtggttctggtggtggaactacttcaacaagctttactattgatttatcacccgtagttagggctatttctgctttatctgataaattgacttgggtaaagtctgaattggttaatgctgtttctcgtgttgaagataaacttacccagactaatagcaagttagatactactaattctaaacttgattctgttaagtcttcagttgatcaaacaactgctgctgttaatgctaacgctactactgtaaaaacggctgtagaagcgaatacggctgctacaaacaatgttaaatcggctgttgatgctaatacaaactctacagctaataagcttaatgaagtcgttaatgcgattaacaataagcctgttggtggtggtggtggcggaactacagatgttaagcctgttgttgatgctattgaaaaacagactactgattttaaagatatgatgaagactgattcatcagattttgatacatcacagtatgagaaaattggtgatgcttcagacgattcacgctatttaaatgcccagtcagaagctaccaatgcactccagaatttatctaataaattaaccttttctaatactgcatgtgtacaggattttacggttgattttccttattttggttcttttgtagttccaatttctcgttggtgtgaactcttagcactaataaaaatattgatacatctcagtacattaattcttgcttttagaatgcttgattcaacagtgagggctatctaa

SEQ ID NO: 67006 - DNA, 333 bp, Acinetobacter baumannii
  misc_feature (317)..(326): n is a, c, g, or t
atgagccaaactagcaagacagaagacccaattgacttaaaagaaatttttttctcattgattgctcaatggaaactgattgtattatgtattcttataagtctagtctgtgcattaatttacttacgtatcacaccaaatacttattctgttgacgcattggttcaagtagaagatagtaaaggtgcagcttcagcagcattattaggtgaactatctaaaacggtaggcattgaacaaaaatctccagcagatgctgaaatacaaattcttagttcacgtatggtacttagtcaagttatacataacttaaatcnnnnnnnnnnaatctag

SEQ ID NO: 67007 - DNA, 1134 bp, Acinetobacter baumannii
atggctgagatcaatgctcaattagcagctgtaaacaaaaaatctactgagcttagcgatactttaaaacgtttaccagaagtgcaacgccagtacttacaactctatcgtgatgttaaagttaatactgaactgtatacgtcactattaaatagttatcagcaattaaaaattgccaaagcaggtgaaattggaaatgttcgtattattgatactgccgtagaacctattaatccaattaaacctaagaaattaattgtcttgaccttagccattttcatcggcggatttattggaattttaattgcattattacgtaatatgctacgtacaggtgtaaaagattcaactcaaattgaaaatgatttaaatctgcctgtatatgcgactgtaccacgctctcctattcaagagactcgtatgaatatcttgaaaaagaaaaagagtattcctattttagctgttaaaagtagcgatgatattgctattgaaagtttacgtagtattcgtacagccattcattttgctttaactacagcaaaaaataatatcattatgatcgcaggcccgtctcctgaggtaggtaaatcatttatttcaactaacctagcaactatttttgcacaaggaaataaacgagtattactcattgatgctgacatgcgtcgcggctatatgcataaatatttcgatgttgatgtcaaacctggtttatcagaactattaagtggacaagctgatttacaaaaagtattgcacaaaactcaagttactaatcttgatgtgattactcgtggcaagagcccaacgaatccttcagaaatgttgagctctacccagttcaaagacttattagaaaagttccagtctcaatacgaccacatcattattgatactccaccagtgcttgcggtaactgatggtattattatttcgcaatatactggtgtgaacttaattgttgcacgctacgccaagtcacaaatgaaagagcttgaactaactgttaatcgttttgaacaggcgggtgttaaagttaacggctttattctcaatgatattcaacgtgctagcgctggctatggttatggctataactatgcttatgcctataaggcacaaaaagaagactaa

SEQ ID NO: 67008 - DNA, 222 bp, Acinetobacter baumannii
atggaaactcaagttaaagaaaaaaacaaggctatacctgttgctttaggtacttcacttttgctcgctgctggttctgcttttgctgaaggtgaattagaaactggtgctgtgagtgcaattagtggcggttctggaaccttacaaacagtaggtattgccattattggcgtagttgcaggtgtttgggtgatcaaacgtgtcattgcattgatccgttaa

SEQ ID NO: 67009 - DNA, 390 bp, Acinetobacter baumannii
atgacagaaaataaaggtaatttatctggtgaaagtagttcaattttgaaaaaattgattgatatgaatcccgaggatataaatttaaaatatatttttgatcacattagaaattacggtattgcttccacaatgatgattgcaggactgtatttatggaaacatcctgaatctgcatttggcatgattctaatttttagtgaaatttggtctttattactgattttattaggtttatttttaaatgtattaaaccttactcaagttatttgggtgttggcaaaggtgaaaatgccattgggcatctttatttttttaatgttttttatcttctatatagttctaagctttttagcttcttatgctaaatactttatgagcatttcttaa

SEQ ID NO: 67010 - DNA, 348 bp, Acinetobacter baumannii; identical to SEQ ID NO: 66995
  misc_feature (294)..(303): n is a, c, g, or t

SEQ ID NO: 67011 - DNA, 192 bp, Acinetobacter baumannii; identical to SEQ ID NO: 51564

SEQ ID NO: 67012 - DNA, 1263 bp, Acinetobacter baumannii
atgcatgcatgtttacatggtggggaaatgttagacaaaatcgtgatgcacataccagttgatgcttcgctagtcgatatcgatagcgaaggtcggtactgtgtatttggttttgatctgctagaccttggtttaagagttggctcttacgatgtattcaaagacgaagatgggaacgttaaacatcaggttctaaatcatgcatattctaaacttccgacttcttatacgaagatggcttttaagttctttcatgagggccgtacttatccttatgttgaacttaaagctagtcctgcgaagattttgcaagggcacaatgtgtatggatcggattggatagagcagggtgcgcttgaaatgcttggttatctggctgagtcgcatccaacactttacggtatgttggccattggtgaaacggaagttaaacagttagatgctacttattcagcacgtttacgtgatgataaccaagtcgctgatgctattgactttttacgtaatgtaactactcaacatatccgtaaatcaaccaagcaagttacttataagaacactaattattacggttctgaacgttgtaaacgttttgcccgtaaagtttacggtaaatctgctgaatttcagtctcaacttgaagagcaaattaagcttgctaaggcaaatgataaatgtgctcaacgtgttgtagctgttatgtcagatccagatttacagcagtgggttaaaggtctcttgcgatttgaaacaggcattaaagcctacgttatgaaagaactcggtattccgactaatttatttgaacttattcgttatcaacgctctaaccctaattttttacgtgatatctggattaaagcaaacgctcagttatttaaagccctagagggtacagcaatgaaagctactgaccacgatactgtatttaaaaatctctgtaatgtttttggcactgtgacacctaaaggtcgtcaaagttttactaaggctcgtaatgtcttcaatttttactgcgcgttagaaatgaacggttatgaggttatgaagacacgttatggtgagcgtcagtactaccaatatatggctgatttaatagctgcgggttattcaaaagcattcttgcagaatctacatgttgagtctaaatccaacattattccatttcttaaacttgtcgaaattaatttcgaaaatcaagtacctgagaactttaaagaaccaatttctacttttaatcagcgtgaattacgcatcgcataa

SEQ ID NO: 67013 - DNA, 315 bp, Acinetobacter baumannii
atgtctcaaattattttcaaagcaaagctacttaacgttgatttaactacaaatgagaaaggattaaacatgcgtttaatctttgaatcacaacgctatgacaaaggtctcgatcagtgggttccatgttcacagaacgtgaaagtcgttgaagatcatcatcatatgaaagatttctatttatcttataaaggtcgtgaaatctatttaccaatcgaaatgacagcggttgaccgtaatattttttataagacaactggtgatggtaagccgttgcaggttgaggaaaagaaagcgactgagctaaaagcttaa

SEQ ID NO: 67014 - DNA, 207 bp, Acinetobacter baumannii
atgagatatagacgttcaataggtacaatgcgtaaagacgattggcagcaacttattgaaatgatgaatgaatatctaatttatgttcaaaaagatgatagttctagtaatgaaaaaattaatgatgtgaagttgctaatccacaaactacagcatcatatagatctaccagtgcagcaagtttatagttttaatcgctggtcataa

SEQ ID NO: 67015 - DNA, 474 bp, Acinetobacter baumannii
atgtttgatattaagcgtaaatatacaaaacaagaagctcaagacctaagacgatcgcatgagcaaacaaaaggaatttttagtcattcttattcacagtcagtcattgaggctggtgaaaaacaatgggaagttgattatttacgtattattaatggtgaaacaactttagctgaactggaagcggaagccttatccaaatgggataaaaaaattgctttggcttgtcaaattgatcgtcagcaagaaatattcaatgatgcattatccttatttaagcttatgaataaagaacataaattttatgaacgacacaaaagttgtgtggaagatgctcataaaaggctgatgcaggttaaatgtaaatacattgaattggtttggtcgactagtggattgagtacagaaactgtctcttatacacatctccgagcccacgagacaagaggcaatgttttttatttggcgttttaa

SEQ ID NO: 67016 - DNA, 1188 bp, Acinetobacter baumannii
atgctaacgcttattagtgcaacgccaggttctggaaaaacacttaaagctgttgaattaatttatgaatgtttgaatagtggttatgttgtttattcgaatatcttaggcttaaaagtaccaggtgttattcagatttctagccaagaagactggcgtgatctagatcattttagacgtcaaaacattgaaatgcttaaaacacctattgccgttttttatgatgaagcacatgaacatgcagcatttgctgaaaaagacttgttaaagaattatcaaatagatcgatctgattatgatttggacattgatattatcaatttagatgactcactgacagcaacacaaaaaaagcaaaaaattgatgagatcaataggaaatacaaggttgcacttgatattaaaaaggaacaaattagagaaattggtactgccttatcaatgcacaggcacttcggttttgatattttcttaattacccaaagtccaaaaaaattagctgctcatgttcttgctgatgtcggaacacatttacacttgagacgagtttttaagatgaaaagggcaacgatatatgagtttccagaagcccatgcaacagtttcaaaggctgttagggatgatgctattaataaaacgatttggaaattcccaaaacatttgtttggtacttatacatcaacagaggttgatacccataaacaaaaaattccgttgaaatatattattattcttgtattggtttttattggtattccatcctacgttgcaagatcattttggtatgaccctttatttggacataaggacaaacaagaatcaccttcaaaagttgaagccaaggaggctcaaaaaccaaagagtaatattcaagaaatgtcgaaaacaactcaaaatagtccaaaagaagatttacaacaaaatgaattacaaagaattgcgatgattacagaatcatcaaatgattgtatagctagaaattcttatggtgaaatattagatattcctattgataaatgtcgccaattatcatcaaaaaatagtcgtatgcaatttagtcgttataaacgtgaaaattttacagaattgcctaatagtcattcaaatactgaacatgaatatgctcaaaatatagcgactaataatcaatctgttacatacaaaccagcacaatacccatcaatgtaa

SEQ ID NO: 67017 - DNA, 1164 bp, Acinetobacter baumannii
atgagtaagaatataacctctattaaaaaattaaatgtccttaaatttcgggctctcaataatctcgaaataaattttgggcaaagagtcaccgtaatctgtggcaaaaatggaacagcaaaatctactattttaggtttattagctcaaatctttagttttgaaaaagattatattaaacaaagtgatctagattttagtccacttcatatgaaatcttttaaatcccgatttagtgatcattttcgcctatcagaacaatttgactttgcaggtgacttagaagcttcttatgaaatctatgatgcttactttaaaactgatatttctccaaagttaaagttctataagttgcaagatagaccactaccacgagctattgttagaaacaacataacaacaaccacggttacgaatgaaagccgtaatgtaactcatccagttatttatttaagtttaaatagactccttccaattaccagtcgaacagactatgaaattaaagatttggaatatttaaataatcattatcaagaatttatacgtgcaaataatcagcttttatgtaaaacaacagggacacaaataacgtctacaactggatcattagactctgtagtggtgcatggtgataactataaccatgaagcaatttctgctggagaagataatgctgggcaaattattcaagctcttttctcatttaaaaagttaaaagaagagtatccagactatcatggtggcttattattaattgatgaagcagatgctgggttatttccaggtgctcaatatcaattaaaagaaatatttaatcgttatgctaaagatttaaatatacaaattgttcttactacacattcaccaattttaattgaggaatatcataaattatcgcaaacagaccgtaagaacttcaaaacaatttatttatctaacaagatgaatagaattgaggtttttgaaaatttttcatggtctgatatttttgcagatattagtgtcagaatgaaagaaattagtcgtcaattaacttttcccgagactaatgtttactttgaagatggtgaagctttagcttattttaaaacccttaagaatcatgaacggaatttctatggggtgtggaaactatctagaattaattcgccaaaaagtccctga

SEQ ID NO: 67018 - DNA, 327 bp, Acinetobacter baumannii
atgatcttgtctgaagcatccttttcggctttgactttggcagctgatttttcatcggcagtcattttagatttttcaatctcatctaatgccttttgcagatctaaagcgactttcttttcttcggatgcatatttataccgaatatcagccagcgctttagctgcttgttcagcttggcgtacagcatcggacttaccctgctttgccttctctgatttaccaccatcaggattgagtgccttattttgtccgataccagaagtaacccctttactgccacctctagcacctaattgtgcattctgtatgtcaatctttgcctga

SEQ ID NO: 67019 - DNA, 408 bp, Acinetobacter baumannii; identical to SEQ ID NO: 55380

SEQ ID NO: 67020 - DNA, 246 bp, Acinetobacter baumannii
atgaagactctaaaaatgatttatggtatctcccttatgaaaaagttcaaatctccagatgttgttaaacacgttaatttaccttttgaatggaaggttgttgagtcaacaaaagagtgggtaaaggttgaaagaaagaatgaagaagggcaaaggattgttgaagaattcgcgcctgaatttctggaactagtaaaaaaaagacctagtttggtatcgggcctaaagccagaagattttcactaa

SEQ ID NO: 67021 - DNA, 219 bp, Acinetobacter baumannii
atgaatatctgtgttggtggtgagcttgacgggcaaaagatagaaaaagaagggcgattacttcaagcttctgaaattgatccatcatttgaaaccgagtactacaagcagatttttaaccgcgacaacatcaattatcaattctggttgcctttaggatgtgatctacatgaaatgtctaaagtagtgttggatattttaagagcacctaaaaactaa

SEQ ID NO: 67022 - DNA, 897 bp, Acinetobacter baumannii
atgcaattagctttagtaaataataaacgggtagaagcttttgaaggggggagaggaaactgtccaatttgtggagctgtaacaattgctaagtgtgggtctaaaatcatcaatcattgggctcatttcaggctaaaggattgtgacccatggtgggaaaatgaaactcaatggcatagagattggaagaataattttccattggaatgtcgtgaaattagtcatacagctccagatggagaaatacatagagcagacgtaaaaacacctaccggcataatagttgaattacagcattccccgatatctgataaagaaagaatatcaagggaagagttttataagaatttagtctgggttattgatggagaagagtttaaaaaaaatttcaagttctgtcatatactaccagaccctaattcggcattaggtaaagatttagtttggtataaagcaaaacatgatgatttgatccctgtgaacgaaaatgggatgttctatagaatttctgagacaagagaatcgtatcccgaaataccagagataagtaaaagcaatcttgaagctatacgggggttagttgagggtcattctatacgcaaaatttttaaagaagtacaagataatcatattggacattatcaatttgattggaaaaaacctagaagtacttggctagaggcaaagtgtccagtgtatattgattttggcggatctttcttagctatgttagaaacttatgatgaaactggtctaaagtgcatcagatatatttctaagagtaaatttatgtatgatgtaatgcatgaagataaggtagaaaatattgcaaaaaagtggtttaacataaaagaatgggtggatgcccaaaattttaattttgataaaaatggataa

SEQ ID NO: 67023 - DNA, 339 bp, Acinetobacter baumannii
atgagcatatcagcgaacataaagcgcctatgtaaagagttaaacataaatcaaaaagaactagccaaattagcatctttaccaccaagcacgataagcagcgcacttaaagaaggtagcgaccctagagcatcaacaattaaaaacatagtaattgctctgggtgtaagctcggacatgattttatttgatgatgaagaactaggaataaacggagacttaaaaatactatttagagaggtcgaaagatttgaaggtaaacaaagagaacaattaaaagatatgttaaaaatgatgattgtacataacaaaagccaagaactaatgaagcaagattaa

SEQ ID NO: 67024 - DNA, 1242 bp, Acinetobacter baumannii
atgttagataaaatcgttatgcatattcctgtagatgcctcgctagttgatatagatagcgaaggtaatcattgcattttcggttttgacatgcttgatcttgggcttaaaaaagttggttcttgggacgtttacaaagatgaggatggtaatactcaacatcgtgttttaaatcatggttatgagcggttgccaacttcatttacttctatggcttttaagtttttccatgaaggtcgtttttttccacatgttgagcttaaagcaagtcctgcaaagatattgcaaggtcataatgtatacggaactgattggatagaggagggtgctttggaaatgctaggttatttagctgaatctcatccgaccctttattcaatgttagcaatctcagaaactgaagttttacaacttgatgctacttattcggctcgtttgaaagatgacaatcaagtagctcaagctcttgattttatgcgaaatatgtcttcaagacatattcgtaaatctcaaaaacagatcgtttataaaaataccgtttatttcggttctgaacgttctaaacgatttgctcgtaaagtttatggcaagtcatgtgagtttcagaatcaacttgaagaacaaattaagcttgctaaagccaacgataaatgtgctcagcgtgtagttaaggttatgtctgatccagagcttcaggcttggactaaaggtcttcttcgttttgaaactggtattaagcgttatgttttaaaggaacttggtattcctacaaatttatttcaacttattcgtcatcaacgtactaatctgaattttttaaaagacctatgggtcaaagccaattctgaactttttaaagcacttgagggtcattctatgaaagctcttgatcatgattctatctatgaaaacttatgtaatgttcataaatctgtaactccaactggacaagtccgttttacgaaagctagaaacctttttaatttttattgtgctttagaaacccatggctttgatgttatgaaatcgcgttattctgaaacgcgtttttatgcatattttaaagatttgatgttggctggttattctaaggcttatcttcaaaaccttcatattgaatctaaaaataacgttattccgtttatcaaacttgttgaaattaatttcgaaaatcaagtacctgataattttaaagagccagtctctacatttaatcaacgtcaattaaaactcgtatcttag

SEQ ID NO: 67025 - DNA, 315 bp, Acinetobacter baumannii
atgtctcaaattatctttaaagcaaagcttcttaatattgatctttctacaaatgagaaaggcttaaacatgcgtttggtatttgaatcacaacgctatgacaaaggtcttgatcagtgggttccatgttcacagaacgttaaagtcgttgaagatcatcaccacatgaaagatttctatctgtcgtacaaaggtcgtgaaatctatttaccaatcgaaatgacagcgatggaccgcaacattttttataagactactggtgacggtaagccgttgcaggttgaggaaaagaaagcgactgatataaaagcttaa

SEQ ID NO: 67026 - DNA, 663 bp, Acinetobacter baumannii
atggcagactctccgcgtgctgtgccggttcggttggcatggcggccagttgcatttcgaggctggccagggcctcgcgccgacgctcgacgagttgccgcaacacggcaagctgcgcagacgcaccgtcaccgtccgcagcatccagcgcccggcacagccgcgccagtgcgtccaggccgatacccgcttcgaaggcagcccgtacaaagcgcagccgttgcaacgcggtgtcatcgaacaagccgtagccgcccgtggtgtacgcgaccggccgtagcaatccgcgcagcaggtagtcgcgcacgatatgcacgctcaccccggcatcaagggccagccgggacactgtgtaggcgctcattgaacacctccttttcctcatccggcgcagcacgaaagctgcttcacgtccttgctgaaggtctgcgccgcgagcttcagcccttcgaccatggtcaggtaggggaacaattggtcggccagttcctgcacggtcatacggttgcgaatggcgagcaccgccgtctggatcagttcacccgcttccggggccaccgcttgcacgccgatgagccgtccgctaccttcctcgatgaccagcttgatgaagccgcgtgtgtcgaagttggcaagcgcacgcggcacgttatccagtgttag

SEQ ID NO: 67027 - DNA, 831 bp, Acinetobacter baumannii
ttgaaaaataagttagatcaattaaaatctataaatttctctgatttagaaattattaacctcttacaaaaacagctaaatgagttgaaatctaagaataactttgattcatctcactcagagtcagagttagattttaaaaaatttgtagagactattaaagaatctttaataaatgatttattaggtataaaagatatatcttttaataatttttctggtcgaacacaagtttatttccatttatcagatgggaatattgttaactcaaaacagttatcacacggtcaaaaagttacttattcattgattggagacatatgtcttagactattattactaaaccctaatcttaagaatccattaaaaggtcaaggtataattcttattgatgagctagaactacatttacatcccaaatggcaacagagaattctagtttcattacgtaatacttttccaaatattcaatttatagtctctactcatagtcctcagattttatctacaatagataaaaaacatataagaattttagaagaaaatgactctattattgagcctatttatcaaactgaagggactcgtagctctgatattcttgaacaactaatgtcgacacactctacccctgatattagaataaatactttatacaataaatacttagctctaattgaacagaacatttatgaaactcaagaagctcaagaactaggggcggaattagctagtcactatggagagaaacatccaaaaatacaagaaattaaaagtttaattcgattaaaagaattaaagaataaaattgctagtaaaaaaatggactaa

SEQ ID NO: 67028 - DNA, 303 bp, Acinetobacter baumannii
atgacaaaaccattaagcgcatttcttgatcatattcaaggggtaatcaaatgtccaatttgtagttatgactatactcatcagggtaaagtggaaatttttgaacgtggtgaagacgatgaacaaggaaaccatgttcaagtgcttaatgacgggattaatgttgatagagatttaacaaaaaatccaagtccgcggcgccatggtgtaactatacatatgacgtgtgaggttgatagacatccttttaaacttaatatttaccagcataaaggacagacttttgtagaagtagaagtttag

SEQ ID NO: 67029 - DNA, 444 bp, Acinetobacter baumannii
gtggatagtgaagcaatttatcaagcgctgtttgatcggttaagtacaagggtagaagggctcaaaacagtaagtcgccgtttacgtcactttaataatgtattgcctgatgaacggcctgccatatttatcactcaaggcaatcagcaagaagtaccggtacatggtatggattcaaaagttgaacttgctgctgaagtttatatctacatccatgaggctgatagagctaagcccccatcatcacagatgaatattttcatcgatcgtgtacgtgaagctattaagccagaccatcctgattttagtgagtatcaaaccttaggtggtttggtagagcactgctggatcgagggcactgtagaagtatatgaagcagtagaaaacatgctggatgaccaggcgattgccattatccctattcggatcctgacaaccaattaa

SEQ ID NO: 67030 - DNA, 444 bp, Acinetobacter baumannii
gtggatagcgaagcaatctatcaggcgttgtttgaaaggttaagcacaagggtagaaggattgattacggtaagtcgccgtttacgtcactttaaccatgtaacaccagaacagcgcccagccatgtttattacacaaggcaatcagcaagaagtcacggtacatggtttagattcaaaagttgaactagctgctgaggtttatctctatattcatgaatcggacactacaaagccgccatcatcgcagatgaatatattcatcgatcgtgtacgtgaagctattcagccagatcatccagattttaatgaatgtcagaccttgggaggtttggttgagcattgctggattgaaggcacaatagaagtgtatgaagcagtagaaaacatgctagatgatcaggcgattgccattatccctatccggatcctcacaaccaattaa

SEQ ID NO: 67031 - DNA, 435 bp, Acinetobacter baumannii
  misc_feature (134)..(143): n is a, c, g, or t
ttgggagaaaaaaaggcacagcaaagccataaagactgtgcttggcacatctcaagttttatagttaatgcaagttttttgagccgtaatgacttaaagcctgaaaaccctaaaggccatcaagctgctttaannnnnnnnnnaataatggatgtgcaaagccaactcctttttattgggagttctgccaaaacatttaaattatggtggcagaacgaaagggggttcgcagactggaaacaaaggaaccagcacaccagaggtgtcccccttccgccctaccgtagagaaaaagggggcgaacgagttcccgacacacaaaacaagaattttgcatatcgactttgttttcccggtctgcgacaaccggctggcaatgtggccagtatgcgaagaatagtattccaccctcttgtagtcaagcacacaaaatga

SEQ ID NO: 67032 - DNA, 852 bp, Acinetobacter baumannii; identical to SEQ ID NO: 55641

SEQ ID NO: 67033 - DNA, 267 bp, Acinetobacter baumannii
gtgccatccacagttaccactacaatcgctgtcggatcatttactgtacccgtaagtgctggtgtgctgtcattcgttaatacatcatccagtgctactgtcggtgcaactgcatccaccacagctgttgctgggcctgaggtattgcctgcagggtcagttgctgttgcagtcactgtatcgccatccaccaggttacctgggtttggtactgaccatgttccatctgtgcctgccacaactgttgcagttgtgccatcaggataa

SEQ ID NO: 67034 - DNA, 315 bp, Acinetobacter baumannii
ttgtctgaaacactttcggctgaacttcgcaaattcaatattaaagtcaatgtactttgcccgactttggtgccaaccaatatcattaaaaatggtcgtattccggggcgttattccaagcttgcagaccatgcactcatgaactatgccatgacgaccagcgatgcagttgcaactttaacattgaatcgattagatcgtgggcagctctacaccacgccacagatcgacgccaaattattctggcttatgaaaaggacatctccaacgctatatgcaaagttccttgggctttcgtatcagttatttaaataa

SEQ ID NO: 67035 - DNA, 246 bp, Acinetobacter baumannii
gtgcctaccaatatcattaaaaatggtcgtattccgggccgttattcaaaacttgcagaccatgcgctcatgaactacgcactcaccacaagtgatgatgtagccaaactcacacttaaccgtcttgatcaggatgagctttataccattcctcaaatcgatgcgaagttgttctggctgatgaaacgtgcatcaccaagtttgtataccaagtttcttggtacctcttacaaattatttaaataa

SEQ ID NO: 67036 - DNA, 327 bp, Acinetobacter baumannii
atgaaaccagaacagtttattcgtgagcaaggattggatgctgttaaggattgcatagaagaggctaaggcatatggcggcttgtatgtaaatgctaagaccttggagctttcaaagcacataccttcatacgatgcggtgtcaattatcgagttaatgcgtctggtggagtcggttgatttggttgaatcatggggcggcattgaagacttgaaactatatgacttgtctcattgcaaagataaacctgaatctgctgggtacaagttgcttcaagcaattgctgattacgaatcaatatacggaggcggggatgaaattaactaa

SEQ ID NO: 67037 - DNA, 279 bp, Acinetobacter baumannii
atgcgtatcagcatcaaaaaaccactttctgaaaacgctgtgaagttaattcttaaaaaacttatctcgtttggttctttggctaaccagtctcttgaaaactcaattattggaaattatcagggtgtatttgaacctcgccaaaatcaaattcaggaacacccacaatctcataacgttccagaagaaccgggttatttcactcagatgtacgctgagagcaaccgttcaaacgtgattgatgttacccctgaacagcaatatatcggaggctattaa

SEQ ID NO: 67038 - DNA, 279 bp, Acinetobacter baumannii
atgcgtatcagcatcaaaaaaccactttctgaaaatgcagtaaagctaatccttaaaaaacttatctcgtttggacctttggccaaccaatcactggaaaactcaattatcggaaattatcagggtgtgtttgaaccacgacaaaaccagattcaggaaaacacacattctcacaacgttcctgaagagccgggttatttcactcaaatgtacgctgaaagcaaccgttcaaacgtgattgacgttacaccagtgtcacaagattttggaggctattaa

SEQ ID NO: 67039 - DNA, 285 bp, Acinetobacter baumannii
atgcctatgcgagatttgtttttttggcaaatgataggagactctctaaaaattggtagttggatacttgcatatctaatgttaagtaaagcaatgacaaaactatttataactactgaaattatatttgcacttacctcaatattattaacttatatctgtactcaaatttttggttttaaaggggtgtctattgctcatctagttaattatggaatgtactggattatagtcggtttttttatatttagagttttaagtaataaaggtttgaagaatgagtga

SEQ ID NO: 67040 - DNA, 1917 bp, Acinetobacter baumannii
atgaatatccagcttaatttccttggttcagcacagcatcttcaacttgagcaaccaatgtcgatttttgaaaccttgtcccgtttcaaaattcaaggctataaaaaagcttttctcgccaaaattgatgctcatttcgttgatgtgcatcatgtcatccaacatgactgtcacatcgaacttttcagtctgaacgatgacaataatttaaatctactacgacactcctatgcttatttattagcacaggctgtccatcagttatactctgctgctcaacctgtagaatatcaaattaccaatcaaggtatttattatgatttcgccgatacgccgcattttaatcaggatgatttacaacaaattgaactgaaaatgcatgagtgggtacaacaacatttagatattcgcactgaaaagattacagccgatcaagcagctaatttttttaaacagcaagatttggattttaagtatcaatacttaaaaaatacgagtaactcaagcgacttatttttccatcaaaataatgatttctcagacgtttacttatatccacttgttccaaatactgaatttttagaatattttaaagtgactcatgtttctggtgcatattggcaaggcgacgctacacaaccgatgttacagcggatttatgtcacatgttgggctgaccaaaaacaattaaaaaaacatttaaagcaagttgaagaagccgcaaaacgagatcatcgcaaattagcacaacaacttgatttactacattttgatgataaagcaccaggtgccgtgttctggcacgcgaaaggatggaaattatttcagttattatcagattatttacaccagcaacaagatgatgcgggttatatcgaagttaatactcccgatgtcatggatcgtgaactttgggaaatttcgggacactggcaaaactatcagcagcatatgtttaccaccgtcactgaagatcagcgaagttatgcacttaagcctatgagttgtcctggcgcagtttgtctatatgcacatgaattaagaagttatcgtgacttaccattacgtatggcggaatttggtaaagttcatcgctatgagccatctggatctttacatggattaatgcgtgttcgtcattttacccaagatgatgcccatattttttgtactaacagccagcttttatctgaatgtaaaaatacaattgccctcatttataaaatttatgagcaatttggctttaatgaagtttcgcttaaattatcgacaaggcctgatcatcgtgtcggcacggaagaaatttgggatttcttagaaaatacactaaaacaatctctcgaacagcttaatattccttatacattaaatatcggtgaaggtgcattttatggccctaaacttgaatttaccttaaaagatgccatcggtcgtgaatggcaatgcggaacaattcaggttgatttaaatttaccagaacgttttgatattcattacattgatgaaaataatgaaaaacaacggcctgtgatgttgcaccgtgctttatttggatctcttgagcgctttattggtattttgatcgagcattatatggggcacttcccattttggcttgcacctgtccaaatcgcaattttaccgattacagatgtacaacatgattacgccaaacaagtccaagaatcacttaaacagaatggttttagggcaacattagatttaagtcaatcaaaattgaactataaaatccgtgaaaatacgctacaaaaaataccttatctgatcattgttggggagcaagaaatgcaacaatcatctgttcgaatacgtgcgcaaaatggtcaggattttgggaatctcctgactacagatctgcatgatttttttacgaatcaagcacattttgtgaattga

SEQ ID NO: 67041 - DNA, 420 bp, Acinetobacter baumannii
atggtaggttcaacagtttttctagacattgaacaaggaaagatggggcaatgttatgaactgaaaagcattattgatgctattccctggaacaaggatggactaatcactgccattgcccaagatggacaaagtaaagatgtcttaatgcttgcttggattaaccgtgatgcactacttgaaaccctaaatacaagacaggtttgctattggtctcgctcgcggaagtgcttatggcgaaaaggcgaaagttcaggacatcgtcaaaaactcattgaagccagacttgattgtgacggtgacagcatcctttttttggtcgagcaaactggaccagcctgccacactaatcgccccaattgtttttatcttggattaaacacacaacacgccacaattttaactcagcccattatttag

SEQ ID NO: 67042 - DNA, 417 bp, Acinetobacter baumannii
atggcaattagcaatcaagacctgagaaaagcaggactaaaagtcactcttccgcgaataaaaattttagaaatattggaaaactcaattcctcaccacctgagtgccgaggatatttataaaaaactattggagcaagatgaggatgttggactagcaacggtctatagagtcttaactcaatttgaaatggcgggtattattcaacgccataactttgatcacaatcatgctgtatttgagataaagcaaaatacctcgcacgatcatcttgtctgtcaagaaacaaaccaaatcattgagtttaaaaatgaggaaattgaaaaattgcttctagatattgcaacaaagcatgattttcaactcacaggacattctctgatcttatttggatattctagaaattcaaccaagtaa

SEQ ID NO: 67043 - DNA, 1434 bp, Acinetobacter baumannii
atgtctgatttgtatgtttataacgctgaaactcgctcaaaagagcactttgagcccatcgtagcaaacgagatcaagctctatgtctgtggaatcaccgtttatgactactgtcatattggacatgccagaaccatgattgcatttgatttgattgtgcgttttttaagatcacagggctggaaagtaaaatacattcgtaatattacggatatcgatgacaagattattcataaagcacaagacaaccatgaatccatcggcgaattgacggatcgctttattcaggcaatgcatgaagattttcagacattaggctgcctttctccagatgccgagcctaaagcaaccgattcaattcaggatatccaacgaatcattcaaaccttaatcgagaaaaaatacgcctaccaaatagcaaatggtgatatttatttttccattgaaagctatcctgactatgggcgattatctggtcgaaaattagcagatatgcaagcaggcgctagccaacgtgtcagtttagaaacagaaaaacatcatccttttgattttgtactctggaaagcttcaaaacccaatgaacctttttggcaatcgccttggggaaatgggcgaccaggttggcatattgaatgttcggcaatgtcaatgtgtcatcttggcaaccatttcgatattcatggcggtgggggtgacttaattttcccacatcatgaaaatgaaattgcgcagagtgaagctgcaactggagaaaaatatgtaaattactggttgcatacaggcttcatcaatgtcaatggagaaaaaatgtcgaaatcattaggtaattttctcaccatccgcgatgcattcaagtcttatcatcctgaagtcattcgcttattaatgatgagttctcattatcggagtcctattgatttctctgatcatattttaaaagatacacaaaaagtattgtctcgattctatcaagcaatttaccacgcacaaccctttatcgcatcaaaagatgatgctattaaaacagaactaaatagtaatccttttatacaaaaatttaatcaagccatgaacgatgactttaacacccctgaagcactcgtcatttgttttgacttattaaagcagctgaacatagccttaaaagaagagagcccagaaaaagttattaaaaattatcagttacttctttggatcggcaatattctaaatatttttcagtatgatcctgagaaaatattaaagcactcagctagtgaacaagattcacccctttctgagcaggaaatccaagaagcgattctggcaagaaatacagcacgaagcaataaacaatatgctttagcagatcaaattcgacagaaattgcttcaaagtggcatccttttagaagatacccagacacaaacaatttggagactcaatcaataa

SEQ ID NO: 67044 - DNA, 747 bp, Acinetobacter baumannii
atgaaacattttttaattttcggggtacttttttgtcttatcgcatgtagtcaaaaaccaatacggcatttggtttcgcaaccctactcttcggaagaagatgacacattcaaacataaatctgtgcagtctcgtccaacacttcagaaaattacacctgcttcttatcagaactggttatctcaaccttttaataaaaatcaagttcatcgttatcaatcttttttaaaaaatcaagacttgcagaatgtagtgcctgaatttgaactatttcaaacagcgcgagattggcaaaactgccatgcatctgaatatgaaattccaccgcaagaaatttggaacaatatcgtaccgactttaaatattttgaaggaattaattaatgacaatgtgattgatgattttacagtcacttctgtttaccgtaactctgccttaaatcgttgtgcgaaaggagcagattcttccagacatgtttttaatgctgcactcgattttaggattggtccagaacagccaatatcagaagaacttacaacgattcagcaaacaaaaacaaatttgtgtcaattttgggtcaaaaatggtgatcgcttgaatatgggactaggagtctatgcttctggtcaaattcatattgatagtgctggatatcgcacatggggaccggatcatagaagtacctcatctccctgtatcacccagcttttatctaatcgaaatgataaaggaaatgtagatgagtga

SEQ ID NO: 67045 - DNA, 432 bp, Acinetobacter baumannii
atgagtgaattaaaacttagtgcgatacagcaaagggtattaacaattttgcgaaatgagcagaaagcaataagtgcttatgctttattagaaaaggtaaaaccttatggcttgcaatctccagtacaaatttatcgtattttaaaaaaactgtcaggctatggcttaatacttagacttgatacattgaataaatatttagcgtatgaattgaaaaataaacaaaattacttactcgtcacaatttgtacagagtgtcagacagttcaaattcttgattcacctcagtttactcaagtgattgaacagtcacttgttcatcaggattttagccctaaacatcattgtttagagctattaggtcaatgtgctttatgtttttccaaacgtaacaagccttttattaagataagtgagaaagccaatggataa

SEQ ID NO: 67046 - DNA, 1233 bp, Acinetobacter baumannii
atggataattctttagccactccagccaaattacctgtaactgtgctgtcgggattcctcggtgcaggtaagacgacgttactcaatcatattttaaataaccgcgaaggtcgtcgtatcgcggtcattgttaatgatatgtcggaggtaaatattgatgctgctttagtacgagatggtggcgcagaactttcccgtactgatgaaaaactggtagaaatgagtaatggttgtatctgctgtactttgcgggaagatttactggtagaagttcgtcgccttgctcaagagtatcgttttgatcaattagtcattgagtcaacgggaatttctgagccattgcccgtagccgaaacttttacttttgaagatgaaaatggtgtgtcactgaatgagtttgcacgacttgataccatggtgactgttgtagatgcctttaattttttaaaagattacagctcgtatgatagtttgcaacaacgcggagagtcgttgggtgaacaagatgagcgtactgtggttgacctgttgattgatcaaattgagttttgtgatgtcatcatcttaaataaagtagatctgatcaatgaggatgataaacaacgtttatttgcaattctaaataaacttaatccacgagcaaaaattgaaatttctgaatttggtaaagtcaatttagataaagttttaaatacagggctttttgattttaatgaagcctctcaagccccaggatggctgaaggaattgcgtggggaacatacacctgaaaccgaagagtacggaattaaaagttttgtgtatcgcgcaagacgtccatttcatccacaacgcttttatgatttcatcaattccgaatggaaaggtgtggttcgttcgaaaggctatttttggttggcttcaaacccagagtttgctgcttcttggtcacaagcgggtgcaatggctagacatggtgttgccggctattggtgggcaacggttcctgacgagcattggccagaggatcagcaaagccgtgatgaaatcatcagaaattgggatgagcgtactggggatgcacgacaggaaattgtaatgattggaatggatatggatgaacagagtttaatccaacagtttgaccaatgtttactgacggatgaggaaatggcaggaggacctgagcagtggaaacttatggttaatccatttcctgagtgggagaacttagagcaatcttcagataattga

SEQ ID NO: 67047 - DNA, 327 bp, Acinetobacter baumannii
atgaaaaccaatgaattaaaaatgaaaatagatctttcaaaagtcgaccttgtcactgattgtctaaaagtcttatcgaatcctgatcgtcttaaaattttatgtgtcttaattgatggtgagctgaatgttcaacaaattgaaaaaaccgctcaggtataccaaccaacattgtcccaacaactaacgatactcagaaaaagtaaaatggtatcgacacgccgcgaaggcaaacaaatcttttatcaatttagtgatatgagaatattacaaatcatgcagaccctatacggcttatattgtatgaatgacatagactcggactag

SEQ ID NO: 67048 - DNA, 417 bp, Acinetobacter baumannii
atgtatgactatttgatttcctttatgggtggattattgctaggtgcagctgtagttggctacctatatgtacatggtcgtattgccggaattagtggattagttgcacaaattctaaaccctcaaatgatatttaagacacctgctatttggtttatgtcaggtttgatcattatacctttcatttatgggcgatttgttcagccagaaattgaattgaatgccagtccgttgatgatgatcattgctgggctattggtgggttttgggacacgcctaggttcaggctgtaccagtggtcatggcatttgtggaatcagccgcttatctaaacgttctattctagccaccatgagttttatgttcgctggatttgttacggtttatatgattcgccatgtcacaggagctttctaa

SEQ ID NO: 67049 - DNA, 417 bp, Acinetobacter baumannii
atgaagaattttcttgctttcattttcggcggtttattttctataggtttgatgctttcagggatgtccaatccagaaaaagttctaaacttcttagatttgtttggtgattgggatgcaagcctagcttttgtaatgattggggcgattatgattgcaattattccttttcaaaaggtggtacgcagtcaggcacctaaaaccgtatttaatgaaccaattgagttacctagcaatcataaaattgattttaaattgatctcgggcagccttttatttggtattggttgggggattgctgggatatgtcctgcacccagttttaccttgattggtcttgggcattatcaggttctgtattttattgtctcaatgtttgcaggcatcttgcttcatcgtaagtggacaggagcttaa

SEQ ID NO: 67050 - DNA, 873 bp, Acinetobacter baumannii
atgtcaaattcacctgttgtaaaagatttttttcatgaagatacccatacttttagttatgtggtgagtgatccttcaacgaaagcatgtgcaattattgacagtgtgctggattatgatgctgcatctgccagtacatcgaccatacatgccgataagattattgcttatgtcaaagagcaaggcttaacagttgagtggattttggaaacccatgtccatgccgatcatttaactgcggcgcagtatctcaaagctacacttggcggaaagattgccatgagccataaaatagcgatggttcagaagactttcgcagcgatctatcatctggatatcaagcaatggaatactcagcagatgtttgaccacttgtttgaggattatgagaaattccagattggttccattgaggcatataacattcctacacctggacatacgcctgcctgcttgagttatgttatcggtgatgctgtgtttgttggtgataccttgtttatgccagattatggaacagcgcgttgcgattttccaaaaggaagtgcatcaacccttttcgattccatacaaagtttgtatcaattacctgaaaaaacacgagtatttctctgccatgattatttgccagaaaaacgtgatacttacatgtgtaaaacggatattcagacgcaaaaaaaacacaacattcatgttcacgaaggcacaaccaaagctgaatttgttgaaatgcgtaataagcgtgatgcgcttttaagcatgccagaactgattttaccttcgatacagatcaacatgaaagcaggacagtttcctgagccagaagataatggtgtttcttatctaaaacttccacttaattacttcaagtag

SEQ ID NO: 67051 - DNA, 786 bp, Acinetobacter baumannii
atgtggacgctaatacttgaaggcttggccatcggttgtttactcggtttaactggtgcaggtggtgggattttggcagtacctgcactgatggcaagtcaagggtggacagtcgcacaagctgctccagtaggtttgcttgcagtgaccttatcagcgctggttggaacatttgaaggtttgtccaagcacatcgtacggtatcgtgctgcactatggattgcactgatcagcattccttcagcacgttatggtgtatatctgggaggggttatttctccgacatggcttacgttagcatttagtttagtcatgctatttgttgcctatcggattttctttaaaaaagtgaatgatcatcatacaggtgcgctgtgtaaagtaaatcagatgacagggcgtttgatttggaacgtaaagacggctttggcccttggtggtataggtatagtcgcaggtttattaactggtttgcttggagttgggggtgggttcgtgattgtacccgcactcagtaaatttacagacttggatatgcgtagcattgtagctacctcactcatgattatttttctgattggtggcgttagtatttctgctcatattttagatggttttcaataccctgtctcagttacgctgactttcgttttagcttgcgtgttagggatgttgattggtcgaagtttgatgcctttagttaagaatagtcaaatccaaaaggtttttgctgtgacagtcataggcgtagcgttttatttaatttttacagttactatggcttag

SEQ ID NO: 67052 - DNA, 396 bp, Acinetobacter baumannii
atgaaaacagcagatcaattaatttcaatggcaaaaagccgaattcaggaagtgactgtcacagacttacttgaagccatgaaaaaccataaaacaattctcattgatgtccgcgaacccgaagaatttcaagcagcttttattgatcgtgctgtgaactatccacgtggtgttttagaaatgcgtatacatcagcatccgtttgccagtcaccattgcgatactgttcaggcacttgagcatttgaaagatcagcctatttatttgatttgtggaacgggcgggcgatcagctctagctacagatactttgcagaatatgggttttactcaggttaaatctgttcaaggaggttttcaagcatgggtagaacatggttatccagtagagaaataa

SEQ ID NO: 67053 - DNA, 336 bp, Acinetobacter baumannii
atgaaatacaaagaattaacccaaaacatttcaggaaacttgaagacattagtgcaggattctcctgatttaatgaagagttttaatcaattgtcacaagttgcaatgcgtgaaggtgttgttgatcctaaaactaaggaaatgattgctttagcaattggtgttgcagcacgatgtgatggatgtataggctttcatgtcagaaccctagtcaaaatggggataacattacaagaattggaagaagtgcttggcgttgcagtttatatgggaggtgggccttcattgatgtatgcagcgaatgcattggaagcatttaaagaattcacagcctaa

SEQ ID NO: 67054 - DNA, 621 bp, Acinetobacter baumannii
atgagtcagcattgggatagtctttattcgcaaacacaggatctatatggcatttcgcccaatcattttattcaacagatagcagatcaaattccaattgtgggaaaaacccttgctatcgcagagggtgaagggcggaatatcctttatttagcggataaagcaagacggcaaaatgattcattttcggcagaaatatgggattactcaaaagttgccttgcaacatttgtctgcaaaagctcaagatgctggatttgattttacacttagaaatattgatctcagtgatgtcgagtggccaagagaacgttatcaaaatgtgatgtgtgcgtatgggcattttgatgaaaatacacaatttaaggtactcactgggattcgccaatcattgacagacaatggttggtttattggagagctttattctaaagagcaaatccattatcgaactggtggccccaaagataccaactatttatacgacccaatgctgattctgtcggtatttaaaaatgatcatctccatcatttttatgtcggagagcaggagcgctatgaaggtaaattacataacggaaaatgtcatgtaattcaatttgcaatccaagtgcagaaatag

SEQ ID NO: 67055 - DNA, 744 bp, Acinetobacter baumannii
atgtcaacacgctttaataataaagtggctttagttacaggtgcaggttcgggtattgggcgaagcacggcgttgcttcttgctaagcaaggggcaaaagttgttgtttcagatatcaatcttgatgcggctgagaaagttgtagctgaaattatggctgcgggcggtcatgctgttgcgaataaaacggatacatctcgtccagaggaaatgaaacaagcagttgactttgctgtggaaagctttggagctttgcatttagcatttaataatgcgggtatcttaggtgaagttaatccgattgctgagttaagtatagagggttggcgtcgagtgatagatattaatttgaacgctgttttttatgggctacattatcagattccagcaatgcttaaatctggtggtggtgcgattgttaataccgcatctatcttaggtttagttgggactaaaaatatttcaggatatgttgcagcgaagcatggtgtgactggtctgacaaagactgcatcattggagtatgctgatcaaggtatacgcataaattctgttcacccaggttatatccaaaccccattaattggagaatttgaggaatcagaattagtgaaacttcatccagttggtcgattgggtaaaccagaagaagttgctcaagtagtggcttttctattatctgatgaagcttcatttgtgaccggcagtcaatatacagttgatggttcttatacttcacaataa

SEQ ID NO: 67056 - DNA, 309 bp, Acinetobacter baumannii
atggtaattgttattacatcacaaaaccggcgtcatattactccccatgcgggaaaatgtcggaaattttggaaatatgaattaaaagatggagaagtgactgacaaacaacttatcgaagttgaaaaggagcaatccttttcccagtctggtgaagtactcgaaaaactgctgcctatggatatattcgtaactacgggaatgggcgatcgattacgagaaaaactcagaaatattggtgttcatgtcatggtaacagcagaaattgaaccagaacaatttatctgcagtttaatttcaaccaaataa

SEQ ID NO: 67057 - DNA, 258 bp, Acinetobacter baumannii
atgcatctacttcaacagcaccatgtgaatttcaatcatgatttcccttatatcgttaatttaacattagctcaggaaatcattatggcacgtaaaaaaatgaatatctctcaacaacagttagcatctaaacttggcatatccccaagaacgctagaaagttgggaaagaggtgttcggcatccttcaagttcggcgcaagctttaataaaattgtttataaagtcacctcagtttgtattggaaaatcttgcttga

SEQ ID NO: 67058 - DNA, 1005 bp, Acinetobacter baumannii
atgattgatttatctttaatctggattgtcattattgcagttggtgtttttatttacgtgctacttgatggctttgatttaggtatcgggattttattcccctttattaaaaatcagcaagagcgtgatgtgatgatgaacaccgttgctcccgtttgggatggtaatgaaacatggatggttctaggtggcgctggtctttttgcggctttccctattgtctattcagcggttctgtcagccttatatttacctatcatattgatggtaatagctttgatttttagaggcgtagcttttgagtttcgtttcaaagccaatcgaacaaagtacatttgggataatgcattcatttggggctctattgttgccagtttcttacaaggggtgatcttaggagcttatattcagggtattgatattgttgataatcgctacgctggtggtggctttgattggttaacacccttttcattatttacaggtttgggtgttgtagtcgtttatgcagcattgggatgtggttggctcatcatgaagactgatgacctactacaaaagcatatgtataaattaatgcccaagcttttgattggcttattggttattttcattgctgtcagcatctatacgcctatcgcacatccacaaattgctgagcgctggttcaatcccactcaattgatttattttagcccagtccctttgcttgttctagtttgtaccgttttagcggtacgctcatgtattcagcaaaaccaagctatgccctttttatataccttaggactcgtatttctggcttacacaggattctgtatcagtatttttccttacattatcccgccctcaattaccatttgggatgctgccgcacctgccaatagccagctatttgcactgattggcgcactgatcttaattccaatcatacttgtctataccgccctatcatactgggtattcagagataaagttcgtgttggggatgaaggttatcattaa

SEQ ID NO: 67059 - DNA, 1434 bp, Acinetobacter baumannii
atgaccttaggttttacggcacttgagttagcacgtattcagtttgcattcacggtgtcatttcatattattttccctgcgatttctattgggcttgcaagctttcttgcagttttagaatggcgatggcttagaacaaacgactctatttatcatgatttattcaaattctgggtgaaaatatttgcattatcattcggtatgggtgtcgtttctggtgtcgtgatgagttatcagtttggtacaaactggagtgaattttctcgatttgcaggaggcgttacaggcccgttactgagctacgaagttctaagtgctttcttcttagaagcaggatttttaggcattatgctttttggatgggggcgtgtcggtaaaaaagcacacttttttgccacactgatggtcgccatcggtacatgtatttcaatgttctggattttgtcttcaaacagttggatgcagacaccacaaggcttcacgattgaaaatggggttgttgtacctcaagattggtttgctattgtttttaacccatcctttatctatcgcttattccatatggcacttgcagcctttttagtagctgctcttcttgttgctgctactgctgcgtggcacttgctcaaaggccgtagagatgcattagtcaaaacatcattttcaatggcgctttggttaatccttattttagcccccctccaagtttttattggtgatgcccatggtttaaataccctaaaacatcaaccagctaaacttgctgctatggaaggccattgggaaacgaaccatgatcatgggatgcccttatatttatttggtattcctgatatgcaagaagaacgcacgaaatatgcgattgcaattccacatttaggaagcctaattttgacccattccatgaatgggacggtgaaaggattaaaagattttgcacctgaagatcgtccaaattcaacaatcgtattttggagtttccgtattatggttgggctaggcatgcttatgctcttccttgcagtcacggccctatggctcagaaaaacaggcaacctctatgagagtaagtggtttcatcgctttgcaatcctaatgggtccttcaggcttcatcgcgttactcgcaggttggttcaccacagaagtaggacgtcagccatggattatctatggcgttatgaggacaaaagatgcgctttctccagtctcagcagaacaggtgggattaaccctcattatttttgtgatcgtgtattttattgtctttggtgtgggcatttattacatgctcaaactcatgcataaaggacctgagtttttacataacccaccagaagaaatcggaggcgttggccattttaaaacaccaatgcgccccctgagtgctattgatgaaaaaattgatgatcaggatcaaggagcatctttatga

SEQ ID NO: 67060 - DNA, 468 bp, Acinetobacter baumannii
atggttttaggaagattgctcgcattctcagcaatcttgttacagattgctgtttttatacagcctttacttccagagaaatatcaaatttctcctgtctgtgaaactattgtccatgcacttcaattagatacttctcaccatgagcatagctcagatcattttacgcataatcactctcatcaagagttggattttgttaatcatgatactgaaaagcttaatcatgcacatcttgaacaaaaaacttcatctagccatcatcacgatgcaaatcatcaatgtcagtactgtgttgtttacgcacatgtcgttccactaccagacatgggtgttaaagaagtagtcgtgataattcaagttcggttattagcttttaaagaagctttctttcatatcttctttcttttaaagcaattatttctgatccctcaaggtcgagcacctcctgtctcttttgctgtctaa

SEQ ID NO: 67061 - DNA, 468 bp, Acinetobacter baumannii; identical to SEQ ID NO: 67060

SEQ ID NO: 67062 - DNA, 1434 bp, Acinetobacter baumannii; identical to SEQ ID NO: 67059

SEQ ID NO: 67063 - DNA, 1005 bp, Acinetobacter baumannii; identical to SEQ ID NO: 67058

SEQ ID NO: 67064 - DNA, 258 bp, Acinetobacter baumannii; identical to SEQ ID NO: 67057

SEQ ID NO: 67065 - DNA, 309 bp, Acinetobacter baumannii; identical to SEQ ID NO: 67056

SEQ ID NO: 67066 - DNA, 744 bp, Acinetobacter baumannii; identical to SEQ ID NO: 67055

SEQ ID NO: 67067 - DNA, 621 bp, Acinetobacter baumannii; identical to SEQ ID NO: 67054

SEQ ID NO: 67068 - DNA, 336 bp, Acinetobacter baumannii; identical to SEQ ID NO: 67053

SEQ ID NO: 67069 - DNA, 396 bp, Acinetobacter baumannii; identical to SEQ ID NO: 67052

SEQ ID NO: 67070 - DNA, 786 bp, Acinetobacter baumannii; identical to SEQ ID NO: 67051

SEQ ID NO: 67071 - DNA, 873 bp, Acinetobacter baumannii; identical to SEQ ID NO: 67050

SEQ ID NO: 67072 - DNA, 417 bp, Acinetobacter baumannii; identical to SEQ ID NO: 67049

SEQ ID NO: 67073 - DNA, 417 bp, Acinetobacter baumannii; identical to SEQ ID NO: 67048

SEQ ID NO: 67074 - DNA, 327 bp, Acinetobacter baumannii; identical to SEQ ID NO: 67047

SEQ ID NO: 67075 - DNA, 1233 bp, Acinetobacter baumannii; identical to SEQ ID NO: 67046

SEQ ID NO: 67076 - DNA, 432 bp, Acinetobacter baumannii; identical to SEQ ID NO: 67045

SEQ ID NO: 67077 - DNA, 747 bp, Acinetobacter baumannii; identical to SEQ ID NO: 67044

SEQ ID NO: 67078 - DNA, 1434 bp, Acinetobacter baumannii; identical to SEQ ID NO: 67043

SEQ ID NO: 67079 - DNA, 417 bp, Acinetobacter baumannii; identical to SEQ ID NO: 67042

SEQ ID NO: 67080 - DNA, 906 bp, Acinetobacter baumannii
atgaatgccttgcagctcccagatgtctcatctgaaccttttctgaatatgcatgcctatagtctcgattgggtcggaatggagaatatcgccttacctattcacattcaaaatacactgtgcgcaagtaaagtgaatgcctatgtcagcttagatgatcctcaggctaaaggtattcatatgtctagactgtatactcgactgttggaactccatgccctacctgacctaactttaagtaaaatttatcaaacgcttcaagattttttagcgagccatactgagctctctcaacaagcccgccttgatattcaagcggagtttaatttagaacaacctgctttagtcagcgcactatcgggctggaaaagttatccatttagcttatcctgtaagttaagtgagcatacttttgaagcagaattagcaatagaaatcacctattcctcaacctgtccttgttctgctgctttagcacgtgacctcattcaaaaaagctttcaagatgccattgatacaaaaaaaataaatccacaaaacaccgatgaagttatggcgtggttaggtacaacagatgcgattgtagcaactccacacagccaaagaagttttgctcagctacgttttaaattagacccttgtttacaatccattccaattcggcaattcatttcacatgcagaacaagccttgacaacacctgttcagacagctgtcaaacgcgtagatgagcaagcattcgcattagcaaatggtcaaaatttaatgttctgtgaagatgctttacgccgcttataccacgcatttgtcaactactcaggtatttcaggatttaacttcaaagtcatccatgctgaaagtttacatgctcacgatgcagtcgctcagggatcatggcaatggtag

SEQ ID NO: 67081 - DNA, 420 bp, Acinetobacter baumannii; identical to SEQ ID NO: 67041

SEQ ID NO: 67082 - DNA, 561 bp, Acinetobacter baumannii
atgattcgtaaaaatccaactggtcatctccctgtcattgaccaatccgcttatattgatcagaccgcaattatttgtggaaaagtcattattgaagcgaacgtatttgtcggtccttatgcggtgatccgtgcagatgaagtggatgaaaatggcgacatgcaacccatcatcattggtgaaaattcaaatattcaagatggtgttgtcattcattcaaaagcaggtgcacaagtcacgattggaaaaaactcatccatcgcccatcgttcgattattcatggtccatgtgtggttggtaaccgcgtatttgtcggctttaacagtgtcttattcaactgtaaagtcggtgatcatagtgccatccgtcataatgcagttgtcgatggtcgcgatttacctgaatcattttatgtccctgcgatgagctatatcaatgcccgaaccgacttaagcctatacccaccgatcgatatttctatcagtgaattttctgaaagtgtggtgagcactaatattgagttagtacaaggttataaggcattacaaaatgaattttag

SEQ ID NO: 67083 - DNA, 1356 bp, Acinetobacter baumannii
atgaattttagacaactcccaaatctcatcatacgtaatgcgaatatagttaatgaggggcagcaacaaatcggtgatgtccttattcagcaaggccgtattcgtaaaatacaatctaatataacgggtatccacaatgccaagagcatcgaggctgatggcgcatggttactcccaggcatgattgatgatcaagtccacttccgcgacccaggctcaccacaaaaagggagttttacctcagaatctttggcagctgcgataggtggaattaccagctttatggatatgccgaataccaatcctgctacattggacttaactgcactacacgataaaaaagcaattgcagctcaacatagcatagccaattatgcatttcactttggggtaagtgcacaaaatttagatattgttgaagcgcttgatcctaaattggttagcggcgtgaaagtttttatgggagcatcaacgggtaatatgttggttgatgatccaaaaattttagagcgcctatttgcgaatgtacccactattttattaacacattgcgaatccacgccccggatcaaacagctggaagagttttatcgtgataaatatggcgaagatattccagcaaacttacatcctaaaattagggataaacaagcctgttttgaaagctctcgattagccgtatcactcgctgaggaatttggtacacagctacatgtgttgcatctgacgacagcaaaagagctttgcttatttaaaaatttaccattagataaaaagcatattactgctgaagtatgtatacatcacttaacttttgatgagtctgattatgcagatttaggacatttaattaaatgtaatccagcaataaaaactgccagtgacaagcataccctcattgatgctgtcgccaatagtgagcgtttagatattattggcacagaccatgcgccgcatacttggcaagaaaaacagcaaacttattttaatgccccttcagggttaccgatagttcagcatgccttacccgcattattagaattagtggcagatcaaaagctatcaattgaaacgctggtaagaaaaacttctcatcaagttgccgatttattccgtattaaagatcgaggctatatccgcgaaggctattgggctgatttagtcctcatccgcgaaaatcagaaaaaacaatcagtagctgaacagactaattttatgcgttgcggctggacacccttccaagagaaaacgttccgctatctggtggatacaaccatcatttctggtcaactcgcatggcaccaacagcaaccttatcttaactgtcagggtcaagccttagaaattgaccgctaa

SEQ ID NO: 67084 - DNA, 1917 bp, Acinetobacter baumannii; identical to SEQ ID NO: 67040

SEQ ID NO: 67085 - DNA, 297 bp, Acinetobacter baumannii
  misc_feature (264)..(273): n is a, c, g, or t
atgtggcatcaaacacataatcaggttaaaaatttacggcaggaaaagaagatttttaacctgagaacctattttgcaatggctctagtgggaatttgttttgctgtcttgatcattagatatcgttatttgcaactctatcagcatcaacattttcaaactatttcagaatctaacagaattcgtttacagtcaattccacctgcgagaggaaatatttacgatcgtaatggaatattactcgcccataattatcctattttnnnnnnnnnntattttttcaattactgtaaataa

SEQ ID NO: 67086 - DNA, 633 bp, Acinetobacter baumannii
atgttacaaccaatattaaatttatcagcagaagatattggacaagttcaaaaacgttttaaagatgcacgaaaaactgaccaagtcatcattaaattccatcttactgatgaagatattgcacgatttagtgaagttaaatatcaatttcctgatgttgaaattgcaacccaaatgacacgaatttatccttatgatgatttatttgctcatttaattggctatgtgggacgaattaatgataaagagctaaaagttattgataaagataaatatgcaggtacaaacctgattggtaaaatcggtatagaaaaattttacgaacaacttctacatgggcaaaagggtcatgaatctgttgaagtcaatgtacatgggacagttttaaaacatttagaacatcaacctgcaattcgtggcaatgatctctatctttcacttgactttcatttacagaagtttgcatcggaacaacttgcacagaaacgtggagcgattatcgccttagatcctcgtaatggtgaagtgctggcaatggtatctagcccaagttttaatccgaatttatttgtgacgggtattagccataaagattatcacaatctcaatgagaatcttgatatccccttgtga

SEQ ID NO: 67087 - DNA, 237 bp, Acinetobacter baumannii
gtgaataagccatgggctctagcaatggctcagcttaaacaaaattcagactcatcaaattatttaatcacacgtattgatattgcaagagtcttagagcaagaacctttattaacagctaatggctttggtcatgctgatacttaccatgaatctttttataaaagacacacttttcatgattcaaaagcagaatatattcagcattttcatgcaagccaagccaagaaatattaa

SEQ ID NO: 67088 - DNA, 687 bp, Acinetobacter baumannii
atgtctgtaggtgatcgtattcgttcattacgtagagagaagaaatggtctcaaccagttcttgctaaacaggctggtgttacacaatctactatttcagatttagaaaatgataaaaaaagtacgtctgctgcaaatatgcaggcgattgcagaagctttaggtacaacaacaagttatttaattaatggcagctcaaaagctcaagtggctaaggtagaggcatgggattcatctacaccacttgaagatgatgaagttgaaattaaattttttaaagattttaaagttgcatgtggttctggaacggttggagaagcattggaaagtgaatggcgtagattgcgtatttcaaaatctactttgagaaatttggggataagcaaagataattgtgttgcaatgaccgctgaaggtagctctatgaagcctactatcaatgatcgcgatactgtctatgtggatttgggtcgaaaaatggtaaaagatggcaaggtttatgccatttgtcatggcgggctgtttaagttcaaacgcttatataatctaccttttggaggtattcgagtaacaagtgataattatgaagaatatcctgaagaaagattgactgctgaacaaattaaagaagaagaatttgaaattattggctgggcatggtcttggcaaacaactgaaacttggtga

SEQ ID NO: 67089 - DNA, 204 bp, Acinetobacter baumannii
atgactaattggagtcaaatcattagcgagttgcaggacaaagagaaagggaatatgacccagcaagaaattgcagaagtcgttccttgctctcagaactacatcagcgatttaaaaactggaaaaaaagggaagcgcatttcgcaccacattgctcaggggctaataaagcttcatcagcaaaaagttcataccgctgcttag

SEQ ID NO: 67090 - DNA, 858 bp, Acinetobacter baumannii
atgaatttagcacacaaacatgatagcccacaaggtgaagttatcgagtttccaaaacaagagcgacaagatatgtcaaagaaagatgaaggctatacaagagtgccgaattctttaattgacgagcaaataatggcgcaattaagtgacaaagcattcaaatgtttgatgctgataattcgtcagactacaggttttaataaagcttccaacaagattgcgactatccagtttcaggaactatgtggaataaaaaaatctgacaaagtctatgcctcaattaaagagcttgaacagaaaaatttaatcaaggttgagcgcaaaactggcggattaaacacctattatttgttagaaaaccaatcccaaaataaggtactacctgaaaatgggactactcccaaaaatggggaggggactactcccaaaaatggggaggggactactcccaaaaatggggacactacaaaagaaaatattaaagaaaactttaaagaaaatatgtgtggtgaaaatcaggtcgattcagtgctcaaactttggacacctgaaatacaaactttgaacgcttggttgcaacgatcaggcatcgcaaaaatgactcaacaggaaatcgattcttggctgattgagatcaacgggtattactcaacgaaaatcgaatcgggttcagtcaccgaaactcaaatgtattcaaatttcgtcaagtggatcaaacgcagtttcacaactcgtaaaccagcaccacagcaacaaatcgattctcgcaacgtaaaccaagcttgggcaaacgttcaaacgaattacgagccagttgagccagttgagccagttgagttggaggattggatgctatga

SEQ ID NO: 67091 - DNA, 732 bp, Acinetobacter baumannii
atgaacgcaatgtttaaccaggtgattgtgcaaacccaagcacgttgtaaaaaacacaacgttccaatgatcgaaatgttcaaccgtgaatcatgtccgatctgcgcaattgagtttgtgaatgcgtcaaacaaacaacatgggattcaagttcaaaagtctgtacgtaaaaaacacttcgctggggcaatgattcctaagcgacacgaaaattcaggttttagaaattacaacgctcagttgtcagggcagaaaatcgcacttactcaaactgcaagctatgcaaaaaaaatcgtgaatggcgatgtgacgaatcttgtgatggttggaaacactggaacaggcaaaacacatttgtcatgtgcaacagcaagaacacttttggcaaaaggcaagtatgcacgctacatcacgagcgaaaacttagcacaagacatcatgggtgcatggtcaagaactgacgatagcgaacgcaacaccattgcacgttacaccgagtatgacttgttgattctcgatgaatacggactgcatgaccgtgataagcgcttagagccagtacacaaggttttgtactcacgctatgacgctggcaaagcaacgatgatcatttcaaacatgacgcttgatcaactcaaaacagatttaggtgatcgtctttggtcacgtctgcaacacggtggactaaccatcatcgaatgcaattgggcagatgcgagggttaattcatga

SEQ ID NO: 67092 - DNA, 420 bp, Acinetobacter baumannii
atgagaatgactgaacaggagctagaagcaatccaaaacaagcgaaataacgcacaaaaacgcacattacagctcgataagagcaaaagtgatgcaagggtactaggaagattaaaacaaggcgctatgaacaaaacagagcgtaaatataacgatcacctagaaagcaaaaaaatgaaaggcgaaatcctttggttcaagttcgattgtatcaatttgagattggcggataagacgttctacaaacctgattttttcgtgatgaccaaagattttgaactgcaagtgcatgaagtgaaaggtcactggaaagatgatgctttagtaaaaattaaagtagcagccagtttatatcctttttcttttaaatcagtgcattggaatgaaagaaacaatgcttgggatgtaagagagttttag

SEQ ID NO: 67093 - DNA, 384 bp, Acinetobacter baumannii
atgaaaccagagcagtttattcgtgagcaggggttgccagaggctaagcaaattttagaaatggcgccagaagatgcaactcactacgagcttaatgttgatggtgatttctacttcaagcaggaaagatttgactggttctgcttcggtggtggcgagctaatcaaaacatacatggatgagtatgagacacagcatttgattcctttaagtttcctcaatcgtctggtggagtctttggacattatcgaatttcacgaaggtattagtggagcaaagctagtttataagctcagaccatcagatgcagaaggtgttgatctctgggtgagattggagcgcgctatcaaagaccacgaatcaatatacggagaagaacaatga

SEQ ID NO: 67094 - DNA, 282 bp, Acinetobacter baumannii
atgagtgagtttaaagtcggggattatgtagtgcatcctaagttttcaaacagaggattgtacaaaatctatgagatatcaggatcaataacaaaagttcagcttatgccaaatgggcgaaaaagctactcatttgaatctgatattcggcacgccacccccgaagaaatagcagcaggccaccgcattgatcaaacctcggtaaaaccgatagcagatatgggcgacgacttccccatagaaaaccacatttcgccaaactacaaagtgagtggagagtga

SEQ ID NO: 67095 - DNA, 267 bp, Acinetobacter baumannii
atgaaatttgattattgggatggaattgtattgggtgtatttagtggctctagccgcctaattttatcaaacattcatggatatctaggtgtttattggggctatagatcatttaggccaacacgcagaattttcacaattcaagacctaaatgacttgaagtctgatgcattaaatcatggtgtaaaaatggattggtctacatatcaatgggttcttaataactttgaactaattaacccgctttgcaaagctaaggatgtttga

SEQ ID NO: 67096 - DNA, 333 bp, Acinetobacter baumannii
atggctgctaaacgagaaattaaaacaccgggtgtgactgctgggccgaatcaagaacaacaagcaccaacaccagaagtaaaccaagacacatctacacaagatcaggctgaggcggctttgtctgaaatcttatttggtcctcaagattccgaacgttcaacgcaaacagatattcctgattgggcgagtgcaatcctacaaggtcaaacacgcctagagcaaaagctagacgcgatcttgtctcaatcaccaaatgcacctgctacgcctaaagcaaaaggccgattcaagcttgttgaaggcaagggccacgtttggacggaggactaa

SEQ ID NO: 67097 - DNA, 186 bp, Acinetobacter baumannii
atgtgcggaagtcctaaagtcgttcaaagcgatccagaagcagaagctcaattggctgctgaaaaagctacgcaagagaccaacaaaaagaaggctcagcgtaacttggctaagcaagacagcgtcttggcaagctcaatgaactcaactgttccaaataataaaactacattaggcggtggttga

SEQ ID NO: 67098 - DNA, 1662 bp, Acinetobacter baumannii
atggatattcaggctaagcagttatgcgctcggtttgggcaaatgaagctcagccgatctattcatgaggcgcactggggtgaatgctataagtatggagcaccagagcgtcaacaatcattcattggtgataatccaaaatcacagcgtgaaaaagagcgcgcagatttagttgattcaacagcagcagaagcaattcaactacttgtgtcaatgatcatgtcaggtgtaacgcctgctaattctatttggtttcaggctgcacccgatggcgttgatgacatttcccagctcacagatggtgaacgttggttagaaacagtttgtcaattcatgtggcgcaatatccacgctgcaaactttgacagtgaagcctttgaaactattacagatgtaactgttgcaggctggggcgttctctacactgacatcgaccacaaagaaggcggtggctatgtatttgagtcatggcctattggttcatgttggattggttcaagccgtcctaatggtgttgtagacatcatttaccgtgaacatgagatgactgcagaagcgatgatcaatgcttatggtgaagacaagtgtgcaagtgatgttgttaatgcagcacgtacagagccagagcgcagattcaagctattacatgtcattcaaccacgcaaaactaaaggagcagggcaattaaacactgatatggctttcgcttcatatcatgtggatctgaaccatcaaatcatcttaaaagagtcgggctatcaagagtttccatgctctattccgcgcttaagacgcttgccaaattcagtttatggcaacggtcaaatgtcagtggcattaccagatgctaagacgtgtaatgagcttgtgcgacaaacattgcgcgcagctgatatgcagatttgcggcatgtggattgccgaagatgatggcaccttaaaccctcatacacttaaggttggtccacgtaaagttattgtagccaatagtgttgattcaatgaagcgccttgatgatggcgttaatttccaaatcgctgagtatctgcttaacagtcttcaaaatggcatccgtaaaaagctaatggctgatcagttgccgcctattggcacacagcaaatgacagctactgagattaatactcgtgtagaaatcattcgacagcaactaggcccgttatatggccgtcttcaatctgaattcttaatgcctttgcttgatcgttgctttggtcttgctttgcgctctggtgtgcttccaccacctccacgtgagttatggggtgcaaacctttcattcaagtttatttcacctttggcacgtgctcagcgtctagatgaagtcattgcaactgaacaattcgttgtggctcttactcaattcgctcaagtggataaatcagtactggatgttgtcgatttagatgcagcagcaaatgtagtggcccgtggtcgtggtgttccgcaatcaatattacgtactgatgaagaagtggaccagctacgtacggcacgtcaaaaagccatggaagaagagaaacaaaaagccatgcaacaacaaatggcccaacaaatgggcggtgtcattgccgatggtgcaaaagccgctgtcacacaggatccaagcctaattacaggaatggctagcgaggtaatgcaatga

SEQ ID NO: 67099 - DNA, 456 bp, Acinetobacter baumannii
atgatttatttaattttcatagctgcaatgttcgccttggtggtaattattgctattcaacaaaatgccctagagaaagctacccaaaagcactgggatgaagtccgtgatcatgctgaaacacgcaagaagttagcagcacttgagcgggttgaagaaaaacaagaagaagcgccattagttgcagataaggcaattcgacaacgttatccgcgcaaacctactgcaatggattactacacgctatttgaagcaaatcctattggccgcgacatcctagacgatttagtcaatctgtttggcggtgtgtcttatacgcggggtggtcatgacgctgaccgtgagacctgctttaaggcgggtaaaaagtttgtagtcgatcacatcatcatccaagcaaacaaagcaacaacgaatcaacaaaatcaatctgaggtaactactgatgacaactga

SEQ ID NO: 67100 - DNA, 666 bp, Acinetobacter baumannii
atgacaactgaacaagcccaagaaacaacgaccactactgaagccactgagacgacagatacaacttttcttggtggtcaagaaagccaaggtggtgaaggtcagcaagcaactgagcaagttactacccctgcaacagtagcaacgccagacgattacagcgttgaaattgaaggctttaactttgacgagtttaaggcaattgatgaaaacaaagagttcctgaaagaagctcatgaagcaggtctatcaaacgagcagcttggctttgtgctgaacaagtacaaccagatcattcctgaagtcatggctcagatgtcccaaatgcaaactgagacatgcaaagaaacactccaaaaagagtggggtgcagagactcaggcaaacattggattggctatgaaggcagctcaagccgctggtctatcaggtgaagaaatccaaaacccaacaattggtaataaccctactgtcatcaaattacttgcccattttggtaagcagcttggtgaagatgtgccacctcaaaacgctcaacaaagtagtggagaggatgttcaagaattaatgcgaagtgaagcgtacggtaatccatcgcatcctgaccacaaacgtgttactgaacaggtcagccgttggtacgcaaaacaatatgttgaaaactaa

SEQ ID NO: 67101 - DNA, 909 bp, Acinetobacter baumannii
atggctcaagatatggcaaccaatggcgctatgatcaccgcagcatttaagcgtcagtttcacgatacttttgaagtaaagtgccaacaagataaatcagtgctgcaagtaggcgtggaagatcgtggcccgattcaaggctcgtcattcacaatcaatgatatgggcttggttgaaatgctgccatcaggtgcacgttttggggatactgtatggtctgtgcctgaatctggtacgcgcttggcaactatggcggattacgatttattcgtacctattgaaccacgtgatgagccaaaactttcagcaaatcccactaacaaatacatgcaagcttgtttagctgctgaaatgcgtcaacgtgatcgtattatttttaatgcatttggtgcgtcgattcagcgcaaaacagttgatggcgaaacatatacgccaactccattaccagcaacccaaaaaattgctgccgctgcaacaccaatgaacaaagcaaaaattgttcaggcgcgtaagttgttccgcaaaaaccattgtgacaatttgccgctctatatgatttataactctgaaatgttggctcaaatccttatggatgatgaactgactcgttgggataaagaaacaattcaagctatccaagatggtgatgttgcgaaaaaatgggctggcttcttatggcttccatatgaagacatcacatcagtaacagctggtgatccagcagtaacaacccaaactacctttgcttatgcgcaaggtgcagtccactacggtcgtaactctatcagtaactttgatattgctactcgtccagacaagaaaaacgttaaacaaattggcggtattgcatcatatggtgcaggccgtgcaaacgagcaaaaagtagtgcagatcgatttcatcgtgtaa

SEQ ID NO: 67102 - DNA, 564 bp, Acinetobacter baumannii
atgactaccacaaatataagcatctgcaatgaggcgctaaacctatgtggcgctaagtcaattcaaagttttgatgaaaatacagagaacgcacgccgatgtgctgtgctgtatgactctacacgtaaatcattattacgaatgcatccatggtcatgtgcaaaaaaacgtgtcgtgttagccccatctacaacacatccaacattcggctataaaaatgcattcccactgccgcgtgatttcttgcgtgtctttgatccaaatactcaatgttatgagtttgaaaaccgccacatcttatctaatcaagattcaattcaattggtgtacatctatgacaatgataacgaagaaacatgggattccttactcgctgaggctatggcgctatatctatgctccaaaatcgctaaaccaattacaggcagccaagcggaatcagacagcgcatatcaaaaattaatgaatctgcttaagcaggctagggctatcaatggtcaagaacgaccagcacaagactttgcagaaggtgaggcaagtttgattgaggtgcgctacccatga

SEQ ID NO: 67103 - DNA, 2079 bp, Acinetobacter baumannii
atgaagacttcaatcttaaaaaacaactttagcgcgggtgagctatcaccttatctaactacacgcaccgatattcaacagtatgctaatggcgcacgtcaattgcgcaatgtgattccattggttgagggtggggttaaatcaagaccaggtacatactttaaaactgtttttacgggggctttgcgtctaatcccttttgttgtgaactcagacaagacctatttattaattttcaaaaataatgaactggttgtttatgacccacgcacctacacaattgtgactacgcttagctctccttatacaactgcgcaagtaaatgaagttcaatttgtgcagtaccggtacagtatgtttatgactcacaaccaagtgcctgtttatcggtttagatgttctgaggactatacaaattgggagatggctttatttggttttgttcatccgccacttgatgatgagagtgcacgaagcccatttcgtaaggggacaccaagcggtaaagaactaggatcatcaatcacctttgctttaacacctgttccagactggttggaaacagttgactacgttaaaggcgatgttgtttggtatggcggaaaatattatcaggccttagctgcaagcactaataagccgccagctacaaacccaacatactggctggaagtagattcagcggcagctacagcagttttcacaagtgcagatatcggaagttatattgatgtgaacggtgggatcatcaaaattaccaaacttaatagccctgaagaagttgtggcagaagttgtaaaagaacttgaatctgacactgtagctattgaacgatcatggaccattacgccacctgcttttaatgcaacaaatggctatccaagatgtgtgacattctttaagcagcgccttgtattggctaataccaaggtgtcacctaataagatttggtttagtgctgtagctggaaatgcaaacttcttagagacaacagaagacgcagacgcttttagtgtggtttccgcttctggactatccaactcaattctatttcttgaggcgacacgcggagttgtttgtttaacctctggtggtgagtacatgattagtgctgatggtgcgctcacaccaacatcagttgagatcaatgaacatacttcatatggagcttatccgcttacccgtccttgccgtgtgggtaatgaattattgtttgtacagcgcggtggtgagcgtttaagagctttgtcatatcgttatgaggttgacggccttgtatcacctgagattagtgttttagcttcacatattggtgaagaacacggtggaattgacgagattacataccagcaagaaccgcaatcattagtctggtgcaaacttggagatggaaagctcgcatcaattacctttaacagagaccaagaagtgctagcgtgggcacaacatgattttggtgggactgcaatttcgctttgttcgttgcctacaaaattgggtagtgatcaatgtttcttgttgattaaccggaatggcgcaacatgtctagaagaaatccacgaagcagcaaatatggattcacagcgcacagtagccattacaaataatgctgttagtgttgctagtatttcatatttgacaaagtatgacttgcttaaaacaacaaatggttattactacacagtaccttatgagcaagaagggaatagcttaaatatcctcaatgataccgaaacaggacagatccaactaggaatggcatttgaaggtttagtggacctattcccgcctgagttgtctcaaaatcccgcaactacgattcttgccaaagccaaaattcagcgcgttgcattctttttcatgaagacattagggcctttatttaatggagaagtcctagagctatttgacttcaatcatacgcctatggatggacaaaatctatttactggccgtcacatctacgaaggtggtgactttggtgatctgtacgaaacagagatcaaaatatcacttaacaaaccacttcctttccacatgcaagctttagctatagagatttcagttaatgagcgataa

SEQ ID NO: 67104 - DNA, 456 bp, Acinetobacter baumannii
atgaagcttcgtgttgccacacttaacgatattccgacactggtcgagtttggtaaatcatttattgatgaggcgccaaactaccagaatcggcactattgcccagaatcagcagaagaccattttaaaaagttgctcaaagagggggtgatttttgtagttgagcataacggtttgctttgcggtggttttgcaggcgggattggcaaggattggtttaacaatcagaaaattgcttttgattatgtgatgtacgtcaagccagattttcgaaaaacaagggttgcctacatgttagtaagcgcctttatcaattgggcaaaaattcttaaagctgaccgtatccagtgtggcactacaacgggcgttgaatctcttgggtgtattcgtttgtacaagcattttggcttgcgcgaatacgggactgtacttgatatggagttagcccatgactga

SEQ ID NO: 67105 - DNA, 513 bp, Acinetobacter baumannii
atgactgaggttatatcgccagacaataaagagcttttaacctatgttctaggagacatacataacaagctctacattgacgtggtgcgagatttaaaacaacaaactgagcaaaaattagaatctggtgaacttgaaccagcagatttccctattacacaccattttgcaccaggtgtttattcacgtcagatggatgcaaaagcgggaactttctgcattagcaagatgcatcgcactactcacttaaactttttaatgaagggtgctttaaccattatcactgaagaaggtttgcagtacttagaagcgccacaaattattgtttctcaagctgggacaatgcgaatcgggtactttcatcaagatactacttgggcgactattcatccaacaaatgaaactgatttggaagccattgagcgtgatgtgattgttcctgaacatgaaattgaggctttccttgcatcaattggtcataaacctaaggagattgcattatgtcttgggtag

SEQ ID NO: 67106 - DNA, 426 bp, Acinetobacter baumannii
atgtcttgggtagcagtcggtgccgctgctgctgtagcaagtgcagctttggcgggatattcagcttattcacaatctaaaacagcagagaagcaagcagaagcagacgcatcggcgcaagcttcaagaggtcgtttagaagctgaacgcatccttaagcagaaaaccaaacaacagtctatggcacgtgcagcagcagcagccaacggtttagatgtgaatgaaggtacagcgcttaagattaatgatgagattgaaaaagcaggtcaatatgacgcagagattgcacggcagactggttataacgcatcgcaacgcttaatggcgcaggcagatcagtacggtaaaaatgcaaataccgcgttggcttctggtgcattaaacatggtctcagcaggtgtttcagctaagaaggggtggaaataa

SEQ ID NO: 67107 - DNA, 2043 bp, Acinetobacter baumannii
atggcaaagatccctatgggcaactttggtaatgcactgccggaggtgcaagaaacacgcttgcctcaaagtaatttaaacatgcttgccaatactcttcaaaatgttagcaatacagctgggctgattgctgaaaagcaaaaacaagatcaaatcaagaaggatgatttaacagcttctaccattgttagtcaatttggtttagatgctgaaaacatgggtgcagaatatcgccaaaaggttgccagtggcatgagtgccacagatgctgatcttgaattttcgaaagaatatggcttgaagatggatgaggtcattgcacagcttccaacaagtgttagtcagggatataaggaaaatcttgttaaatatggcgctggtcaggttggaacgttctatcaaactggacgcaatgtggctggagatttggcaaggactaaccttaagttaacacttgagaatggatccaaaatgagggaccaagaggcagctctacccttagttgaaaatgcttttaatgctgccgctgactatttgagtccagcggaagtgattgaattccgcgcaaactacaagcaacaacaacagagcaacaatattggctatcgcttagcaagtgctaaaactgtacaagactatcaaaaaatttacgatgaacttcaggatgaaagaaattatgacggccttcctgggtctacacgtaatagtgtaatgcattctgcgcaaagtggcattttgcgtattcaaaagcaagagcaacaagctcataacaaaaaggaggctgatgcggttaaattggtaaatgccctccaaagcaatgtattgtcaggtggaaaaattgatcttgagtacatgaccaatataggcaaggcgacagagggcacagcagcttattctgatttccaatttctacaagaaaattatgtaaagattcaagagttccaaaacctgagcactaatgacaagaaagtgaaacttgatcaattagagcgcgattttaaaaacactccatctgataatgcatctgacagaaaaaaacttttagatttgtatcgtagtagttataaccaagatgtttctgatgcgaaatcaaataacgtatcggcagcaggaaaacttggaattgaagtgagtggctttactggtcagcagcttttatcagatccagcaggaacaatggggttaattgtgaataatttgcatgctttaaaccaagcaaagaaaatagaacccaatattagccttgatccaatcccatcattaaataaagctgatattcaggaatcttttgagaaggcaagtgctaataagaaattagatgtcttagctagcattatgaaaggttctcaaaaaaatagactctcattgagtgcaacaaaagagattatcaaaaccattggtggtggtgatggcatatacaacattgctgctgtagctgtagcaaataatgctgtctaccatggtaaaaacacaggccatattattttgtcaggtgcgagcttaattaaggcaggaaatcaaattacgccgaaatcactggaaactgattaccgcagtaaactcagcaatctttcaggtgacggtgattattctgccaactggtcagcatttaaatcagcctacgcttattttgaatcagaggcggggcatcatcaaaagagtgaaactgatatggttgatactgattcatttaataaagccctagatgctacgactggtgggctgtatcggcagcacaacacctcatggtttggtacgggtaagtttaaaacagcaaatggaactgtcactgattggatggttcaaaaaccttatttgatgagtgatagtggttttgaaattgctgtgaattcgggctttgaacaaattgccaaaaaacataatttatctcctgattttgtaaaagataactatcgactacaagcaagaccaggttctacatatgatcgaaatgtaatttatgacctgctggatgcagatggtaagcaatggaatgtgaatggtagaactcaaatgattattgtcacgaacaagcggagataa

SEQ ID NO: 67108 - DNA, 2889 bp, Acinetobacter baumannii
atgggattagcctataatgcattagatgacgatgatagtgatttggatgcttatgacttgagtctaagtatgaaaccaagcgcaagtcctggtacaccaactgatcctaaaaatttaaaagaagagccaggctttttttctggatcatctacggctattcagcgtggcgtaaagtcaggcttagggaaggttgttgtttcgttgatggggacagaggaagaaaaccttgatgctgcaaaagatagcaagttacagcaacaactttaccagttggctgtagaaaaagatggagtgattaaaacaggcacttttgagcagtatacggagcgagtatacaaagagggcaaaaaagataccatgcaatttattaaggacaatagtcctaatgaaggtgatggtatgggggctcaaattcttaatagtttgggagactatgcaacacgaggtgcaattggtggaggcgtagctggtggtgcatatgttgttggcacttcaactaaggactatgtttataacaagctgattgattctggggtggatgaagctactgcacaaaaagcgtcttggaatgatggttttgtagatggtctgggaatggcggttcctatttaccgtggtgctggagctttaaaaaatgctagcttggttgcggcgccagtagtgcttactgaagcaggtcatgcaatcaatgaaaatttgctggaaaacaagggctataaaaaacaagcaaaagagtatgagttctctacagagaacgtaatgactggattaattcttggcggggcaattaaccgaggaacggcatatcttgattcacgtggcaataaaaaagcattagaacaaaccccagaagaggcacaaacaactgctgaaataaaagatgaagttataccagctatagcaaagcgccttgaagatgagtacaacgagcttggtcttcattcaagtgatattgagacaagagagaaaattaaacaaaatagaaatgttgctgaagcacagataatgagtggacagcctattaatgtgcctcattcagatgtttccgagccaattgcaagaccaaaactaaataagtcgatactaaatagtaatggacagcttctagctacaaaggctgaacaagtaggaattaacccaagtgatgcactaactattgctcaccttgaaagtggagcgaacttttctgcatcggcacagaatgcaaaatcaaccgccaacggcattcttcaggttattaattcttcttggaaacgcttgggtggtggtgatcggacggatattaacgagcagatccgtgttggattgctgcacatgaaagaagccaattcctatattgcaaagaagttagggcgtgagccagtagcgcatgagcaatacctaggtcatttacttggtccagagggggcaactcgggtattaaaagctgatcctgatgcaaagctgattgatgtagtgcgtaagtatgactcaaagcatgctgatgccattgtgaagaacaacggcatggatggcttaactgtcgggcaggctatcagcaaatgggaacagaaatggaataaggtgagtgcgcgttatggtggcaatggctcaaaccgtgtcagcaccgcttatgatgccaatggagacagctatgagctattaacagaaattgaggatttatcggacttagttgcgtctaatgaaatgaacggtgcattaaatgcaatgtacccacaggaattacagccacgtgaccgctcgagtgctgcatcacagatgcagattgagaatatagcgaataatttaagagcagaagtgcttggcaatagccaccgagtttctgatggtgcgccaattattgatttaaataacgtggttgaatctggcaatggtcgtacattagcgattagaaaagctagtgaaacaggtaaggcagacgattatcgcgcctatgttgagcaatatgcgcgtgacaatggtatcgatatctcaggaatgaaacagcctgtactggtacgcagacgtttgtctgaagctgatcaggttgaatttgcacgtgtcgccaatcagcaggatattgcgggttacagcgcaacagagcgagcaagaaacgatgttatcccagatacaagcctgttgaagttcaatcaggatgggaatattaactttgaccagtcacatgagtttgtaaaacagttcttgcatggcatcccagaagctgagcgtgtgaatcttataaccaaggacaagcaacttagccaagatggcaagcgtcgcattgaagcagcagtggctcatcattcttatggagactccaatctggtcgcaagactgtctgagaatcttgatgatgaaagcaaaaacttactaaatgctcttatgcgagtggcaccgcagcttgcacagcagaacgacttaatgaagcaaggtgggcgacatgcaaacactattgccaaagatttagctatagcagcgcaaaagctcagtgatctaaaagccaatggtcaaactgtgcctgattatttaaatcaaggccagcttatcgatgacggtttgagtgatggtgcaaagcagttcttgaatatgtttgatactaacaagcgcagctctaaagcgatttcagactatattcagtctgagataaataagattgaacaaatgggtgatccgcgacaaggttctttatttggtgatacaccagagcaaattacagcgatgcaaatcttaaaagataatccagatatggatatagcaacattcattgaagatccagcaggcaatgaactatcagctacaaccaaagcttcaaatgtattggagcaactaaaaaaagaaactgaattagctgatatggatatccttgcatctcaaacagcgattaattgtttattgcagtacgggacataa

SEQ ID NO: 67109 - DNA, 2538 bp, Acinetobacter baumannii
atgaaagaccaatgcaaagcagctgtagccaaagcacttggcaaaccaaaattaagtcagcaagaagctactaaaattgatcagcgcgtaacaaaggcaatgactaatcttgcacgtcaagatcgagataaatggcgcaatatgagtcagatcgacaagctgacagcagccagtgagcaagttgctaaagatattcaaagtgatttagcacgaaaaaaacagattttggccaaagatattattaaacgaagtcaaggtttagaaatcttaaagacacccgggcttgctgcaaatcaaaatttagaccggatgattgctcataatggtgacatgtctggaattacatcattaaattctgaatacaaagttatcgctaatgaaacaaagcgccatatgtggaatttctataccaaaataaaaggtgctttaggaatctggacagataaaaagttaatgaacgatgttgctcgtgagcgttttggggaagatacgggtaataaagttgcaaagcagatatcagaagaactcgggaaaatgtatgacgaccttcgcataagatttaatgcggcaggtggcgatattggcgatcttggtgatgactttggatttaatacgatttggcatggtgataagttaaaagacgcaggggtacaacagtggttggatgatgcgcttaaaaatatcgatcgctcaaagtatgtggatgttgatggtaatccattaaccaatgatcaaataaaagagatgatcagttattcatttgaatcaattaccacagatggcctaaataaattaaatgttggcgagatgcaccaaggtggcgggaaagttacaaaccgtatgagtcaatcccgtgttttgcattggaagaatgcagatgcatggcttgagatgcaacaaaaatatggggcgctaccatttgttgatctgattgattcgcatattgatactatggcaaaaaatattgccttagttgagaaatttggtagcaatccaaaccgtgcttttgagcttttagcacaagaagccaaacgtattgataacgcaaatggcattaaaacaaatgccttaactgacggaattcgtcgtgcaacaacaatgtacgatgtatttgcaaaccgtgaaatgggacatggtattgaagcattgaactcctttggtgtggcttaccgtgcatggaatgtatctacaatgcttggttcagcattgttggcttccctgtcagatatagcaccaatgataaaactggcacgtatgcacaatctatctgtagcgaagcttatgggtaatctaataggcgagatgaatccatttaaccccaaagatagggagttgtcatttagcatgggcattgctgttgatgaaataacatcatcattaggtcgttttgcagctgaagacctgaccagcgtttacgatcgtgccagtcaggtcgcacgcgtatccaataccgctgcatccaccattatgcgcgcatcactcttaaacgcctggacacgcgcaactaaggcggcttggtcaaaaaccttaatgaataaatacgccaatttgcccaaagaaaaaaaatgggggcaactggatgcaaaagatcagagttttttaaaagctgttggcttggatgaacgtacatgggaggtaatgggtctggcagagccaatgaaggatggatcaggcaacccattgatgactacgcaatctattttaaacatccctgatgatcagttaaaacacttgggtgatccagtagaagtcaaaaaccaagccgttaaaaaatacttttctcatgttttagatgaacagggtatggctgttattgaagccggactgcgtgagcgtacaaggctgtatggtaaaactcatggcggtgaaattttagggttttttggacgcggaatgatgcagtttaaatccttccctgtaacctttctgatgcgccacggtacgcgcgctttgcgtgatggtgcattctcaccaactccatttacctatatgattcctcttgctatggggatgagtgcaatgggtgccttgtcactacagttgggtgaaattgcaaatgggaacaatcctctaacgatgtgggatgacgatgatccagatgttgctttaagctttatgacaaaagcaatgatgaagggtggtggtatgactctcttgggggatattgttgcagctggtgcagatacgtcaggacgtgatggaagggattttttattaggtccgatgggtggcgacatggtgaaactagcccaacttaccggcggaacagccaatcaactactaaatggaaaagatgtaaccagcaaaaccaaccaaatgtacatgttggcaaaatcaaaaatacctgggcaaaacttatggtacgcaaaaactgttatgaaccgcttaatgtttgatgatcttcaaaatatgattgcgcctgactatcaagaaaagtataaaagaaaaatgcaaaagcaaggccgtagccaatggtgggaaagtggagaaggcttggaaggtttgaatggtattgagttagaggaggtggttaagtga

SEQ ID NO: 67110 - DNA, 585 bp, Acinetobacter baumannii
gtgagacttttaatatccttttttttattaatttcttttggtcagtttgtgcatgctgattcagatgaatatagtgttgctgttgggtatagtgcggacttttgtgatatctccagtaatgaaacgtgtattacgcattttgatgaattaacaaatagtttgtttaagaaatggggtgatagcttgccatataattactttgaggatgatcactataatgccaacattggccttcaaaatctttattgtgctgcgttatctgatcatataagagaattaaaatatgctccaatatttttcgataatggaatgaagtttattgatgactatgcagcaaaacatgcggtaagagaatcgaaatcttacgatgatttaaggaatatgaattctacaaatatcaatatcccaaagtatcaccagtcatggttgataaatgataagaatattttaaaaggagttattttttcaggaatttcaaatattcttaatgatgcagatgttgctacagatggagatttaaagagattaaaaattaaaaaaaagatgaaagaatcatacgatagtaattgcatgcctctgctgtaa

SEQ ID NO: 67111 - DNA, 2448 bp, Acinetobacter baumannii
atggcagtaccagaacagacgccatttatagaatatacagcgaatggaaccactacagtttatccgcttacgtttgactgtgataaatctgaatacttgattgtatctcttgatggggaagaagccccagttgggtcatggacccttactggtgggtcaataactttcaattctgcacccgctaatggtgtgctcattacaattgaaagaaataccccattccaaagaacaacagattaccagtcctacaacaattcattccgcccagcgcctgtaaacaaagactttgatttaatctggtggaagcttcaagaattaggtgttgctgattggattctcggtaatcgtattagtgcacttaaaaactatgtggaccgtaaagatgatgagctgaaagcttatcttatggaggagatccgcaagcaaggtgttgctttagatcagcttgatgaatactacaattatctcatgcagcgacttgctcagattgctgtggataagggctgggaagcttcttttgttgttgatgctagtggaaaaacgcagcaagaagtaaatgatcgtggtgggtcgccgtggtacaacaaaccggatggttattccgcacaggaaaaggcactaattatcaacggtgctggcgtaagatcaatagaaaataacaacaccaccgatccgaatactgatatgagtaagtgggctttcattgagcatctgatttttaaatctcgcgatgaaatgctggcttatgcaaacccgaaaacaggtcaagttgcgcatctattaagtgtccacgctccaaactttgcgctactaaaaccacaggacggcgatggcttctttatttacgatgaatctaaatcaaatgacaataatggcggcacagtctgcaacggatgggttcgtcaatacgctggtgatgtagatatttcttggtttggtgctcaacaaggtgcagatgccagtccatttatcgaagaagctttaaagatcagcaagtctatcgttattcgtggcaactacacattagaaacaatatgtggtattccagatcaaaataactatagtccaacggttatatcaattcgcggggaaaatcaagcaaccttgactgtaaattgccctgctggagctgtattcacatcggctgctgctaagttaaacccaacaagcacatcggatatttatacgggaaaaattaacgtcagtgacattaacttcattggtacaactattgcgaactcagttatatttaacggtgatcgcttgtacaacatgaagatacaccacaataattttcatggaagcgtcactattatcaaggctgttgttaagcgtttagctgatcgaaactatattcagtcagtagacattaacaacaatcacatggcgcttgtgcatcgtgttattgaggcagatagagcttataactttaacttctcatttaacgcttgtgagaactgcatcggtggtatttacatcgggatagatgctccattcgacccaactggtatgtctgtttctatattcaggaacctatgggaatcaggcgggatgattctaaaagttcagggcgggttggttgcaggctctgtaagtaaaaactattttgagtctaataatattgctgatgccgctacagataaatgtcagatttatattaacagaactggaacaggtgcgggtcattctggtggtttagtgtttgactctaacttcttcagtggttcagcgtccgttgcgggatattgtgatgtccgaattattggtacacccgatgtttcagggagtacaactaaaaatgccataaccgcacctgccgtgtttattgggaactggtccgagaatgaaagactcgtagataatccatccgcaatcctcatcggcaaccgcattaaagatcgtgcgctaatgcttaatgcttacacgccacaagaagctcgcgttagtttcttatcggggtatttgaataaagctgtcacaactaataccgtaagatttatgacaattgatacgcgaccatgcctgactaatggtgcagcgtcagcaaactttaaagccagcatggatgttatgttgaatttcaccacatctggagcgattaatactgcaaccgttgggtttaagttagatttaatggtttttgcagcctatggagttgttacgccaccaccgaaagcaggattgaaagtttcgatgtctggatttgctcaatcaagtgggtctgacaaaataacaggtacggtaaacatggcatctgttattagcaccccgactttgagtgttattgacaatggtgatggaacttatcacttagacttgagtacattttcgaactatagcgcaccggactggggaaatataacaaatgttcgtgtgacctataatatgcagggttctggttatataccgggcggttactcatccttcaacttgctaggtattagttaa

SEQ ID NO: 67112 - DNA, 384 bp, Acinetobacter baumannii
atgaacatggatatatattcagcaacacctcctgttgctaaaaaacgcagaacatacagcaaagaattcaaactcagtattgtcaatgcctgtaaaaatcctaatacctcgatcgcttcggtcgcactgcaacatagtattaatgccaaccttgtcagtcgttggatcaggatcttcagccatcatgagggtgccgtgcaggatcctactcatgtgaatccagcatttattgctttgccttacactgctgcaatcagccaacctattgatgagaggatcacgttgtgtatcaccgtgcctcatacgaataatgatattcagctaaaatggcagacatcagaaatacctgccttggcagaattactcaaggcactggcaacatga

SEQ ID NO: 67113 - DNA, 384 bp, Acinetobacter baumannii; identical to SEQ ID NO: 67112

SEQ ID NO: 67114 - DNA, 384 bp, Acinetobacter baumannii; identical to SEQ ID NO: 67112

SEQ ID NO: 67115 - DNA, 198 bp, Acinetobacter baumannii
gtggttttacgttacccaatcaaggacatggtggtgagaacagtcgatgaaacccctcatcctcaatatgtagctttagatggatatcggcacatctatcacactgactttattcgattggctacccctgaagaaatcaaggttggctatcgaatagatcatcatattcttcagtttgatttaagccgacgtaattag

SEQ ID NO: 67116 - DNA, 702 bp, Acinetobacter baumannii
atgttcgaagactttttagtatcatcagatacagccgcagttctcagcttcattgcatttctcatcttacttttcattggttcaaacaataaaaatattggaattttccacagtgtttttaatgtttatcaatacctaaaaaaccgaaaaatagaatatctgaagaatcaattggcctcccccgttgttgaggaagaggataaaaaaacatatcagaatgagttaagcgttgtgacactacaaaaagaactcaatctcaacgaaaaagacttacagaagctgcgctgtatcaaacgtaaaaccgacagtgaatttactgcaagactctataaaaactgtagttcgttgcttgtatttgattatgttactaatcaattcaaactcgctaaaccaattgaccctaaacgagctaaacaacttgagaagatcggagtatgtcttttctttacgtctggactattcgcctacgggttcttgctttatatgctctatatctacgatatgccactccacaatacgagagatattttagcttgggctggtatcaattattttctgatgtttgcaatcgttttcataggaactcggatattaaaattctttatgaaacaatcaaatgctttaagatttattgaattatctgaaagaaatttgactccccaacaagaactgctacatacgacacaaaaagaacaaaaataa

SEQ ID NO: 67117 - DNA, 603 bp, Acinetobacter baumannii
gtgaatggaatcaggagcagtggtgatttgaaaaaatcgagcacaaaaaaagaaatgatcttgtcaacagcaattcaactgttcactaaagagagttatatcactgttggcgtggatagaattattgatgaatctcaggttgccaaagcgaccttttataagcatttctcatctaaagaaaatctagtcattgcctgcctacaacgtttgaaagatgagattcgagtcagtgtagaagatcgtatctttaacctatcgacaccattagcaaaactatatcagctttatatgtggtatatcgactggattgatcaaaatggtggtaaagggtgcccatttcataaagcacgaatggatgtagctgagttatacccacctattttaattacgctagatgaatatcggagctggttattccaacaagtatcattgctatttgaacaattagaagttaatgatccccgaatgttaaccaacctatttattcacattttagatggtgtaatcagtgattcagctatagatgaaagcctacttcaacctcaaaaaacatgggtatatatcagaacattaattgagcttgaaatggaaaattttaaataa

SEQ ID NO: 67118 - DNA, 135 bp, Acinetobacter baumannii
atgcgaaaactttcaattttattaattgcatctttagcactcatgctcagtgcttgtaacgatgataacgactcagataattcatcgccaacaacaccgcctaccagtaattgtaaaatgcactgtgcaccataa

SEQ ID NO: 67119 - DNA, 384 bp, Acinetobacter baumannii; identical to SEQ ID NO: 67112

SEQ ID NO: 67120 - DNA, 384 bp, Acinetobacter baumannii; identical to SEQ ID NO: 67112

SEQ ID NO: 67121 - DNA, 153 bp, Acinetobacter baumannii
atggctgtaactatagccattatggggcgtgaaaatttagaaattaaaagtgtaatgaagcatcatgcgctgttcatccagacttttgccatgtttggtgtcgtagttaatattttagaaaagaaacttaagatttttaatccaagcatttag

SEQ ID NO: 67122 - DNA, 4404 bp, Acinetobacter baumannii
atgaacgcagtaattaaaggcgcaaaggcagggcagggcaaatcaagacagccagtgattgcacccgactcagcacaatctaaaacctatattaaaattctatatggtttatctgagggtgaagttgaaggcttggccaatggtttgcaatcggtttatctggaagaaactccgctacaaaatccggctggcggctggaactttgaagatgttcaggctgattttcgccatggtactaatgaccagactcatatcgaaggctttccagatatctcctctgaaactgcaatcaatgttgaattaaagtctgaatcgccttgggttcgctcactcaccaatactgatctggatgcaatccgtttacgcttcaagtgggggccgctacgtgagcagaatgctgaaaatggtgatgtaaaaggcatcgtcattcagtatgcgattgatctacaaactgatggtggcacatggactgaggttttaaatactcaaatcgctgacaaaacttctgcaaactatgagcgctcacaccggattgatttacctaaggccgataccggctggacgatccgtgtccgtagaatcacaccgaactcaacatcagaatatatcagtgacaagatgtatgtggatgcgctgactgaagttatcgacctgagattgagttatccaaatacagctttactcggtctgcaatatgacgctgaaactttctctaatgtcgcaaaaattgctgtggatttaaaaggtatcaagcttcaggttccatcaaattatgatccggttgcacgcacttatgcaggcatgtgggatggtacatttaaacgcgcttataccaataaccctgcgtggatttattacgacatttgcacatcaaagcgctatgcattgggcgaccgcttaacgtctgcaatgctggataaatggtctttatatcgccttgcacagtattgcgaccagatggttgatgatggcaaaggcggaaaagagccacgttttacctgcaacgtttatctgcaatccgccgaagatgcttatgtaattctcagcaaactggcaggtgtattccgtgcgatttcatactgggatggcaattccattgtgtgtgatgctgatattccgcaagacacttactttacttacacacgcgccaatgtgattgatggtctgtttgagtattcaggcactcgtgcgcgtgatcgacacacagttgcaaaagtagcttgggataacccagcaaatcactataaaactgaatatgtgtatgtgcgtgatgaagcagctattgcaaagctcggtgtacgtattgctgaaattgatgcatggggctgcacatcagaagggcaggcacagcgtgcaggtctttgggcgctaaagtctgagcaattagaaactcgcactgtatcttttaaagttggtttggatggttatattccacagccgggccgtgtgattgaaatcgcagatgaactgtttgcaggtcgtgccaatggcggtcgtatttctgctgtcagtgccgaccgcaaagtcattactctggatcgtgatgatgtggtgtgtcgtgcgggtgaccggcttgttgtaaacggtgaagatggtaaagcacaagcgcgaattgtgtcatctataaatggtcgcaatatcactgtaaccacggcttttgatgcggttgcaccagaaaatgtttgggtcgttgatgctcaagacttaaaaaccatgaagtttcgcgtcatgagtattactcaagacgacaaacatcagttttcaatcactggcttgcaatacgagtcagcaaaatatgatgcgattgattttggtgcttttattgatgagcgtccgatttcaattattaatccaactgttcaagcgcctgtcgagtctgtatcaatcacttctgaaactatggtgcaacaaggtcttgcagtggaaaccatggttatctcatggccacaggcacaaggtgcaaccaagtaccaggtggaatggcgaaaggatgatggcacctggattaaattaccgattaccggaaataactcagctgaagtgtcaggcatttatgctggtaattatgaagcgcgtgtgacagcaatttcagcctttgatattgcttcactgccaacatattcaattctgacttcactgaccggaaaacaaggcttgccgcctgctttagccaacattacagcgacaggtatcctgttcggttatcgcttgaactggaattttcctgcggttggcgcacttgataccgcttatacggaaattgaaatttcaagtacagcgaatggtgctaacgctgcacagcttggtttatttgcttatccaacagatacgcacgaaattcagggaatgcagccaaatttaacacgttggttccgtggtcgtttgattgaccggattggaaacattgggccatggtcggattggactcatgcgacaacttctgccgatgcaacagatgttcttgagctcttgaacgatcaaatcagtgaaactcagctcaatcaggatcttaaaaccaggattgatcatattgagactattgacgctgaaattggtccaattaagcaagatatacaaaatacgaaagatcggattgcacaagaagtcattgatcgacaaaacgctattcagcaagcttcagatggcctttcacagcaaattattgatggtgatgaaagtgttcttgaagttgtagaaacggtcaagaaatcaagtgatgatggtcttgcggcggttcaggaagatattcgtgttgttgcaaatgaactctcacttgttgctgaaaagaccgatggcgtgtatgcacagttaaatccacctttaattggctctgagtctgatctgattggtaacgatcaaggttttgctggcacatggtctgttcaatcggcaatgatcgaaggagacttggcacttagtaagcgtattgatacgacagttgttgaagttaatgatttacgtgcttacgcacggcaagaagttgaagcgcgaattgaaggcgataaagtaacagttcaaaagattgatacgtatatcgcaagtaatgacagtgctcttgcaactgtacgccaatctgcacaagttgcagttgagcagtcagctgcaaatgctgaagcaattgattcaattaatcttgagcttgacgataaagcttcaactggtgcacttgagcaagttaagtctgatattaagaatgtagatgacaaagttattgcccaaactacaaggattgatggagtttacgcgcaaatcaatcctccgttgatcgggtcagaatctgacttaattggaaatgaaggaggttatgcaggcgtatggtcagagcaatctgctcgtatcgaaggtgatttggcccaagctaaacttactgaacagctttctgctcagatgaatgagaacaatgccgtattcaagcgccagctcgaggcaaattcaagtgctatttcttcaacgataaaagtaacggaaacgttgcaaactaaagtcggtgagaatagtgcgtctattcaaaatgtcagtgaaagtgtagatggcatctatgctcagcagtttactaagttcgatgtaaatggccatgtttcaggtcatggatcaatgaatgatggtacgacttctactttcatttttaactatgactgcattcaatttggtactccggtgggtatagatggtattgagccaaaacccttgatgacattacagaataagcctgtgactctgcctaatggcactgttattccgcgtggtttgtatgtcgataatggtagttttgggtatatcaatgcgaatcgaatctgggctgaaaacttaagtgctattagtgcagatttgggtgatattgaagttgataatgctcacattaaaaacggagcagtagatactttaaaaattcaagatgaagcagtcactgtcccttctggagtaattaatcaatcagagcgtaagttttattttgctgtttctaattcaatggcgggttcggttgcctatacacaagatctaattaccctgaatgtagagacgcaaggagggaagttaaggattgatggatcgtttgtgtttgattgtaaggtcagacttacacaatatccatcctcctacaacatcttgaaatgtgtgacattggcttgtcgggtattagtaaatggtactgttgcatacactcaggaaatatacccaacattttatgaagggagcaatacaatccggtttattggagttactgcgacacctgtttatatcctacctgcttccaccggtacaaaaacagtagtgcttcagttggcctatatcactaaatattccaatatttattatggctcatttgaagctcaaggtggctttgccgaagctcctacaataatcaccatgtcatctttatcaacattggagcttaaaaagtga

SEQ ID NO: 67123 - DNA, 540 bp, Acinetobacter baumannii
gtgacggtattagtttcaaagaatggtgaagttattggacatatttttggtaatgaagagatgatcaagctgaatactccggaggggtgtgtagctttagatgatcctccttatccaaatatgttttatcagggtgggtgggtagagatgcctgctcaaccctcgccatatcatatcttcgattatgaaactaagaagtgggtcgataatcgatctttagaagaggtgaaaaggcacaaatgggaacaaatcaaacagattcgggatcagtatgagtttggcggttttgagtttgaaaataagctttatgattcagatcctaattctcaattaagaatcgctactgcagctttgctcggcgtatcagttgagtggactttaaaagacaattcagttgttaatcttagtcctgatcaattgattgacttaaaaacagcacttgcagtgcacattaataacattcatgaaagagggcgtattgcacgacagaaaattgaaactgctttgacatatgaagaaattgaagcagtaaatttttaa

SEQ ID NO: 67124 - DNA, 384 bp, Acinetobacter baumannii; identical to SEQ ID NO: 67112

SEQ ID NO: 67125 - DNA, 384 bp, Acinetobacter baumannii; identical to SEQ ID NO: 67112

SEQ ID NO: 67126 - DNA, 702 bp, Acinetobacter baumannii
gtgcattattcattaaaaaaacgactgatttggggcacctcaattttcagtgtcatcttaggttgtattttaatttttagtgcttataaggttgcacttcaagaagtcgatgaaattctagatactcaaatgaagtatttagcggaaagaacagctgagcaccctttaaaaactgtaagcagtaagttcgattttcataaaacttaccacgaagaagatctgtttatcgatatttgggcttataaggatcaggcccatttgtctcatcatttacatttgctggttccacctgttgagcaagcgggattttattctcataaaaccgctcaaggtatagtcagaacttatgttttacctttgaaggattaccagattcaggtcagtcagcaagagagggttcgtgaagctttcgcttgggagcttgcgggcagtatgtttattccgtatttaattattttaccttttgcaatatttgctttagcagccattattcgtcgtggtttaaaaccaatagatgattttaaaaatgagttaaaagaacgcgattccgaagaactcactccaattgaagtacatgattatcctcaagagcttttacctactattgacgaaatgaaccgtattttgagcgaatttctaaagctcaaaatgaacagaagcaatttattgccgatgctgctcatgaactacgaacacctgtga

SEQ ID NO: 67127 - DNA, 141 bp, Acinetobacter baumannii
atgttaactttggagcaagcagtgacaatccaaatacttcatcaacaaggtaaatctattaaagccattagtcgtgaactaggggtgtccagaaataccgtacgtaaacaccacacctcagtatcagcgtatacagcctag

SEQ ID NO: 67128 - DNA, 927 bp, Acinetobacter baumannii
atgtctatttatattgattcacacaaggctgtgctgaagcaggtaggtaatctatttgtaaatatgcactcgcccctacccaatcaccatctcaatcaatttaattcttcagatggggatggttatagtgaaatctatgattttggaaaactctgtgtaggtaaaggtaaatattgggttgatcggccattaaagatgagtgctgagtcgccaagcaatgcttttggaatcaccatgttattgtcagggacacatcatattaagaatcaccgtagtaatcatgaataccagattcgctcacctatgattatcctaagaaaaggaagcctaggtttacagactatctatcttcaagaacacaaaaaaatggctttaattacattagattttaatgaaacttttctagaaattatgcaaactagttttcagcatcatgatttggcaaaatttttcttagcggatcccaatcctgcacttaaaaccatcaatattccgaataaaaatgtacttcatcaggcacattatttattaaatcttcctcctgcacagtcatctattgatttattgcatttagaaggggcagctttagagctgatgagtctgttattggatcaacatagcaagtcaaatcaaattcctgcccctattcataagagtattatgattttagagtcagaatttgaacaaaaaatcacaattcgaactttagctaagcgtgtcggtataaacgaatgtgatttaaaacgcctatttaaagaatatacaggaaaaacaattggtcattatttactggaaactcgcatgaaacatgctcaaatattattgaaagatggtgtttcagttgaaaatgtagctaatcaggttggttacagtagcgtacaatattttaagcaaatttttgaacagcattttggttatagttgctaa

SEQ ID NO: 67129 - DNA, 345 bp, Acinetobacter baumannii
atgcagcatggaatcaaatttaggccaaataaaccaggttcacctcatttgaatggcaaggtagagcgttctcaaaagactgataaatctgagttctacgctactgtcgatattaattctgaagatatccaagacaagctagccgaatggcagcattactataactggatgagaccacattcagctttgaaaggtaaaacaccgatggaaaggtactttgaattatgtgaagaaacccctttctctgatgaggtccagaagcaatacaacccatcaaatgaacggattcaacacgccaattacaagatggatttagagatcgctaaattgaaacgatctctatga

SEQ ID NO: 67130 - DNA, 627 bp, Acinetobacter baumannii
atgaacagagaaattcaacaaagactcgtatgggttaaattatttgaagagaccaatgatgctggcctagtttgtcggagatgtggcatttctagaccaacgttacgcaagtggtggaaacgatattctgaacaaggtattgatggattaagtagtcagagtaaacgtcccttaaaatcaccaaatactaaaatcaatgctgagctagaagctttaatattagaaatgcgctcggctagaaatcttggtgctcgacgtttgcaaacagaattgatgaggctacacggagtctcgttgtccttagcgactatccataaagtactatccacccatcaagtcaaaccgattaaaaaattccgtcgtaaagtagatttcattcgttatgaacgcccattaccaggcgatagaattcaaatggatacctgtaaattgggtcctggaatatatcaatacacatctatcgatgactgcacacgatatcgcgttttaaggatatataaacgccgaacagcagcgaatactctcgactttttagactgcgtaattgaagaaatgccttttcccatacagcgaatcagaccgatcgagggcgagaattctttgctgaaaaagtacagaaaaaattga

SEQ ID NO: 67131 - DNA, 384 bp, Acinetobacter baumannii; identical to SEQ ID NO: 67112

SEQ ID NO: 67132 - DNA, 384 bp, Acinetobacter baumannii; identical to SEQ ID NO: 67112

SEQ ID NO: 67133 - DNA, 384 bp, Acinetobacter baumannii; identical to SEQ ID NO: 67112

SEQ ID NO: 67134 - DNA, 384 bp, Acinetobacter baumannii; identical to SEQ ID NO: 67112

SEQ ID NO: 67135 - DNA, 405 bp, Acinetobacter baumannii
atgctgttggggggtcatttttacattgccgctaacaatacgatccacacagtgtttaccagtaactggataagtcagctcagcgacaatctttggctcaccttgtttggttacatggtccgtagtgataaatactttcttggcaccaaccgccaaatccatcgcaccacctacggcaggaatcgcatccggtgcacccgtgtgccagttcgccaagtcaccattggctgccacctgaaatgccccaagcaccgcaatatcaaggtgaccaccacgcatcatggcaaaggagtcaccatggtggaaaaagctgccgccttcaagcatggtcacaaactctttacccgcattaatcagttcagggtcttcttcacccacagctggcggtgggccaaaagccaataa

SEQ ID NO: 67136 - DNA, 384 bp, Acinetobacter baumannii; identical to SEQ ID NO: 67112

SEQ ID NO: 67137 - DNA, 645 bp, Acinetobacter baumannii
atgtcagatgtattttttcctgaattacccggtttggagtgggacttgtcaaagagtcccatttttaacaccaaaattatgacatccataaatggtcgtgaattacgggcaagctatcaggctgtacccaagtatgaaatttcaatgtcatatgcatttttgagagagtcgaaaggcaggcaagaattacagcagttagaaggattctttttagagcgccgtggttcatttgattcgtttctttacaaaatgcctgatgataatcagttcacatgcacaattattggcgatggttctacggaatatcaattatttaaacaggttgggtcagctaagcttttattgggaaatactgaagcagataatagtgaagtcagagatcctaagatgtggggtcaaaattcttcaaagttaatgtggagtaatgacaataatttaatgtggtatacaggttttggtattaacgcaaatggaaaggtaattttttctgcccctttacaaataggacaaaaattcaccatatctggaactttctattatcggtgcagatttaaagatgatgaacaagaatatgtcaactttatgcataagctttggaaaattggaaaagttgagttgattggttcactaggaaataagatatga

SEQ ID NO: 67138 - DNA, 1962 bp, Acinetobacter baumannii
atggcagaactacctagtgctgaagcatttgtgggttcagatgtaactgagagtggttttaaggctgcgcaaactcaacttatcgatttccttggagacttggacgggagagtttcagcaataggagcggggcactatggcgtagatacttatgcaaccgcggatacaatcaaaacctccttgcctgccggaacaatcattgaagttgggaatgatccagatccgaacaagaatggttcatataattgggatggagtcacattaaaaaaatctcaatatgatcctaagacacaagctatcaatatttcaaaagaatatgttgatgcgcgtgccttgattagaacttcatttatgaagttatttagtttggaagatggaaataatactcctattgttaatatttataagaatggatctgtttggattaaagggttaaaaaaagatattgcaacatatatcaattcattgaatcaaaatgtcgaacttctaaatagtctcttaagtattactgctggatcaaatattattgaaattagagattttaataatgtaccagtatttagtattaataaagctcttgatgtgaacataggaaaatataaattaagtttaatgtctgatgctttgaataccttaaaaagcatggtttttaaaaataatgggaagaattatttcgtttttaatgatgtaaataacttgcctttaataaaactgaatcagaataaagatttatttataccgaaaattggtaatcttactgagcaagccttactttccaaaaaaattacatcaaagttagcacagagtctaagttcagctgccggtgccgagtatgcagataatgtacttgagcaacttaccaattcccaatcaagtacaacactaacagctatcacagcagctcaagttaatgattctggtattttcccacaccctgtaactatgctccgcatcccagctataacaaggatagcagttaacaaatatttatgtttttttgaagcgagacgggatggtgatgactttggcgagaattcgcagggtgtagtaacgctaacagttgatcaagataatttgactgtgtcggcaactaatttgcaatcgctacacagtacttatgttgatgaaaataacaagcgttggtcatttatgaatgcttgtgctgtgaaacttgattcgggacgtattatcgttctgtatgtaaagcgcaatggcactacaagtcatgccttatataaacgttactcagacgatgatggggttacatggtcagaatatgaagatatagggcattttttaaatatgcctttttacaatttactttgtccgtgctcacaaggacttgtaaaacgttttggctctaatcgtggacgtataattttccctgtttggtattctggtgtgcgatatagaaccgaagaatttcgagcaggttacatttattccgatgatgatggcgagacatggcatgatggctcgttcaacaatgaaacaatgagtaatgaggtacagtgcgctgaagatgtaaatggagatattcttttctgtatacgaagagaagtcacgggaatcaacacaaaaacttggagcaagttgcttgatggcgattttaaattaactcctttcactccacataatcagctttgtgaaactccaatcatgagcggacttattcaagctcaaaataagtttgataaaagcaatgccaaatttcattatgtgggaacttattcaatcggtcgcaaaaacctaaaactcttcacttcttttaacggtggttctgactggacccacgaatatgacgtagcaaatacgaatattacatctgtttatagctgtatagaacgtttatcgccaacacaatgttttgttttgtgggaggcggactatgtcacctcactaaaatgtcagattttatctatcaatgaaaccaacactggcaaacaagcacaggagctttaa

SEQ ID NO: 67139 - DNA, 936 bp, Acinetobacter baumannii
atggctggtcaattagttttgaaatcacaaaatgcagtagataatatcattgatctacctgatattaatttctatataaatcgtgtagttgctgatgggggcattatttatgatacgaatgccctcttagatgtttttagttttatttatgctaatggcatttctgaaggggaagtatttagcgcagtaaaccctgcttggggaattaaatatgacaaaaactctggcaatgtgtcaaaactctatagtatttttaatgaatcaggagacatgattgtgacgaatggaactattccagcaaaattaaatagtaatcttactgtgccatctgtttattttgccggcacaatgactacatatatgcattctgttggtacagtttccgatgttaatgctttcggtgctgctacagcatatttggttccacaactagcatcttacggaagttcaacaacctttgcattagggctactgtattcaaaaattgatcatgatgctaatagtccaagtggtgcggcaagcccatacacagcagcggcgtggacacttagtcgaccagattcaaataatacaacattgaaatcctggacaaatttcgcttcagcttggggtgcaactggttctgttggctcaaatgttacaactgggtatgagagtgcaaaaccactttctatttatgctgactcggctggattgaaggcttttaataatggcgtactagtcacatctgacgttacagtaactcaattgcaaacccagaaaaacaatctaggtttttggtttggatcaagcattactgcaaatggcgatcaggcctcatcatattttatagggcatttctttgagaactgggttttagtaaacacagattctgaaaaattgactaaaatcagtgagcgcattaacgataaatattatgtagtttttccacattaa

SEQ ID NO: 67140 - DNA, 165 bp, Acinetobacter baumannii
atggctttcgcaatcatgatctatcatcttattagttggaagctatttcatcctgaagctggtagtactcttgggaattttggaatttatggagtctcaatattctttgtattatcaggtcttagcatgggaattatttacaatcgttttataaaagatttctag

SEQ ID NO: 67141 - DNA, 384 bp, Acinetobacter baumannii; identical to SEQ ID NO: 67112

SEQ ID NO: 67142 - DNA, 1017 bp, Acinetobacter baumannii
atgaaaagaatattattaacgggttttttatttacggcaggccttggtgtatatggtgaagctaatgctgcttgtactcctgaaactggatttaagactctagacgttcctatggcagttggacgtgtggtagttcgcccaactgatgaagttggaaaggtattaaggaaagctaccttccctatttcttccaatggctcaacttactggtgtgattcatatggaggatatttagaagctaatcttacacaaaattatcctattagctccatcggaaataatgtctattcaacaaatattcctgggattggtattcgtttataccgtgaagcagaaaatgctacaaatttctctggttattatccttatagagcggccactcaaagaagtagaaggtatacgctagcaacagggtattttgtagtggagattgttaaaactgaaacacagactggctcaggtaccttagtacccggtcgttatagtacttataatgcctctggctattcagctgttccttggttaacaagtactgtgtatggtaatgcaattaccattgcttcttcttcatgtgaaattcagggtaatatcaataaagttgtacagctgccaacagttacaaaggcaggttttaaaggtgttggctcaactcaaggcgaccaaacctttgatatgaacattctatgtaatggtggtattaacccaacaggttatgaagagaaaaacctcattagcttaacttacgactttacccaagacggaacaaataatcaggtcctagcaaatactgctccgacatctgaaaaagcaaatggtgtaggtgtacagttactctggaattatcaaaataaaaatcaggttatcaaaaaaggtgacaaattagccttaggtactttgtcttctaaccagacacttcaatataatgtaccaatgactgcccgctactatcaaacagcagcaaatgtgacggcgggtaaagtacgtgcaatggctactgtaactattgaatatgattaa

SEQ ID NO: 67143 - DNA, 2559 bp, Acinetobacter baumannii
atgccaaaaaaaaggcaagaatcttataaattattaaaacgccatatttgttattacttggcttctggcgttgttacaatgacaatgcctgtgttcgtgcatgctgaagaagcagctgcgagtgcgcctgtagaagctgaatttgattctgcttttttaattggtgacgctcagaaagtcgatatttctcgatttaagtacggcaaccctgttttaccaggtgaatataacgttgacgtttatgtaaatggtcaatggtttggtaaacgccgcatgattttcaaggcattagatccaaatcaaaatgccgtaacttgttttactggaatgaaccttcttgaatacggcgtaaaacaagaaattttaaccaagcatgctccccttcaaaaagaaaataatagttgttataaaattgaagaatgggtagaaaacgcattttatgaattcgatacgtctcgtttacgtgtagatatttcaattcctcaagtcgcattacaaaaaaatgctcaaggctatgtcgacccaagcgtatgggatcgtgggattaatgccggctttttgtcttatagtggtagtgcgtataaaacttttaatcagtctggtgaccgaagcgaaacgaccaatgcttttatgggggttacggctggactaaatttagcaggttggcaattacgtcataatggtcagtggcaatggcaagatacgcctgcggaaaatcaatctaaatcagactatcaagaaacaagcacctatttacaaagagctttccctaaatatcgtggtgttttaacactcggggatagttttacaaacggcgaagtatttgactcatatggttatcgtggtatcgatttttcaagtgatgatcgaatgctaccgaatagtatgcttggttatgctccacgtatccgtggtaatgcaaaaaccaatgcaaaagttgaagtacgtcaacagggccaattgatttaccaaacaactgttgcaccaggtaacttcgaaattaatgacctttaccctaccggctttggtggtgaaattgaagtttctgttatcgaagcgaatggtgaaatacagaaattttctgtgccttatgcctctgttgtacagatgttacgcccaggcatgaaccgttactcattaactgtaggtcagttccgtgatcaagacattgatctggacccttggattattcagggtaaataccaacaaggtattaataactatttaactggctataccggaattcaagcatctgagaattacgctgcaatattgcttggtgctgccgttgctacaccaattggagcaattgcattcgacgtgactcactctgaagccgagtttgaaaaacaggcttcacaatcaggtcaaagtttccgtttaagttatagtaagttaattacgccgactaacacaaacttaacacttgcagcttaccgttattcaaccgaaaacttctataaattgcgcgatgccctgcttatacgtgacttggaagaaaaaggtgtaaacacttatgctgctggtcgtcaacgtagtgagttccagattactttaaaccaagggttacctgagggttggggtaacttctatgtggtaggttcatgggtagattactggaatcgtagcgagagtactaagcagtatcagattggttatagtaataactaccatggtttaacttatggtttatctgcaattaaccgtaaggttgagtacggctcaaatgatgcgtcgcatgatactgaatatttaatgacgctttcattcccaattaactttaagaagaattcagtcaacgtcaacgttactgcttctgaagacagccgtactgttggtgcaagtggaatggtgggtgatcgctttagttatggcgcttctgtgtcacatcaagactatgcgaacccaacatttaacgcaaatggtcgttaccgtactaactatgcaactgttggcggctcttatagtattgctgattcttaccaacaagcaatggtaagtttaagcggtagtgttgttgctcactcagatggtattttatttggacctgaacaaggccaaaccatggtacttgtgcatgcacctgatgctgctggagcaaaagtgaataacacggttggtctaagtgtaaataaagcgggttatgcagtagttccttatgttacgccataccgcctgaatgacattactcttgacccacaagaaatgtcgagcgaagttgaacttgaagaaacaagtcaacgtattgccccatttgctggtgcaattgctaaagtagattttgcaactaaaacaggctatgcagtttatattaatagtaaaactgcagatggcaacagtttaccgtttgcagcgcaagtttttaaccagaaagatgaagctgtaggtattgttgcacaagggagtatgatttacttacgtacacccctcgctcaagatcgtctctatgttaaatggggcgatgaaagtaatgaacgttgttcggttgagtacaacatcagtaatgagttgcaaaataaacaacaaagcatagttatgactgaggctgtatgcaaatga

SEQ ID NO: 67144 - DNA, 1002 bp, Acinetobacter baumannii
atgatagatttaaaaaatgagagctatatatcaaatattccacagtatttagttgatgcatatttagaaactgagaattttcctgcttttttacagcaaaatcgtaagcattgctattggatgatattcagtgattatagctttaaacccagatttcctaagaaacctgttattactgctacaattattcctttctcagactatagatggatacaaactatttgtaacctcagtaagctgaaaacaaatttggatattaaaaaaacatatataaatgaaaagtatatatcatttataaaattcattgaatggcttccagcatttcatatatctttaatagttgatgaaaatttaaattactataaaaatgaaaatattaatgaaaaagaatattttaaaaggtattttgagggggtgaaagtacattacggtaatcacataaactatgctgttgtccaaccaaatcctaagatgaatattgggaacattaaccgggttttaaaactgttgaacggacaaccaaaaataagaatctttaagcagtctcaaatagtatcatctctgatttcaagtgtaagtaagttgattgttgattcaactcaagttgaatgtaagattttatggtgctctgatacagatgatattttgagttattcagaaaattcccttttttatccatttgtttttgacatgataagaactgatctttaccgattaagacctcagaaaatatatcaaattgattttttaaagaaagttaataaagattttgatgaactaataaggatacctgattacatcgtaggaacaatatctgatctaaacttgaaggagttaactgtcactcatggaaaatttttacctgttctgtattcatttttaaccaattcaaataaaaacttgatcattagtttaactaatacatcaaacaagattgaattaacaaaatatgagttcaagaaacttgttgaaaaagagcctgattggagtgcatacggatga

SEQ ID NO: 67145 - DNA, 354 bp, Acinetobacter baumannii
atgaaaatgaaaaaaatagtattatgtttaagtcttgtttatatgaataattctagttattctgagtccaccatagtagaaccagaatcatactgtgaaatagtgaaaaaaatagcttataacgctcaatcttataggcagagtggggttgaatataaagttacgataaagaaattacaaacagcaccagaaaagttatctacttcaaaaagagaaaataacgagttggtttttagaattgtacagtatgcctattatatatttcctgagtatacaaatgatgaattaaaaaagaatgctattgaaaaatatgccatgcgctcttatacagaatgcttaaaaaaatatagttaa

SEQ ID NO: 67146 - DNA, 267 bp, Acinetobacter baumannii
atgatcgaaaaacgttatcgcgtaaaagagctagtcaattaccctgaacgtcctgccaaggactatattgatcgtagtggccgtagacgtcgtctttctcataaaccagcgagtaagggcttactgaatattgcagagtcaactttttggaaaatgattcgccgtggtgacttcccccaacccatctatttaacagcaagtatgcccacttggactgaaagccaaatccaaggttggcttgaagcaaagaatcctaaagcagcataa

SEQ ID NO: 67147 - DNA, 384 bp, Acinetobacter baumannii; identical to SEQ ID NO: 67112

SEQ ID NO: 67148 - DNA, 2475 bp, Acinetobacter baumannii
atgagcgttttagataaaaaaggttttatttgggttaatttagaatcttttggatatttaactagaccatcacgacgtaaagaaaacaaccaaatcggtattgaaatagttgatctcaataatcaactagatatcgataaattaagatcctttaatgttcatgttgaaaaagtgaataaatcaagtgttcttgatgtttactggtcaagcatttcaattaaggacttttctaattttattggtgttgataacaacaatattccctttcaatccattacattggctcagcttaatgctgagttcaataactctgttcgttctcttgcccaacaaagagttgactatgccattagacatgcgacattaattggtcaaaacctgaataaacaatatgtttatgctacacaatattcacgattttatttggatcagcctttaactgaaattgctaagaatggaacaatctcaattgatcccgcgcaatttgaagcacgattacctcaagaagattattggaaaatacttaaagttggcaatcagccaaagtttaagcgagctaatatggcacattgtgcaaaaagctttgctagtagcatagttgaaggaacaacaaacattcatgattcagatgttgagttgtttttaaaaaaaatattaaacgacaaccatgatagatcttatttgaatgaaataaagccgacaattaagcaatttttctatgaacagcttgaatgttgttttaatagtttaagtaatcaatttaacgtacataatttcaattcttttgaaaaaattattgaaatccataacaaacaaccagttaaaccgatcattggtatttctgagctgcaactgcaacaattttcaactcctataacaatttcagcaatatgtcagaaattattattcaatcctgaaactctagatactggaaaaactctacttgaacctactattggtaatggatccttagttgctcatttcataaaaaaaccgcaacttaaaatcgttggtgttgaaattgattcgaatcgggtgaaaaatacccagctctttctcgacgcaaacattgaacaatcaaatctaagagtaattgagggagattattcaaagattaaattgaagcaattaaacaataatgaattatttgattttactatcgcaaatccaccttttggcaaaatcgataaaacttcacttactttgaatcaagcgggatcattagaacgtttaaatttttctactcaaaggttagatcataaaattttattagagacactttctttgagaaaagacaaaggaagaagtgtttttattattggttcagacagcttttatgaagctggcgtagtcaagggtggaagtaaaaatttattaaattatctctatgataattacaatgttgaagcggccgtagagctcgacgggagtttatataagaaacaagggactcgcgtcaatgttcgtgttcttgtcattggtgatcttctggaaaataaccgtacttatgaagttcctcatgagttgcccatcataaataatgttcaagatttatggagatggtcggaaaatgtcctacagaaaagattacaacctgagttaagttacgatgggccctccccttctattaatcaaagtgaatcagttatatccgaagctaattttgaccagaatttagatgtggtagacgatgctgatttcttaacaagtgcattggattcatatttaaatgatcaaatagttccggatgagtccggtaatgttggggacttgaataaacctgatgatgacgacttctttggtaatgaggaagaagatacggctgttaaacctctttctactggagatgaacaccagaacaatgagattcttgatctagaaatagtagaggatgaatctcaagctcaggaaattatttttgaatctaaatcattgcaagttgcatatgtgccagtttcacaactaagcttgccagaaacaatgttgccagcagatcaagcaatacttattaaacaagcgcaagataatcagattaagaagatcttgcttttagctgaagtaaatcatgaattgcaaaaatctatcgatttagccaataacaatcctttcgacggctttctactttacaagctacagtattcagatctttcatctctttctaaagctttcagtgctgaacaggttgatgctgttacttccgcaatattaagcattgaaaatgaccgctcttatattcttggtgatcaaacaggtattggtaaaggtcgctctttagctggcatgttgcgttattctttaatcaatgggtttagaccagtatttttcacaaggaaagcacaattatttaatgatttatggcgggatatcgtagatacaggaacagataaatttatttctaatccttttatctgtaagcatccggctaacacagccttaccaagcggtcctataagccttaatttagttcccacctaa

SEQ ID NO: 67149 - DNA, 126 bp, Acinetobacter baumannii
atgattttaaaaaaaagatatagccgtattttaaagaataaaacattcaaaaaacctaagaaagtccttcctatatatataaatttatataaatataaatttaaatttattctatatagggggtaa

SEQ ID NO: 67150 - DNA, 129 bp, Acinetobacter baumannii
atgaaacctcacatatcggaaatgaaacctcacatatatattttaataattaaatttcaatactttattgtaggtgccttaattgaaatgaaacctcacacatcggaaatgaaacctcacatttgttga

SEQ ID NO: 67151 - DNA, 384 bp, Acinetobacter baumannii; identical to SEQ ID NO: 67112

SEQ ID NO: 67152 - DNA, 774 bp, Acinetobacter baumannii
atgacccaggaaaaagcaaagaaaagaggcagaccagctcagttacttcaggtagcggaattacatgctttcgtggagtttttattagaaaaagatcctcgttctaaattagaaaatcaagttgtcgatgcactacaggctgaagatttcgactttgaaatgttgtctgaagctcaacagatcttagtgaaagaggtcttaaaaccttatcgtgagcacatgaagttaaagctattgtttgatgagttgtctgaaaatccaaaacgtacagactatgaagaaaagtttgtgcagttgtatcagggatatcagaacaatgaactagatccaacaaagacaaatattttgaaaacgatgtgtactcgttatctaaagtttaaagcacaaaaattggagtataaggatttagaactgtacttaagccagattcaaaaaaaagaaatcaataaaaaaagaacagcagcagatcatcgaaaatatcagttaggtggcgctgtcattgctgcttataaagaattgggtcttaatattgatactttgacaccagatcaagttagaaaagccattgtaggaaataagaggatcataaataagatcgaaaaatctataatatttgagcagattgaggcgaatcttgaaacgtttctcttcagttggccaatattttttaaggtcattgataaattagcaatgattgagtatgaaggtgaaattgttcctgagtatataaaagcaattatgtcatctttatcagagtgtcaatataaaaaatag

SEQ ID NO: 67153 - DNA, 240 bp, Acinetobacter baumannii
atgtttgagttgtctgtaattgatatttcaggaaacaaaccaaaatcactatatgcaagggaatttaaagttcatcctcgcattggtgaatggattgatatagaaatagatggtgaaagcaatatgttcgaggtagttaaggttgctcattcaacaaatggtggtgattctgatttatatgtaaagtctctaggactaacttatcaagtagttgatgatctctgctgtaaaaatgattag

SEQ ID NO: 67154 - DNA, 231 bp, Acinetobacter baumannii
atgattggaattacaaaaagtggaaagttgatggtaattgataaaaactcttcaattacagggcatcaatttattggagttataattactgatccacaaatacttaatgaggattctttaaacattgctaatcatttttacagcagagatcatcaactacttgataagttagtcctagagactttacatataaatcagaatcaccaccatttgttgaatgagcaaccttaa

SEQ ID NO: 67155 - DNA, 324 bp, Acinetobacter baumannii
atgactaattttaaaaagcaccctgacggctacatgtcttttttaggccgtgatgataagggcctctactctgtccgcatcggctggcaagtgtacgcatctaatgcaaacggcagtgtgctgtacacagtaaaaggcgaagtgaagactcctttaaatgttgaagagtttaaggcgaagcgccctaaggtttacgcatccttaatgaatgaaattagcttccagcgcaaaaaagcattagcaactgcactgcaacttaacaacatcccttcatatgaccgcaaagcttataagaaaaagcgcggcttcaccggctctagatga

SEQ ID NO: 67156 - DNA, 531 bp, Acinetobacter baumannii
atgttttcacaagatgatattcgtttagcattcgataaattagagccacattggaatgaaattgaggctgaacataagaaaagagaggagtactttatatccttaataaataatgattattcagaaacagcagaattactaaaatgccacttaatcattgaacactatttaaatattttcttagagaaagaacttggactagataatttgaatgaagcaaaactaagtttttttaataaaatgaagttacttcctgataataaagttgtaacttttgtgaaaccaggcattgttagaataaatacattacgaaataaggttgcacatcaactcgatgttaaattttccaataaggatttaggagaaatctctagtatcttaaaaattgctagaactgacgtagatgcgcttagtttcatagaaaatattaaaaaattcacatctgttgcatgcacatggctaacccctaaagatgataaaattcaggggtatatagcagaatctatatctcatataaaatataatgaatga

SEQ ID NO: 67157 - DNA, 342 bp, Acinetobacter baumannii
atgaacaatattcgtatattaatggataaaaatatcgccattgtgacagcatatgatgatattaatcctatgaatcgtcttaaacttatctcttctgatctggaatacaagcatttcagaggtaaggttctgttcgatttattcttcttcaatggtttttcttttaaccgtttcgcctcaatagattttgatggtaagaaatttttaaagaaaactatccaaacgttttctcatattgatcctagccttgaagctcaacaaaatgagctaattttgaagaataaagacatggtaaagcagagtgttttgtctagcacagaagtagaaggcctttatatctga

SEQ ID NO: 67158 - DNA, 1086 bp, Acinetobacter baumannii
ttggcatcttcgaatccatataaagatctagtcttgttaaaagaaaaaataatgcctcttatggaggagtttaaagaaaaacataaagttagcatcatcagaaggactagtactaattccaaggaggtttttgtaattagtaaaataggaatggaagatggattatttgaaatttatcataataataaaggtacaacgaccttaaaccctacgggtaaaaataaatctattggagaaatgctagcgtcgttcttagcttctcatgttgctgaagaaaagggtcgaattaatatgacattggttggatatgagtatgaacatatccaaccaattgttgaattaatgttagataaaaaaacagaagatggaaaacaagtattccagtataaagaaacaaaagaattacatggaactagatttgatatatgtaatttaatttccaaagatacattacaagtaacagtttataactctaagaaggtactgattaaaggacttccgttatcctgttatcaggaatttattttccaattttcaattcttttagatgctaatggattagctcatgtattcagccgaactgatgaaaattgcactcaagttgttgaacaaaaaactgttataaataatttagaagcaaagttagaagagagttattcaaaattaccagatattcttagaaatatgctaatcagtagtgcatctttgaaaacaattacttttgatcttccagactatagttgctttttatattctgaactacgagctttagaaggtgtattgaaacatattttaggcgaatttgatgaaatagatcttgatgagacaaaggttggagaacattttgataagataggtcctcaaaaatttacattatctccaaagtattcggctatcatcaatgatgaggatctaataaaagccctcaatgctgcgtattctttttataatcatcagagacatacgctattccatgttgataatgtaattgttaccacaagggtattaatgaattttgatcaagtattacatctgacagatgatgtttacaatctgatcaaaagtctatataaagcgatgccatga

SEQ ID NO: 67159 - DNA, 180 bp, Acinetobacter baumannii
atggaagcggcttctgttgcgcaaatcgcaagccagtttaatgttccgtttttaggaattcgaattttatctaataatattacaaataacggggcttatgaccctggtacaggagaagcttgccaagactacgtgcttaacgtagctgaagaatatatgaaatctaaactaccaaaataa

SEQ ID NO: 67160 - DNA, 384 bp, Acinetobacter baumannii; identical to SEQ ID NO: 67112

SEQ ID NO: 67161 - DNA, 498 bp, Acinetobacter baumannii
atggcgactgcaattcgtgcagattattgtacaaatatgactataaacaattgctctttttcagggtttaacaattgtatagagatgaacttttgtactaacttcaatatattaggtagtggtttttttaattctaataatgctgtctttttatctaattgctacggaaaaggagctatatcaaacaactatactcataatgtaaataatttaatttcagttgctgattcaaaactaaaataccctcttccttcaaaaaataaggaaaagcataaaatcataaaaaaagagcagaagaaaaatagttcaataaggaatatagaatttaataaaaaaattaaagaacttattaacttagaagctaaccaaaaatttattaagagaaatcatcagttagcttgtaaaataaaatatataaaagcaaatcttggaaaattagaagctgaaagccttcttttcttgactcaagcattaatgcagtacgatcttcaaagttaa

SEQ ID NO: 67162 - DNA, 156 bp, Acinetobacter baumannii
atgcaactaaaacaggtattgggaaaaatcaaagatattagttttggcgtgatcgcagcaccgctaattatcatcattatgatgtgggcttcgatactcgatcaaagaacatttaagaaagaactagaccgaaaaaaggcacaggaaaaaacctaa

SEQ ID NO: 67163 - DNA, 297 bp, Acinetobacter baumannii
atgccattaattgaatattacggcttgttatttgaatggcatgaccaaaaaatggatttagtctatcgagggcgagaaatcacgttcgaggaggtctgtagtattttccttgatcctgcattgatctcttttgaggatgtaggacactatgatgaacaacgactaatatcagtcggtttaagcaatcgtggtagactattaacagtggtttgggttgaacgtggagatgttgcgagaataatcactgcatttgaaccatcacatcaccaaaagcggaggtacagcaatgcaaaatga

SEQ ID NO: 67164 - DNA, 333 bp, Acinetobacter baumannii
atggatgcaattatattccctagtcttttagagtgtttctccgcaacacctttagaagcaatgatcatgaaaaaacctttatttgcttctgatagagggtttattaaagatgtgtgtttagactttgcattttattttgaaccgactgatccagaatctgctgcagctgtaattaatggttttatcgaaaataaaaatattaatgagttagatattaaattaacagctgcacaaacccatgctaaaaatttttccagtgcacgacaacgtgcagttaaatatacacagattattgagaattgtttaaataaggaagagaattcacatgtttaa

SEQ ID NO: 67165 - DNA, 753 bp, Acinetobacter baumannii
atgtctgcattattgaaaaaattaaagattaccctgacactggttgcctgttcggcgagttttgccgtcatggcacaagataaattattagtcggtgtggataccgccttcgttccctttgaatttaagcaaggcaataaatatgttggttttgatatcgatttatgggaagccattgcgaagaaaatgaatgtcagctacgaattacgccctatggattttggcggtttaattcctgggctgcaatcgcgtaatttagatgtggcaatggccgggatcaccattaccgatgcccgcaaacaggtcgttgatttcagcgagggttactacgatgcggatctcttaatggcggtgaaaagtggtgataattccatcaccaaattcagcgaactggccggtaaaaaagtggggctgaagcagggcaccgccgcggccagttttatgaaatccaaatataaagccaactatgtcgaattccccaatattgataacgcctatctcgacctgcaggcaggcaatctggacgcggtcgttcacgactccccgaacgtgctctactacgtgaaaaccgcaggtggcggtaaggttaaatcgaccggggaaacggacagcattctgccgcagaaatacggttttgccctgcagaaaaacagcagcctgacgccgaaggtcgatgccgcgttaaaggcattacgcgcggatggcacctacgacaagatttatttcaaatggtttaacaagcaacctaaataa

SEQ ID NO: 67166 - DNA, 579 bp, Acinetobacter baumannii
atggtcggtttggcgggcggctttatcatcggtctgctggcaggaatctgtcgtgcactgggaggcggtattgcgaaaacgttatcattaatttttgtcgaattgattcgcggtacgccaattatggtacaggtgatgtttatctattttgccttgccaatgattctgcctgttcgtatcgaccctatcacggccgcgatggtcaccattattattaactccggcgcgtatattgcggaaattacgcgcggcgcaattttgtccatcaatagaggatttaaagaagccagtctggcgatgggattatcgcagcgcgcaacgctatggcatgtgattatgccgctggccctgcgccgcatgatcccggcgttgggcaaccagtggattatcagcattaaagacacctcgctgttcattgttatcggtgtcgcggaattaacgcggcaggggcaggagatcatcgccgggaacttccgtgcccttgaggtctggacagcggtagccctgatttatcttgccgtcaccctgtgcctgagctttctgctgaagcaactggagaaaaggatccatattttatga

SEQ ID NO: 67167 - DNA, 231 bp, Acinetobacter baumannii
atgagcatggttgaatttagcgcggtcgctaaacatttcggcaccacccaggtgctgcacgatatcaatctgaaaattgatgccggtgaataccggctggctgccgacgatccggatgaggagaacaccctcgccacggcagttttcaccctcgatgccaaccacgtcaggtggcaaattttcgacattaaccgcgacgatgctaaatttcagggagaagtgcgtgggtga

SEQ ID NO: 67168 - DNA, 2568 bp, Acinetobacter baumannii
ttgggtacaggcgatgtactcgatggtacggacggctttgtggttgatacgctagctccggcaccggtgattacgattgatcctgtaacgaatgcaatcacgattgactttggtgaagcagtcaatgcggttgatggcagcccgcttacggcagatgcgcttgagggattgctggacattgctaacggcacattgaccggccttgtagacaacggcgatggcagcttcagcggtacgctggtaccggctgcggactttgaaggcgatgtggttgtgaacgtaccggcaggtattgttacggacgtggcaggtaatgccaacctgactgcaacagagagccttacggtcgatacattggcgccgggcttggtgattacggccctggaccctgcactcactgcgactgaatcgacaacaatcagctttacgtttagcgaggcggtcagtggctttgatattgatgacatcacgcccgtaggcggtacgctgagcaatctggtccaaagtacaaccaacccgaatgtctggacagctacgtttactcaagacggtactctaactgcaccaagcatcagtgttgcagatgatgcctacacggaccttgcaggtaacttgggtaaaggcgatgtattcgatggtacggacggctttgtggttaataccattgatgctattaatgataatgtaacgtttgatccaggtacgtttgtaagtactatttgggacgcaccaataatagctcaagatattaatgttcttgatacctctattattggtgatacttcaatgaatgttgagttttctgtccctagaaatagcgcagatattggtacaggtcatgaaggtgatgttgttattcaagtaagccaagacaatttgatagcagttgcttccgggtttagtgtattagtcgaatattttgatggggctaattgggtacaatacaccacggctacaactacaaatggaggtttaattgctgatgcgcttggtttaggggttttaggtattgtagatgatggcaaaacaatagctgtgcatctaacaggtgtaccagaaggtcaatatcgtgttgtagtgcagaacgatagtagtgctattggtgatttattagatgatttaacattagcacaactaggtgaccaaggtattttattaggagctgacaatcaggatgctgtattagatgcggtagaaactgccttaaatggtcaagtattaaatttaggaactctagtaagaaatgttttagaaccactgttaaatattgctaatgctgctggtgaaacattagctgtgactgatattgtcgcagcaattgtgaaaataccattagttggtagtcttttaggtggtgttgatactgttttagattatattgcagacgcattggttgataatttacttagtgtacttgagtttaccaatgtaaccatcaatggttcagaaacttattacactacaccacaagtatcaggtaatgtttttgatgacaatggatctggagcagatgatcgtggtaatagtgatgcagcacttgtgaccaaagtagatggagttgatgtccctactgatggtacagatgccgtgattaaaggtttgtatggtaccttgtatattaataaagatggtgtttatcgttatgtgctgaatggtagtgtagattctaatggtcaggtagatgattttacttacactttatcagacggtactcactcagatacagccgttttaactataagtgtggcagatgttattgcaccaaaagcaccaattgtttcttcattggatgaaaccaccgttactggtgttgctggagctgcggaagctaatagtgttattaatgtctatggtggtacagacagtgatggcgatggtattccggatacattacttggtacaactacagctaatcctgatggtagttatacagtcacgttgaaccctgcaatcgctttaggggacacagtggttgttacttcaaaagatgcggctggcaatatttctacaccaacaattgcaagtctgcataatattgtcgcgcttgatgatcctaaccaaactaactatgagttatctactacagcagatcgtccaaatattagtggtggtatttttactttagctaatgctggtgttcttggagatttaattgatttagatctgagtgctacatccgctcctggtgtgactgtcggtacaaatgaacaaatcactttaacattaacggcaagtgggtctactggtttagatataagtgcagttgggaatttaattgatgctattttaggtggaaatattggtggtagtcttgatttgattattgctaaacaaacatcaacaggtagctatgaagtttataatactattgctaatgcatatacgttaaacaataatgttttaacttttaccgcgtctggttcgcaatccatatctttggatgatgctggtgtctataaatttattcttgctccaaattcctcaacctcgagtgctttaagtaacttattatctctgaacttattaggtaatttaatattatcgtctaacgatgtagtagcaacgtaa

SEQ ID NO: 67169 - DNA, 1107 bp, Acinetobacter baumannii
atgcgtatattcaaatatgagctcgaagatgctctacaatcgcttgataatagtgttagttatgcaggttttattaataaattatttccaacgtttatatctaaagatgttgataacatcaataccattaccataaacattcttctgaagaaaattcaagatttattatcttctggttattactccgtatttattaattataaaaactatatgaccaatggcgagagggtatggggtatacatcatttttgtatgtgtatttacttacatgaaaattttgaaccatttggtacttattcatgggatgcatcttcacatcctcaaatgatattagatttttggtccttgacatcttcaaataaatacgaattacatgaagtgggtttaacttataatcaagttaacaattcagatcatacagaaaggatgaacatcgatattgaaatggcttgggaagaattagttatattaaatccaacttttaattttcctttctttaggaactttttttacttaagttgtttatcaatttttaatatttcggagtaccaaaagtttggcaagttgctttcattaaattatagcattgatcatttacttgaccagttgagacataatttatttaattttttagacttacttgatgactatatgcttaatatagatttaagtgagtcaacatactcttttactgatagcactagttttacaatgtttgctgaagtaagtgaacaggacttactcaattatgacttctcgtttgtttctgacagttctagttctgaagattctacagctcaacagagccaaacattttctacatcagatacacattcggctccttcacgtgtagacagctcttatctatcttttctttcaaagcaagatattcacgaagagatcacttctaactatgttcgtgagcttataaaacagttcttttataattattctaaagtcagcttttctattcataatacgtcgataccaagtggattcgtcgctgattttcttgattacttaaaccgatcactagagcaaatatttattaaggttgaaagtttaaaagtcaattatttgaagcttcaatggcagagtaaaacttga

SEQ ID NO: 67170 - DNA, 735 bp, Acinetobacter baumannii
ttggaagaagctaaagcgtatgttgaaaatagatttaatggaaacattgatcaaatagatgttaaaaatgcatttttaaataaaaaaacttataacttagatgagttaaaagagatatttccgaaagtagataagaacaaaaaaaatattgtggtaatgtctcatgctttttcagacgcgccacatgtcggagaaggtttattgtttaaagattactacgattttttagttaagactcttatacatttgaataaaaataaagaagttaatgtatttgtcaaagctcaccctagttcatatatgtggaatgaaaagggagcagtagaagagcttttagaaaattatattgttactgcaaaaggcacagctggtctagagtttagttgtcttggtataccggcagtaactgctggtaagggttattattatggatttggtattgctaaggaaccagatactgtagaagaatactacagtatgttagataatattaccaaaattgataggctaaatagtgaaacaataaatagagcattagtattgctttatatggttgcacaaagtagacgtcattctaagattttacctagaagccatattatgccaggtgagatttattcagaggtttatttagataaatataaagaaattattgaaaactttaaaaatggtgaagcgatgaaggatagcttctatgaagaaattaaaaacgatgtagtaaatagcaatgtttaa

SEQ ID NO: 67171 - DNA, 261 bp, Acinetobacter baumannii
atgtttaaaaaagggctaatatatatagtactgaattatacgattcagtttttaaatattatatttaacttgttgctgatgaagtatttaagctcttatcagcttggaagtttggcacttgctaaaacttggcagcagtttgtagattattcacatctaggtgctagattttcacttgatcgctatattcctactgctgaagaagaggaaaagaaatatttagttgcaacagttttatttctgtctcttatacacatctga

SEQ ID NO: 67172 - DNA, 597 bp, Acinetobacter baumannii
ttgggatactctagagcaacctttgttaagttttatgatcatgaacgttctgatgcatggattgatggcttagaaagtgcttttcagttctttggtggtgttcctaaagatgtattatttgataatgctaaggccattatgattgaacgtgatgcttatcaagatggtcaacatcgctggaatgctaaattacttgattgtgctaagaaatataacttccgaccacgtgtttgtaagccatatcgtgcgcaaacaaaaggtaaagtagaacgctttaatagttatttgaaatcaagttttatcgtgccattaaaagcaagtttaaaggtggttgaccttagcttagatgttgatatggcaaatgcctatattggtcgatggcttagtgaaacagcaaatcaacgcattcatgcaacaactaaagaaaaaccaagtactcgtttgcttgaagaacaacaatatttttcttcattacctttatttaatgatggttctaaaaaatctgtaattgatgatgttagcccatcatcactcatacctcatgagagtgttcaacaccccttatcaatctatgatgaattactggaggtttcttaa

SEQ ID NO: 67173 - DNA, 288 bp, Acinetobacter baumannii
atgcatttagctcttatacgtatcccaggtacaaaaataggtgatataacaagtacgagagactttgattatatgatccaccctatttttgctcccttttttgtattttctcacagaaaaaagagaaaactagcgcttgaagctacagatataattacactcattgatgatcccaaaaaagctttaaaacatcttattcaaaaaaataagcgaccagctgaggtattacaatcttcattacccgatcaattggacttatttggggagtacttaaatgtatctaattga

SEQ ID NO: 67174 - DNA, 519 bp, Acinetobacter baumannii
gtgactgacacccaaaaggaagtggacaagcaaattgcagagcacaccaaaacaattattggtgtggatcttacgccgttctatcgagctgctgatattcaggatgaagtagatctaaacattacggccaatgtcagtttgattaagtccattccacagcaatacgccgataagcttgaagtactaattactaatgctttgcagactggacaaaccaatgaagagttggccaaagctattaagcaattagggttatctactgattatcgagcgcgtcttattgctagtgatcagatgggtaagattaacggccaaattaaccaagccagacagctttctatgggtgttgagacatacacatggcaaacagcgaaagatgagcgtgtgcgaccagatcaccagcataagcaaggcaagacatttagatgggattcaccaccagacggtggacatcccggacagcctatccgatgtcggtgtacagcattacctaactatgaggatattttaattgactga

SEQ ID NO: 67175 - DNA, 267 bp, Acinetobacter baumannii
atggataagccaatgacatttaacgaatggatgggaaagcaaggcaatttagctttgattcatgctaattgctgccgaattgcctatgaagctggtcagcagtcaaagcaagcgaaagtggaggagttaaaaaaaacaataagtgaaatggctcaaagttacagagttgaggcacacgaattaagtcgtattagagattttgaaaagtctcagatgtatagccattttgctaatcagttggaacatttgcttaaaggtggtgcttga

SEQ ID NO: 67176 - DNA, 240 bp, Acinetobacter baumannii
atggtagcgggtgctaagtcaatcactgtatctaacctagatatgggttatacgccagagtttgccgttgacctgcaacgtgactacaaaggcaagttcatgcacatgaatttcttccgttgtaccagtaacaaacttggattcagttcaaaacaggacgattacgatattcctgagtttgaattccagcctatggctgatgatcttaaccgtgttttcaaaatcgatttatcggagtaa

SEQ ID NO: 67177 - DNA, 420 bp, Acinetobacter baumannii
atgattaaagagttaaaaagagagggggaaagtgcaaaatatttaattgtattagaaccaacttgtcctctaagaagtgtagaagatgttgataatgtaattgaaaaattaatagaaaatgattcagctgctacatttatggaggctgaattaaatcctcatagagcatggaaaatagaagatagtcatgtctgtccatttatagaaggggcaattccatggctgccgagacagaaattaccgaaagcatatcaactgaatggtgcagtatatggattcaatattgataaattaccagatacaggtatttccgtattatttggtaatatagctgcagtaaaaatgccgagagaaagatcgattgatattgactttaatattgattttataatagcagaagaattgttgattaaatcttaa

SEQ ID NO: 67178 - DNA, 384 bp, Acinetobacter baumannii; identical to SEQ ID NO: 67112

SEQ ID NO: 67179 - DNA, 189 bp, Acinetobacter baumannii
atgagtaggatcctgcacggcaccctcatgatggctgaagatcctgatccaacgactgacaaggttggcattaatactatgttgcagtgcgaccgaagcgatcgaggtattaggatttttacaggcattgacaatactgagtttgaattctttggtaagcgtccgctgaatcccatacctattttttaa

SEQ ID NO: 67180 - DNA, 204 bp, Acinetobacter baumannii; identical to SEQ ID NO: 57254

SEQ ID NO: 67181 - DNA, 618 bp, Acinetobacter baumannii
atggtgatggcattctttctgaaaagcaattacccaatttatgagtatgactttaatcgatctgttgcatatgacgttataaaagatgctcttactttaggtgctgccttccttgcgcctgtagctgcatttgttctttttagtgattggcggagtgaacacaaaataaaaagtacacttcagcttttagatgatttaaatgacttatcattccatattaaaaatgggtttggtttttatcatgctaaaattatcatggaaaaagagataactacgaacgaatttagaaatagagaggatcgtcaaagattattatgggaacttatagaattaagaagaatgaatggtaaatttttaataaaaaatggaaaaataaatgtttatcaagaattgatagttacctttgataacttagctagtaaaattttagatgacttacatatattagagtatttttctttcagaatagctcgagataaaaattcaattgaaagtgagtataaccaaaaaaatcgtttagaaaattttcaaaaatatgatgaaaaatttaaaaaattagaagctcttttgaaagaaattactaatcaagcagttgatgtaaaagaatctattctgtga

SEQ ID NO: 67182 - DNA, 150 bp, Acinetobacter baumannii
atgcgttttgtaacgcctactccgtctaaaaattcaaataataaactaagaattttcatacttattagctatgtcattgttataaatcttatctttttctattccttaatttttatccgttcacattcaaatttctttaaaaaattataa

SEQ ID NO: 67183 - DNA, 522 bp, Acinetobacter baumannii; identical to SEQ ID NO: 46790

SEQ ID NO: 67184 - DNA, 987 bp, Acinetobacter baumannii
ttgatttctatttctggtaatgatgataactataagacaataaaaatattttttgctatccaattaatatctttggtgttcttggtttatggggtttatgtagcgactggcggtaatattttatcttatagctgggctacaaagaatgaattggagggagggaattttgcttttttaatttcttcctatctttttattgtttcctctggggtagtctttttaagctggtatctaaaatatagaaaagtatttttactttctgttgtcttagttgttctctatattattataattcgaagtagaggttttattgtgcctgtacttatgatttttggtttttattatttggtttggaagaggaaggtttttagttcgattttgttcggaattttatttttattcttattttttgcacttcagcagataagatatttaggtgagcttaataatgtctctgatattaagtttggtgttatggttggaaatataattgataaaattatgagcgaggatagtgagttttccttgagaaattcattttattattttattcaaaattacaactatttagttgaaagatatagctttggtaacttccagacctataggcgtatatttttcttttttgatgtatttaatttaggacttaagcctaatgattttacgaatactatgtatcgtgcctattatggtgatagtgcagtcttagcaaatcctaccttgcatcctacaatgtatggcaatttatatgcaaatggtttatatgtttcttcattaatttttactttatttttttctttcttgatttttattgaaaaatttatacgtgaaaaaggtggactaatttattggtttatcatgcctatatttttgtatagttgtatttttattgcgagaggaagtatctataatgctttcctgattttaatagtgaatatatttctagtttttttccttgtgaatattagaagaattagattgttttga

SEQ ID NO: 67185 - DNA, 1212 bp, Acinetobacter baumannii
atgaatattttatatttccaccagcatttttcaacacctaaagggtcagcaggcattcgctcctatgccatggcacaatcattaatccgtaacggccatcaggtaacaatggtttgtggttcttttggtgcgggtcaaacaggtttaactcaatcgtttaataaaggcatgagacgtggtgtggttgatggaattgatattattgaatttgagttgccatactcaaatagtctatctttcctcaaacgtattttaatttttttaagttttgcttttaaatcaatcaaagttgctttaactgaacaatacgatgttgtatttgcgacaacaacaccattaacggcgggtattccgggtatttttgccaaatggtttcgacgtaaaccctttgtttttgaagtcagagatttatggccagagctccctaaagcgatgggtgtgattaagaacccaattgttttgtggatgatgtctgtactagagtggacctcttatcattcagccgatcgtttagttggcttgtctccaggtattgtagacgggattattaaacgaggaatcgcacctgaaaaagttgcctctattccgaatggttgtgatctggatatctttgcatcagaacatcagccttggcgaccagagggagtcaaggaaactgatcttatggcgatctttactggaacgcatggtttggcaaacggtcttaatgctgtgttagaagtagcgcaagagttacaaaaacgtcagcgtcaagatattaaactggtccttgttggcgatggaatgcagaaaaaagctttagttgaaaaggcaactgaacttaatctacaaaatattatttttcacgccccagtaaataaaactaaactggcagggctaatggccagtgcagatcttgggttacagatattagcgaatgtccctgctttttactatggaacatcgccaaataaattttttgattatatttcggcagggttacctgttttaaataattatccaggttggttggccgagttaattacaaaggagcaatgtggctttgctgtacctcctgaaaactctcaagcctttgctgatgctttagtgcaagcagcagatcatcgtgaatcacttaagcagatgggtgaaaatagccaacgggttgctaaagaacaatttaaccgctctgatctttcacagaagttttcagagtgggttgcaggagcatag

SEQ ID NO: 67186 - DNA, 1260 bp, Acinetobacter baumannii
atgaacaactcattcaaacatatttgtgtaattggactcggttatattggcttaccaacagctgcaacttttgccgcacatggtataaaagtcaccggtgtagatgttaatcaacatgctgttgatatgattaatcaaggcaaagtacacattgttgagccagatttggatgctttagtacgtgatgtcgtagcacaagacaagttgtcggctcaaacaacaccgacagaagctgatgcttatattgttgcagttcctactccgtttaaagatgattatcaaccggatttaaaatatatcgaagccgcagcaaaagctttagcaccttttttaaagcctggcaatttagtgattttagaatcaacctctcctgtagaagcgactgaacagatgtcggcttggctcgctgaggcgcgttcagatttaacctttcctcaaacgcatggcgagcaggcagatattttagttgcccattgtcctgagcgtgtattgccaggaaaagtcttgcaagagctgatcagtaatgaccgtattattggcgggatgacaccacgttgttcaaaagctgcctgtgaactgtacaaaacctttgtaaaaggtgaatgtattgaaaccaatgctcgtacagcagaaatgtgtaaattgacggagaactcattccgtgatgtcaatattgcctttgcaaatgaactttcaattatttgtgacaagttagatatcaatgtgtgggaattgattgcactggctaatcgtcacccgcgtgtgaatattttacaaccaggtccaggtgtaggtgggcattgtattgcggtagatccttggtttatcgttgctaaaacacctgagcaagcacgtttaatccggactgcgcgagaagtgaatgatgcaaaacctgaatgggtgattgatcaggttaagatcaagattgctgagtttttacaggcgaatccttctaaaacaattcaagacgttaccgtcgcttgctatggtttggcatttaaaccggatattgatgacctgcgtgaaagtccagcgttagaaattactaaacagttagcagaacaagggttaaatattttagctattgagccaaatattgatgagttacctgtgaacttaccatcaaatgttcaacttatccaattagaggataaggataaagctgatatccatttaattttggttgatcataaagacttcaaaaatactttatcggctaatagtaattatttaattgatacaaagggtttagttaaataa

SEQ ID NO: 67187 - DNA, 204 bp, Acinetobacter baumannii
atgggtattgatgagcaaatcaaaatgcttgaaagcggtgactatgtgcttgtgccaaaagaaccaacacaaagaatgctaaacgctgggcatgtagtaatgaatccaatcaaaggatctgatgtgcatccagggactaatcagaagcggcgtgagtgctacaaggcaatgttaagggcttatcaggagtatggtgaccaatga

SEQ ID NO: 67188 - DNA, 405 bp, Acinetobacter baumannii
atgcgtgttgatagtacagcttttacagacaaccctcgcgcacgcgcgcgttttctcgaaactaagaaaaaagccaaagaattcttgcgccaacgccgaggttataagcgtccagacttcaaccgcatgattctagatttacgcaaccttggatggtcacacgaaaagattgcatacgttcttgatgtgtcgggtggcagcactgtttcttcttggtctactggatccattccagagtacatacacggtgagcaattcatcatgttgtggcaagagcaaacaggcttacagcgcgtaccacgtgaaggcgagtggcaaacatataaatacgatatagggcagcttgatctacttgaaactttagatgtgttcgctgctcagttagatgaggaattacaacaatga

SEQ ID NO: 67189 - DNA, 162 bp, Acinetobacter baumannii
atgactgatattgaaaaatgtctagggaatctaagtgtactaaatcgtttaaatgattattcgatatggctcggtttctttatcggcatttttctatgtttattcatatatttagtcattgaccatgtaatgactaagcgaatttcgaaaaaggaaatttaa

SEQ ID NO: 67190 - DNA, 282 bp, Acinetobacter baumannii; identical to SEQ ID NO: 53026

SEQ ID NO: 67191 - DNA, 195 bp, Acinetobacter baumannii; identical to SEQ ID NO: 53027

SEQ ID NO: 67192 - DNA, 324 bp, Acinetobacter baumannii; identical to SEQ ID NO: 66162

SEQ ID NO: 67193 - DNA, 204 bp, Acinetobacter baumannii; identical to SEQ ID NO: 66146

SEQ ID NO: 67194 - DNA, 252 bp, Acinetobacter baumannii
atggcagttcaaaaacgattagccctcacaattcagcccgactatttggatttattgaagaaagtagcggattatcaaaatatccctgtatcaacaatggttatgggcttattagacgctcaacgccctgtagttgaggcaatgcttaaagcatttcaggatattgaggcaggaaaagataaacaaaaaatcttatctgaacttttagcatcgggtcttgaagcagcagctcaagaaattagaaaggattaa

SEQ ID NO: 67195 - DNA, 204 bp, Acinetobacter baumannii
atgtattggggtttttttctatgtaccgactgtgatcgggtgatgtctacaaaaaacactgaaatggttcatatcaagaatagagataatcttgttcgtggtgtttgtggtgactgtcttaaaaataaggtcgagtacttaaaacatagagaaacagcaaaaaaatatttagaaagtttgagagcgaaattaaaggggtcttag

SEQ ID NO: 67196 - DNA, 1095 bp, Acinetobacter baumannii
atgaatgatgtattgatggtgttgaaaacacaaagcttaaaaacagatcaaagagtactgaaagaaataaggtctttaaaaaagtatggcgcacaagtagatgtttttgtagctaaaaattgtaatatgacacaagagcagttaggatgtaaaatatatgatattagtattctagggggagctgcaacacaaaatatatttctgcaaattattgggattctccagttttatattaattttttgttttttcttttaggtaaaaattataaaaaaatatgggtttgtgacccaataatgtttggtattgtctatttaataaaggttatgaagccttcatctatagtcatttgggatcatcatgaacttccgccaagctggtttatgaaaaataagcttttaatgtgtttttttaaaaaagcttatttaaaggcagatatcattatccatgctaatgagccaagacaaaagtatttagaagataaattaggggccaatgctatttatagttacattattagtaattatccagaaaaagtggttgatgaagaagcttttcttgatccagcaggtgaagactggctttcggaaaatgaaaaatttatctacttgcagaatagtttgcaagataatcgatatggtcaagaggttataaaagctgcgatagcgtgtggttataaggtgtttcatgccggtaaaatagactctaattatatagaaaagcataacttagattcccaaaatatatattttgctggttacctcagtatcgagcaaattaatcgagttttaaaaaaatgcggctttacaattgttttatataaacaaaactcattgaaccagattttttgcgatgctaatcgtttatatcatgcaatgtcattgggtgttccacttattgttgggaataatcctacgcttgtagaagcaactggaggatataaaaactttgtttgtttagatgatgatggtcgtgattctgaatcattaaaattagctatatctaaattgctaaaggatataaaggagagagagtcaaaaactttttattgggcttcttatgattctatttttatgcaggttgttgaaaaatgttag

SEQ ID NO: 67197 - DNA, 207 bp, Acinetobacter baumannii
atgaaaaaatcagacttatcaaaaacttatagagttcgtggggaattcgttgaatcaatcaaagagaaatcactagatttcatcattgaaaccaaggaaagaattgaggaagcggatatcattaacgcattgatttacaagcatttaaactcaataacatcgaaagatgtaacaaaatatattgaggaagtaaaaaaagcagattag

SEQ ID NO: 67198 - DNA, 291 bp, Acinetobacter baumannii
gtgtcacacgttgcagtgttacgcgcaattctgttatatttctgtcaaatagttgcatgtgatgctgttgcaatgggaaaagaacaagcttttgaaatcgtagccaagaacatttttgatcgtgctgttcagttaattattgggggcaatccagcctacgagtctgagctcgttctttttcacattgaaatgactatggtcgagtggggctataagtctgccaaagttgctgagtattgcgattcgatcaaggctgagaacgataatttccgttcaatggggatttgctaa

SEQ ID NO: 67199 - DNA, 393 bp, Acinetobacter baumannii
atgaaaccagaacagtttattcgtgagaaggggttgaagaaggcgagagaggtggttgagggggcgccagaaggtgctactcactacgggctaagacaataccgccagtgggagggtcgaattctaaaaacatttacagatgagtcttggcgttcaactgctgtttttggtggaaatcttagatttattgaagatgactgcctgtgtattcaagacctcaagcgtctggtggagtctttggatttggtaaaaaagctgggtgggagatctggtgctattcgcgagtattttgaatatgtccacagtggcaaatctgaattagatattcgtcctaatgagctagcaagagtaatccgcgaccacgaatcaatatacggaggcggggatgagtaa

SEQ ID NO: 67200 - DNA, 228 bp, Acinetobacter baumannii
atgagtaaagtaaaaacacctaaatataaaattggtgataaagttaaactaaatgttgggggaccagatatggcggttctttcccttggtgaaaactttcaaactaaagaatttaatggattatattcttgccaatggtttgctgggaagaaacttgattctggaaagtttcctgaagaaagccttgtagcggtcacagatgaagaagatcctgaatcaaaaaagtag

SEQ ID NO: 67201 - DNA, 240 bp, Acinetobacter baumannii
atgatattaaaactacgaattgatggttgtctttatcaagatgacgtagttgattacttggttaagaactcctattttgattatctgaaagaaaatgcagatggtaatttggcaattgcaaccccattactaactgcctttaaaaaaccaaccttaaaagaaattgtttgggtaaagccagatcgttattggcgctatagagtgctagaggatgaacttgctcgagaagcaagaggttaa

SEQ ID NO: 67202 - DNA, 1269 bp, Acinetobacter baumannii
atgaataaaaatttagaacaattgtgtgaagttttggatgagctttctgaagtagttttgagatcatggaatgatgatcaaattttaagaaatgtgtatggttggactcatcccccattaacaagacaggatttagctaatattcctaaagagcttagtaatcaaatacgaagaattgaagtatctaaacttgaagatagtctagtagaattgattgagaaaattcctgaaaagattagattaatgtatggggacacagttccctatatgtttaatggaaatggggcacaagcaattcctatttttctttcaacattagaatgggtaaggcaagttattgctcctttaatgggatgggaggttttacaagacaataaagctatgccaacccaaatggcgcgtcgtctcagagcgattcagattgaaatagagaatattattcctaataaagaaaatctaaccaatcaaataagtcttattaatgaggcgacggaagctgctgaaaatctgccaacagacttaaagagtcttaaagaagctagaaatcaggtatctgcattagaaaaagatagttcttttgatcgaaaaaaagtatcagaacataagaactccattgaagcacaacttaaatcaattaatgagatgcatgagcaggcgaagcaactcatagaaaactgtgaagaagcatatcgtattactacaacaaaaggtttagctgctgcttttgataaacgcgcatctgatttgaaatggtcaatgagattatgggtgggaggattattatttgctttggctgtaggcgcttttattggacatgaaagaatacagattcttacccaagcacttaataattcaaatataagctggggaattattagtattcaaattgttctatcattcacaagtgttttggcacctttatggtttgcttggttagcgacaaaacaaattagccaacgatttaaactagctgaagattatgactttaaggcttctgtagcaaaagcatatgagggatataaaaaggaggcagcaaaaattgatgttaattttgaagctaggttatttaatgtggcattaacacgcttagaagaagctcctttacgtttagttgaagctagtaatcatggcagtcctagccatgaatttttagaaacaacaggattagataaattagcaaatagtgccagtaaaattactgaaaatgtaattgagaaaattactaatacaaaagtttcaaaaaataatttagatgaagtttctcaataa

SEQ ID NO: 67203 - DNA, 693 bp, Acinetobacter baumannii
atgtctacccaatcacaaagattgaaagaagcacgtttaaaagctggactttctcagaagcaagttgctgaagctgtgggcatgaaacaaccgtcatacagttatttagaacaaaatccgaatgctggatctactcttctccctgagatagctaaagttcttaaagtagatccgtattggttaagaactggcgaaacaccagaaaatatcgacaaaagtctaagtctaataattgataattctccgagcgttactgtaagctcagaagaacaagaaagcgaaagaatttggattgatttagtgaacatacggtttgcctgtggggatggggaatcgattgaatttcatttcgatgaagttcttgaaaaacgtgattttccaccgcagttttttaaaaaatatggcgttaagcctgaaaatgttaagctcgccctggcatcaggcgactctcaagaaccgtatgtttgtacgggagatgtgtttgcaattgatttagctgatactgatgtcaaagatggtgaattttatgctgtctactttgaaggtgaagctatgctcaagcaaatattcaaagaggaaggcggagtattaacgctacatagccttaatccaaaatatagagacaagagcgtttctgcttccaatggtacaagttttagagtaattggccgccaattttatagagctggatag

SEQ ID NO: 67204 - DNA, 183 bp, Acinetobacter baumannii
atgcaagtgcatgagaaaagaaaactacttgaagctattgatgtgcttattcgtcgtcctgcttcagcaacagagacaacacttgctgaggcaatggcctacttcaagatgctaattgaagagtctacacaaggacaaattgaagtccggtattcagacactactcagcagttgccattttaa

SEQ ID NO: 67205 - DNA, 468 bp, Acinetobacter baumannii
atgttggttgcaggcgcattactatggcaaaaaaagcgcatcaaagaacaaaagaaatttggatatagattagtacagcatttgaatttttttactttcttagggctgccttttgcctcagccttttatttaatggttggtcggattatacctgcttcatttgagccgagggaactatacgaggtttcagcattttatatagcatggctattaagcttattgattagctttagctgctcaataaggaagggaataatcatcatgctatatattacggctgctgttttattgcttattccagttattagtgtcgttctggtgccagaagcctctttattaaatagtttaaagtctgtgcattggtctcttgccggtgttgatctggcgctcatactgctcgggctattctatttagtagtattacgcttctaccaaaccaaatttattacgttaggagaggctaaatga

SEQ ID NO: 67206 - DNA, 165 bp, Acinetobacter baumannii; identical to SEQ ID NO: 53990

SEQ ID NO: 67207 - DNA, 357 bp, Acinetobacter baumannii
atgagtgagtttaaagcgggtgactgggtcaaaacccaaggacatataggactaatggtgatttacaaagtgactggtgaaaaagccattgtggatgtgatcagtagaacaggaaagtcgattgggctatctggatacaaactatctgagattgagcgcgcatcagaagctgagattaaagcaggccaccgcattgaatcaagcaacgatcaagcaataagtgattgtagtgtctcaaatttatgccaaaacgatacacaaaacagtttgcctatcaagcaagagaatcaagacatgggcgacgactcccacatagaaaaccgtatcagcccgctgtgtaaatcaaaggatttttga

SEQ ID NO: 67208 - DNA, 264 bp, Acinetobacter baumannii
atgaaatcaaatacacataaaacaattcacttgttagcacaagacaaagacggctcattaatcaaagcaatgcagcaataccgtttggttgagattgatgacgttcttaaatcacgcggcacattagagtttgcaggaaagacggtaactgctgttagaccacatccaaacaatgatgattcttggcaggttgaaactggtgaaggcctaatctgggttgaagaaaagaacttggaaagtatggaaggagccagccatgagtga

SEQ ID NO: 67209 - DNA, 228 bp, Acinetobacter baumannii
atgagtaaattcaagaacgaagtgaaagccacgctaaaggattttaaagagctttatacacatgactggcatgagttcagcaatgcaggacagttctataaacaagcgttccgtgactttgcatacgccacaaaacttttactgattgggttgcttggcattatctgcctgattgtagctccattcctaattccttttgcaatcatgattcggacgataaaaaaatga

SEQ ID NO: 67210 - DNA, 381 bp, Acinetobacter baumannii
atgaaaccagagcagtttattcgtgagcaaggattggataaggcgagggaggttgttgagggtgcgccaggatttccagttttcggctattgcactttgacaggtaactacattttcaaaagatcaaatgctactgcttactaccacaatgaaactaattcatggtcagaagattatgcgattgagttgatcttattggaagacctcaagcgtctggtggagtctttggatttgatcaagttttatgatggcattgagaaagcaaagttgaagctggcgataggtacttgtctttttggtcgcccaccacatcctcgtgaagttgaattaagacaagccatccgcgaccacgaatcaatatacggaggcggggatgagtaa

SEQ ID NO: 67211 - DNA, 258 bp, Acinetobacter baumannii; identical to SEQ ID NO: 46547

SEQ ID NO: 67212 - DNA, 681 bp, Acinetobacter baumannii
atggtggttgagcatgcccatggcctccgtcagcgccgagggcccaatgccaaaagctctctccacaaggcgcacctcgcccctgatgccgggctgcaggcaccaggggcgagcctgtcctttgcgcagggctcgcatgacttcgaatcccttgatcgtggcataggccgtggggatcgatttgaaaccgcgcaccggcttgatcagtatcttgagctttccgtgatcggcctcgatcacgttattgagatacttcacctgccggtgggccgtctcccggtccagctttccttcgcgcttcaattcggtgatcgctgcaccatagctcggcgctttgtcggtattgagcgtggcaggcttttcccagtgcttcaggcctcgcagggccttgcccaggaaccgcttcgctgccttggcgctgcgggtcggcgacaggtagaaatcgatcgtgtcgccccgcttgtcgactgcccggtacaggtaggtccacttgccccgcaccttgacgtaggtttcatccaggcgccagctcggatcaaagccacgccgccagaaccagcgcagccgcttctccatctccggggcgtagcactggacccagcgatagatcgtcgtatggtcgaccgaaaggcactgttgcaaatagtcggtggtgataaacttatcatccccttttgctga

SEQ ID NO: 67213 - DNA, 1338 bp, Acinetobacter baumannii
atgttggtgtctatgtcggataaagaacttaaacgattgtcggtcttgcaggaaatctgtgatcaacgcataacccagtcccaagctgctcagctacttcatatttcagagcgtcagatcagacgtttattgcaaaaatacaaagctcaaggcccagctgcattagcccatgccggtcgtggtcaaatcagcaattccaggcttcctgaagagctcaaactcaagtgcctcaatattgtttctgaccaactccatggtttcggacccactttagcgcatgaaaagctcaccaccgttcatggctttgatatttcagtggaaacactgcgttcctggatgattgcagccgatttatggattcctcgcgccaagcgtctgaaacgcccgtatcagcctcgttataaccgggactgttatggtgaactgatccaaatcgatggctcacaccatgactggtttgaaggtcgagcccctaaatgctgtctgctggtatttatcgatgatgccacaggcaaattacagcatttacgcttctgtgagtcggaatcaacctttgactatatgatttcaacacgtttgtatgttgagcagcatggtaagcctttagccttctacagcgataaacattcagtcttcagggtgaatcaaagcagtaagaaagacaccaagattacccagtttgggcgcgtactcagcaccctgaatatcgatattatcttcgctaattcaccacaggccaaaggccgtgtagaacgagccaatagaacgcttcaggaccgtctgatcaaagaaatgcgtctggaaggcatcagttcgattgccgaagccaatgcctggctaccctgcttcattgagcagttcaatcagaagtttgccaagatggcctttaatcccaaggatctacaccggactgtcactgaaacagccgaagaattagatgatatttttacctggcgtgaaccccgcagagtcacgaatagcctgacgatcacttatgataaatgcgtatatctcctggaaaacacggaagaaaaccaaagattgattggcaagtatcttgagtttctggaatacccggatagtacagtcgcgattgaatatcagggaagaaaaatcaattacagcatcttcgataaattaagtcagctcaaccagcgagagattgttgaaaataaacgtttgggttctgtattagcccatattcaacagcagcatgaagaactagaacaacaaaataaacgcaatcgttctcaaaagatgccaagcagacgtgcacagaaaacagtaatcaaagaacgaaatctgaatcctgtgcttgacttggaaatgtctgtatag

SEQ ID NO: 67214 - DNA, 249 bp, Acinetobacter baumannii
atgagagaactatcaatacatgagctagatattattagtggtggttccaacgctactgattgtaaaaatgatgttcttgctggagcaggtcttggggctactgcaggtgcagcagctacagcttgggctggagcttgggctgctgtaggagcagctgtaggagcagtagttggaggcgctgcagcagctgcaaatagttccgcatgtcaagctggtaacgattattgcgaagatggcggtgattattaa

SEQ ID NO: 67215 - DNA, 210 bp, Acinetobacter baumannii
atgtacaaaaaacttttaaaatggttttttatcgcacttctttttttagctcttatttcatattcaatagtaggctgttacattggtattgaccagactttaaatgttttttttgaagatattcaatataacttattaatgcttttttcccctgcattaatcgttgcttttttgctaacgcgttgggaaattaatagaaacaatacttaa

SEQ ID NO: 67216 - DNA, 1017 bp, Acinetobacter baumannii
atgagcttatttacattccaacatagtaataaggagatacaacaaattgcagaaacctcttttgggcaagaaggaatattagaaaggcaagatcttcaacaagctttaaaacaaaatattgaagctcttgttccagatgttttgattgttgctgaagaatattccgaatgggatcagtctcgcaaacgtattgatttattagctatagatcgaaatgcaaacttaataattattgaattaaaaagaacagattctggtgatcatatggagctccaagctctaagatatgcatcaatgatatctacgatgacgtttgaacatcttgtaaaagtattcaccacgtataaaaatctaaatggttttccagattttaaagaagaagatgcacaagaggaaattgaggagtttattggaaaagatttgttagaaatagaaagtacttttggtgatgatgtaaaaattattttggtctctgctgatttttcgaaagagttaacaacatccgttatgtggttgaatgatagagatttagatattacctgtatacgtatcaagccatatagacacaaagaagaaattctactgaatattcaacaaattattccacttccggaagccaaagactatcaagtcaaagcgcagcaaaagtcagaagagcgaagaaattctgataagaaatatttaagagattactctaaatacctgttcaatggtcaggaatacaataaaagaaatttagtcctagctgtagtaaagcatcacgttgaagaaaaaaatataaatagctttttagcactaaataatgattttcctaaaacattaagaagcggacgtttttataagaaatttgatgagattaaaagtcaaaagagatatttttctcaaccaactgaagtttttaattttcaagatggttgttacgctatttcaaatcaatggggatctggaaatatcggtgaatttatagatcaagcgcgaagtcttaattatgagatagaaattaaggaaaatagttaa

SEQ ID NO: 67217 - DNA, 339 bp, Acinetobacter baumannii
atgatgaaaagatatgctcaactattagaacttattcctgatttagagaaaataaaggaagataatagtctatctatgcaagatgtcagagaaaaatacatcgaggctatgaatgacgaaatggtttttgaatatatagaagtattaagtcaatatattgatattaatgaagaagttgtttctaattttgatatagagactattttagcttatttaacatcaactattcggaatgatcgtttttttgatggggctttatcttatagcatccgatcaggggtgattcttactgccttaaaaaggctatctatcttagtagataaagatatttctaattaa

SEQ ID NO: 67218 - DNA, 405 bp, Acinetobacter baumannii
gtgaaatatttattagtcttaatcgctttagttagcacaacttctacgtatgctaagacagattggtgggaggtaggagctgtagttttaggtggggctattgctgtagcaagtacaagtaaaaaccaaaatgcacgtgaagttggtcaggcagctgaggtcattatagggtctgctaatgatggtcaaggccttaaaaaatatatattaccaacacaatatgaagctaaccttgcagcatacagtgaatggataaaagtaggtcgtagtcgtaatttgttaatgccagaaatggatgaaggtttatgtatctaccgtatgaatgcaggattgatcgaattaaacgctgatcgttttgatgaatgtcccaagtatgttgcagtgcatccaaagaattattattaa

SEQ ID NO: 67219 - DNA, 702 bp, Acinetobacter baumannii
atgaaaataacgctacaaatcaaatgtcctacctgtctaagtaacaatataaagagaaatggcatcaaagtagatgggaaacaaaaccatcagtgcaaagattgcaaacgtcagtttattggtgatcatgcattaagctatcaagggtgtaactcaggtattaccggcaagatattacatttgatggtcagaggaagcggtgtaagagatattgctgaagtcgagcgtatcagcattggcaaggtattacgaaccttaagtgaatcgatctatcagattcagcctaaacaaagccactacgaatgtcttgaagtcgatgaactttggacttttgtagggaataagcaaaataaacaatggcttatttatgcctaccatcgagaatctggagaaattgttgcttatgtttggggtaagcgggatttagcaacggttcaacgtcttaaagctagacttaaaaagcttggggttcaatatgctcgaattgcgagtgatcattgggatagttttatcacagcatttcaatgttgcaagcaagtgatcggtaagttttttaccgtcggtattgaaggtaacaattgtagaattcgtcatcgaatcaggcgtggatttaggagaagttgcaacttttctaaaaagcccgaaaatcattttaaagcctttgatttgactttcttttaccttaataacggatttgtttaa

SEQ ID NO: 67220 - DNA, 693 bp, Acinetobacter baumannii
atgtttaaatttttatacattgcacttctattaacgatattagctggctgtactcataaagaaaatcctcaacaagaagttcctgcttctgaacctgtagcagttaaaaaatacgggattaatcttgatgattaccctgatgaatcagctaaagattattctcttcagcaagtatgggagtttgatctcgctgagaaatatgggcgtcctttctataaagcaaataatatttgtagtgacaaatattcatatatcttagataaaagtactgatacatcaacaagtgaaggatctttagtaattgatgagtttaatctcgctcataaaaaatgtgttattgaaactctcaaaaatgtgattcctgaaccacaaacaaatagcaataacaatgacgagattcaacaagctcaagacagtgattattttgatgatcgtcagcctaatgttgatttgagccaacctgtagattctccagaagaagaaataaaggttaaagaagaaactgaatcaaaagaaatatcaaaagaagaagaacttgagcatgttagaaaagttcttgatgaagggtatgcaccgccagaagttaagatcattgtatattgtacgagaaaagctgaaatttactataaagacataaatatgcaaaaaaatgctacggctgattgtatcaatgacttgaaccctggcttttaa

SEQ ID NO: 67221 - DNA, 204 bp, Acinetobacter baumannii
atgtttaatttcaagatttttaataaagtctctacggaagtgttgacgataaaaaatgacctccagcttaattctgaggtgcaattaatcaataaatataaaacttctacttctgaagagtatagaaaagctattgttttaatctttaaagaacgtggttacacctggctagaaatggggcagctattcgaaaggtcaatttaa

SEQ ID NO: 67222 - DNA, 414 bp, Acinetobacter baumannii
atgaaacaaaaaagatattcttttccaattaccttaatggctcgattacttcatgtttcagtttcatgtttttatgattggctcaagagaggcgtgagcaaaagaacgattcaacgaaatcaacagatgatattggtgaaaatagcccatgaggagacaaggcagagctatggttatattcgattaaccaaatacttacaagctcagggcataaaaatgagtatgtacgctgtacgtcagataaaagcgctgaaccacctgtattgtaagcgacacaagcgttttaaaaggactacgaatagtgaccataatcgagcgatctatgaaaacctgctggagcaacaattctcaatgactagaccaaatcaagcatggtcaagtgatattacgtacatatggactgttgaaggatga

SEQ ID NO: 67223 - DNA, 633 bp, Acinetobacter baumannii
atgtttattagagcctaccttcgtgcctcaaccaaagagcaagacgccaatcgtgctaaagatgaacttattgcttttgctagagagcatggccataaaatcgcagcattctatactgagaacgagtcaggagcgacgctagaacgtccacagctcatgcagctcattgatgatgcctctgagggcgatgtgatcttagttgaacagatagaccgtttggcacgtttaaatcaaactgattgggataccttaaagagaaaactatcagccaaacgtctttctgtagtgtctaaagagcttccaacgtcatatatggcattgcaacaaggtaatggctcggagtttatggacagtgtactacgcgccataaatgacatgctgctggatatgttagcggctatagctagaaaggattatgaggatagacgtaaccgtcaaatgcaaggtattgcacgcgctaaagctcaaggtaaatataaagggcgggggaaggacatggaaaagcgtaaaattattgccagtcttctaaaatcaggccacagctactctgatattcaacagactgtgaagtgttcaagacaattgattgctgaggtttcaaaggcatcaaaaccaatatcctcctctatataa

SEQ ID NO: 67224 - DNA, 576 bp, Acinetobacter baumannii
atgaatttaccgcttagtgaagcattaaaaaagtattcccgtcaaacacatgatagtgtagatgcgcttgttttatctatgcacccgtttgcctctgttgagaattatagtaagtttttgcaagcgcaagatatctttcagaagactctaaagcctatctatgatgatcttgattggaactataaaatcgaaggtctgagtcagctatcacgcttaaagcaaatctctaaggatatgcaagatcttaatgttaatccagtttcaatggtcgaggagcaacctaatccaagtggttttgaggctattggctggctgtactgttctgagggctcaaatttaggtgcagcaattttgtgtaaagaggcacaaaagctgaatctaagtgattcttatggagccagacatttggctgcgcatgaagaagggcgaatgagacattggcgcaaatttaaagagcagctagatggtctagaattaacatcagaacagcggcaacaagcgttacaaggggccgaggatgcattcgcattttttaaacgagtgattcgtcaagtaaaccctagaggaaccaaataa

SEQ ID NO: 67225 - DNA, 2487 bp, Acinetobacter baumannii
atgctcaagggttcagcttatagaaagtcgatacatatacctattctcgaaattaggtctaaaaccctattaagtattcttgttgggactttaatgtatcaatctgccttagcggatattcagcagaaagaagaagatctaccgacattatacatggacaaaatcactgtttatgctaaaaaaaatccccctataaacgtaggggacgacatcaaaacagccaaaaccatttcagataacttgattgatagtaataaagacttagttcgttataaccctgatataagtgtgtcagatgcaggtcgatatggtagtaatggctacgctatcagaggtgtggatggcaatagagtagcgttaaacctagatggcgttagcctgccagataagcaagttaacgagatattttcagcctatggttacatgtttgaagggcggctgtcccctgatgtggaaattttatctgaggtagcgtttgaggttggttctgattcttttaattcaggcagtggtgcaatgggaggggctgttagtttcaaaaccaaagacccagaagatttaataaaacctaatcgtcaacttggcggctatgccaaaacaggttatagcagcagcaatgaagagatcagcgaatcctttggtttggcaggaaggaacgataagcttgaagcaataattaattacgtgcatcgtagaggccatgaaacgaaaaatcatcgtatgataggttttgataaagaaaagcttaatcctgcatatgactttatcaatgatccagactatgcttatccccgcacgggttatagaagcaatacagcagcgatattgcctgatcccttgacttacgaaacagaagcggcgttagcgaaactgtatgtccatttgaatgaagagagtaggttaggctttcatgctacaaagcaaaaaacagatacgctatctaataacttttcaagaaagactttttcaccaagaattggtaaagacaacgtcgaattagacagctatggcataagtcataggtacatcccttctgacagtgaattaattgaccaaatagataccaacctaaactaccaaaaggctaaagccgctgcgaatacagaaacctatagccaagattgggggacggataattacaggctagatggtttaaagcatcgccctcaaatagataagactttgcagctaagtatcgcagcgagcagttttcctgtacaaactgaaaaactcggtgagcatattttttcagtaaatacaaagtatgcaaaaaaagatcataagcttatcttagaggaatcatttattcctgcttcgggcacagctgaatcttggtatgatttccttggtccatcggtgaaacaagacgtatttaatattgctgttcaggataaaatcaacctcaccgataagctagatacagtgcttggcattcggtatgaccactataattataagccctatatggatgagattaataaaaaagggattgaaaaatccagcaaatattatcctgtgcgtatcgcctacgaaaacggtgaatttgatcacaataaaacaatgagtaacataggaggaatgttctccgttaattacgaactaacccctgatttgcaggcacagtatcaaatatctaccggctttatggcgccagcgacaagtcagatgtattctgcatttgagatgatgggaaacagtttaacgcctaattttcacctaaagcctgagaaatcacttaaccatgaaataagtttgcgcggtgaatataaggattttagctttaaagctactggtttttatacgaaatatagcgactttattagcttattacattatcaggaagaacaagaaagatgctacgaagactattcgagtggtaagcctgtatgttcccctcatactgtcaatatgattggcgctaagaatatcggcaatgcaaagacgtatggtatacgcttaggtggtatgtgggatattgctcaattggttgatacagagggcgatatcaaggtgtttgctaatttaaattatgctaaagacgaaagcgataaaggaaccaacctactggctactcagcctttgaatgcgatgttaggtatagggtatcaatcctctaaaaaagattggcagttatcaggaaacctgaggtatttaggcagaaagcatcccaatgatgcaaaggttgttaatttagaatctaatggctttaattcaccttatcaggagtatatagcgccttacaaacatattgataggtctaaatcagcctatgtctatgatgtctatggcagtaaaaaaataggctcacaattaaaactatcagcaggaatatttaacctctttaataccaattatgttccgtgggacagcctacgctcattggcagaattaaacgtcaactctatggtagatgataaaggcgttggtattgagagattcaccgcacctggtagaaattataaggtgggtctaacttacgagttttag

SEQ ID NO: 67226 - DNA, 441 bp, Acinetobacter baumannii
atggacaacatatatccctctccccagcaaaagacgttacagaaagaaatagcccatagtcagatgcaccataaccgtttcgttcgcctaatatttatgattctaggcgctgttttttttatactaggtttaatcggaattgttcttccagtcctacccaccaccccctttattttgcttactgccacctgttgggccaaaggttccattaaatttaataactggcttcttaatcataaaatatttggcaaaatggtcattgactggcagcagcatcgtgcaattccgcgtaaagctaaatatttggcctggtcaatgatggcgctttcttgcggtatgttgttctaccgattttctgataattggcaatggcttgcttgggctacatgtgtgatatgtatcactgttgcgatatggatgtctcgattacccgatgcctaa

SEQ ID NO: 67227 - DNA, 561 bp, Acinetobacter baumannii
atggatgtttgtagtttggattggtcaattattgctacctatcaaggtgtgatgggaacttatttaggagtagcagcaacaatagcatcaccaataatagttgctatttatatttataaaaaatggcatgatcagaaaggaaaagaagttatagctaatgaagcaaaggaaattttaaaaatagtagaagagttaaaaaatgactatatgtatagatacggaaatatggatagtttaattaattataaagaactttttagcaaagaagatttatctactaatagaattaatagctctagaaatgataggaaatatagagatagggtaagattgctattagaaataattgaagataaagatatagaagcagttcaatctgatataaaaaattatggatttcaatatatccaccaagaaatgcgtgttgataatgaagaaaaattaaaaattttggagaagaaattaaatcttttagtagatagtctgaatgatttaaatcgaatcctcatagagtatatgatgtataaaaaggaaattgtttttcgatctaaaagcgcatag

SEQ ID NO: 67228 - DNA, 201 bp, Acinetobacter baumannii
atgaacgaaaaatttaaatggattttcttatatggtggtttaggttggggaatatcctttgcctgtcttacttttgcgattcgatatattcaagataagcctcaagctagctcattgcctatatttttagcaatctgtattgttgctggaatgatttggggttggattatgtttaagtcacctgtaaataggaaagcttaa

SEQ ID NO: 67229 - DNA, 390 bp, Acinetobacter baumannii
atgcaatcagcatattatttaaagaatttcttaggatcattcattggtttgacagttgtaactgggatcgcattaacgattctagaatatactcctgagccctatacatatatcggcattatctttgggctaagtattgtgtttttggggctaacgttaattggttataccaacgcagcaaccctattgaacaataagatgaaacatactctgtatttacattcaatattagtaattttgctgtttgccacagacttaatcttcggtaataaggatctattgtttactattttaagaaatgtaggtttctttgtagtgttgcaatttggagtctatctttatgtgaaaaaacagccaatgagctttaaagaatttctaaaattaacataa

SEQ ID NO: 67230 - DNA, 807 bp, Acinetobacter baumannii
atgtctaaaaattacgcccaaataattgggatatcaaatactgagatagattcactaaaacgaaagatagagaaaacttgttcactctatttagacaaagcggaatttgattggaaagaaagtgatgccgatcaacttttagcattagatgaatcaaaagctatagcattagagcacttcaaaattgcagataatagtagtctaattccaggccatgaaaaagttaatgcattttcgccaaaagtagatgagtttattgctattgtttgtgatattagagactccacaaaacgcttaagcacaatagatcattcaatcaaaataaaaggtattcagagaatcttttatgaaacgtctgctctcttaccatcaattgaaattacgataaatcatttcggcggaaaggtaactgaatatctaggggatggagttttaggtttcattcaatataaagatacagaacaaatatataaggctcataaagttgcaaaaagctgtttaagtctaactttagacatagtcaaccaacagctaaaacagagatataacttaccacctttgcaaataggtatcggaatggcgctatcaaaagctatgattcgagtcgtcactgctgatcatgtaaaagcttttggtgagtgcgtttggaaggcatctaaattatctagtggcaggaataaagcgtgtatggatgataatctaaaagctaaatggccaaaaactgtgggtggtcgtttggttttcaaaagagagattctcaaatcatccgacattaatgcttatagagtttttccattactagattaa

SEQ ID NO: 67231 - DNA, 585 bp, Acinetobacter baumannii
atgtcaaatgactcttataaagagactcttttaagagaaagtatccaagatacccaagcaactattcgagctctagatgtaaaagctggctttctttttgtctttttatgtgttccctttggaaccatggataaaataacacctgcttttacaactcttataaaatctaataatctctttattttattaattctttctttctttgtcttatggggatatgcgctggttattttattttcaagcatagctccacaaaataatcccaaagatagcattgattttaatggtattactaatcaacccaaaggttttttatttggtggttaccatttacagaaactaggattttttcagttatttcaagcagaagctacacctaaagaaaaaattaagcttttagatgaaattaatttcataaaaaatctcagtgaagaagcttatctagaagaacttaatgtagaaagaggcaaattaataactattagaaatttaaagactcaacgcttaaatgtatgtataaaaacgatttttatatggttaattctttcagcatctttatgggttatttacctaatagttagttaa

SEQ ID NO: 67232 - DNA, 588 bp, Acinetobacter baumannii
atgcatagtccagaggaagtaataaagtctagggctgctcagaaaaaattgaatgagattaatcagcaaatttctattaaagctcatgaattagcagctctcctagaaactagatccgagttaataaatacttctggctttatgacagatacccattatcacattggtaatgtaattcgtgaagcatctcagaataatccgtattttagaacatctttgctagataaattaaagcaactccaaggtcagtttgatcttaaatattggcctcggttagatgatgtaatgaaagttatcgctgaagatgcaagaatggccgtacctattgctattgattctattactgaagtggcaacaataggtgagagagcttccttagttgattattttagagctttatttgaagctattgaatgtaatcgtcagaaagaatatggtttcttacctaatgactttaagttaacagataatacaattgctaccttagcgaattgcgccttagctttagagccaaaagaaatgattgatggcctatatgtgaaaaattttagaagtcgtgagcgcaaacgcataggtagtgactcctaa

SEQ ID NO: 67233 - DNA, 354 bp, Acinetobacter baumannii
atgaaaaaacattttcaatttatcgtttttactactttcatgattggatctgttgaggtttcatatgctgactttggttttattcaagataaggatgggtacgttaatgtacgaggaaattcaagtttaaattctaaagttacgtccaaattgaataataatgaaattgtttcttgtgtgatggatgaagggacaaataatttttgtttagttaatgcaagcaatggtgtaactggatttgtctataaaaatagagtaaataattttagtggttacaattctattaagctatctcaatattctagagctgtctcttatacacatctgacgctgccgacgatctactctgtgtag

SEQ ID NO: 67234 - DNA, 630 bp, Acinetobacter baumannii
gtggtgaatctgacgattaaaggtgctgttgttggacgtggtggtgatggaggattgccacatttggcatttggtgcatggtctaccgatccagattacaactttaccaaaacccgccgtgatgggtttcagggagcacccggtttgttgaaccggcacagtaaattgaacctgatcattgatggtggaactctggctcgaggcggatctggtggcggcgcaacaccaagcggtatttacactgaattaacatatggagtccaaggtatacccggtggagctggtgcaccatttggacgggtcatgacgggacagcccatttcaaatgactcgcaagactggcgttggtacttaaatggtgactttatggttgtcaaagtaaccgatgctgaagctgcagtgcccggtaaaggttaccgaacccaaaatgaccgttatggatctccattatcaggtgatggcggaaactggggcgaacgtggtaccaagtccactaatgatgaaacgtggaactggcaataccatggaacgactgaaggccagccgggactgggaggacctgcaattgtgggagttgctccacttacaaccaaattaatgaatggagggaaaatcttacaaaccctttaa

SEQ ID NO: 67235 - DNA, 477 bp, Acinetobacter baumannii
atgccatctcctgatcagttagatcagtctacagctgctaaagtgctttctgctgctggaagtgtgggcgaaaatgcagatacattacgtcgtgctgatggattaactataagaagattaagttgggctttacaattaagacatgttgagacacttgcaagagatttacctcccaaagtgtggcaaaaacaaagaaatgagttttatcaatttgctcataatcatattctaagaccggatagtatttttgagcattttacttatttaccgcgattacttggttttgctatcagtttaaatgaatggcatcaagcagaattaattgtattaagatcttataactcattagatattcttaaagctgaaattttcaatcaagatagatcaggtccgtatggcgaaattaatggagctaaatgtattcttcatgaagaaatttggcaagaaatcaaatatctgtctcttatacacatctga

SEQ ID NO: 67236 - DNA, 225 bp, Acinetobacter baumannii
atgtcaactagccaaatagatgaggttgtttcctacttcggcagtcagcgtaagacagccactgccttagatattacccaaccaactgtaaaccacatggtctctactggtcaggtgtctgttaaatcagctctgatcatccaaaagagaactaatggcaaatttaaagctttggacttatgtccggaattaaaaaactacttttctgaattaactgtcgtttaa

SEQ ID NO: 67237 - DNA, 549 bp, Acinetobacter baumannii
gtgaataccggtgaaatcaccattcaaacaactgggaaaatcactggtaactttggtttagtaggtagctcatttacgcgacagcaggttaatcctgttacaaatcctattccagcatcgactcgccctctggtgagtatgccaaacgttgaaaagctacttattaatggtcaatcaattcagggtaaagcttgtctgcagacacttaccatcaactttagtaataatctggaagcgatccgttgtatcggttctggtaagtacacgcctgagttttacttagagaaaatgatggatattggcgtaaatgctaatttcatgttctcggcaacttctgccgcatggattgatgctattaaaacccgtgatgtatttacattgacctttgatattacagataccaaaggcagtaagtactcgtttaacttcccgcaacttgaagttaaggaagcaaatcacccggatggtggtggcgatgacatcattacaatagatatcaattttgcccaagtgcgtactagtccaacgattgtacgtgctcttgtgtaa

SEQ ID NO: 67238 - DNA, 549 bp, Acinetobacter baumannii
gtgaataccggtgaaatcaccattcaaacaactgggaaaatcactggtaattttggactggtaggtagctcatttacacgtcagcaagtcaatcctgttactaatcctatagctgcaacaacccgtccactggtcagcatgccaaacgtggaaaacttactggtaaatggacagacgattcaaggtaaagcgtgtttgcagtctcttacgctttcaattaataacaatcttgaagcaatccgttgtatcggctcaggcaagtacacaccagagttctacattgaaaagatgatggatatcgaagcaaatgcttccttcatgttctcggcaactgcggcagggtggattgatgccattaaaacccgagatgtgtttacgctgacctttgatattaaagacagcaaaggcagtaaatactcgtttaacttccctcaattagaagtgatggaagccaatcacccagatgacgggggtgacgacatcattactttagatatcaactttgcccaagtccgtacagcaccaacgattgtacgtgctctcgtgtaa

SEQ ID NO: 67239 - DNA, 399 bp, Acinetobacter baumannii
atggtttgttctgaattgcaaaatagcaaatcaagaataagtttccaaggaaaagttgatgctctttcagtacttagttggaaccaagatttagaaacattctctacattaatagaatctgcagctcttgatgttcatgcttacacaattcttgttaacaatagaaaatatggagatagtcgaattcgagtacctgctaaacaatctttcaatcgtgatttagcacgagtcagaggtggagaaaatgattttgttgtagcagctattcttgatattaatgaattaagagcttttcagagtcgagcaaaaagatggactcaagatggtgataaatttaagcctctaccagaaggttttgtgatatctaaaactcgtaaattatcaccaccaaataagtag

SEQ ID NO: 67240 - DNA, 1107 bp, Acinetobacter baumannii
atgaagaaattgcttctcgctgccgcagttgcaactttgagcgtaaacgcggtgcaagcagcgccaactttgtacggcaaactaaacgtttccattaaccaagttgacaacaaaaatttcgatggtaaaagtgacgttaccgaagttaactcaaactcttctcgtattggggtaaaaggcgaagagaagttgactgataagctatctgctgtttatttagctgaatgggcaatttctactgatggttctggttcagatactgaccttagcgcccgtaaccgttttatcggtttaaaaactgaaggcgtcggtacgttaaaagtaggtaaatatgactcttacttcaaaacctctgctggtagcaaccaagacatctttaacgatgacacacgtttagatattacaaatattatgtacggtgaaaaccgtttagataacgtggttggttttgaattagaccctaaattattagctggtttaacattcaatatcatggctcaaactggtgaaagcacttctgatagcaaaaaaggcgaaactggtaaagacagcaaaaatgatagcttcgattcagtttcgacttctctaggttatgaaaataaagacttaggtttagcaatcgctgctgctggtgacttcggtatcaaaggtaaatatgctgcttacggtttgaaagatgtttatacagacgcttaccgtgtaactggttcttatgacattgctaaatctggttttgtagtaggtgctttatggcaacatgctgaacctactgatgatttgactgcatatggtcaaacatataaatcagatggttcaatcgataaagctggtaaagcttaccgtggtttagaagaagaagcatacgcggtaactgctgcttataaaattcctaacactaaacttaaagtaaaagcagaatatgcttctgctgaaacacaagtaagtggtcaggcagatcgtaaaattgacttgtatggtttaggtcttgattatcaaatcaataaacaagctcgcttctacggtatcgttgctcaacaaaaacgtgactggttaaatgacgacgacaaacaaactgttgtaggtactggtattgaatataacttctaa

SEQ ID NO: 67241 - DNA, 591 bp, Acinetobacter baumannii
atgacaaatttaagcaacattgtagaagttttggctaagcaagctttaggtgggaatcagcaagcgtcaggtcaaagtggtttaggtggaattttaggttctgtactaggacaaatgggtggtaatacttcatctggtgcccaaggtggtcttggtggagtattgggttctgtattaggacaagtcactggtaataacaacacacctcaagctggtggcggtgtacaaagtttattaattgcagtggtacctttaatcttaggttgggttcagcaacaaggtggtttacaagctgctcttgagaaattaaaaggcgctggcttaggtagccaagttcaaagttgggttgatccaaaccaaagtaatagtgaagttccgacccagcaattacaaagtctgtttaatccagcagacattgaacaagttgctcagcaagctcaagcaccaaaagagcaagtttatggtgcaatcgcttctgtcttacctcaggtcattgattctttaacacctcaaggtgagagtacagatcatcaagaagctaaccaagatattcaaaatgtgatgaatcttgtaagtggtttcttaaaataa

SEQ ID NO: 67242 - DNA, 462 bp, Acinetobacter baumannii; identical to SEQ ID NO: 42114

SEQ ID NO: 67243 - DNA, 870 bp, Acinetobacter baumannii
atggaactacaaggcatttgccataaaatgcatgcaggcctaaaagatgctagtgtaactgatcaacagacaaccaaggcaaatgttgaatacaaatttgtattagaccgttcagaaattgatcttccttttaatctaggacaagaactagaaatcgaatggacaggtaatatttattgcacctcttgtggtgctaaaacaccaaagtcttactcgcaaggccactgctttaaatgctttaaaacgaaagcggaatgtgacctttgcattatgaaacctgaaacatgccactaccatttgggtacatgtcgtgaagatgactttgcccacagcgtatgttttcaacctcatattgtgtatttggcaaattcaagtgctttaaaagtaggtattactcgcgttagccatatgcctggtcgttggttagatcaaggggcaactcaagccttacctattttaaaagttggttcacgtcgtttatccggccagcttgaaaccatgtttggttccttaattgcggataagacagattggcgtaaacttctcaaaggcgaagctgaacctctaaatttgattgaacaacgtgatcagttaattgaagaattcgctcctaaaattcaaactattcgtgaagaatttagccaaaatcttgaatttaacgaaacggttgaattactagaaaatgaattgccacgtgagtttgtttacccagttgaacaatatcctgaaaaaattaagtctttaaacttagataaaacaccaaaaattcgtggaatattgcaaggtattaagggccaatatttaatttttgatattggtgttattaatatccgtaaatatacaggttacgagctgattgtacgtgcataa

SEQ ID NO: 67244 - DNA, 1176 bp, Acinetobacter baumannii
ttggcaaaccgaaaacttaaaataggcattgtagttggagaagtttctggagatacgctcggcgtaaaactcatgcgtagttttcgtgagcagggaatcgatgctgaatttgagggaatcggtggccctcaaatgattgcggaaggttttaacagttattacccaatggaaactctgtctgtgatgggcattgttgaggtattaaaagacttaaaaaaactattcgccgtacgtgatggcttaattaatcaatggactcagcatccagttgatatttttattggtattgatgcaccagactttaacctcagactttcgaaaagtatcaaagaaaagaatcttccaataaaaacagttcaatatgtgagtccatcagtttgggcatggcgccaagggcgagtacatggcatcaaacaaagtatagatttagtactttgcttatttccttttgaaaaagttttttatgaacaatatgaagttccagcggcatttgtaggccatccattagctaaacaattaccgcttgagaaccctattcaaattgctaaacaagaattgggtgttgatgaaactcaaaaacatattgctttgttgcctggtagccgcaaaggtgaagtagaaagacttcttcctatgctattgggggcagccaatattttgcatacaaaatatccagatattcaatttttaataccggcaattaatgatgcacgcaaacagcagattgagcagggggttgaacaattagcaccgcagttaaaagcaaaaattcatattttagaaaatacggatagcgaatcgaaaattggtcgtatggtcatgaacgcgagtgacattattgctttagcgtctggaacggcgacattagaagcaatgctcatgcatagaccaatggtcactttctataaactgcattggctaacttatttaattgctaaattcttggtgaaaataccttattactccttgccaaatatcatcgcgggtaaaaaagtaattgaagagctgattcaggcagatgcaacacctgaaaatttagcggctgaaatagaaaaactaatgaatgttgaaaccgctcaaattcaagtaatgcaacatttaactatgcataaacagcttatttctggaaatacagaagatccggttcaagccatcctaaatgtgcttgaaaaataa

SEQ ID NO: 67245 - DNA, 276 bp, Acinetobacter baumannii
atgttatatcgcataaaagttttctatcgattcttaattgttttcggtatgggttatgcctgtatggcgtacttaagtcttggactaactgaaattttccatttgaacttaggcaagccagaagctatctatttggcggcctttatttctattttgttttatgtatttttcgtgattgttggtttctgcatccaatcattattgcgactgaccattttatcaatcgcactatttgcccttttctttattgtgacacggacggtaggttatgcataa

SEQ ID NO: 67246 - DNA, 1557 bp, Acinetobacter baumannii; identical to SEQ ID NO: 52951

SEQ ID NO: 67247 - DNA, 888 bp, Acinetobacter baumannii
atgtctggtgcttttgaatttatcttagcgggtatgttagttggcttctgtgtaggtattacaggagttggtggtggatcattaatgacaccaattttaattggtctttttaggattgaaccgcatatcgcaattggtactgatttactttacgccgcgatctctaagttctgtggatcaatggttcacgcaaaaaaacttaatatcgtgtggccgattgttttatggttagcggtcggtagtattccggcatcttttggtactgcgtgggtacttgagcattatttaagtcaatcaactcattataaagctgtattaaccatggtattaggctttatgttgaccttaactggtgtttccatcattttccgtactcggattgaaaagttctttaataaattccgaaataaagagaatactcaaactgaaaatgagcaattagctgttcaaaataagcgtacctatattgtgattatgggtattattttgggtgtattcgtaacactatcatcagtcggcgctggtgcctttggaattatggcacttgtaatcatgttccctaacttaccaatgattcgtattattggttccgatgtcgtacacgctgtactcttaaccctagtcgcaggtcttgggcatatgagtgccggtaatgtcgactttgtgctgcttatgtggttattagtaggttcaattccggcaattattattggaacattaattagctcacgtatgccggaacgtttaatccgtaaaattttaggtattacgttatttgctcttggtgttaactttatggtccacccagtcaaagccaaaccaaaagcagctgtggtacaacaacaagcagtagttgctgaaaaaacaggcaactcgaccgaaagatag

SEQ ID NO: 67248 - DNA, 1143 bp, Acinetobacter baumannii
atggtatattcagtacacaaaacaacctttagtatgatcgaaccagtgacagcaatgactacacattcaaattccgtttctaagccagatatcgacgacgttaatattaaaagcattcaaactcttgtaacaccaaatgagcttaagtcagaacttccgttatctgatgttgcttcgcaaactgttctaaaaggccgcgaaactattcgtaatattttagatggttcagataaacgtttatttgtcgttattggtccttgctctattcatgatccaaaagctgctcacgaatatgctgatcgcctaaaagcgctaagcgaaaaggttaaagatactttatatctggttatgcgtgtttattttgaaaaaccacgcaccacaattggctggaaaggcttaattaatgatccagatatgaatgactcatttaacatcgaaaaaggtttacgtattggccgtaaacttttgcttgagttaaatgaaaaaggtttaccttgtgcaactgaagcacttgaccctaactctccacagtactatcaagacttaatttcttggtctgcgattggtgcacgtacaaccgaaagccaaactcaccgcgaaatgtcttctggtctatcatcaccagtaggttttaaaaatggtacagacggcggtttaactgttgcaaccaatgctatgcagtctgttaaatatggccatagtttcttaggcttaaatgaagacggtcaggtttcaatcattaatacaaaaggtaacccttatgcacacgtggtattacgtggcggtaatggtaaaccaaactacgatgctggctctgttgcagaagcagaaaacgctttagcgaaagcaaaagtgagcaacaaaattatgattgatgcaagccacgctaactcgaataaagacccttacttacagccgcttgttcttaaaaacattactgaacagattttagatggcaataagtcaattgtaggtattatggtcgaaagtcatctaaaaggtggtcgccaagatattcctgacaatctttgtgaccttgaatatggtaaatcagtaactgatggttgtattgactgggaaactactgaaaagaccttgcttgaaatgcatgaagctttaaaagaagttttaccaaaccgctaa

SEQ ID NO: 67249 - DNA, 744 bp, Acinetobacter baumannii
atgacacctttttggatagcattgcaatttttaactgttctgcctattgagctaaaaacaataccaacggcgcaacaaaatggtcgagctattctgttttatcctctagttggtctgattattgggggcatactttttcttgttacctgtatttttgttaaattacccgctcttttacttgcggcaatcgtactcgctttatggatctggctgacaggtggattgcatttagatgggttagcagatactgccgatgcgtgggtaggcggttttggagataaactacgtactttacaaatcatgaaggatccaagttgtggtccaattggagttctcagcttagttatcatatgtttgctcaaatttacactgatttatgtattgattgaacagcatcaatctttatttttaatatacattcctatccttggacgtgtggtgccatctattatgtttttaactacaccatatgtccgcgaaaaaggcttaggccgttctttgacagaatatttacccaaaactgcttcatggataataactgggttcgttctgctattacctttgtattgggggttgcaagggcttattgccatcaatagttttttaatcagtcttgtttatttaagacatgtgtttataaaaaggattggcggtattacaggggataccgttggtgctgcgattgaaataggagaaactgtactgatgtttacttttgtcgtaagtaatttttatttagtttga

SEQ ID NO: 67250 - DNA, 1569 bp, Acinetobacter baumannii
atgaatattttatttaaaacaactgtgcttgcagcatcattattgctcgcggcttgtaataacaatgatgatcaagaagctcaaattgcaccatctacaaactcatcaaaatattatcaaacaaaaacaccttatcaacctcaacaagacttaaaaagctatgaacaagcgccgacagggttccagccagtttttacagagttagtggcacgtcacggttcgagaggtttatcaagtctgaaatatgatttggcactttataatttatggaaacaggcaaaatcagaaaatgccttaacaccactaggtgagcaattaggtgctgatttagaagcaatgatgaaagcgaatattttgttaggttatggtgttgaagggatccgtcagtacggttatggaaatgagaccatgactggtattttagaacaccgcggtattgccgatcgcttattacagcgcttaccaactcttataaattcacaggcatctatattagtacaaagttctggagtagaccgtgcggtagatagtgctaaatttttcactgctgaactcattaaacaacaaccccaactgaaagataaaattgttccattgtcttataccaaattatcgagtgaaagcgtgccaagtattgaagatggtggcgttgatcgttttaaactttattttcatagtttgaatccagacgaagacttagctcaaccacttagtgttagccaacaaaaaatttatgatgcaagtcaggcttatcaagattttgaagaaaataataaagatttagctcaaaagttagatgagttatcaaaaaatactcaggctgaaaaaactgcccaactggtactcagcccgatttttaaagctgacttccttaaaaagctcggtaccacgggttatagctttagcaataccggatcatttacagtaacttcaccgaaaggtgagcaaattacagaaaaaggtaagggaaaaaatacaattgccagcgcagttgatgcagcggcttatatttatgaactctattcaatttctggtggtatgaaagatgagttaaaaggtattgattttgataaatatatgcctttggaagccgcaaaattttatgctgaatttaatgatgccaatgatttttacgaaaaaggtccaagctttacagaatcaaatcaagtcaccagtgaaatcgcccaaggacttaaacaagacctgttccaacaagttgatgctgttgtgaataaagcccaaccttataaagcagttttacggtttgcccatgctgaaattattattcctctggcaactagcttagatttgcataatatgatgcagccgttaccactacgccagacttataattactcgacaagtgcatggcgtggtgaagtagtttcacctatggcggcaaatgtacagtgggatatttaccaaaataaccaaggctctactttggtaaaaatgctttataacgaaaaagaaactttatttaaacctgcatgtaattatgcacgttatacaccaaccagtttttactatgactacatcaaattgaaacagtgctatcaaatgcaatag

SEQ ID NO: 67251 - DNA, 579 bp, Acinetobacter baumannii
ttgcttagacatggcgaaagccagtatagccatactttacgtggccatttagatgatgagttaacggcaaaaggttggcagcaaatgcagtcaactattgagcaagtcacaaaccagacatgggatgtcattgtaagttcttcattaaaacgttgtgcttgttttgccgagcaactggccaaaacagcagaactccctttacttgtaaatcatgacttaaaagaaatgtattttggtgaatgggaaggcgtctcaactcagcaaatttatgaaaattcacccgaattactggcaaacttttggcaaaaaccaagtcaatattgtccacctcgcgcagaaacattaaaccagtttcaaacaaggattcttaaaggttttcaggatttgctggggtatatgcaaaagcaaaacttacagcatgctttagttgttactcatggcggtgtgattaagctattggcttgtttagccagacaacagcctctagatgacttacttaaaatgccggcagagcttggaaaattatattcactcgaattttctgaaacaggtggtcaattaacttttaagttaagatag

SEQ ID NO: 67252 - DNA, 1056 bp, Acinetobacter baumannii
atgaactggtggttacaatctgtgcagcaacctaatttagatacaaaacaacaagctgagcaacatcaactccaacttaccaaacctacaggtgctttaggagatctagagcagattgcaatcacacttgccagtttacagtcaaatgcgcatccacaagttaaccatccatggattacaatttttgcaggtgatcatggtgtagttgaagaaaatatttctgcatatccccaagctgttacccgtcaaatgttgcaaaacttcacgacgggtggtgcagcaattagtgtgcttgctaaatatcatcaagctcatttgcaagtgattgactgcggtacagcaggcgaagcatacgaatatgcaggtgttgaacgtcattgtattcgtgccggcacagcaaattttgccaaacaagctgcaatgaatgctgacgagtgccgtgctgccttagagttagggaaaaaaagtgtagatactgctaaagcgaatggagcagatatttatattgcgggtgaaatggggattggaaatacctgttctgcctctgctttagcatgccttttattaaatgatactgccgagcaattgactggagtaggtacaggaattggtgccgatcagttaagacataaaattgaagtaattgaaaaagcaattgaacttcatcataaacatgtcattggtgatgtcttcaaaacactatgtgctgtaggtggtttggaaattgcggcaattgtcggtgcttacattcgctgtgcgcaggtgggtttacctgtgattgtagacggttttattagttctgtagccgctttatgtgcgatgcggatgaatcttcaagtgcgtgactggatgctttttggtcatcaatcggctgaatatggacaccgtcgtattttacaagaactcaatgctgacccaattttaaaaatgaatttgcgtttaggtgaaggtagtggtgctggcgctgctttggcattggttaaaatggcttgcgctttacataaccaaatggctaccttcactcaagcggctgtaagcggaaataaaattggctaa

SEQ ID NO: 67253 - DNA, 519 bp, Acinetobacter baumannii
atgttgcaattgattttaggtggtgcccgttctggcaaaagccgattggctgaacaaacggccatatctatgcaattagctgtcacttatgtggctacggcacaagcgcttgatccagaaatgcaaagccgaatcgtccatcatcaaaatcagcgtcctgctcactggtctttagttgaagaaccattatttttagcaaaaactctgcaagaaattgatcgacctaaccaaattattctggtggattgtttaacactttggctaaccaatttgttacttttagaagatcaaaatattcaacaatttgagtgtgagcagctgttaagagttttacctacacttcagtcagaaattattttagtaagtaatgaaacgggtttaggcgttgtgccacttggtgaaattagccgccgttttgtcgatgaagcaggaaggctacatcaggctttaggacaaattgcagataaagttgtgttttgtgtggctggttttccaatgattttaaaaggtgagaaataa

SEQ ID NO: 67254 - DNA, 627 bp, Acinetobacter baumannii
atggtgccaacacctatacgggattatcccgaatggcaccttgggcgtcaaaattacgcattgtggtatctagaaattaatgatcagaaattagttcattatctagatcaattgcgtgcgcatttttcagaatttctagtagaacctaatcatcgtcaatatcatgtcacgctgtttatatgtggtttcttgactcatgaaactaaagttcactgtgatgattttagttttactgaatttgagcagcataagaaagttctaatacaagaaaattttgcaccattccaattaaaaattggttcagttgatagctttagtagtgctttatttgtagaagtccaagacaccgaaaataacttatctctcatacggcaaaaattaggtatagtttctaatgaaattgccgctttagattattgcccgcacattacattgggtttgtataagaaagactatagtagtaatttgattttacaaaaaatttctcaattacctgtacaatacacacaggctgaatttgatcttaaagttgagcatttaagctttggctattatcaagctcaaattttacaaggtcagctgtatccgtatcagcatttgtttttaggtgattcatgttgcaattga

SEQ ID NO: 67255 - DNA, 2148 bp, Acinetobacter baumannii
gtgcttatttttcatggaaaacctgttcatggagctatcttcgatatggatgggacaatgtttgatactgaacggttgcggtttcaaacattgcaacaggcatctcaagaactcattgggcaggagttttcacacgaatatttaatgcaatgtttggggttaagtgcgactacagcggaaaagcttgcacaacgtttatacggagtagatgttccatataaggaaattcgaaaacgtgccgatgagatggaactagaacatattcgaaaacacggcgtgcctattaaaaaaggtttggttcaagttctagagcgtttaagaaaatctggtttaagaatggctgtggctacttcaagccgtagagcaattgccgaagaatatttaattaatgcaaatgtttataaattttttgatgtcattacttgtggggatgaagtagaacaagggaagccacatccagaaatctttttaaaagcggctagtcaacttcacttagacgctaaccaatgtttaatgtttgaagattcggaaaatggtttaacttcagctcacacttcaaaaggtttaacgattttattaaaagatattaaagaaccaaatgatgaaatgctggaaaaagcgcatttttattatgaccagatgtatgactttttaactgatcttgaccaatttattcccgttatggatatgccagagatacaggaaccttttccgcaaagtctgaatcagcttactgttggaatacatggtttcggtgctattggcggtggttatatagcgcagatcttgtcgcattgggatggttatacgaaaccaaaacgtataattgcgtcaacacgaaatagtcttttccgcgaagctgtaaatgcgtttggaacctatagtattcgctatgggcaattttcttatgatgaacgtattgagaatatgaccattgttgattctgacaatgaacaacaaatgttagagatgtatactcattcaagtttgattgcattatgtttacccgaacaggccatcgaacctgaatcaaagataattgcaaaagggttatatgcgcgttttaattcgcaacttgaaacatgtatagaacctttaacctttctaattattttaaataaggttggtgcgaaatatttggttatgaagcatcttaaagaagctctactagagttaaccaacgatgaagatgtaaccgagcatattttaaaagagcattacttttgcgacaccgtagttaatcgcatggtttcaaaactttctaatcagaatttatatcgtcaacttcgtattaagcataattttcttgaacagcatttagaagatgtggagcaagaagaccaaatcgaaattgaagattgtaataaactgaatcaagatcaactaaatcaggcttctatctatgttgataacatgcgccgtaatttccagccgggacatatcttacaaagcatggatttaatcttgttccatagtgaaactgatatgccaatctatgtagagaaaggcagtcctttacttgaaaagttgcgtcaggtggtattggttgaccaagttactgatattcaactcattaaaaatcgtttatggaatggtgtacatgcgatgcttgcttggtatgcatctttaatgggttatgaatctattggtgttgccatgggcgatcattcagttaaagcatttgcagagaacttaattgcagaagtgaagcaaggacttgcaattgtattacctaactatgcaaaagatctggatcgaatgtcacaaagttttctagactcatgtgaatatgcatttaaagatccttgtcaacgcgtagctagagatccactacgcaaactcaatcataatgaacgtgtcatggcatcaattgctgtgaatatttgtcatgatttgccttataaaaatttattaaaaggtgccgctttaggttatgcctatgcgattcaatttttagaaattgaagagactaaagctgttgaacatctgcagcaacaaattcagaacctagacttgagtacaactcaaagaagacagcttgaagctgaattggttcaacttatccaatatttgttttctgaacaaggtaaacaaccattaggcattaagtcgaacaataccaaaactacatcaaatcaatatgtttga

SEQ ID NO: 67256 - DNA, 621 bp, Acinetobacter baumannii; identical to SEQ ID NO: 57082

SEQ ID NO: 67257 - DNA, 339 bp, Acinetobacter baumannii
atgagctttgcatcattattttgggctattgctgccatgatgcaagcatgcatgctcagccaatttggtcagaaaaagcttcaatatagctggcttaaaagtacaactagacgaattttatatggaataaccatattatttttgcttagttcattgtttttgaattgctcctttgaaggaagctcagtaggagtcttatcatggttttttgccataatcacaaccgctttctttttgcaaattattgttttttattcttttagaaaatattttattcctatttggttaatggcaatcgtcgttgcaattattttctcgattgttgagtggttaccttaa

SEQ ID NO: 67258 - DNA, 1524 bp, Acinetobacter baumannii
atgaattttcgtcaaattcaggcaatactacatagttggtttggaattattgttctttgggttatctttttcattttctttacaggctctattgcttattttcggacggaaattaatgtttgggcacagccagaagcaatcagccatattcaaacagtcccttctgcacaacattctgcgcaaactgcgtttaactatctcaaccaacatgcaccaaatgccaaaagatggcgagtcacagtagccaatgagcggatgcctgtgaacctacttcaatggcaggataaagaggggaaacatcaagagttacaaaaccctaataccggagagctattagaacctgtacggaagactttgggtggagatttctttttcaaactacattacacgctttatcctttgccaagcacgttcggtagtttagttgtagctgttgttgccttaattctattaattagtttaatcacaggtgtgattacgcataagaaaattattaaagagttttttacctttagggcttttaaaggacagcgttctttattagatcttcatcacataacaggagttatcacttttcctttttatttggtgatggcctttactggactgttgattttattttatctagttttaccgtggggattatcggaacaatatggtaaagctggtatacctaagttctataatgaaatgcagtttaccgaggtggcaaaacctcgagaaccttccttaacagaagcgatgcaaccttttaatcaattcatggcacaaatgcctaagcgaacagaatctggagctattttagataaatttgaagttcaaaagcctaatacagccgatggcatgattacatttgactataactataaaaatattattaccttaaatactcctcaatatatttttgcaacaaatacggctgaacgactcaatcagccacgaaatttaagtgcaattgcacaattaggttcatcaagttatgggattcatttaggttactttgcttctatctggatgcgttttattttggcttgtttaggaataataggatgtgtcatgttggttgcaggcgcattactatggcaaaaaaagcgcatcaaagaacaaaagaaatttggatatagattagtacagcatttgaacttttttactttcttagggctgccttttgcctcagccttttatttaatggttggtcggattatacctgcttcatttgagccgagggaactatacgaggtttctgcattttatatagcatggctattaagcttattgattagctttagctgctcaataaggaagggaataatcatcatgctatatattacggctgctgttttattgcttattcctgttattagtgtcgttctggtaccagaagcctctttattaaatagtctaaagtctgtgcattggtctcttgctggtatcgatctggcgctcatactgctcgggctattctatttagtagtattacgcttctaccaaaccaaatttattacgttaggagaggctaaatga

SEQ ID NO: 67259 - DNA, 294 bp, Acinetobacter baumannii; identical to SEQ ID NO: 42090

SEQ ID NO: 67260 - DNA, 615 bp, Acinetobacter baumannii
atgaatcaaattgatactaaagcacttgttacagcatataaagaaatagcaacctctactattggtcatgtacttgatcagggatatattcctcaggtattccccttaagacctgaagataaggtggtggggattgtacgtacagttcggattgaatcgatcaatgcgagtggtttaagacaagtcttgatgagttgtcaaccaaatgaagttctcgttattgatgcaagatatgatctacagcgtgcttgctggggagagcaaaggagcgtagccgctatacactgtggtctggctggcgttgtggtcttaggtgctattacagatcggcaggctttacttaaactcaaacttcctatatttgctcatacaaccagttgtttaaccactcgcaatgaaggggaaagtctcattgaaatagatgccaagattcatattaatcataccattgtacaaactggagatctgattgtaggggatgcagatggaatatttataataaaaatggatgtggcacagcaatatttagatgaatttcaaatgcttgagcaaaatgaacaaaataagaaaaatgaattctttttaaaaaataagatagatgactattatttttaa

SEQ ID NO: 67261 - DNA, 771 bp, Acinetobacter baumannii
atgaatacgtcttttaaaatacaggcagagaagtgcgcaactctgcctatattgcaacagcgtctgaaattaaatgttcaaatactacctgaaagttcaacaaccttagattgtctgttgaatgatgatgtatgtcgacaggtgttacaggattttgcaacacgtattcatgctaaaaatctaacttgtgcgacctcattgtttgtcaaatattggtgtacaagttggatcttaccttttttatattgccatgtggctgttttgccatttgtaaaatgggatagttcagcattagttatagacttgccggaacaatggtattgggataggactttacagttaaaccaaacaagtttttattcttttcagattatacatttgcaagagtttaatgacttgatagaacaactgaatgtgctatttaagcagttagcgaaaataggtcgcgtaccttatgtattactctgggaaaatgtagctgttcgagtagtacagttttatcattcttttacaaagcaaaatctaaatccagatatacagtctcggttagaacggcaaaaacaattctttaagtcaaaaactgccgaaagtttttatttaactgaaaatccatttatgcgtttatggaatggatggcatccagaatttaatacttttatgagacaaaaatgctgtttctattttcagctcgaagaggctgagcagaccttatgccgtaattgtcccttacgtttaaaagaaatcggaaaatttaaagatgaatcaaattga

SEQ ID NO: 67262 - DNA, 1842 bp, Acinetobacter baumannii
atgggacaattacatccagttttatcaaatacacatgtgattcaaaatgctttacaggcttggcagcatccaaattcggatcaggcaaaatatgttgagcaacgtgttattaaacaattacttcaagctttaatttttgaagatattattcattcagaatatgatggaaaaaattttattatagaagtacaaaatagtcagcgccaaaccattcgttatgtcgctgcagggcaaagacaatatagttacaaattggtacatctcgcccgtaatcaggatgtatttcgtcaagatgaaaacggtcattatcagattgctactttaaatttagttattgatgaaattcttagaagcataaccgatgcagcaaaagttgaagattttatttttgaattaaaacgaacatttattcatgatttacagtctcaagcatgttttgatcactatgctttgccagcaattcaatatccatatgatattttagaatcatatttaatggatggtcatccatatcatccgtgttacaagtcacgtgtaggttttagtttacaagacaatgtacgctatggggtagagttcgcccaaccaatcgccttggtctggttggctgtgcatcaggacattgttgcaacaaaacattcagaagatatagagccagatttattttttaaggagcaattgaattcacaagaccaagagctattcctgcaacatctctcagatcgtgatttgaaggctgatgaatatatttggattccggttcatccttggcaatgggaaaaccatttaatttctatttttgctgaagaaattctaaatggcaaaattgtttatttagggcaaagtcaggatcgctatttagcccaacaatctctacgcactatgactaacttgcagcatccggaaaagccttatatcaaactgtccatgagtctaactaacacatcaagctcacgtgttctggcaaaacatacagtaatgaatgggccaattattacagactggttgcaacgtttaattaaacagagcaaaaccgcccaagagcttgattttgctgtattacgtgaagtgtatggtttaagcgtggattttactaaattgccaaaatcacatgctcaacaggcctatggcacaattggatgtttatggcgtgagagtgtgcatcaatatttacgtgaaggtgaagatgcaataccgttaaatggcgtgagtcatatccaaaaagatgggcaagcattaattggaccatggttacagcaatatggtgttgaatcatggacacgtcaacttttgaaagttgtaattactcctttgattcatttactttttgcggagggaatagcaactgaatcacatggccaaaatattattcttgtacataaacaaggttggccaacgcgagttcttttaaaagacttccatgatggtgtgcgctatagcccagcacatttagcacaccctgaactggctcctgaactcgatcagttgccgcctgagcatgcaaaaaccaacagtatgtcatttattttgacagatgatttaaatggtattcgtgattttagctgtgcctgtctgttttttgtcgctttaaccgatattgcaatatttgtaaatcaatactttgatcttccagaaaaaaatttctggcaatgggctgcgaaagtcatccaaaattaccagcagcaacatccagagcatgcttcacgttaccaattatttgatgtttttgccgaaaaattgcgcattgagtcattaactaaacggcgtttatttggcgatcgtagcatacaaattaaatttgtcgataacccgttagctccttttaaattgcaggtgaagtga

SEQ ID NO: 67263 - DNA, 1440 bp, Acinetobacter baumannii
atggaacgttcttctgtgtccgcggctcaacctcatgagcaaagtttacaacgctacgtacttctgacagttatgcttggtacaggtacggttagtttaaataacagtagtttcaaccctgcaatacctcatttaatgtcctattttcaggtaggtgaggtatgggcaagttgggtcgttgttgcctttttattagcaatgagtatcagtttgcctttagctggattcctaagccagcgttttggtaagcggtcaatttatttaattgccttattgggatttgctttggcttctacagcaggtggtttatttaatcagtttgaatcggtgttgattgctagagctctgcaaggcttttgtagcggattaatgattccattatctcttggactaattttttcagttacaccaagtgaacaacggggaagtacaacaggattatggggtgccatgatcatgctaaccttagcagttgggcctatgctcggagcactggttttggtatggcttaattggaaagccttattttttatcaatttacctgttgcttgtctggcattaattttaggctatgtttttctacctaaagagcaaggggacaataagcaagagtttgactgggcaggattcttttttctcggttcaagcatagttttattacttgggacactgagccaaatccatcaaattcaggacttatttcaacctctatatggtgcgcttttagttctaagtgtgctgctttttataaggtttatttttttacaaaagaataagtcgatgccattaatcgagccagctttgtttgctacgaagggtttccgctacagcttagtcatttgtgtggcacaaacagtaggcttatttattggcatgttgctcattccactatggatacagcaccttctaaagttaagcccgctttggactggttttgcgctaatgagcagtgcagtagttaccggtatttgtagtcaacctgcaggaaaatatctagatcgttacggtgctgcaaaaatcatgtctcttggactaatgattactgtggcttcttttcttttgcttgcttgggcacctgtacaaaatgtctggttcattgtgttttgtatgatattacatggcttaggaatgggactttcttatatgccatcgactacggcaggtttgaacagcttacgccagcagcaacagcatctagttactcaagcggccgctctaaataatttattccgacgtatttttgctgcagtggcagtcgttattgccgcgttatatcttcagctaagacaacaatcattgccgttaaatactcaagcaatatttacatcatttcacactatgcaggaaatctttgtgtgttgtgcaattcttatactttgcactttgcctttcgcatggcgttttcctgaacagtacagaatcgaccaattaaagaaatag

SEQ ID NO: 67264 - DNA, 1449 bp, Acinetobacter baumannii
ttgttagagaaatggatacaaagccgggacgcgctactacaattcttaaaacaacgccacaatgatttcgatgatttagtaaaggctgggcagaattttattgaaagtgaacaggcattaattttgggtcatagtatgcacccagcgcctaaaagccggaatggttttgttcatgaagattggttgaagttttcacctgaacatgctggaaaaacccagttacattattggcttgttcatcagaattatattgctgaaggttgtgcaactgagcagccaatttcagatcaagttaaagacgcaatccgttggtatttgtccgaaagcgatttaaatctgttaaagactcatgttgaatttaaattattgccactacatccttggcaagctcgttatttacaaggtaaaccttggtttgagcaattaaaacaaacaggacagttaattgatatcggtttacgtggatggcaattttcaccgactacatcaattcggaccttagcaagttttaacgccccttggatggttaaaacttcactatcagtcatgatcactaattcaattcgagtgaatttggcaaaagagtgtcatcgtggcgaaatttcttatcgtttatggcacagtgatttaggtaaaaaaatattaaaacaattcccaacattgaaagcagttaatgatccagcctggatagctctgcaaatagacggcgagattattaacgagacaatttgtattttccgtgatcaaccatttgcagtacagcaacaagtcacttgtattgcatctttatgtcaagaccatccaaataaagagttaaatcgttttaatgctttatttgaccaaattgctcagaaaaatcaacaaacgaattttaaagaaattgctttggattggtttgatcatttcttgaagattagcttggctccgttaatgtatgtttatcataaatacggtatggcttttgaatcgcatcaacaaaatgtattgcttgagctagaagatggtttaccgaaaaatctctggttacgtgacaaccaaggcttttattatattgaagagtttgcaactgaaattgtagaagcattaccagatttactagaaaaagctcatgcggttggtcctaaagattttgtggatgaacgctttagttattatttctttggcaacactttatttggtttgattaatgcaattggagcaactggctatatctctgaagatgaactgttaatccatttacaacaaaatttacttcaattattagagcaatatccagatagcacattattacagggtttattgtttaacgattctttaccgtataaaggcaatttacttacacgtttacatgaattagatgagcttattgcaccattagaacatcagtccgtgtatgtgcagctaccaaatccactgtacgttgaacagaaggacgtgagctatgcttga

SEQ ID NO: 67265 - DNA, 456 bp, Acinetobacter baumannii
atgcagctcaatccaatttactataatgaacaacatatagcttttgccgataatgttcgtagatttgtacaaaaagaaatgacacctttcgttaatgaatgggatgaggctgagacattcccaagagaactttataaaaaggctgctgaaattggattactgggtctaggtttttcagaagaatatggtggtattccagatgcagatccattctattcattactggctggtatcgaaatggcaaaggcgggttcaggtggggtgcatatctcgctcatggtccataccattggcgcccctcccattcagtactttgggagtgaggagttaaaggctagagttctgccaggtattatttccggtgagaaaatttcggctttagcgattacagaacctggtggtggttcagatgttgctgcattacagactaaagctgtcagagatggagattattaa

SEQ ID NO: 67266 - DNA, 216 bp, Acinetobacter baumannii; identical to SEQ ID NO: 42270

SEQ ID NO: 67267 - DNA, 150 bp, Acinetobacter baumannii
atggctgaggaaattaagcaggttcaagaatgggaactaaaaccagactcagaatattgggcagacccatttgatcaaaaagaacagtacatcgaaagcttaagagcagaaggcaagccagtaccttttgcattacgaggtgcagcatga

SEQ ID NO: 67268 - DNA, 435 bp, Acinetobacter baumannii
gtggccaaacaagcaacgcatgcccaacctgctgctggttggcccgaccaacaatggcaagtcgatgatcgtcgagaagttccgccgcacccacccggccagctccgacgccgaccaggagcacatcccggtgttggtcgtgcagatgccgtccgagccgtccgtgatccgcttctacgtcgcgctgctcgccgcgatgggcgcgccgctgcgcccacgcccacggttgccggaaatggagcaactggctctggcactgctgcgcaaggtcggcgtgcgcatgctggtgatcgacgagctgcacaacgtgctggccggcaacagcgtcaaccgccgggaattcctcaacctgctgcgcttcctcggcaacgaactgcgcatcccgttggttggggtaggcacgcgcgacgcctacctagccatccgctccgatga

SEQ ID NO: 67269 - DNA, 1599 bp, Acinetobacter baumannii
atgagacatctaaaatatttgatttttataataataagtttattttctataaacgcatattcatacaatccacaacttcagtatttatggaaatctagtgtaaccaataagttatttgaaacaattgatcctgcttgtgattatttaactgttgttaatggtggcaagggtatccctggatattcatattcacactacacattaaatagttcaggaactcgagctacttgttactacaacgataaggattggagttctgctgatagagtacctaatcctgactataagcctgaatcaataaagtgtcctgtttctggtactcctgttcctgtttattttgagccgaatacaccgatacctttgcgtgtatgtaaacaaaatccaaatggctcttattgtgtatatgatgctcctgataaattgaaccctatagttattacatcaggtaactatcagaacattactttgcgttctgttagtgaaattcctatgcctagttgtacgcctgaattttctaaaagttcttgtgatcctaaagacccatatgggggatgttatcaaccacctaatgacaactgtaaccgtatgtcagatggctctatttattgtccaccagacgagccaccaccaccgattaaatcaggctgtcaaaatggtgcgacttattgtgatatgccacctacaggatgtggtacaggttatgttccgggtacgtacaacggtaagcagatttgtgtaaaaaatagcaatccgcctccgactgatccaccagatcaaccacctccggcatctgatccaccgccgatcactccgcctgatcctagtgatccgcctgatccgggtgatccaccaccgccaccgccaccgccaccgccaccaagcaatgatcctcttttacgggcgattcttgatgctattaatgcggtgaataacaagctgacatggcttaagaacgaattggttaattctcttaattacattgctaagaagatagatgtaacgaattctaagcttgatactacgaaccaaaagcttgatacggttaattcttcaattaaagagactaccgctgctgtaaacgcaaatggtgacaaagttaaggctgctgtagatgctaacgcaacaactgtaaaaacggctgtagaagcgaatacggctgctacaaatggcgttaaatctgcggttgaggctaatactagttcaactgcaaataaactaaatgaagttgtaaatgcgattaacaacaagcctgttgggggtggtggtactgctgtcaatttagagcctacgaataatttattaaaaggcattcaggattggcttgcagtatcggatgacactaatcccgaagatggcgaaattaaggtagtcaaaaatgaaatagatactaattttgatggaaatctagttaatgctacgggtacttgtcctcagccaatgcagatttctttctcgattgtgcagacttatacaatccaatttagttatgaaaccttttgtttaggtgcatctttggctcgaccgtggattatttttgtcggcatgttaacggctttctttattgttactggtcattatcgaggtggtagcaatgattag

SEQ ID NO: 67270 - DNA, 165 bp, Acinetobacter baumannii; identical to SEQ ID NO: 53990

SEQ ID NO: 67271 - DNA, 318 bp, Acinetobacter baumannii; identical to SEQ ID NO: 61648

SEQ ID NO: 67272 - DNA, 264 bp, Acinetobacter baumannii; identical to SEQ ID NO: 53998

SEQ ID NO: 67273 - DNA, 453 bp, Acinetobacter baumannii
atggatgcaccttctgatgcctttttgtgggtaaaagcattacatattattgctgtggtttgttggttcgctgctttgttctacttaccacgtctttatgtttaccatgcaatgagtgatgatgctacaagccatcaacgctttgaagtaatggaacgtaagttgtatcgaggtattatgtggccatctatgattgccacattaattactgctcactttctcgtagattggggtgatgcaactagacattaccatgaagccacttggttttatctaaaagttggattagtggctttattagtgatctaccatttagtttgtggttactatcgcaaaaagcttattggaaatgctcactacaaatcacataagttctggcgtttcttcaatgaaatgccaaccttaattttatttgctgttgtgattttagttgttgtaaaacctcagttttaa

SEQ ID NO: 67274 - DNA, 1626 bp, Acinetobacter baumannii
atgaaaagttttaaagttgcccttgctcagttttctccgcatattggcaatattgactcaaacacccaaaagatgattgagcaagcaaatcaggcgaaaaaacaagacgctgacctgattatttttcctgagctttctgtgattggttatccagctgaagacttattgttacgtccaaatttaaataagcggatgcaaaaggcttttgctcaacttagtgaagttaaagatattgtgatggttttcggcttcgtaaaccagacagaagatggccaacgttataattcagctgctgtcatgaaagacggtcaggttttaggagtcttcaataaacataacttgccaaactatggcgtttttgatgaaaaacgttatttccaaaaaggccatcagcacttggtgtttgagtacttaggtcataagtttggtgtactcatctgtgaagatatctggtcaatcaatacagtaaaacaattaagccaattaaatgttgatactgtacttgtgcttaattcatcgccatatgaagtgggtaaaccacagcatcgtaaacagacattaagtgagcttgcaaagcagcttcatttaaatattgtttatgttaaccaagttggtggacaagatgatttaatttttgatggtacaagttttgtcagcaatcaaaatggtgaaattgctttacaagcacctagctttaaagaagatctctatattgctgaatttgaccgcgatacaaaattatataaagttgtcgagtctgctcctgcactagaaacttttgcagagatctatcaaggtctagtcatggcaacacgtgactatgtagaacgctcaggttttcctggagtaattttaggtctttctggtggtattgactctgcccttacgcttgctatcgcagttgatgcaatcggtgcagagagagttcaagctgtgatgatgccatatacctacacttctcaaattagtgtagaagatgcagcggaacaagctcgccgtatgggcgtgactttcggtattgccgaaattcattcaatcgtaaatagcttcatgcaaactttgtatccgttctttggtaattcaccagccgatgcaactgaagaaaatttacaagcgcgcgctcgtggcacattgcttatgggcttatctaacaagtttggtaatttagtcctttctacaggtaataaatctgaactttcagttggctattgcacactttacggtgacatggtgggtggctttgctgttctcaaagatgtttataaaacaatcgtgtttgaattagcaaaataccgtaatagcttaagtgaaactccggttattcctgagcgtgtaattactcgcccaccttcagcagaactgcgtccagatcaaaaagaccaagactctttaccagcgtatgatgtattggatgctatcctttatgcatacattgaggaagatttaggtcaggcagacattattgccaaaggttttgataaagaagttgttgaaaaagtcatccgtttagttgatcgtaatgaatataaacgtcgtcaaggtgcgattggcccgagaattacttctcgtgcatttagtcgcgaacgacgttatccgattgtcaacggttggacagcgaatgactga

SEQ ID NO: 67275 - DNA, 1029 bp, Acinetobacter baumannii
atgactgagcagaaaaactcatcaaaaactacagcacttgctcaagcacttttgcttgagcaggtggaatttttcaaaaaacaattatctatagaaaactcacctatttatttccggcaatttattcagctttttatgcaacatgccgacgaaattaaactttatgaagttgtggatttagaacaattacaagccgttgtgaaacgctatgcttttgaaatgcagcttggtgcaggcttgcttgagtttattggggaaattgcacagcgtatttatttatctgccatgaaatctccagttcagctacaagacttggtatccgatcaccagtttgaaatgtggctttccaagtttttggaaatggagcatattccacattatctcaatcagtttttaagaactagcccatctgtccaacagctttgccaatatattgctacttcaaccttagaacaaaaattaccaaaatttctcacagcatctagagtggatgattaccattttgaatggcaacataaactcaaaaaattctcttttttacagcaacaacgtcttgagcataagcttgaaacgtggattgccagctttattcatgaacaactgacagaattaagccttttatcggctgaagatttagaaagcttagtacgtcatatctgggaagatattagacataaaaaaatctatgagtttatgaaacagctcactcctctcgatgttgaggagttctttgttttaatttatgaatactggaaagaattaagacagtcacaatttatgcaaggtcttattttgtatggtgtcgaagttttttatgatttttataaagaccaaagtttatttgaagtattaagtgcaattggtttatccgaaactgacttacaaactgaagctttacgtttttatccaaaagttatggatgcctttaatgaacacggtattttggaaccgttacttcaagcgctcttagctcctttttatcaaagttcaaaaacactcgatataattgaaaaacattttagtgagtaa

SEQ ID NO: 67276 - DNA, 1452 bp, Acinetobacter baumannii
atgtcgagtttacaaagtactgaactatttcagcaacaagcctatattaatgggcaatggctagctgcacagtcgaatgcgactgttccggtgagtaacccagctacaggcgaagaaattggcacaattcctaatatgggagcggcagaggcaacccaagcagttgaagctgcctatacggctttacaaagttggaaagctttaacggcacaaaaccgtgctgatatcttattggcttggcataaactggttctcgatcataccgatgaacttgctttaatcatgaccattgagcaaggcaagcctttagcagaagcaaaaggcgaggttcgctatgctgcatcatttattcaatggtttgccgaagaaggcaagcgtatttatggtgatgtgattccaaccgtaaataaccagcagcgctttattatcagtaaagaacctgtgggtgtggtggctgcgattacaccgtggaatttcccaattgccatgattacccgtaaagcagcgccagctttagcagcgggttgtacggtcgtgattaagccagccaatgaaacaccttactgtgcattagcgattgcaaagcttgcagaaaaggcaggtataccagctggtgtgattaatgttgttactggtaaatctcaagaaattggctcggtatttacttcacatgaaaaagtgaagaagttaacttttactggttcaacgccagtgggacgcttactgatgcagcagtgttcaagcaccattaaaaaattggcgcttgagttgggcggaaatgctcctctgattgtgtttgatgatgccgatttagataaagctgtacaaggcgcgatttttgccaagttccgtaatgcaggccagacctgtgtttgtgctaaccgcatttatgtacatgacaatatttatcaagcttttgccgagaagtttgtacaagaagtacaaaagtttaaagtcggtaatggtttggaagatggcgtacaaattggcccattaattaatgaaaaggcagttttgaaagcacagcagttaattgatgatgcagtgagcaaaggcgctaagattgcctgtggtggtaagcagcatgctttaggacaaaccttttacgaaccatcagttttaactaacgttgaccgtacaatggaaattgtccaagaagaaatttttggtccagttgcgccgctcattcgctttacagatgaagcagatgtggttgctcaagcaaatgacactatctttggtttggctgcgtatgtttatagcgaaaatatttcacgtttatggcgagtgtcagaacagcttgaatatggaatggtcggtatgaatgccactgcaatttcaaatgaagttgtaccatttggcggtgtgaaacaatcaggtgttgggcgtgaaggctcaaaatatggtcttgaagaattcatgaccattaaatacatgtgtttagggctttaa

SEQ ID NO: 67277 - DNA, 1116 bp, Acinetobacter baumannii
atgagtgcagttgaaaaattacctgaagatttttgcgcaaacccagatgttgcatggactttccctaaagttttctatacttcatctcaagtttttgagcacgagaaagaggtaatctttgctaaaagttggatttgcgttgcacatggtagtgagttggctcagccaaatgactatattacccgtaaagtaattggtgaaaatattgtcatcattcgtggtaaagatagcgttttacgagctttttataatgtatgtccgcaccgtggtcatgaacttttaagcggtagtggtaaagcaaaaaatgtaattacctgcccatatcatgcatggacatttaagttagatggaagcttggcattggcacgtaactgtgaccacgttgaatctttcgataaagaaaactcaagcatggtgcctttaaaagttgaggaatatgcgggatttgttttcattaatatggatgaaaatgcgacttgcgtagaagaccagctcccgggctttgctgaacgtttaaatcaagcatgtggtgtgattaaagatttaaaattggcagcacgctttgtgacagaaacaccagcaaactggaaagtgattgttgataactacatggaatgctaccactgtggacctgcacatccaggctttgctgactctgtacaagtcgataaatactggcatacaacacatcaaaactggacattgcaatatggctttgcacgttcatctgagaagtcattcaaacttgatccatcagtaacagatcctgagtttcatggtttctggacttggccttgcaccatgttcaacgtaccaccaggcagcaacttcatgacagttatttatgaattccctgttgatgcagaaacaactttgcagcattacgatatttacttcactaacgaagaactgactcaagatcaaaaagatttgattgagtggtatcgcaatgtattccgcccggaagatttgaacttggtagagagcgtacaacgtggtttgaaatcacgtggttatcgtggtcaaggccgtatcatgaccgacaagcaacgttctggtatcagtgagcatggtattgcttacttccaacatcttgtggcgcagtaccatcaataa

SEQ ID NO: 67278 - DNA, 975 bp, Acinetobacter baumannii
atgacgacatatgaacaggctacttatgccttaagtgaagaaatgcaaagccttgtgtattggagcagcatttattcaccagcagatgcagatattgactcagtccgtgcggcatatgatgccatgtgccgacactacactttgccacgtgatgacaagttagatgtagaagatagagtgattgcaaatgaagagcaacctgtgcctgttcgtgtgtatttaccaaaaacaaatcggcctgggtctggttggccatgtgtgttgtatctacatggtggtggttggatggtgggtggactcgattcacatgagtttattaccagttatttgtgtaaggacttaaatgcggttgttattggtgtggattaccgcttggcaccagagcatcgctttccagcagcctttgaagattgtttagcagtgtatcactggcttaaacagcatggttcagcttggcaaatcgatagtgaaaatattgtgctagcaggcgatagcgcgggtggtaatttagcagctgcccttgcagtggaactacaacatagtggtttacaagctcaagggctggcattggtttatccatgtttaacgacagcatttgatactccatccgcacaaaagcacgcccatgcgccgttgttaacgacagaagatatgcatttttatttaaaggaatatgctccgaactcacaagattggcaggatttacgtctagctcctttattggcgacggacttttcagatatgcctacaagttttgtggctgttgcagaatatgaccctttaagtgatgacggttatctctttacccaaaaactggaacaagcaggcatccctaacgagtttcatttaggtaaaggtttattacatggcagtttacgtctgatgcgtgactgtccggaagttcaacatttatatcaaaacatgctaagtgcaatacaccgcatgttgagcagtaccgaaaagacatcaatttaa

SEQ ID NO: 67279 - DNA, 1113 bp, Acinetobacter baumannii
atggcaaaaagatataaagttgccacgattgcaggcgatggcattggtttagaagttctaccagaaggtattaaggttgtaaaggcagcagcagagaagtacggcattgatcttcagttagatgctttcgattgggcaagctgcgattactaccttaagcacggcaaaatgatgccagatgactggtttgaaactttgcagggctacgatgcaatttattttggcgctgtaggctggccagataaagtgcctgaccatatttcactttggggttcgctgctccagttccgtcgtggttttgaccaatatgtgaatttacgtccagtgcgcttaatgccgggtgtgaaatgtccattggtaggtaaaaaaccgggcgatatcgacttctacgtggttcgtgaaaatagtgaaggtgaatactcagcgattggcggtaaagcttttgaaggtacagaccgcgagtttgttttacaagaagccgtatttacacgtcatggcgtagaccgaattttgcgttatgcatttgagtttgcaaatcagcgagatgcgaaaaaaattaccgcagcgaccaagtcaaatggcattgcagtgagcatgccgtactgggatgagcgcgttgatgcgatggcaaaacagtatccacaaattcaagctgataaacagcatgttgatattttagcggctcgttttgttttacaacctgaacgctttgatgtggttgtggcatcaaatttatttggcgatattctttccgatttaggtcctgcatgtacgggaaccattggtttagcggcatcggcaaatttaaacccagaaagaaaatttccatcactgtttgaacctgtccatggttcagcaccagatatttacggtaaacaaattgccaacccaatcgctgcgatctggtcgggtgccatgatgttcgaattctttggtgaagaagacgagcgctgtatccaagcgggtcaagatattatgcaggcgattgagaatgtattaattaatggcccaaaaacggccgatatcggcggtcaggcaaagacttatgaggtaggagatgcaattgcatcatgtgtagcccaaactaaaatggacgtattcgctatggaataa

SEQ ID NO: 67280 - DNA, 1185 bp, Acinetobacter baumannii
atgaaaaggtcattattatttttaggaattctaagtttaactgctggagcacaagtctctgcagctgatttgagttggggtgatccaactttagattcgggtcaatttaaagtgtctggcgcagtacgttctcgttatttacataaagattatgtggtcggggcgaatgaaggttcccaaaatgatgactggcgacttactgatattaaattagtgttgggttatgaaaacccaaactggattgcaggagcagatgctcgctgttatcaatatgatcgcttgtgtgatgcgatttttctaaaaaaagcttgggtagggtataagttatctgaccaacaaagagtcacggcaggtttgcagcctgttgattttggctttggtgaattttggggaagtagttattacgaaacgcttttaaataccgttggtttagaagatattgataatctggggattaaatataaatttgcagatgacaaatacaatttaaccttaggattctatccaactgatggaggaaattataaggggacatcaaaagactcaagccgatatagtggtaatttcgttgaagctgatgatttaactacaggaaccaatattgaagaaaaaaatatgtggattgcgcgggcctctagaaaatttgagcttgataaagctcaaaaattttcgaccgagttaggtggttcagtttggtattcagatttagaaaataaaagaacagatgaagatggacaccgcaaatcatggaatgtatttgctcaaacgcaatatcaagcatggcaatggatgttcttagcaggtaagcaagatgtcactaatggcgataatttattgccaaatagctcaaccattggagcatttgattacccgtatcaagttgctaacaaaggaaaatatctggtcaatgaaattaactatacctttgctcagccattccacaaacttgaaaatattaagccctatatctctcatagccgctttttcaaagatgaggatggatataaagactctgagcgtttaattgcaggcgtttattttaattacaaagccattggtattcagggtgaatatattatgagtaaaaacgatccaatggtaggtggtggggcgaatggccttgcacaaggtagcagtaatgattgggataaactgttttatctttcaattggatattatttctaa

SEQ ID NO: 67281 - DNA, 717 bp, Acinetobacter baumannii; identical to SEQ ID NO: 54006

SEQ ID NO: 67282 - DNA, 2565 bp, Acinetobacter baumannii
atgagaatactaataggttttgtatttagcttcttttgtttgattattcatgctggacaaatagattgggctgttgcaaaaacttcatttccgagtgatcaaagtattggtgatactgggcatgaaaagacacctaatggttatgtagatttaatgagtggtaatctaatttatgatactcctgaagtaatattaaaaggtgatagggggttagattttacactttctaagtcttacggaaaagtgaatagtggctttcgtgccatgggtaactgggaattggaagttcctagactagtaatgaatacgggaccatctactattctaaaaggagatatagatggaaatggaatttgtgaggccaacggagatgcaacaaacaattcctctgggcgacctagttttacagcatccttattaaatacttcatttaaaaataaaattgaagaatcatatgtaaaccaagtaaatttaaacttagcgaatcaaactttaaattcaattgtctacttacttggacagtttggaactgcaacaggggattcgaatgcccagtataataatcaacaggctcaatctgctctatcgaagttgcaagctcagctttacgatgcatttaaaacaaatgtaaatgcaatttctattagtagtgccgaggcaagtaccgaaaaaagtaaatataaacaaagtttaattaatactttgcaaacagggcaagtgaaaattcaggttaatggtatatccttgacaactggtaatattagttctgtgttagatgatttagctattaattctaattttactgtgaagacaaataacgtaatacttgacacagtgataagacaagttattgttggatacctctattatcataatataatagtagcaaagtctaatgaagtattgaatggaatttactcaacagtatcacttaatacatcttcatatgttgactcaagacaaagagtgattagtttatatcttccaggccaaaagaatattattttttatcccgttaatgagcgtgtaactggattccctaagtctgctaaatatgtatcccaagataactggtttattagctgtgcggaaagtggtaaagactttgttgtacgatctaataatggtgttacttactatttccctaattctaatcgagaaaatcaaacaggatttacttctttttttgcaaatgagtatattcctggaaaagtaactgtctatgcttcaaaaatagagaatcaatataaagaggcttatattttaaactattttagtaagcaggctaatactttaatttatagtgggtttaatacttctaataagttttttctaaaatctgttcaacatacattagatgataagcttataaattcaacctcaccagaaattagaattgattatgtaaaaagattagatacaacagaaaatacagatgaaagtcaatttgatagtgtaaaaggagatatcctcttaaagaaaatttcccgattcatcaatggtggctataaagattgggtttcttatacctattcatctggtgctaaagcaggtacgacttataagttaaatgattcaattctattaaatggtaatattggtagttttcaggatgaaaacgctgcgctcttttatttagatacagtaagttatatatctggagataaagtatcttatgcatatggagggccatatcgtattgtgggtaatataagtccatccgaaataggtggtataaccgcacaagattttctttggttttatagtgatttgacagcaattaagtattataagaactctaagagtggcttagttaatgctctctctgtggattggacttatgagttggtaaatagctcaagaccaggttttacagaagaaaagtcttttaaagttacaagttctaaatactctatagcgaatgctaattcatatgatgtgacttatagctatagccgagatgactctacacatgagcaaacaacagttgttactagcaaagattctgtaactggactttcaaaggtttatacttatgtaatgcatgcatttttaggtggtggtgctgagaacttcttacatgggcttttgaaaaaaattacgataggtgatcgagaagaaagttatacatggacaaccctatctctaattgggcaaaaacctaagactatagatgataactatactgattatgaggatgttcgtttagtccgtcttgctagtaaagcaattagtcattttggtgagtataaaactacctatagtaactttgaccaatatgggaatgcacaatcagtccagatgactggattgaatggttcaagtactgttcaatttccagcaacaacggctacatattttaatgctaatgctgcaagtgatgatgtaaatacaggaaatttaccttggattatcggattaccaaaaaaaaaatatcaggtagttttacgttacaaactactgaatatgatgcacaaggagcaatacgtagtaatactcaagctggtcgtgttaccaaatataaatatgaaacggtatcattctcaacatgtcttggaaatttag

SEQ ID NO: 67283 - DNA, 1107 bp, Acinetobacter baumannii
atgaagaaagttatacatattattataggcctaaatgtgggcggggctgaattaatgcttagacggctagttttaaatagtcagttgagaggtgattttaagcatgaagtgatttccttaactgacgttgggataattggtaatgagttaaaaaaagagggagttcctgtttatactcttaatatgagaaatattttatctcttcctgaagtatgtttttccttaagagcgttactaaaagatattaagccagatattgtacaaacttggatgtatcatgcagattttattggtggaattgtagctaaaagtttaaaaattaaaaaaattatatgggggattcgcactacagatgtatctcaggggggggctaaactaacagttatattgagtaaaatatgtgcaatattatctcatttcattccaacagatataatttgtgctgcacatatttctaaggccgtccatattaatcttggttatgatgaaaaaaaaatgcatgtcattccaaatggctttgaattagataaattagtggctagtgaggaagatcgtggcagagtgcggcaagaatttaatgtaaataaagaagctcttgtagttggatcggtaggacgatttaatgttgttaaagaccagagatttttcatagaagtagcagcaattttagttgagaaatatccagatttgatatttatgctagttggaagagataatacgagagaaaaccaagagctaatgagttggattaaagagaaaaaattagaaagtaattttatattgttggggcaacgtaaagatattccacaatgtttaaaagcaatggatattttttgtttacattctaaaactgagggttttccgaatgtagtagtagaagcaatggctttaggacttccggttgttagtcgagatgtaggtgatagtaagtatttgatagataataaaagactaattcaaaatgatataaataatttttgcagagaaattataagaataatagaaaaccctcaagtaagagaagagataagagtttttaataaaaaaagatctaaagattattcaattgatagttttattgaaaatataaataggatttatatttaa

SEQ ID NO: 67284 - DNA, 438 bp, Acinetobacter baumannii
  misc_feature (422)..(431): n is a, c, g, or t
atgtatttttatcttaagaaatatattaggaatctggctaataaaagtaaacttataaaatctatttatagttttttaaattttattaaagtcaactcaacctcaaaaatgagtgatgagttttttgcaaaaatgaaatataaggaaaatacaggtaagacgctaaatcttgagaatcccaaatattttaatgaaaagctttggtggcttaaaataaataacagaaactctcttatgactcaatgcagtgacaaagttgaggtgcgagagtatttgaagacaataggcttagagcatcttttaacggatatatatggggtatatgataaagcggatgatattccttttaataatttacaagggaaatattttattaaatgtaatcatgtttcaggaataaatgctttatatgatagtttaannnnnnnnnnctattaa

SEQ ID NO: 67285 - DNA, 408 bp, Acinetobacter baumannii
atgcttgaagaatctgagcataaagatattgcttatgacgtctatcaggttttaaacggtaattatccgttacgggcaacgggctttttaatggctttcattactattttagggcttattccaacagcaactttatttgtacctctactgcgtaagccaaaagaactgttgaccagaaaattctggaaagatgcacgtcgtggcgtcaacttaatttttagtccaaaagatggcgtatttggtagcaccattggccagattttcgattacttacgtcctgacttccatccaaatgaccatgacacgaccgaatatctagagtactacaaagacaaattactcaaagaaggcggcgcgattgcaccttactttgtgaaggaatttaccccacctgtacgcttgtcttaa

SEQ ID NO: 67286 - DNA, 288 bp, Acinetobacter baumannii
atggcagaacctataacttatgtaacaagttttctagtaaaaataataactattatattaggtccttttttaaggaagcctattgatataattagtaaatttttatatttggaggcctataaaatttcaacattttacagtttgtattttgatgtgaaaagaatgtttcctcatagtttagggggagttatagattataatataaattggagtgaaatatatcttaagaaaaaacaggctaattgtactcttcgtataagagcaaagggtaatctatcggcagagtaa

SEQ ID NO: 67287 - DNA, 435 bp, Acinetobacter baumannii
ttgtgtgcaattgcagtaggccctcagtttgaccgttggttagatgaattgttcgaaggtaaccagaaaaaggttccggctgaaattattcaacaaatcaaggtttggctagagtcgattcgtcaagatttagcaaatgaaaatgggattgaatttccatttgaagttgaagaagctgacgttgaatcaagcctaggcgattggagtgtagggtttgttgatgcaatgttcttaaacgaagaggcgtggtttgctcctgagtacgaagaacaattggttgatttaactttaccgattatggtttttagtggaattgatgaagaagatccacagatggaatctttccgtcgcaatggacagttaatggatgaactggcagaagaaatcccagataatttgaatgagttatatttgatgtaccatactccaaattaa

SEQ ID NO: 67288 - DNA, 681 bp, Acinetobacter baumannii; identical to SEQ ID NO: 67212

SEQ ID NO: 67289 - DNA, 549 bp, Acinetobacter baumannii; identical to SEQ ID NO: 67238

SEQ ID NO: 67290 - DNA, 549 bp, Acinetobacter baumannii; identical to SEQ ID NO: 67237

SEQ ID NO: 67291 - DNA, 432 bp, Acinetobacter baumannii; identical to SEQ ID NO: 59561

SEQ ID NO: 67292 - DNA, 663 bp, Acinetobacter baumannii; identical to SEQ ID NO: 53396

SEQ ID NO: 67293 - DNA, 135 bp, Acinetobacter baumannii; identical to SEQ ID NO: 53397

SEQ ID NO: 67294 - DNA, 294 bp, Acinetobacter baumannii; identical to SEQ ID NO: 53398

SEQ ID NO: 67295 - DNA, 864 bp, Acinetobacter baumannii; identical to SEQ ID NO: 62020

SEQ ID NO: 67296 - DNA, 132 bp, Acinetobacter baumannii; identical to SEQ ID NO: 62021

SEQ ID NO: 67297 - DNA, 315 bp, Acinetobacter baumannii; identical to SEQ ID NO: 62136

SEQ ID NO: 67298 - DNA, 777 bp, Acinetobacter baumannii; identical to SEQ ID NO: 62023

SEQ ID NO: 67299 - DNA, 777 bp, Acinetobacter baumannii; identical to SEQ ID NO: 52165

SEQ ID NO: 67300 - DNA, 330 bp, Acinetobacter baumannii
atgagctctctcaatattactaattctcatttattgacagcttatttagaatttgatgataaatgcgcggaaatagaacgatacattcaatttatgaataatctagattcaggagcggataatcatcttttagcgaaggatagtcatggttattggtcaactaaaccaataactagagaagtccaaaaaactattagagcttccacatatctattaatttataatttactggaatcttcaatgtgtgatgcattagatgcgatacatttaactttagagacagagtcagtagctgtctcttatacacatctccgagcccacgagacgtag

SEQ ID NO: 67301 - DNA, 207 bp, Acinetobacter baumannii
gtgtctaaagaggaagatttaataattaatacattaaatgaaaaaggttatgatccaatttttgaggcagaattttacaaattacgaactttaaagctaaagctagataaaacaccagttgatgctccagaatttgttgaaatgcatgaatcatttattgagcaagaaagggcctttgaagagagattctttcgattaaattcttaa

SEQ ID NO: 67302 - DNA, 1113 bp, Acinetobacter baumannii
atgcacagtaattcaagttctgggtcgaggcttggccttagctctttattttcttctctcccattgaaagttcttgcgctcagcactatgttttttccctttcatagtatcaatgcaggaaaaaccctacagtacaatactgtagttaacacaaacacattaacagtggttgccgtagaaagcccaacgactgtttttaaagaagaccagtttttacacggcttcggttatgacttagcgcgtaactatgcacaaagcttaaatgtaaagttggacttcaaaatcgtgacagataatgccacggcgcttaagtgggttcagcaaggtaaagcaaatcttgccatgacaaccgcaagcttaagttcaatcgagaacaaaggtttaatgtctttttctgcaagttgtggtgatatcgtaaatttgcaaaaaaatggattaaatccgaatctaagctgggtgtttaaacaagcagatgacccgcttacacaaacagcaagcggttttgtttgtcaaagcaaacaaaatggtctaactcagcaacttgcttctttttataaccgtaatgttgtaaaaccagaagcttggtctacgattcaacgtgacttaagtgcacgtataccgatttacaaagcaagctttaaacaaagtgctgctcagtacgatttagactggcatttgcttgcagcgattggttatcaagaatcgtacctaaagccagagtctgtttcaccaacaggtgtacgtgggttaatgatgttaaccaatagtacagctcgggcaatgggtgtaagtaaccgtaacgatccagcacagagtattcagggcggtgcgaaatattatgatctcatgttaagtgagtatgatgatattcctttcccagatcgcaactggtatgcacttgtagcttacaatatgggatcgggtgcggtgaaccagattcaaaagcgcttgcaagcccaagggaaagaccctaaccaatgggttaatctctataattatttgcagagtaacaaaactcgcaatggtcgatacaaacaagcggttcagtatgtgactcgtatacgtgcttatcttgagcacattaaaacggcacaaacgcgaattaatatctag

SEQ ID NO: 67303 - DNA, 213 bp, Acinetobacter baumannii
ttgcaagagcaatttgaattatatgcagataacttcccagtttggtctgaacattcaagtgcaattgctcagtttgcgacttggactgcgctttcagaacttggtttaggcgcatcgttacagcattataacccgattgttgatgctgatgctgctgaagctggtgaaaaagcatttattagcgatgaagatcgttttaaaacattcaactaa

SEQ ID NO: 67304 - DNA, 756 bp, Acinetobacter baumannii
gtgtataagagacagctacaacctatattaaataccagaattttaggtcaccctggttatgaaagaacattgggctattatcttaaatattggtgtttaagtggatttattctctgcagtttgaccccttggcttccagatttaccccatcaacttctaagttatggatggtttatatctacaactatactactgagtgctttgctgctagatgcaacaccatatatgaatagattagagcaaagtgcatttattaatatcgataaatggataattaatatcggtttaatctctcttagtatttttcttatttctgtcttttttattattggtgaacctaatcatatctggttcataatttatagtctgatcccgatctgtttcttattttacccagaatctttccgccctctcttctatatttttggatacaataaagaagatacccacttaacagataaacaaataatgtatagaagtattggtattatcttctttaggctattctgggtttttggctttagctatttatttataaaatcttcctcacaaccttttatgtatgctgcaggcttgattctaggaagtatattaataaccggatttagtgccaagaatctctcttctacacttaaatatttaacctacatcgccttatgtatagcaacgttatacaccatactcttccctttgatattaatttattatttatatcaaagctatcaagcaaaaaaaatcattttatctagctgctaa

SEQ ID NO: 67305 - DNA, 315 bp, Acinetobacter baumannii
gtggctttatataattcaaataatgagttaattgttcaacaaactggtgccaataatgaggcaagaccgtggtttgcatcgggattgctaggtaaggttactgatttcacgactaaatcatctaaacaacaacctgacgctgtgtatgctgctgcaaaacctaccacgactcaagctaatgcgcctgttgcaacaactatgcctgctactggtgtagtacaaactaatgatcagcgtttggcagaaatttggaaaaaatcttctaaagcagagcgccaaaagtttatggcttggttagctgagcagtcgaattaa

SEQ ID NO: 67306 - DNA, 348 bp, Acinetobacter baumannii; identical to SEQ ID NO: 55311

SEQ ID NO: 67307 - DNA, 273 bp, Acinetobacter baumannii
atgaaaccaggacagtttattcgtgagttcggcgaaaagaaggcgagagaggttgttgaagtcgcaatagatggttctactcatgtcatctatgagcaagcggacgggctcattaatctgaaagaactcaaacgtctggtggagtctttggatttgattgaggaactcggtggaatgaaggtgataaagaaacatttgaggggtggtggcgtattgggtggaagggttgttattgctgtcaaagaccacgaatcaatatacggagaagaataa

SEQ ID NO: 67308 - DNA, 747 bp, Acinetobacter baumannii
atggtgggctttaattttattggtgttttgatggatgaactagttacagcggcagccactattcatgcagcacaaatacaagcatattatgctttatgggctgcggttattggagcaatagggattatatttgctgcctggtatgcttggcaaagtggtatgaagcttcagcaacacaataatattatagaggcaaaaagagaggtttatttggatgcaattacgaagtatcagcaacttgcaaatgacttaaagttaattacatatgctccagacaagtttcatgaggtttatttaagcaataaaaaggattttttaatttcaataaataaagttcagttaatttgtgataaggccaacgcgtatgttgtattagattttaaaaataatgttgatactaaaatcattgagctatatggattctttgaagtatttttagaatcatactattctttaattggatttaaagaaaaacttgagttagcaaacaaagatctaaataattttctcacagaaaacccaaagctagctcaagggagagtccttcacacaggaatccaattatctgctacaaaaatacaaaatgaacttgcagagagtcgaaaagagtacgaggctgcaaagattggttatgactttaacctaatgcaaattaatgaaaaaatacagaattttgaagcagatcttattaacaaatacaacaacttttgcaatatattaagagctgaattaaaaatcgttaactaa

SEQ ID NO: 67309 - DNA, 228 bp, Acinetobacter baumannii
atgataaataaaaatttagcagcggaaggtttgcgtggtatagcatgtataatagtagttctatcacacctttcattaactttcttccctcaacttcacaactatttttcacaagaaaactttccttcaagtgattttttagcatcaatgcataattcaccttttttattctttatttctggcactggtgctgtttatattttctttatattaagtggatatatttaa

SEQ ID NO: 67310 - DNA, 918 bp, Acinetobacter baumannii
atgattgaatctaatgctgtcaatatcgatcgtagtcgtatcattctaaaacccaatgtggttgtcggttatgaggggcaaccctataaaattgtgaatgttttaaatgccaatgacattgttatatcaagtcttgattcggtacgtagtctacaggtcaatgctagaagtttgaccatttttaatgggggaaatacgctaactgagcgtttgaataagggtgatcaggatattagtaatgaagcttggcagattgctttacaacgttatgagattattaagcctttgattgagtattcaacgactgaactggtcgaaaatagggcgaatgaatatgatgtgaatcgctcaacattgtggaaatggcttaaagattatcgggaaaataattctctaatggcattgattcccaaaaaacgaggttggacaactgaaaaatcaaggttgtcacctcaagtgagcaatatcattaaacaagctatcaatgatgaatatttgaatgcgaagaaacccagtatttccaaaacgattgaaattgtaaaagcagagtgttctcggcttcagcttgaagcaccgcatgaaaactctattcgtagaagaatcgaggctttaaatgattaccaagtaacgaaagcacgtcttggatctaaagctgcaatagataaatttaaggctgctgctggttcatttccaaatgctgattaccctttggcatatgtgcagattgatcatacacctctagatattgaaatcgtggatgacgagtttagagaagcgattggaaaacctcatttaaccttggcaatcgatgttttcagtcggatgatcgtagggtattacctatcactagaagcgccaagtacgacttcagtggcgatgtgtatcgcatcttgtattttgtcaaaaaacgtaagttga

SEQ ID NO: 67311 - DNA, 246 bp, Acinetobacter baumannii
atgttattcaaaaaattcgctgttgctgctgctgttgctgctactttagctttcgttggttgttctaagaaagaagaagctcctgctgctaacgctgcatctgaagctactgctgctgcatctgaagctactgctgctgcatctgaagctgctactgctgcttctcaagctgttgatgctgctgcatctgaagctgccgcttctgcacctgccgcttctgaagctgctgcttctgctgcacactaa

SEQ ID NO: 67312 - DNA, 927 bp, Acinetobacter baumannii; identical to SEQ ID NO: 59193

SEQ ID NO: 67313 - DNA, 1104 bp, Acinetobacter baumannii
  misc_feature (681)..(690): n is a, c, g, or t
atgagtattcaagttaaaaatattgaaaaacactttggtgcattccatgcgcttaaaaatatttcactcgatttcccagagggtgaactggttgccttactcggcccttctggctgcggtaaaacgacgctacttcgtattattgcgggtttagagtcagcagatggtggtcaagtcttactagaaggcgaagatgcaaccaatgtacatgtccgtgagcgtcaggtcggttttgtttttcagcactatgctttattccgtcacatgaccgtatttgacaatattgcctttggtttacgtgtccgtcctcgtgccacacgcccatcggaagccgaaattaaaaaacgtgtgactcgtctactcgatttggttcaattgggctttttagcagaccgttacccagcccagctttctggtggtcaacgccaacgtattgccttagctcgtgcacttgccgtagaacctcgtgtgttattgcttgatgaaccatttggtgcactagatgctaaggttcgtaaagaattacgccgctggttacgtaacttgcatgatgagctgcatatcacttcaattttcgtaacccatgaccaagaagaggcacttgaagtagccgaccaaattattgtgatgaataaaggtaacgtcgaacaaattggttcaccgcgtgaagtttacgaaaannnnnnnnnncaaattggttctccgcgtgaagtttacgaaaaacctgcaacgccatttgtatttgatttcttgggtcaagcaaatcgttttgaaggtgaacatgcaagcggtattatccgtattggcaatgatcgtatcgaattaccgaccacagttcaggcaccgcaaggaaaagtaattgcttttgcccgtccggatgagttacatattcatgcgcaaccacaggcaaatacaattgaagcaacttttgtacgtgaagtctggattgctggaaaagtagtggcggaattacaagatcgtaatggacgtttaattgagattgctctgagcagtgaagctgcaaaacaacatgcatttaaaccaaatcaaactgtttgggtaagtgcatctcaacttcacctatttgcagatcaagttgcttaa

SEQ ID NO: 67314 - DNA, 1809 bp, Acinetobacter baumannii
atgaagaacttcctcataggttatggtgaaaccattacaaatccagtctatataaaaactggaggtggagataagaaacatccctattcaatagaagaagggagattaagatttcaacataatttagaggaaattatgtgggaaatcgaaaataaacctaccgatgcatgtgctaatgatgaggttgtggtcaaatttattcaacacccttcatatttagctaaaacctattatcctcgtaagctattcaaaaaatttgggatgaaagacataggttcaaaatctgtaaaaatttcccctgatagttgggctacccgcaaacatccagatattgctgtaacttcttgcatatatgtatctgggaaaaaaactgactatcaaaaaatgcttaaagatgttgaagaaaataatctagatcaaactactttagactttattcgaacaattgaacgagtagatatttttacttcagaagaaaagattaaaaatttagatccaactagacaaatcaacaaacttgaagtggtaattcacgcatctcaagaagaggaaagtattctagaagcttttttaaagtatgttgataaactaggaggaaatgcggaaaaaaataaaagtaaatttgttgggggcttaacattcttacctgtcactattgaacatggtcttgaggaagaactcgcagaattttctcatttgcgagcattaagaagtattcctaagttacgtttcaataagcccaatttaacaaggacactattaaaggaaacatttgcctttcctcagaattatcaactgtctgataagtttaaagtatgtattttcgatggtggtcttggaagcactcatctcctaggagatttagctaaagaaattatacctgctgatgtttccgcgtctcatccccattttttagcacatggcagtgaagtatgttccacttacctatttgggccatatcagccaggttctggattactaggctctccttacacaagtgttgatgtagtcagagttctttcaccagaagatgaacacgatcctgatttatttaacgttttaacaagaattgaagctgtacttaaagaaaaaaagtataaatatattaatttgagtctaggtcctcaaatagctgttgatgatgatgatgtgcatgtatggacctctgttctcgaccaatatctacaagatgggcattgtttagcgacaatcgctattggaaatgatggagacttacctggagaattagggcgtatccaacctccaagtgatatggttaacagccttgctattggggcaattgattgccaaagcaaagattgggaacgcgccccttatagttgtacgggcccaggaagaagtcctggactaattaaacctgatggagttttatttggtggaagtgaaaaggagatgttccatgtttattcaccattaactcattcaataatcgcgaccatgggtactagctttgcttccccacttgccatgcgtgtagcagctggtattgatgcattaacggattttgaattaacaacaaactcaattaaagccttaatgattcataaggctaaacctgaaaaacattcacaaaataatgtaggttggggtaaattaccacatcaaccagaagaagtattagaatgcttagatgatgaagctacaattctttttcagggggaacttaaaccagaccaacacctgcgtatacctattccagttcccaaagacgcagattgtacatgggttgttttaaaagcgacattctgtactgatgaatcccctaatgattttggtaaaaatcattaa

SEQ ID NO: 67315 - DNA, 786 bp, Acinetobacter baumannii
atgaatattaatcaagaacaactactcatgttccaagccgttatggaaacaggttcattttcagcagcagcaaggaaactcggtaaagtcccctctgctgtgagtatgtcgattgctaatttagaaattgatctgaacctgactttatttgaacgtaaaggccgcgaacctactcctacagccgaagcacgagtgctatatgaaaaaacggcgcaactattgattgaaatgaatcaatggaaacagcacgcgcatgcattaagtactgggctggaacctaatcttactattgttgtggtgtctgagctgctacataccaattggaccgactatgtttgcctgctagaaagtcgctttcccgatctacaaattaatattgtgtctgcccctcaagaagatgcgcttcaaatgttattagatggatctgcccaactggcccttatgtttgaacgtgagcatttagacaatagagaacagtttgttgaactcaaacgtgaagccttaattccggttatttcaaaaacccatccgcttgcaagccaagagcatgtttcatatgcttgcttaatgattttacgtaatttaggttggggcgtacttccacaagagatgtttaaagaaaatcctgagttaaacaacaagcttaaagcattagatgtatttgattttacgcctcgatttgaatattacgttgatttggtctggagccgcgaaagtgaactcggtgctgctgcacggtttttgattgactatattcgtaataagcgaatgcaaccggctccgtaa

SEQ ID NO: 67316 - DNA, 246 bp, Acinetobacter baumannii; identical to SEQ ID NO: 46242

SEQ ID NO: 67317 - DNA, 465 bp, Acinetobacter baumannii
atggaaattatggatttatcaaaagctgtacagctggctattgtctttagtggcgtctttttatggataggaatgttaactggagtatggaaatattggcaaattcgccgttccgaattaagtcgcgcacattattatgtagatattgcacatagaagcagtttgctttatgcagcagccacacttattctggctgtattgagctatttcacgattttaaatgaagatattgctttatggtgtgtattggcaaatatactgttttttagtttctcaattttagtttatatcatccacggatttttgcaggatacgaccaatcagtttaaacaacctcataggttagggcatttcagtttacctacatggttgatgacgtttatgatgttcgctttaattattactgagctattagcaactgctattttagtgatggggacaattttattgtttttaagcaaataa

SEQ ID NO: 67318 - DNA, 861 bp, Acinetobacter baumannii; identical to SEQ ID NO: 46766

SEQ ID NO: 67319 - DNA, 948 bp, Acinetobacter baumannii
atggctaaaattttaacaattactttaaaccctgcaattgatgtaaccattcaactgaatgagttactagtaggagaagtgaatcgacaagagtcggtagaaattcatgcggctggcaaaggtctgaatgttgctcaagtattaaaagacttaggccacgacgtagtcgtaaccggttttttaggtgagcataatcgacaaattttcgatacacattttgcacaagctcaatttcaacctgagtttatttatattgatggtgaaacacgtcaaaatataaaaattgctgagcattctgggcggatgacagatttaaatggcaaaggtttctttgtttctgaaacagacaaacaaagtctatttaataagattgaagctctgttaccacaagtcgaggtcgttgcaatagctggtagcctcccgcaaggttttagtattgatgagttacaacaacttattcaactgatcaaaaaaaataataagaaagttgccctagataccagtggtaaagcattggttgctgcaattgaatgtcaaccttggatgatcaaaccgaataccgatgagttggttgaaagttatcaacgtcctgcaacaagctatgctgaacaaagaaaactttttgatagcttaaccaatattgagcatgtagttatctcaatgggtgaagatggcgtaaattggttacacgccactcatcccttacatgctcaagcaccaaaagttatcgtaaaaagtacagtaggcgctggtgattcactcttagccggcatgatccatggacttgttaaccaaatgcctcctgaagagaccttaaaaactgcgacagccattgcaagccatgctgtaacacaaattggttttcgaatccctacttctgaggttctaaaccaattaaaagcacaaactattatcaattcattgagtgaatctgatgcaaactgctaa

SEQ ID NO: 67320 - DNA, 1719 bp, Acinetobacter baumannii
atgcaaactgctaaacatttattatttgtcactaatgatccgcaacagcaagtcaatactttaatcttggctcgtaaacttgctttagtcgcaacccaacacggctataaacatagtgtcatttcactcgatgagtttgaatcaagcgatcattttgatcatgtcattattattggacagcaacctaaaaatctaaatatttttggtcaaaacgctttatctttagtttctattgaagatattaaagatgatgcagacaaagcacttttaacggcacttgaacactcaaaaccagcaaatgagtgggaacaaaaacctaagcaagcttcaaataccgcaactcattttgttgccattactgcttgcccaactggagttgcccatacatttatggcagctgaagcgttacaacaaggtgcagaaagacttgggtatcaaatcgatgtagaaactcaaggttctgtaggtgcgaagaatattttatcacctcaagcgattgctgatgccgatattgttattcttgctactgacattgaagtcaacactgaccgctttataggtaagcgtgtctatagatgtagcactggttttgctttaaaacaaaccgacaaggcttttgctgaggcaattgctaatgctcaggttttagaacaaggtaaacagcaagcaacaacggaaaataaggataaaactgaaaaagttggtgtatataaacacttattaactggcgtttcttatatgctacctatggttgttgcgggtggcttgctaattgcactttctttatgttttggcctaaatgcagcagaacaagctggtagtctgccagccatattaaaacagattggcgcagcagcatttaccctcatggtacccatgctgtcgggttatattgcatattccattgcagatcgccccggtcttgcgccaggtttaatcgggggattattggcagcacagttacaagcaggttttttaggcggtattgtttctggtttccttgcaggttatatcgcgttatttattgctaaaaaagttaagctcccaactagcttagagtctcttaagcccattttgattattccattattaggaacattatctgttgggctgattatgttctatgtggtaggtcaacctgtagcgcatatttttgagttaatgaaagatttcctcaacaacatgggcacaacaaatgctgtattaatgggaattattctggcaagtatgatgtgtattgatttgggcggaccaattaataaagctgcttatgcttttacagttggactacttaccaccaatacctatatgccaatggcagccacgatggcaggcggtatggttcctgcaattgggatggcaattgcaaccttcctcgctagaaataaatttagtactggtgaaaaagatgcaggtaaagctgcgtttgtgcttggtttatgctttatttcagaaggtgcaattccatttgcagcaaaagatccaatgcgcgttattccaacctgtattctaggtggcgcagtaactggtgcattagttgctttatttcactgtgagcttgtgactccacacggcggtgtatttgtactactgattccaaatgcaatcaatcatgcgtggttgtatcttgcagcaattgcggctggaagtatcgtaacgggagtaagttatgccatcattaaaaagaatcaagaagaaaaattattaacaaactcataa

SEQ ID NO: 67321 - DNA, 465 bp, Acinetobacter baumannii
atgacaaagaagtatgcgcgttttttacctacaacagaatctttcactcttgaagattttccatattattggattactcaggtccatgctcaatatgtacaaaatattgataatgccctcaaaaaatatggcctagataattcacgtcgtcgtattatgcttgcgctaagtagtaaacctcacgctagcgtatcagagctatctgatatgattatttcaaaaatgtcgactaccactaaaattgtttatcgcttaaaagatgaaggcttagttgaaacctattcttgtcaatcagatggtcgtattacacgtgtatatcttaccgaacgtggtacagaaatgattaataaaattaatgatctaacgagtgtagtacttgaacaatcattcgaaggtatcacccctcttcaactagaaaaaatgatggaaagcttaaaattgcttttaaaaaatctttctcgataa

SEQ ID NO: 67322 - DNA, 216 bp, Acinetobacter baumannii; identical to SEQ ID NO: 44681

SEQ ID NO: 67323 - DNA, 420 bp, Acinetobacter baumannii
atgctcccaccccagcggggacagatattgcagcaacgtgtcgtccagcgcctcgcccttattcagctccgcatggacgcggcggcgcagctccacgctttgcagccaatccagaatgaacagcgtgcgctcgatgcgcccatacatccgcaccttgtcgttgatcgccttgccggaagcctggaactgctgttgatgcttgttcttggccgcattgaacagcttgccgatgatacggtcgtgaaggtcgatgatttcatcagtgacggtggccatgccctcgatggccagtgctaccaaggtggcgtaacgccgctgcgactcgaacttggccaggtcggcgggcgtcatctggccgccttcgcgggcgatcttgagcaagcggttttggtgtacctgccgttcgatgccagcaggtag

SEQ ID NO: 67324 - DNA, 972 bp, Acinetobacter baumannii
atgcgagttgaagtaatgcagtattacggactgacgcaagcgctcagccaggcgggctatcatgaaaccgagcatcaccagcagctcatcaaggacatcaggggcgccatcatgcaagggcggctaattgcggtctgcggtgtcgtgggcagcggcaagacggtcaccttgcgccgcctgcagcagatcctgaaggaggagaaccgggtgaccgtcgccaaatcgatttcggtggaaaagcacagcatcaagctcgccaccctgattacggccctctactacgacctggcccaggacaagctggttcagattcccaagcagaacgagcgacgcgaccgggagctgcaagagctcctgaaaaagggcaagcgcccggtggcactgttcatcgacgaagcgcacgacctgaacggacacacgctgatcggattgaaacgcttgatggaactggcggaagatgtcggcggccggctgtcggtgatcctggcgggccatcccaaattgcgcaacgacctgcgccggccgacgatggaagaaatcggctatcgcaccgacatcttcacgttggacggcatcgccggcagccaacgcgactacattcattggctgcttggcgtcagtaccggcaacacggtcgagtcggagtcgatcttgacggccgatgcaatcgacatactggccaccaagctgcgcacgccgctgcaagtccagctgcatctaacattggcgctggaagcgggctaccagaccggcgaaaaaccggtgacggcggaattggtggaaacggtgatgtcgcgccagctcgacgacctggagccgacgttggcgcgacatggctaccggctcaaggacatggtcgagcagttcgacgctaaggcatcggagatccgatcgctgttcagcaatcagcttgaaccgaagcgcacggcagaaatccgtgagcgcatgctggctgctggcttgccgatatag

SEQ ID NO: 67325 - DNA, 1659 bp, Acinetobacter baumannii
atgtcgtcggggcggcgtaagcagatcccgtccgattcgctactgcagttgcggcagcggttggaccgcttgccccgcaaaagtccggagcggacggcgcaggtgcaagcgagcgcagaactgtacggcatctccgccagcaccgtgtatcgggcgctgaaggacttcctcaagccgcgcgcggcgcatcgtgtcgatcacggcacgccgcgcctgatgccccgatcggagctggaacgttattgcgagctggtcgccgccctcaaactcagaaccaccaacaaggcagggcggcacctgtccaccaagcgtgccattgagctgctggaagagtatggcgtcgaaactgggcaaggcttggtgcgcgcaccgcaaggtgttctgacgcgcagcacggtgaatgaatacctcacgcgttggcacctggatcaggcgcgcctgcgccggcagccgcccgccgtacgtttccaggccgaatacagcaatgattgctggcagttcgacatgtcgccgtccgacctgaaacgcatcgaagcgccgtcttgggtggacccggccaaaggcgatcccaccttgatgctgtacagcgtagtcgatgaccgaagcggcgtgtgctttctcgaataccgctgcgtctacggcgaagatgcagaatcggcactgcgctttctgttcaatgcgatggcggcgaagggcgaggccgaatttccattccagggccggcccaagatgatctatctcgacaatggcccggtggccaagagtcgcgtattccagaacgtgatgcagtccctgggcatcgagtggctgacccacatcccggcaggcaaggatggcgaacgcgtgacagcccgctcgaagggcaaggtcgagcgccccttccgcaccgtcaaggatgcccacgaaacgctgtaccactttcacaagccggaaaccgaacaacaggccaacgcgtggctgatgcgttacctgttgcgctacaaccggcaagaccaccgcgctgaaccacattcccggatcgaggactggatcgccaatttcccgcccgacggcatccgggccatgtgcgcctgggaacaatactgccgcttcgcccgcgaaccggagcggcgcaaagtcggcattgatgcgcgcgtctcggtggatggcaccgcctatgaggtggaaccggacatggccggcgaaacggtgctgttgttgtgggggctgttcgacagcgaactgtatgtcgagtacgagggaacccgaagcggcccttaccatccggtgtccggtccgattccgttgggccgctaccgggcattcaagcgcggcgccgcctgcgagcgggccgaccgcatccgctcgctggcggaccagctcaagctgccgatcgcggcgctggccggggaggatctgcggctggcgccgttgaatctatccagcgagtttcccatacagccattcgatgcggaagcgcacgaataccatttcgccagcatcatcgccgccaagctggcaatcgccaacgacctggcgcaaccgctggccaagctcccgccggccgatcgggccttcatcgaccaggtgctgggcgagacgctgacccgcagcattgtgctgacgcgcgtacgcgattattttcgcaataaaaaatccggagaagaccatgcgagttga

SEQ ID NO: 67326 - DNA, 576 bp, Acinetobacter baumannii
atgctgctcggctacgctcggatatcgaccgatgaccagaacctcgacttgcaacgggatgccttggaggcggccggttgcgagcggatgttcgaggacatggcaagcggcgcgaaggccgatcgcattggcctggccgcactgatgacggtgctgcgcgccggtgacaccgtcgtcatctggcgcctggaccggctaggccgctcgctcaagaacctgatcacactggtggaacggctcgaagcagccaaggtcgggttgcgcagcttgcaggaaaacatcgacaccacgtccagcggcggacgcctggtgttccacctgttcggcgccctcgccgagttcgagcgcaacctggtccgcgagcgcactctggcgggcctggccgctgcccgtgcgcgcggccggatgggtggccggccaaaacggctcgaccccgccaaactggcattggccttgcggctccaccatgaagacaagcacacgatcaaggaaatctgccagatgatgggcatttccaaattgacgctctacaactatctgaccaaagcggacagcgatgtcgtcggggcggcgtaa

SEQ ID NO: 67327 - DNA, 561 bp, Acinetobacter baumannii
atgaatacacgattatttgcattcgtcggaggagacatcggtctttggcggatcgttggaaccgaaaccatagttggcaagtcactgcctgaagccaaaaggctcaacgtaatatctgcctcagagttgcaacctgaaaccagtgcgccctgggtacttcgtggaataacaagcaatgaacggtatgtcatgcgcgaagagaagagcgaaattgtggcgaagcagcaagggctggcgcgcccggaagcaacttgcgcagcgttgataccgatccgaaaaaacgcagcttggtgggaattcacgcaagacgagcgccggagtgttttcgaaaagtcaaagcacatccaaatcgggcttaactacttgcctgcagtagcgcgcaagctccaccactgccgtgacctctcagaaaatgaaccgttcgattttctcaattggttcgagttcgcgccagcccatgaggctgagttcaacgcattgctttccgaactgcgtgcaacagaggaatggaagtacgttgacagagaggtcgacatccgtctcatgcgagaagatgtctaa

SEQ ID NO: 67328 - DNA, 2988 bp, Acinetobacter baumannii
atggcaaggaggcagattctttctctgtcggaaagagaatcattactggcattaccggacgaagagttaacgctgacccggatggcgtatttcagtgaacatgatctggcacttatcagtgcccaccgtaaacctgccagccgttttggttttgccgtccttctttgctatctgaaaaatgtcggctttaccccggataaaaaaatccctccctctgatgcgctgctgaagcatatcgccagcaggctaaaacttaccggggatctctggccagcttacctttccggcagggaaaccacgcgacgcgaacatttaaccgaactgtaccgctatcttggcttaaaagcgttcaccggcaaaatacagcaggactgtattacacacctgctgccgatggcgacgcgcaccgataaaggtattctcctggccgaagaactactggtctggctccggcagaacaacgtgataatcccctcgattgatgtcgtggagcgttcctgtgctgaggccatggcaggcggcgataaaatcgtgtttcagaccctgaatgctccgttaactccggctcacagggatgctctggattgtttacttgagtcatcggataatcagtcttccaggctgacatggcttctgcaacctccgggtaaaatcaatggtaagaacgtgctgcaacaccttgatcggctcagtagcattgaatcgctggcattaccggaaggtatagatcgtaccattcaccagaaccggttgctgaaactggcgcgggaaggccgaaagatgagcagccgggatttgacccgattttcagcagcccggcgtcatgcgatcctggtgtgcgtgctggaagaagccagagccacactgacagacgaagtgattgagttgcatgagcgaatgctgaacagccttttcagcaaagccaaaagaacacaggctgagcgccttcagcagaccggaaagctgatccagtcaaaactgaggcagtacatcaatgtcggtcaggcgctgtctgatgcccgtgattccgggggagatccatggctcgcaatagaaaacatactcccatggcctgaatttgtcgccagtctggaggaaacacgccatctcgccagaaaaaataattttgacccgctgcatattattaccgagaaatacagcacattacggaaatatgccccgcgcatgttgtcagctttacagttaatcgcaactccggcagcgcaacctctggctgatgcgctggttgtgatcaaggatatgtaccggaagcagtcacgtaaagttccggccaccgcgccgcttgagtttgtcccagaaagttggcgcaaggtggtaattacacctgcgggtattgaccggcagtactatgaattttgtgcgctcagcgagcttaagggggcgttgcgttccggggacatctgggttaaaggctcacgccgctacaaaaattttgatgattacctcattcccgaaaaggactttgacaaactcacaccggcgctgccacttcccgtatctgctgattatcatgagtacattaccagccgtatgaccctgcttcagtccaggcttgaagaggtcaatgccatggctgcccttggtgaactgcccgatgtggaaatatcttacaggggcgtaaaagtctctccgctggataacagcgttccggtgcaggtttcaccgctggcagagctggtttacagcatgctaccgcgccctaaaatcacggaaattctcgatgaggtaaacagctggacgacgtttacccgacatttttcgcatataaaaactgacattacccgtcccgatatccgcctgcttctcaccaccattcttgcggatggcatcaatcttggcctgaccaaaatggcggaagcctgccccggtagcaccaaatcatcactcgaagatattcaggcatggtacatccgcgacgaaacctattcagcagcccttgcagagctggtaaacgcgcaggggaaaaggccgctggcggcattctggggagacgggacaacatcatcatcagatggacagaatttcagaacaggcagatcaggccgctacgcagggcaggttaacccgaaatacgggcaggagcccggacgtcagttttatacccatatttcggatcaatacagcccgttttacacctgcataatcagtcgggtcagagattcaacccatgtgctcgatggcttgctgtaccacgaaagcgacctggaaatcagggagcattacaccgatacagcgggtttcaccgatcatgtctttgccctgatgcatctgctgggatttgcgttctgtccgcgaatcagggatctccacgacaagaagctatttatcaaagggaaagcaggccagtacccggcgcttcagtcactgatatcaacaaccagcctgaatctgaaagagatcgaaattcactggcgtgaagtgctgcgtctggcaacctcgataaagcagggaaccgtgacggcatccctgatgctgaaaaagcttgccagctaccccaagcaaaacgggctggccaaagcactgagagaaattggccgtattgaacgaactctgtttatgctcgactggttccgcgatcctgcactgcgtcggcgggtacaggcggggctgaataaaggtgaagcccgtaacgcgctggcgcgagcggtatttatgcaccggctgggagaaatcagggaccgaaaaccggaaaatcagagctatcgcgccagtggactgacgctcctgacagctgccatatccctgtggaataccgtctatatggaaagagctgtcgatgctctgaagcgtaagggagtgaagatcaacgagcaactgctgtcgcatttgtccccgctaggctgggaacacatcaatctgacaggcgattatatatggaaaagcaaccggataccgtcagccggtaagtttcgtcggctgaggccagctaaattaggcaggtcaaaaaataaccttaacgtacaataa

SEQ ID NO: 67329 - DNA, 636 bp, Acinetobacter baumannii
atgttcatcagagcttatttaagggcatcgacggaagatcagttcgccgatcgggcaaaagagatgctggagcagtttgttcaggagcggggacataaaatagccagttactaccgggagaacatcagcggtacaaaacttgaccgcccggaactggggcgcttactgatggacagtcaccgcaatgatattttactggtcgagcagatagaccgtctgacccgtctgagcaacagcgactggatgacgctgaaaaagcaaatcgagcaacacgagctgcggattgtcagcctcgatgtacccacctcatggcaggcgctgtcagataaagatccttcgcaggctgacccaatcacccgcgccgtgataaccgccatcaataatatgcttatcgacctgatggcctcgatgtcgcataaggactggctgagccgccgccatcggcagaagcagggaattgaacgggcacatacgctgggaaaataccggggcaaacaggccgatcaggaacgacataagaaagttctgtattaccgacaggtcaagaaactgagcataagagaaactgctgaagccaccggttacagcacatctcaggtctgcaggattcaggccctgttcaggcctgaaaattaa

SEQ ID NO: 67330 - DNA, 852 bp, Acinetobacter baumannii
atgagacagaggctgatggaactcatcgagcagcatgccagcgctggcggctggcaaaacgtataccgccataattcacaaacacttaattgtgggatgaatttcggtgtttatcttccccccaaagcagcaacagaaaaactgccggtcctgtactggctctcgggtctgacctgtacggagcagaatttcatcaccaaatcgggtatgcagcattatgccgccaggaacaacatcatcgtcgttgttcctgataccagtccccgtggagagcatgtcgcagatgctgacagctacgatctgggccagggtgccggattttatctgaacgcgacggaacatccgtggaacacgcattacaggatgtatgactatattctccatgagcttccggatgttgtcatggagcatttacctgtaacatcaaggaaatcaatatccggtcactccatgggggggctgggagcgctggttctgtcgctgcgaaatcctgatgaatatgtgagtgtatcggcattttcaccaatagtgtcaccttctcaggtgccatggggacaacaggcattcaccgcgtacctgggtgaaaataaaaaaacgtgggagcactacgatcccgtcagtctcattttacagggtgcgaaattaccagaaatttttattgaccagggattaagtgacgccttttatgaagatcagttacgcactaaaagtcttgaaagagtgtgcaacgagatgaacatcaacacatcattccgatatcatactggttacgaccacagctattatttcatttccagctttattggtgagcacattgcttaccatgccaacaggctcaggctgtcagcatga

SEQ ID NO: 67331 - DNA, 399 bp, Acinetobacter baumannii
atggcaacacctgtaatttctggtaatgacgttttttcccacgtcttcatcggtgcatccgatgttgaaaaatccgctgatttttacgatgctgtcctcggtacgcttggcatcaataacctcggcccgtttggcaatggctgggtactttatggtcgcgaaaagccagcctttattattgcacatccgggcaacggtgaagcgccatcggccaacggcgttactgtcggctttgcagctgcaagtccggaagaagttgatgctttccacgccgcgggccttgccgccggagggaaagatgaaggtcagcctggcccgcgcagccatctccctggagcctatgcagcctacctgcgagaccctgcgggtaacaaaatcacggcttatacgttcatctga

SEQ ID NO: 67332 - DNA, 276 bp, Acinetobacter baumannii
atgcccagtactcctgaagagaaaaaaaaggtccttacccgtgttcgccgcattcggggtcagattgatgctctggaaagagcgctggaaaatggtgctgaatgccgttccattcttcagcagatagctgccgttcgcggagcagctaacggtcttatggcagaggtgctcgagagccacatacgggaaacctttgaccagaatgacagctacagccatgaaatcagtaaatccgttgacgatacgattgaactggttcgcgcctatcttaaatag

SEQ ID NO: 67333 - DNA, 780 bp, Acinetobacter baumannii
atgcccgttctgacatataagattcttgaaaaaacaaagttcaatgagattagtacaactggcgctgaagagggtgttttatcaatattaattaaaactgataatgaaaattacaaagcacaggtctattcggaattggttgcgaaccgtttagcaatgtttttaggtatccctgttgccctgggtgtcccagctaagcattcagcaacgaaagataggttgagttttgcatctttgattgcatttgaggatgacagggagatatatgatttcactcacatggatcatcgctctttagaaccgccacgccatgtacctaaaggtattttacaagagatggatcatttacgtgaggtgattaaactaaccaagctatatccacttgaaacagcttttttgactgtgtttgattattgggtgggtaatgaagatagatcatataactttaaggctgagctttcaaaaggtaatcgaggcatcatattcgcgctggatcacggctcttccttacttgcttgcaaatccactatagatcagtcattggaacagcttgagcagccaagttatccaagattccatccttttcagaagatggtaaatcctttatatgctggggagatgatagagagaataattaacatgcctgattgggctattgagtcagctacaatatttgatgaagcaattggtaatgtaatacctatggatcaaattgctctttttgaagtattaagggtacgcaaaaagtatcttcgacagcaaatacaaaatataatttaa

SEQ ID NO: 67334 - DNA, 3042 bp, Acinetobacter baumannii
gtgaatgaaaacgctttagagctagtatgtattgggtggttaaaagaattaggttatgagtgcttggaagaggtaaaggttaatccagaagaaaatatcaaaattcgtaaaagttatacagagtgtattttacagagcagacttagagaggcaatagagcgcctgaactttgatgctaccaatgaagaaaaagaattgggttttcaaaagttaaatggtttttcagctaactcgatgcttgttggtaatcagaaaatttatgattggcttcgcaatggtgttccagtagaagtaaaaagagatgatggcactattgttgtaaaacgcttaaaaatatttgattttgacggtgataataaatattcagttgttagacacatgagtattatgggtttaaagcttgctcgccctgatctaatcttgtttgtaaatggcttacctttagtcattattgagttatctcaatcaaatgactcagagcttaatattgaaaaagcatacgatcaaattcaagactataaatcttatattcctcaaatttttaacttcaacctttttaatgttataactgacggatttcaggcgcgttatggttcgtttactgagagttttgagagatttttaccatggcgtttgttaaatgaaagcatattagattctcagaatgaattcgaggtgctgattaaagggttattgaatcccaaaactttgatggatttttttaaaggatttgttatctatttagatgaagatggggtacagcctcgcaaaattattgctcaatggcatcaatatcatgacactaaaggtctttgtcagcggttatcaagttgctttttaagtaaggatgttggaaaaaaaacggtgatatggcataccaaagggttaggtaaaactctaaaagccataatgtttgtcattaatattcgtagcttacctgagtttaataatccatcggtggttatagttactgatcataatgtttcagaaaatcattggtataaagagtttacatccagcagttggtcattacgtgatattccccaaaaagctgaaagtcgagcagtcttaaaaagctacttagatgaagtggatgcaggtggtattttctttgcggggatcaatcattttgttattggtgaaaataaagtagttgatgccgtatgcactcgaagtaatatcattgttatttggaatgaaatccatcgtagtcagtctgcatttaaagcagcacctgataataagttaggttattttgagaatggcgtagttcaatacatgcatacagccttccctaacgcaactcatttaggaattacagctacacctattagttatgtagatacagatgtagtctttgatttatatgtcgataaatacgacatgattgctgcacaaaaagatggaacaaatgttccgataggatatgaaagacgtttacttaaattttctattgaaaaaactgaacaaaaatccttggttaataaggatgttgaaattttcaatggttctatgaaaattctggcaaaagactttgttaaacattgggaactccgtaaagagcagatggaaggtaaagcaatttttgttgctttttctcgtcatgctgcagtcgagctttacaatgaggtcattacaattaaaccagactggcatcatcctgatgtagataaaggtaaaattaaggtggtaatgagttgtcgtgtttctgatcctgaagaatttcaaccgcatagaacaactaaaacagaaagagaaattataaaaaatcgactaaagaatcctgacgatgaattagaggtagttatcgtcagggatatgttgctttcgggctttaatgcaccacctgtgcatacactttatatttataagccaatgaaagggtttgctttaatgcaggcaattactagaactagccaagtatggagagataaatcaaatggtttagtggttgattacattggtttacagcaaaattttaaggatgcgataactcaacaagatacagaaatctcagataaagaagacaactcaccattttatgatagtgctaaggcattaaaggttttacttgatactctaaatgcgattcgtatggagttttacaatggttttgactacaagggatataaaaccccaactgaagcaataagcttgttactgcctgctatggaacatcttttacaggtaaataccaaaatagataaacaagggcgaaatagtggtattaccaagtatattgatttggtaaataagctaactaaagttcaaagctttgtaggaacattacctgatgcccaaaaacataaagatgaaatagctttctttcaagcggttaaagtaggtttaattaaactgacatactcaggagcttcacaaggtcaaaataagctaggaaaagaagctgtcatgaggccgattgtgggtaatggtgctttggttgacggagtacaagacatatttcaaacgcttgggttgggggcacaaaatcaatccctgcttgatgaaaattttcttggagaaatccaagttatgccaacaaaaaaattagcagtcgagatgattttgcgtttgctaaatgatcagattttagcaagaggtcgcaagaatgctattcaaggacaagagtttactaagaaactatatggagtgatccaaggttatcatggtggctcaatatcaacatttaaggtaattcaacttctaattgacttggctagggaattcaatcaatcaggcgcaccaagtggtatgactgacgaagagttcgccatctatcagattctaactgaaaataatgcagcaactgaggatttgggggattcagttcttaaggctttggcattcgagcttacagataaattaagaaaatcagcaattattaattggcaaaaccgtaaagtttctagggccaaaatgaatgctatggtgaagttttttatgaaaaaatatagttattctgctgacaatgagattgaagttacagagaaaatattaacccaagcagaattgttagctgatgaatgggcttttgaggtgtag

SEQ ID NO: 67335 - DNA, 3177 bp, Acinetobacter baumannii
atggaaattcgttttaaaacccttgggtatcagaaagattctgtacaagcgattgtagattgctttaaaggacaaccatgttctgaaggtcatcgttacatgattgaccaaggtatagcgaaagcaaaaaaagtaactgcacaggctgatatgctagaagaaaccttggatttacaaggtggtaaagcaaaaaaaatcgttgcagatgtgggttttgaaaatgctgaaattttcaatctacaggctgtactaaaaaacattcaggatgtgcaagctgctggtggattgcaaaggtcatctgaattgattactgatgacaatggtaaaggtaaaaactttactaaaagccaactcaatcttgacattgagatggaaacaggtacaggtaagacctattgttatattcgcactatgtttgagctgcataagcattacggttggtcaaagtttattgtagttgtaccaagtattgctatccgtgaaggcgtttacaaaagccttaatatgatggcagatcactttcaagagcagtacggtaaaaaggctcgtttctttatctatgattcaaaagcattacaccaattagagaattttagctcaaatggcggtattaatgtcatggtcattaatgtgcaggcatttacatctaagtctaaagataaccttcgcatttatgatgagttggatgaatttcaatctcgccgaccaattgatgtgattagccgtaaccgccctatcttgattttagatgaaccacaaaagatgggggctgagacgactttacaatctatctcaaacttcaacccactgtttattttgcgttattcagcaacacataagcgcaactacaaccttgtttatcgccttgatgctttagatgcctacaaccaaaaattggtgaagaagatcaatgtaaaaggcgtggaggttaaagggctttctggtactcatggatatttgtacttacaagatattattgtgtcgaaatctgctcctgaagctagattagagttggaagttgcagttaaagatggttttaaacgtattgtacgaaaagtaaaaaaaggcactaatctgtacagtagtgatatttcaaataatgctgagcaatatagagatcgttttgtagttgaaaatatcgatgcgagagataactctgttacctttctaaatggtacaaaaatctatgtgggtcaagcattgggccatgtagatgaacaggtcatgcgaactattcaaattcgtgaaaccattcgttctcatttccaaaaggaacgccagttatacaatcaaggtattaaggttctcagtctattttttattgatgaagtagctaaatatcgtcaatatgatgaagagaataatcctgtcgatggtgaatatgttgagatattcaaggagcagtatcaacaggtattaaatgagtttttagacctgaatttagaaaatgacccttattttgattatctaagagcaattgatgttaatcaaactcacaatggttatttttcaattgataaaaagtccaaacgtcttagtaatccaagcattgacaaaaaagcagaggaagccaaggtatctaacgatattgatgcctatgatctcattttaaaggataaagagcgcctactttcttttgaagaaccaactcgtttcatcttttcgcattctgcattacgagaaggttgggataacccgaatgtctttgttatttgtacattaaagcattcagataacatgatttcccgccgacaagaggttggccgtggtatgcgtcttgctgtaaataagaatggtgaacgtatggatgccaattattttcagggtgtattaggggaaattcataaaatcaacaacctaacggttgtgaccaatgaaagttatacagattttgtttctaatctgcagtcagaaattttaagtgctattcagaatcgtccaacacttgcgactcctgattactttaaaggtaaggtatttaagtcacctgatggctcaacaatagaagttactactcctatggctgagttgatcaataaacatttatataagcatgaatatattgacgatcataatcaattaacaccgaagtatcacgaagctttggagcaaggtacgttagtagaattacctgaaagtttatctgtttatgctgagcaaatacaaaagcttattagtggtctgtttgatcctaaagcattggaagggatgactgaaaatgccaatagaaaattgacgaatccgattaatgaagagaatttaaaacgtaaagaatttaaggaactgtggtctagaatcaataggaaggctgtttatcagattcatctagattctactaaactgattgagcagagcattagtgcagtggagcgcacagctaaagagcgtaacaacaagtttgtggaatctctgagttataaaataactgaggctaccatgaatgatgaatcaacctacgaacaagttaagaataaagaaatgttcggtaaagtgaattctaaaacggaagtagccaacatttctactcagtctcaagtaacgtatgatttgataggtgagatcgctgatgacacaaatttaactcgtaaaacagttgctcgtattttgcagggaatcaacgctgcagtatttgcacagtttaaactgaatcccgaagcctttattcgtgaaatgagccgtatcatcaatgagcaacaagcacaaatggtcattcatggtttgacatacaattctttggataaaacgtatcctgaaaatgaaatttttgtaagtaatgaaagcattccattgcaatcttacaaagctgatcgccatgtttgggactatgtggttactgattctgataatgagcgtaagtttgttcaggacttagatggtgcggatgaagtggtggtttatgcaaagcttcctggtcgctttcagatttctacacctttcggtgcatacaaccctgattgggcaattgcatttaacaaagacaaggtacgacaaatctattttgttgctgaaacgaaaggttcgatgtcagaaattgaactccgaggaaaagagttactaaaaattcagagtgcaaaaaaattctttgagcttttaaatgtggaaaatcagtcatcaggcaatgctgtgcaatactcggtgattgatagctttgatgggttgatgggtctcattaaataa

SEQ ID NO: 67336 - DNA, 564 bp, Acinetobacter baumannii
atgatgatcggttatgcgagagtcagtacccaagatcagaatttagagcctcagcttgatgctttaaaaaaagcaggatgtgaacaaatatttgaggaaaaaataacaggtactcaacgagaaagacctgaactcaataattgtttaagaatgcttcggaaagatgacgttcttgttgtatggaagctagataggcttgctcgttcccttaaggacttagtggtaataatctcagacttagatcagagagaaataggctttttctctattacggagtcaattgatactacttcgccgagcggtagattaatttttcatatctttggtgctttagctgaatttgaacatagtttaatcagggaaagaacaattgcaggattggctgctgccagagctagagggcgtaaaggtggtagaaagccagctatgtcaaacagtgatatacaaaaggctatagcaatgcttaaagacccgatgatcaccaaaacagaggtcgctaagcatttcggggttagtcgattaacactcaataaatcaatagagcgattaaacaagactgtttga

SEQ ID NO: 67337 - DNA, 813 bp, Acinetobacter baumannii
atggcaaccaaagaaatccctttatcaacaataagtctagtttcggaatttctggctaaatacgagactcatccaaagatagactctctactaatgtattctggtgcaagtggtgaacctcctgaggggagtaaaccaactaaagttcgtcaatggttgatgaatacaaataaaaatcctacaacagccccactaaaagtattaggtaaaattttagaaggatacatggactgcattccaacaaatgtttataaagatcatgaagatcaatacaaaaatgacattgagcgaatcaaacgaaatcttgctgataattcactaagttatttaagtggaaatattatccataaaaacatcaatatagtatctaaaacattagaacaattaattaaagacctagacgtagaagcaattaatttagagtttgatcgtgccattaacactgtagactccaacccaagagaggctgtatcggctgccagcaatattctagaatcaatctgtaaggtttatatcgaacagcaacaattaaccatgcctgcaaaacaggatttaaaaaatttattcactcctgttcggaaagatttaaacatcgacccaagtgttattactgatcaagacctaataagaattatttcaggaattatcagtatcgtagacggaattgcatcattaagaacacatgctagttcagcacatggagcaggcagtaaaatgtacaaccttcaaccaagacatgctcgtttagctattcactcatcacacactattgctttatttatattggaatcttggaaaattaataaaaaataa

SEQ ID NO: 67338 - DNA, 174 bp, Acinetobacter baumannii; identical to SEQ ID NO: 58128

SEQ ID NO: 67339 - DNA, 1182 bp, Acinetobacter baumannii
atgaagaacgcattaagcataaaacgcacgaccaatagttcaggttcgactaaactcgaaagaactgctgacaccaaagaatttctatttcttaatggtgaaaaacgcacttatgcccaaaatcttcttaaagattggattgctcaaattcgccatatacaaggactgaaaaacaatacgattgataatcacagcgccaatgtgttaagactgcttaattttgcccaagttgccccttgggaactcaaacctacagatgtcaccaatttttttgaatccaaatacgatcacagtacgggtaaaggtatttccccatcaacttatgctggctattgttcctcttggcgttcatttcagaatttcatgtgcgaacctgatatagccaaccaaatttatcgcacattcaatatacgccctattcgatttgtaaatgatgaaaacagtattgctgttaggaagtataaatctaatcatggacctaaagcctgggctttatcgctagaacagattgatgcgatggatgaggaatttaaaaatcaaatcaaggttgcatatcaaacaaggagcaaagctcttttaccattacaaagagatagagtcatgtttaacctctgcatccattttgctctgcgcgtcactgaacttattacgttgcaactgaatcaatttagccaaagtgaagatcaaaggcttaaagataaattcgataaatatggacaacttactgtatctggtaaaaatgacgttacaggcacaattccaatgagagaacttgatatttataatttacttatgtggtacttagagaatgttcgacctaaaattctacttaggcgaaaagataaaaatgatggagtctgcacatacgatggacagagctttcgtactgctcaactcttatttccgagtggacagggtggagtcatgactcacgaaaatttcggtaagagattaaaatcaattgctctagcaactggtgtaatagatagaagagttacaccacatacgcttagacatacaggctgcaccttgatggtcccactgtattcacctgaaatcgcacaaaaatatatgcgtcataaaaatttatatacaactctcggttattatcatcctatcccactggatgcagcgagtgagccaaatcgtccattgggactttttgacgatgaagatgattaa

SEQ ID NO: 67340 - DNA, 477 bp, Acinetobacter baumannii
atgaagattaagctaagaaatcgccttgaggttttaatgaaagatgctggtatttcaacctttgaagaaatgtcagagcgtttaaccaaaaaccagcaatggtcaatcagccgttcagcacttagccgaaaattccgcgatgaaaacccaagtttaaccatggaaatgattgcagcgatatgtaatgaactccagtgtttgccaagcgatttatttgaaatatcaatctcaagtgcatcacaggaagaaattgatgatatgcaaaaccgtattttaccgtttcgctacggcacaatccgtaaaggcgtattgactgctgccgaagatgaaacgaccaatactgcagcttccaaaccagaaaaagtcattgctacccaaaaacaaaaaacagctcagcaagataaggttgatctagatagcatcttaggacctaaggtttcacacctacatgctggaaagttaaataaaggtaaatag

SEQ ID NO: 67341 - DNA, 1254 bp, Acinetobacter baumannii
atggtcaaattatgcctatacagtaatgtgaaaaaccataatcctgaattatgttggaaaaccaaaagcagcagaatacaaagccttttcgtagactccatgtttaaagcaaaacacttacatgctgaaaaaataacagtcttaacaaccttgtttcgtattttaagtagtgctgctgaagaaagtgatcacgcatttaaaatggcattctccaatatgagtagtaatgatcgtcatttattgatcacatttagcgtagatgaactgagatatcttcttcttaaaataacagcagaaaataaattaaatacacgtactgagttaaaaaaatattctattcctgaagaattgccagaagatttcaagcaacttctcactgaatatcaagaaaaatttatcaagcgttattcgattttaatttccaaaggtcattcacgcagtagagaatactcgaaaaaagaaatggcacttgcattaaaatttgtcaggtatcttacaaatcaaggctattctaattggttgcaggtcgggcaaacacaggtggtcaattttattcaggatgagaatactcgcttttcatacgaactacggcacttccttaaatttgccagagatcatagaaatccatttaaaaaaagaaaatctggtaaacccaagaaaaatgctagtgctcttacttcaacgccacttcccaaagtactatcaccaaaaattgttacgcaattattagagcagatcgaaaatgatcatggtgatgctgcatttgcacttgcttggttggtatgtagaatgggattgacattaaccgcagcttttcagttaccgctttctcggattatgatcaacgatcaagatgagtgtgtaattaagccgaatgaggtttggattagcgttcctgaaaaaataaaaaaaatcctaacttccttaatagaagcacattatcctaattggcaaaccatccctgataaaacttcagagtattttacgattttcccttattacattgaaaataaaaataagtttggaatgaaaatactacatagtcagacaaaagaattgcgttcctcagcaattttagccttaatgaaaaaaggctaccaagataggatcacgcttcataaagccattggtgtatctatgccaacaattgtaaaactggaatacctcctaccagtggacacccatagaaaacttgatcctgaacttattaaagccagaaatgcagtcatattaggtgaagataaagatggataa

SEQ ID NO: 67342 - DNA, 276 bp, Acinetobacter baumannii
atggataatcaaatttggtatgtctatttattggaatgcgagggaggaaaagtttacgcaggcgtgagtccaaatccaaatcaacgacttagcacccatcaaaaaggcaaaggtgctttattcacacaacttaatcatccacaaaaacttttagcatttaaagcatatcccacaaaaacagcagctttaaaaatggaaaaagaaattaaaaaaatgcccaaacagggaaagttaatacttacaaaaagatggaatcaagaagaacatcaaaattag

SEQ ID NO: 67343 - DNA, 414 bp, Acinetobacter baumannii
atgatcctagatgccagttatacattattagtcgcatgtatcgcgctactcataggaatgtttgtcgtaaaatttaccccgttcctacaaaaaaaccacataccagaagccgtcgttggtggctttattgttgcaattgttctgttaattattgataaaacatcaggttattcgtttacttttgatgcttcattgcaaagtttattaatgctcacattcttttcctctatcgggctaagttctgacttttctcgactgattaaaggaggaaagccgttagttctattaactattgcagtaacgatcctaatcgccattcaaaatactgtcggcatgagtatggctgtcatgatgaatgaaagggcactgttgcaaatagtcggtggtgataaacttatcatccccttttgctga

SEQ ID NO: 67344 - DNA, 321 bp, Acinetobacter baumannii
atgattgctgtaatatttgaggtgcaaatacaacccgaccaacaaactcgctatttgactttagctgaggagttaagaccactattaagtcatgtagctggttttatttcaattgaacgttttcaaagtctagctacagaaggaaaaatgttatcgctatcttggtgggaaaacgaatacgcagttctgcaatggaaaaatcatgttttacatgcgaaagctcaacaagaagggcgagagtcaatatttgatttttacaaaattagtattgctcatattactcgcgaatattcatttaaaaaggacaaggataatgtttga

SEQ ID NO: 67345 - DNA, 387 bp, Acinetobacter baumannii; identical to SEQ ID NO: 10354

SEQ ID NO: 67346 - DNA, 594 bp, Acinetobacter baumannii; identical to SEQ ID NO: 10350

SEQ ID NO: 67347 - DNA, 417 bp, Acinetobacter baumannii; identical to SEQ ID NO: 10349

SEQ ID NO: 67348 - DNA, 213 bp, Acinetobacter baumannii
atgaaaaaaatcattaaaattttattattatctagtttgatttcatctataccattatctgtagttgctaaaaatgttgagactaaagtaagctttttaaaagattcttctcaaattacgttaaccggaaagtttcaaggttatgataatggtcataatgagtcattttatcaaagtggctttaagtacatggcttataaaaaccgtatttaa

SEQ ID NO: 67349 - DNA, 189 bp, Acinetobacter baumannii
atgaatatttttattcgcgatgagcgagaagaagatattaaagaaattgaagaattgactaaagcggcatttctaaatgctgaacatacgagccatactgaacactttattgttaatagtttaagaaagcacaaacaacttacagtctctttagttgcggttgaagataatactattcttgggcattaa

SEQ ID NO: 67350 - DNA, 336 bp, Acinetobacter baumannii
atgaaatgggattcattaatttttaaattcttaattaatgtgcctttgatttggattgctacaattgctaatataaacttaaatagattttcaaggttagaacaagaatattctcataaagaagcattagcaaaatcatatgagagatataaaacggagattgatgagcttgagaaactaggtgtgtcgggttcagaagaattaaaattaaagctattagagattaatctcgatgcatttaaagttaatcctgctgatcattcggataaagctaaaccagatttttcaatttttgatcttgttaaaaataaaaatgattcaaaaacagagacgtaa

SEQ ID NO: 67351 - DNA, 1266 bp, Acinetobacter baumannii
gtgcgctcacaaaattattcctggcggtattctcttaccgccactgtgctgttgttatcaccattcgacttgttggcatcacttggcatggacatgtatttgcctgtggtgcctttcatgcccggtgcgcttggcaccaccgcggagacaatccagcttacgttaacaacatacctgatcatgataggagctggtcagcttctatttggaccattgtcagaccggctgggacgtcgtcccgttttacttgctggcggcgttgcctacattgtggcctctattggcctcgcagtaacatcgtcagccgaactgttcctgagtcttcgaatcgttcaagcttgcggtgcctcggcgtgtctcgttgccacgtttgcaacagtgcgcgacatctacgccggccgcgatgaaagtaacgttatttatggcttgctcagttccatgctggctatagtgcctgcggtagggccattgctgggaacgctcgtcgacacttggctgggatggcgtgcaattttcgtcttgctgggaatcgggatgatggtctcctgtacggctgcgtggagactctggcccgaaactcggaggcaacgaacgccggactttcagtggtcgcagctattactcccaatgaagcgattgaacttctggctgtatacgctttgttacagcgcgggaatgggtagcttctttgtctttttctcgaccgcccctcggttaatgatgggcaggcaagaattgtcgcagctcagtttcagtttgctatttgcaacagtggccatcgcaatgatgggtacagcgagaatcatggggcgtttgattccccggtggggtagcctgaacaccttgcggataggaatgggatgcctgatggcaggggcaattttcctcgttatgagtgaattatgggcaccgttgtcggtgcttggcttcatcgccccaatgtggctcgtgggggtaggtgttgccactgcggtgtctgtggcacccaatggcgcgctccgggggttcgatcatgttgccggagccgttacagcagtctacttctgtttgggtgggctactgctagggggcatcgggacgctcatcatcgcacttttaccgagtgatactgcttggccggtcatcgcttattgcatgatcctcgcaacagtcgtacttggtctatcctgcatgaactccgcgagacaccgtcgtggcaatgaagtacacgataccgtggtgctgcaaggtgccgattgcgagcaagaggaacatggccatgactag

SEQ ID NO: 67352 - DNA, 1206 bp, Acinetobacter baumannii
atgactagcgcgagcgtctggaatttattctggaaaggctttgcgccggcgtcccatgagcttctggacgaacggaccctgctcatccgtcttagacacgatgaggagcattcgccagtatgtggccgatgcggccgaccttgctttctggtacacgacgttaattggcgtcgtgttcgtgagtcaccgattatgcagtatagagtcgaactggaggtacccgttcgacggctgcgttgctcccggtgcggcccatccagagagcggattgattggctaccagggcgatcccgtattacgcaaacattgcgccattgggttgagaatctggtacggatgctgcctatcagccatgttgccaaactcttagggctgaactggcatacagtcaagcgaatcgacatggagcggctgaaacgtgatttatccgagccagatcgaggccggctacgccgtttaatgatggacgaattcgccctgcacaaggggcatcgctacgccaccgtcgtcgcctgtgccgatactcagcaggtggtatggatcggcgaggggcgttcccgtgaggcgatccgccctttcttcgagtggttgggtgatgctcgggagcagatcgaggcagtggccatggacatgaactccgccttcgacctggaggtgaaggagcagtgtgataacgcggtggtggtctatgacctcttccatgtggtggccaagtacgggcgcgaggtcgtggatcgggtgcgcgtcgatcaggccaaccagttgcgggacgacaaggccgcccgcaaggtcatcaagagcagccgctggctactgctgcgcaatgctgacaacttgaagcccgaacaggcggtcaagctcgaagagctcctggccgccaatgcctcattggccacggtttacgtgctcaaggatcagctcaagacgctctggttcgcccgggacgaggcccgcgcccgaaacgcctggcaggagtgggcgggcatggccctcagcagcggcattgacgccttggagcgcttcgccgggaggctggagccctacgtggaaggaatcgtctccagcgcccagcaccggctaaataccagcgtgttggaaggcatgaacaaccggatcaaggtcatcaagcggatggcttatgggtatcgcgacacggcttacttcttcctaaagattcgtgctgcgtttcccggcaaagtgcgatga

SEQ ID NO: 67353 - DNA, 258 bp, Acinetobacter baumannii
atgaatcaagtagtaatcaatggaggacaattaggcagtatattagatcgtaagttacgcataacaataaatgaagtttgtgaacttttatcgataaaaagagataagttggggaagttaataaaaaatgatccttcttttcctatcccaataaaagaaggtagaacaagacaagcagcagtttattttgatacgaaacaaattgagtattggtggcagcttaaagtcgaggaagtcaaattatcaaataaaatttaa

SEQ ID NO: 67354 - DNA, 426 bp, Acinetobacter baumannii
atgcatatttgcccattacattcgtatttaaagcaaagccttaatgatcaagttgaagcttggttagcacaaggcaatgaaatcaaaaaactggctcatggtgaaagtggtcatgcctggtatttcaacaatcagccaatcagtgctcaatcaactttgcgtgaaatgatgaccaagtctattaaaaaccataaggctaaaaagtcagaaaagaaaagtagtaaacgagctactagagcgcagataaatgaattgatcaaatggcttgatcaaagcacaggccgcggcactctcttaactcaaaagttagaatgttccccttcatttatttcacaaattaaaaacttcactcgtccttgttctgccgagaactataaaaagatcaagaaagcaattttggaaattgaacaggatgaaaaaaaatga

SEQ ID NO: 67355 - DNA, 534 bp, Acinetobacter baumannii
atggacataacacataaaatggttggtctagatgacatgcaaaaacaaatgtcaaatttggtcgatctagctactgaaaagaaaaaaaccaaagctgctgcaatgtatgcggttaaacccatgcttgatgaagcaaagagtcgggcaccagttgctgaaagggcgtattaccgttattaccgtggttcttacagacagcgaaagcgtggtaatgctaaatccagccgtcaattaatgataccaggcaaattaaaagaagctataaaacgtaaaagtgtggaactggatcaatctgtaggtgctgctgtatatgttggtacagcaaaggcactatttaatcgtaaatattatcctttttattggcgttttttggaaaggggcacgcctaaaatggcagccaagcctatttttaggccgacttttgatgctggtaaatacctagcgttacaacgttttaagtccagatataaaaaatatatcgatgcaattgtgaagcgtcaaaagttggagagtttacaagatgatggtgagtga

SEQ ID NO: 67356 - DNA, 366 bp, Acinetobacter baumannii
atgatggtgagtgaaattatttatgaggtcctgaagggaccttttaatgacaatgttgggccgcatccattgcctgaagggtttgatagatcaaccacatatatcacttatcaaggtatttcaaatattcctttaaatacggttaaaggttggacaggccatgatcggttacggattcaaattaacgtctatacccacgaaaaattgcaaggtgaaaaagatgccattgcggtgaaatgggctatggaccagcaaaaatattcaaactgtgaaatcgctgatcaacgtgatggcggttttgatgaagaaacccagctttgggttcaggaaattgatttttttatatggcaaaacgcctgcaattag

SEQ ID NO: 67357 - DNA, 576 bp, Acinetobacter baumannii
  misc_feature (19)..(28): n is a, c, g, or t
atggctatggaattgcctnnnnnnnnnngaattgcctataaagaacaggctcatattatcggctggcgtgcttggaataaactgaagtatcagcgagtcaattgtaagtttgactgctttgctgaaggtgagctaacagaacgtggggacccaatcattgttgttgatgatacccgtttgacacctattgctctgggtgatggttcaataacgtctggagaaattacagcgtggaatggcttaaccattgaaatcagccagccatgtactttgatagcaggtcatgattatgtgattcatctgcaaaagaaaagtggctttactgatcaaatcccaattagccagggtgcaagtgagtatgagctaatcttggcacgtccaccacttgaagttctagtaacagaaggtgaggtgaaaacggtttattcaatcactgtagatgatcgtcaagatgatgaattgttcctggtctcaaccaaaaatcgaaatggggtttttgaaaactccatatcagcaaccaattccgatgagcgttattatcgaaatgataaggacatcatcaataacttaatttaa

SEQ ID NO: 67358 - DNA, 1791 bp, Acinetobacter baumannii
atggcgattatcaccgaagagatgatggaaggtcttaggcaggatatcgaagatattaagcgaaccttgcgtataataggctatatcgaacctcgtgatggaaccccttttgagtcacttcccttagctgtacaaaaagttatggagactggtggatttgaaccgtttcttactgaagctgagcttttatccagcaccccaactattgcacctaaagcagcaaaagccttagatactggtaaaatatggtactggggtaaagatgaaggtgaaacgatagattcttggcatgacacgggtttgagtgaacttgatcaagctaatcagaatgcatcaaatctagtaaaccttttggctgcaaaaatcattgaaatgcttttctctgcaccaggttcaactaacttgtttcaattctcggacgtagaagggaatattgcataccgaattgacactgactccaagcactggattgttgggctgcaggatgatttggcaacctcaatattaaacaatataaacttagttgatgcattggcaactgaagttattagtaaattaacttcattaatagataatcagttgctaactgtacaggatgtcgaagggaatattgcataccgaattgacactgactccaagcactggattgttggtttagatacagatttagcaacagcaattaatagcaagtcagaaaaggggctggaagctaaagatacatctaatctagaagaatactcatatcgagatacgtacattgcaaaagcagagcgattactaaacttttttagaaatactcaagatactggattgcttgcacccgttccgcttcaatcattcgagcaaaacttttctattgggtctagctggttaaatgatgcaaaaattacttcatggggcaattacattcctgtggaaacgccttacggtcaagatagaggggttgttcacccacagattctagaaatcccaaataagtttatgggttatcgttatatcttgacaatcacagggtatacaaatggtgtcacaactgaagaaaatccatttttattagcatcaaacgatttgcagagcttcgacttaataactcctattttgaatgagcctccttcatatgagtgggagcatggtgttgtttataacaatgacccatttacgttttatgatcataaaactggtgagcttgttctaattttccgccgatattattcgtcaagcacaagtggtgtttccccgtatatgattttattggctatcactacaaaggatggtaagacatggagtgatccagttgagttttacaattcaaatcttggtgatcttcaaattttagctccatgtttgttctttgatgtcaaaacagaaacgtatcatatgtacggtgtgaatcagtcaaagattcgacactttacaactaaaaattggcgtggtggttgggttcagcaggccgatgtaatcactccagctggggatgcaccatggcatgcggatttaaagctcgttggtgataagttattgatgacatatcaaaaccgtgtttctgacacgtcagtgggttttaaattgggaatttccagcgattatcaaaatttcacatgggcagatgactggtggaatagtcaagattatgaggtttataaagcaacgttccttcctcaatttaatgaacaaaatcaaatgagattggttttcatctggacaacaaatcataagcctgcaacaaatcttagatacaagctttttgtacagccaacaccctttttaaatgtcgacttcgtggagaagtaa

SEQ ID NO: 67359 - DNA, 1119 bp, Acinetobacter baumannii
atgtctttagtcttaaaatcgaataatattgctactgcaagtttaggcaatgtgaatggcctgccaagccaagattatgctctttttcttgattttgaaaatgggcaatatacaaagaaaattaacggtgcaatctcaagcttaaccgaagcagaagttcttacctgtacttcacaaaagaacctgccgtctcaaccaatgacgatggatcggattggtgttaaatctgtaattactcaacaacaaccacgtttttggggcagtaaaggaagatatggattgcttattgaagcagatcaaacaaatctgttcttaaactcagaagcgcctgtttctcaaagcattgcaattccggcaggatcggttgttgttgtttcatgtgttggtagtggaagcctttctgtttctgggactaatattgactctatgacggtcactgaaagctctcccaaaacagttacacctttgaatcaagctcaagcgattactttagatattacagttaatgggtcactcagccatgctcaggtggtgcgttgttcaggcatcccaacagttcattcaccaattgtaactggttcatcttcgcgtcctggtggtccagataatatagagataaatcaagcactattaactgaaattttaaactccagctctaatgtgacagtgcttctgcaaactgttggaattgactatacatttgatacacgtgcagtcagtgaaaataggtgctttttagaaacggatacgcatatttgtgctgttagcttgaataaaaaggtagattctgtgggtatgcgcttagcttcatatacaaaagcaggggcagtcgaaactacaccagtaattgtaaatacaaaagcttacacacaaaattcggcaattacacaagccattacatttaatagttcaggacttaaatgtgctactaatggcggctcactattagattcaaatagtgcagtgaactacaatttacttaaaagaatgttacttggtacacatatttcaagcccgttaattattcagggtgctaactgtatttatactaaaatagcgatattcaacaaagttttaacagattcagaaattcttgaatactcaaaaagctggatttga

SEQ ID NO: 67360 - DNA, 297 bp, Acinetobacter baumannii
atgagcgaatttaaaaaagttagcaatgtcttgcttgagtcaaacgggatttacttcattgagtgtcccggctgtaaatgctggcatccgttgcacgttggtccacaacacaaaatacgatggaattttgatgggaacatagaaaaaccaacgttttcaccttcactgatggttaatgctggagaaagtagtcaatgccattcctttattagaaatggacaaattcagttcttatccgattgtcatcacagcctagctggtcaaacggtcgatttaccagaaattgaggaattctaa

SEQ ID NO: 67361 - DNA, 363 bp, Acinetobacter baumannii
atgacttggattttaaataataagcgatggtctttgatcatcgttttgtcaattctttacctaatccaaattggttacaccaatcatctagcaggaaaggtaaatcaggctgagcagcaatgccaggcacaaatacaagatattgagcgtaagcaggtaaaagcgcttgccgaagcacaaaatgagctaaataaagtgagtgccgattatgaacagcttaagtcagaacaacgtacaaaagtcgagtatgttgaacgtgaagtgcaaaagatcattgagcgtcctgtttatctcaatcgctgtattgattctgacggggtgtaccagatcaacagtcttattgaagccgaacgtaccagctaa

SEQ ID NO: 67362 - DNA, 405 bp, Acinetobacter baumannii
atgcccctaaagataataaatccttccattaatgacatagcaggcactggtatttatattggtgaagacaccaaaggatgtataattgaaaatcctaatattcaagattgcaaaaatcatggtatagcagtctctgccaatagcgatatcacaatatcagagccaagaatttcaaagattggagggcatggtatatatatctatgataagcacttattaaatcagataggtcttccagaatctactgacctagaacaattaaaaattttattaatttctctaaaaggcttacctaaagaagaccaaaaaaccaaaatattagaaagctttctctctggagcaaataacatatcgagtattgtaaataatatattgcaaattttgcctaatttaccatcgttataa

SEQ ID NO: 67363 - DNA, 561 bp, Acinetobacter baumannii
atgatggaaaataaatttgatatagccgctctaggcactagctcctcaggattagtagaatcaattcctgaggttagagatatctcaccacttataggcgtaggtgttatgattttcgatgaaaccgataaagtattgctaggtttacgtataaaagaaggagaagaaacttcttggtgtttccctggcggaaagatcgaagctggtgaaacttttgagcaatcagcagcaagagaagttttcgaagaaacttctttaaaattggatatatcaaatatccagccttttactgtactaatcgatcaatcttcactacgtattaacacgacgataggtctatcttttaaattaacagatagcagtttgaaagaacaagttatggtaaccgagccggatatttttgaaagctggagttggttctctttatcagatttacctcctaatttattcccagcatctgcagcaatgataaaagtatggaaagaagagaaacttgctgattattgggcttcatatcctatcaaaatggctgctaatccaaaacaacatctaagtttttaa

SEQ ID NO: 67364 - DNA, 396 bp, Acinetobacter baumannii
ttgtatatcaataaaatattattaatggcagcgatacttggcctgcttaccgcatgtaatcaacaagtacaaagtaagcaagaaaaaaatgaacattttagctcagtgaaaattccgagttatcaattcaatggtatttccgcttctgcaagattaagaggcccattacagttaaaaaatgaatgtctatatgtgaatgatattttaattgtttttcctgaccgttctgcagaatggaatgctaaaaatcaaactttaacttataaaggcgagaaaattgccttaggtgaagaattagatcttgttgggggttctggtcaatacgaattagataaccatcaaattaaaaacctaagcccttcatgtgatcataaaagtctttggcttgctggataa

SEQ ID NO: 67365 - DNA, 996 bp, Acinetobacter baumannii
atgttaggtgaaaatggttttgtttcaccatataatttattcaaagataagaaaaagagagcacaggaaatttcaaatgtctttaataaatatatttttaatggttacacttttgtactaaatagtgcgcatacgaagcacgtcaagcttgctaagttctgtttaaatctgtctcaatttttatgtacgaatacacaagctaatttatatgcatcttggaaaaattcacgtagtccttttgggtctcattgggatgagcaagataccttcattattcaattagaaggatcgaaaaaatggaagatttatgattttgcagatctagaccctgtaaatcataaacatacagtgaagaaaagtgaaaaattacttgccgaatttactttgcaaaaaggggatgttttatatgttccaatggggcaaatacattcggctgaaacaggagatgatatttctctacatgcaactattggaattcataggtataccgctttagatttattagattggctgaaagatgatttgtctaaaattcctgagtttaggaaaagaatgccaaatataaatgataaaaaacaaatggaagaatttgtttcaaacttcttttctaatttatgtaaagttcaatggagttctaataaaattcataatgttatgtatcatcttaaatctaattttaaattcaattctcttttaaatttaccctatgtaggaattgagtcagctgatgctaattttgcgaatcaaacttttatattaaatcattttattacatatgagaaagaacatcaaaatggattaattattactaatggactaaagaaatgggttgtgcctaaagagatttcagtttcttttaatgagttgttattaggaaagccggttcactattctactctttctagagagggatatgaaaatggtatgcagattaattatattaataaagtttgcacagatatgattcatgctggaattatcactatttataattaa

SEQ ID NO: 67366 - DNA, 1767 bp, Acinetobacter baumannii
atgaattatttaaaaaaaacaaatttatatatactatctcaatttgttctatcttatatttttaataacaatgataagaaaattgtatttaacttctttacatatatttttattattctactttcctctttagctacagttctagcacctctagctttaaagtattctattgatagttttagctcagggactaaaaatgcaattttagtaacttctattctgttaagtttgtacgtaatatcacaatccgcatctcgttatctgatagatttacaatggacttttttttgcaaaattgaacaagctatccatagcttgatacggaatgaatcgatttcacatattataaatttaccagttaaatatttacataattacacttctgggaagttggttcaatctattagtaacggtactcggagtgtaactatatatttgcaatcttttatccaagttggccttttaatcatatttcaagttgttggtacatcaattgtaatcctttctttttatgacatttcctttttgctgattattttatttggaattgctttgtatatttactattttgttcaaggtaataataagataatggtttcaaatagggatgtagtagaggatcagaatgctgttaactctgacttaaattcggcttttttataccctgaaactaataagtatttaagtgttgaaaaagactatattgaaataatgcgtaaacaaaatgaaaaactaaaaaaatcatatattacatatttcaatactacaatatccgtaaatttcgtaacaacaataatttttactatcctcttaggtttaattacatatttatcttattcaaagctacttcaaggaaaaatgacgataggtgattttgttttgatgattacttatttgcttcagttaattaagccagttgaagctgtaggtggtgttatgagacaagtgaaccaaggtagggtttttcttgataattataaaaaaattaatagccttgctactgaacaagaaatttggaagggcaaaaaaaatattgaaaagtctcaggttaatataaatattaattctttaaattttatttatcctaaaaataaacatacagcactggataatattaattgttcttttgagagtaatacggtaactgcaattataggtaggactggttcaggaaagtcttcccttgtaaaacttctttatggtttttatgatgattacgaaggtgagattaaatttaataatattgatataagaagccttagcctaaaatctttgagaaataatatttcagttatttctcaggaatgtcatatctttaacttacctatctggaaaaatattacaattggaactgatcgtagtaaagatgaagcaatagaagttgctaaaaagtttaaaattcatgagtttatttctaaattagataaaagttatgacactgttgtaggtgagcatggtgttaagatttctgggggagaaagacagaggatttcacttgcgcgagcttttttaaggaattcacctgtaattatttttgatgagccaacctcttcattagactctgttacagaaaaagaaattatggatttattatttgataaattcaaaaattctacgattattattattgcacacagattaaatactattcgtaatgttgataaagtaattgttctagatgaaggaagaattattgaaactggtaaatatagtgatttaatttatacgaataataatttaaaagatttaatgaaagaaattgattaa

SEQ ID NO: 67367 - DNA, 1740 bp, Acinetobacter baumannii
atgtttagatatatgctggaatttaaaaaaagcacagactttaactcttctattaactatagtttgttaaataaagaattggaaaaaatagaaataaattcaaaaacaaatttatggttaagtcaccctaccagttcaggtgaaacttatttctttagcaatgcaataattattggtaaattatttaaaaaaagtaaaaataaatcttctaaagttgtaaataaaaataaaagaattataactattgaagagcttgttaaagatttttggggttcatatatagctataatttttgataatgagaatgtcgaagtttttaaagatccagcatgttcatttgattttctatggactataaataatgaaaatacaattgggttttcagatgtagaattttataaaaaatatagtgaaagtaatttggaagtgaatgacaaatatgtggctgcatctttatgctatgagagattaaacctaagagaaaccggctttaaaaatatcagcaatctactttcaggtgagagtataactttatatgatttaaaaataaaaactatatggtcacctgaaaaatttgtaaaaagtgataatctaacaattgatgtggcaatggatgagttgagaaaagttgttattgactgtataagttgttggggtaacgaatataataatattttgttgaatctatcaggaggtttggattcgagcttagttgctactattcttagaaagcatacaaatactaatatttacggtttgaatttatgttttgactctgaattaggtaatgaagagcgatatgctagagatgtcagtaatatgtatgaatttccactttttgtatttaagatggaagaaaataaatttaatctagaagataaattaagtatatatcctattcaatataaaccattgaaatatggtttaggttttgaaatattagataaagagttagagattctagaaaaatacagtattgattctatcttctctggatgtgcaggggacgtattatttcaaacaaaaaattcaatatttattgctcaagactattttagagataatggcttgaagggatatctttcaacagcaataagaacagctgaattaacaaataatacaatttgggcagtttttaagaaaactgctgcttatatattatttggaagtaggaggtacgcgtatgaaggaaaaattgataaaggtatttgcaatgaaaaatataaagaaattattgataataaatatttatctcatccatggatagagaatatttctcatattaacaatgggaagaaatttcaaatattctgcttggcagattctcaaaacttctatacaaatttttatacctctaattttgttgataatttacatccattgttatcacagccaattatggaatattgtctatccattccaagttatattttgacaccacaattaattagtagaggacttattcgggaagcatttaaagactacttgccagaaagtatatataggagaaggacgaaatcaggagtaggttcatattatgctgatattgtcgaagataattttaataatattactgaaattttgtgtaatggaaacttggttaaaaaagatattattactaaatttgatctaaaattattaatagaaaaggcaaaaaatagtgataccgttaaaatggagctatttagattatttacaactgaaatgtggatgagaaaggttgaaggaaaaaaattatga

SEQ ID NO: 67368 - DNA, 648 bp, Acinetobacter baumannii
atgtacagattaaaaaataatgtttatgcatgtattgatcaaggttgtctagttttcttagactcaagaaattaccgatatttccaattgaatgagaaagatacagcagaattgctaaattgtgaaatagagaaaactaaatttaataaattaattgaaaaacagattattgagtatgataaagaaaataagttaaaaactattgtcaaaaaggaaagagaactaccactaaatagtattttatcaaatacttatgctgcaaaaagacaagtgaattttggaaatattgtaaaagtagtattcattaatactgtaaataaagcacggataaagtttctaaaaagtccttttccgaaatttagaaataaaagtacgtttagtaaagttgatgataataagatcgctgaagttatcgggacttataacgcctgtatagtttttttaccatggagtaaagtagatgagtgcttatttcagtcaataagcttaaagcagttccttatgttacatggtattgattctgaattagtaattggagttaaaacgaaaccatttagggctcatgcatggttagaaaaagatagaaaaatattaaatgatgaattgcaacacattgaaaaatataagccaataatggtggtaaagtaa

SEQ ID NO: 67369 - DNA, 159 bp, Acinetobacter baumannii
atgaataatatccagttgaaaccagaagcagctcaaacagaagaagtggatttaatttttttaggaacagttcaagaagaaaccaaaggtttcgactttgaaggaacatatgagcctagaaatatggataaatatgatggtgatgccattattccataa

SEQ ID NO: 67370 - DNA, 2262 bp, Acinetobacter baumannii
atgcctttaacaccagaaactttccaaaatttggaaagggatattgaagatacaggcaaggctgtaaatacagacgcactaattgagccaagatatggcaatccatttaactcattacctagagcaattcggttacttatggagacaggtggttggaaagcttacagcactgaaaccgagctattagctaccgctccaacagtcaatccatcagtaggctatgcatttgataccaagaaaatgtacctatggaatggcactgcttggattgatgaaggattaagtcaatattcacaagctgttaactttgctaattcaaataagatattcaaacccgttcttttaaaatctgcaattgatttcaataactataaagagttgggattctactacttcccatctggagcggtgtgggatgcttcaacaaataagccgactggaatttcatatcagtgggcatatttatttgttatgcctattccagcaaatgtagttggacagtttgtctggtgctttaattctcaaaagatggctttccgattctgtaatgcttcaaatgtttggtcatcatggtctatttttagtgatgatgttgctttaacaacgatagttaaagctgctgttaatgttgatcgtgatgcaacctttgaatctagaagcataaatagcacaacaccagtatttgaaaacttatcgaaaaacctttttgacaaaagtattcagctattagccaattatcgattaaatgcatctggcgctgttgaggcaaatacgaacagtgttctgacccagttaattaatgttaagggactagcttctatagctctaagtggcatgcaagcaagcgaagcagcttatcgtgggtacagatttcttgacgccaacaaagtaaaaattagcaatgcatcgatagcaccatctgctactggtgctgtaattgctgtacctggtaacgctgtatggtttcaagtcacattaaaagacagtagtgatagttggagtctagatacatctactttgcaggttgagagtggaacagtagcaacaacatataccgcttatgtaaaggggcggttgaaaaatatttttggttcagatcttctagttgactcaaatcaagttaaagacataaccaacccagtgttttcaagtggatctaagaatatatttgataaagacttcttgataaaagactatgtaatcaccgcaactggcgaccttcaatataagttaaatggctatacgacaaggttgattaatgttaatgagctttcatcaatagcagttagtggattgcaatctagtactgtttatcgggcatatagattcctagatgtcaataaggtaaaaaaaagtaatgcttcaattgcccctaacttaacaagtaaagtaatacccgtccctgctggttcagtatggtttcagctttgtatcaaagacagtagtgatacatgggcattagatccgagcacaattcagattgaggcgggtaccgaggtgacttcatttactccatatgtacgaggtaatcttattagcttgtacgatgctgatgtgagcggtggagatggtgccagatcttcttctaaagcatttggcgctaaatacttaatatttggtgactcaattacccagacatccaatgttgatgggggtatttatgaccaagttaattatttcacacaatggccgacttatgcatatgatcagttgcagatgtcccaatttcgtaattatgcaaaatcaggggcgtcattccgcaatcgaagcctgtcgaacctttatcagtacatgggttatcaagtagaaagagcaattgcgaataatgaagttacggatgtagttattgtgtcatgtggcacaaatgatggaattactaatcttggtgactacgaaactgcaatgtctaaagctactaaggcggatcttgataagacattattgtttgaggctgccagatattcattttggagtattagagagaaatggcctaatgctatttgcttctattgcgtacctttacaacgagcaagcgctgatacgacagagctctcaccaatgcttgatggactaacaaaaatggcgaagcgctatgggtttacaattattgatcagcattcagaatctggcattatccgagattttgaaacggtaggagcagaaggtaaattcttagctgatggtttacatccaaatacagcagggaaaatacttcaatccaagtacgtttgtagcaaaatcattgcaagaatgatgttttaa

SEQ ID NO: 67371 - DNA, 351 bp, Acinetobacter baumannii
atgcagtctggaaaacttaagcatcgcatacaagttcaaaaaccgattaattcacaggatcctgacacgggtgctgtgatttcaacatggtcagaacatgcaacaatttgggcagaagttaccgatctttctacaaaagatgttattgccgcaaaggcggtaaatagcacaatccaagcacgggccaaagttcgatacagccctaaaactaagcttatcaatagcacaatgcgggtgttttttgatggctattattacaggattgatgggaacccaatgcgagacccagactcacgccgtgagtatttaactatcaaccttgcaacaggtggtaaagcatggaatgggtga

SEQ ID NO: 67372 - DNA, 1719 bp, Acinetobacter baumannii
atggctgctatatacccaaatgttgaggctgccaacaaatggtgtaaagcagttgttgctggcaaagtccctgcatgtaaatgggtgaaacttgcatgccaaaggcaccttgatgatttagcaaaatcaaaaagtaaggattacccctataaatttgaaccaaggcttgcagaaaaaaagattctttttgtccagttgttgccacacacaaaaggtgagtgggcattaaaaagactcaaaatcaccttagaagactggcaaaaattcggactggccgtcacatttggttgggtcagaaaaaaagatgggtaccgaagatttagagagagctattgggaagtgccacgtaaaaatggtaaatctgcaattgctgcgggcgttgctctcaacatgttttgtaatgatggtgaatttggctcagaggtttactctggggcaactactgaaaaacaagcttgggaagtgtttaagcctgcaaaactcatggttacccgttcacctgatttacttgaggcaacagggattgttgtcaatgcaggtagcttagcaataccaacagatggatctctttttgagcctatcattggcgatccgggtgatggtcaatcaccgcattgcgctattgttgatgaatatcacgagcactctgattctagactgtatgacacaatgcaaacaggaatgggagcacgcagacagcctttgatcttcacaattacaacagcgggctttgatattgaaggcccttgttatgaattgcgtgagcgagtcatgaaaatgctgctgggcgtgactgaagatgatgagttatttgggtggatctggacgattgatgaggatgacgactggaccgatccaagtgtattgcggaaagctaatcctaattatgatgtttctgtatatgaagattatcttaagtcacaacagcacaaggcaatcctacacccttctagacagaacacatttaaaactaaacatttaaatgtatgggtatctgctcgtactgcttttttcaatattgagaaatggaaagcgtgtgcggatcccacactaacactagataagtttaaagcggtgccatgtttgatttgtgccgatctggcagcaaaaattgacttggccgcaaccgtcaatctgttttaccgccgtgaaagtgacggaaaaattcattactactgtgtcgctcctaaattttatgtacccgaagacacagtttttaatggtgaagaaaaacaggtaattaagctttatcagaaatggctaaacatgggtttgattgatgctcatgataaggccgaaaacgaccttaataagattgctgacgatatcaccgatatggctcaacatgtcgccttaactgaggttccacttgatgagtggggaggctttcagattattaagaaggttgaggaaaagggttatacagcagtcaaaattccaaaaacaactaagtcattttcccctgcaatgcgcgagctagaggcagctattgctgcaaagcgtttccatcatgatggaaaccctattttaacttggatgattagtaacgttattgctagtcctgatgctaacaacaacgttttcccacgcaaggccaataactccaaaaagattgatggagctattgctttgttgatgggtattaatcgcgccatgttcttagctggtgaggcagatccaaatggcttctacgatgatccaattatggtgggtgtatga

SEQ ID NO: 67373 - DNA, 492 bp, Acinetobacter baumannii
atgggtggaattgcttctgtgcctggtcggggtagaaagtccaaaccagacgaacaaaaacgggccgcaggcaatcccggtaaacggcccctaaataacaatattcctgagttctcagacgtaactaatatcgatgtgcctgaatacatggtgagcttggaatatgcatcaatgatttgggcgtctattgttcctgaactcttaaataacaaaatccttcgcataactgatatgcataacgttgaaagtttctgtattgcgtacgaaaactggcgacaagcacaaaaagaagttgctttgaatggaattgttgttgctggttcgcagggtggacctgttaaaaaccctgccttaacagcaatgaatgaggctgctcgtcaaatggcaatgtttggctccttacttggtttagatccatcttcaagaagtcgtttgattggtgagggacagaaaaagaaaggcaatcagtttgcaggggttttagcaatgtga

SEQ ID NO: 67374 - DNA, 354 bp, Acinetobacter baumannii
atggaaaaccaacaccgcaagatcaaaggatatagagaattaagtcaagaagaaattgacttgatgaatcgtattaaacaagtaggggcagatttacttgctttgcaagcggagcttgcagggcgtttggatactgatgcagaagtaaagcttgttgaagcgcgccgttctattgaaggccatgaatatgaaggtcgtccttataatgtttataacggcaatactgacgaatgccaagaataccgccgctttgaagaagcagagcctttacgttgggcagccattggtaaaacagatattcaaacaggaattatggcgttagtccgcgccgttgcacagcctgcaggttgctga

SEQ ID NO: 67375 - DNA, 159 bp, Acinetobacter baumannii
atgattattacaggatctattcatatttcttttaaagatgaatgtaactgcactggttgcttctacacaagagagcatggtggctacatgccttgtcaaagaaatcgaaagaacaaagcaattaatgggcagccaatccagccaccgaagaaaccataa

SEQ ID NO: 67376 - DNA, 261 bp, Acinetobacter baumannii
atgagtcatgaagatcataagttgtttgatgcaatgtttgattcaatccagcgtacagcagatgacttgttagcatctatgcatgaaaaggtaagaactccagatgttaagcggaaagagttggaacttggtttagttaaactggtccagcagtaccaacgcgaaggcttgaatattgattggatatctattgaattaggtagtggtgtagatgcgcgagtaacattatgtccagaccctgtagagaatttggctgtataa

SEQ ID NO: 67377 - DNA, 546 bp, Acinetobacter baumannii
atgcctagagtagcaagcattatcccaccagacagcaaaggcagcctcacattatgtaatggaactcaagttctgcttgataatggtgaatatcttcaacatgtaaacaaaatcactttggtggctgaaccgggtcaaccatggaaggcgatcattgaggtgcacccaactaatcaagagcagattgatgccttgttgagtgatctaaaggtgactaagcgtaatgatgcttttaaccgtttatatgaaatacaagaagcaatgcaaaaactccaagatgagaaagcatttcttgagcatgaatatggttcgccaaagacgggtgtttggactgatggcgtggactatgttcctaaggaaggtacatggttgttgcatggacatgaaactgttctaaccccaaagcagaatgaaagtttaaaagagatcctgaaaataaattctggtcttttagaacctattccaccagtaaccgagaaggttaaagatattcatggtgttattcattctcggccagatcttaaaggtgagaaagatgagtcatga

SEQ ID NO: 67378 - DNA, 237 bp, Acinetobacter baumannii
atgttattcaaaaaattcgctgttgctgctgctgttgctgctactttagctttcgttggttgttctaagaaagaagaagctcctgctgctgctgctgcatctgaagctactgctgctgcttctactgctgctactgctgcttctgaagctgctactgctgcttctcaagcagttgacgctgctgctgcttcaactgctgctgcttctgaagctaaaccagcttctgctgcacactaa

SEQ ID NO: 67379 - DNA, 1068 bp, Acinetobacter baumannii
gtgtcttttaaacatcctgttaaagatatatttgttaaggctgaaaatgctcaaacattattggttgatttagagaaaacttgccaaaagcaatatgccaaagatgatttcttatcattcgctgcaactgtgtcagatgacactgaaattagctcggcagtatgggcatattattttagagtaacaccacatcctgatacatatggtgttttaaaaatgaactttagatatgcatggtatattgcaagtcaggaaaataaagagaagtggcatcagtttgttgagcattgcatccatacattgaagccccgtcatacctacagcggatttgagattgctcaggctacttctttacatttgggcagttatgagattaatagtcttgaaaagattgtcactcaggctttttatggggtagacattgatcatcctagttttaatggtagtaatactcatgatgaccccgatggttatgtcaatgaacgaaaattaggctcaggtattcggacacctgtctggagctttttacttgatccatattggattgcaaaattagataaaacaattggagagatcaagacttactttagttgctttaaagaagttgaaattaaggaaatcgggtatccagaaaatcagataggcttatggattcgacttggggagctttcaatgtatcctgttgaggatggtgtacctgttttgcctgtttatgctaatgctttaattaagccgatacgttgtgatgagctgaaactggtgggctatgcacaatgggatgatgatccaaatgagcatctgagttatgaagaaggtattgcatggatgcgtcgttttgatgaagacagtagttggcctgaagggaagcgagtcaataggcttaatggattattactagaggaggaggcactcaaagtgaaaggcggagaattatgtccacgaactggttattggcaaacaccagcacaacctgattcacgacaatattttacgcaaggtacaatcttgccgatcctttcagaaacggactggggtgaagtgtattggtactgggatggagagaattaa

SEQ ID NO: 67380 - DNA, 1029 bp, Acinetobacter baumannii
atgttgccattaattggtttgggggttgtgcttgcacgagcttttacagcggcattgacggtatatgagctttatagttatggttcaaacttgtatgaagggcaggcaaactatcgccaagagttagaaaaggccaaggtagaaataaagaagatcattcatgatctggaaaaagagtttaatggtcatcttgtatatgcctctgaaattgcttatttggaaagtttaaggaaaaaagacccgcagaatacggaaacacgagcaccacgacagcgtggtcatgaaggttttaagaagcagatttcagaaagaataccttttcggaaagtaatctcggaagtttgtgaaaaagctaacgccaatggatttccgcagctaaaaaagaaaagaggtgtcaaagttagtgatttgcctaaagcgcgacaaaagatattagaaagctgggcagggctgatcctatctgagattctagatgaagacattggtagtgagtttctgatcgcacgtttaaagcaattagctgcttccatcatgtttgagtttgtcgatgagattttgggttggaaggctcccataaagacagaggtgtgttttggggcgaaattcgaagacccacaattagttttgcccggtaatcccaagcttaagcggataggacgttttgatctgaatcctttttatccaacaccttaccataatcaaagaggaagtattgctgccgatttggtcattgcagaatctcgtttggaaccgatctcaaaaactaatctttttgcgattgtagaaattaagtttcagggggattcgataaaagataagcagtttaaccaatatgatcgattattagaggcatgtaaaactgcaaaagaaaaaaagtatggtaaaggtaataaccattctggaaagggtttaaatgaaggtgggtacatttctttgtttcgttaccccgaagatattgccgtagaagatggtaagaagaaatcgaatgaacaagcaggaaccaagaaatctggtagaggtgggcgataa

SEQ ID NO: 67381 - DNA, 393 bp, Acinetobacter baumannii
atgtttaataatatttcccaagttttagagagtataggttttctctcacagcatcgttcggtgtatctccagttttcagatgcatccctgaatagtcaggtttttttacaacgtatagatgggcaacattatcttaatcagggcatgacagccgagctgatttgtttatcaacccatgcccatattgcacttaaacaatttattggggtacaggttgcggttgatcaggtcactgatcaaggccaactgtttcgtactacagggattattactggagcttcacagggacaaagtgacggcgctctaactttatataaactcaacattagtgatccaacttatctctggcataaacgcagaaacagtcgtgtgtttatgaataagagtgaataa

SEQ ID NO: 67382 - DNA, 603 bp, Acinetobacter baumannii
atggataatttatctttttttgatgctcctaaacctactatcaaggttcctgatatattgggagttgaatatttatctgattttgtttctgtagtagaagagactgaaattcttaaaaatattgattcacaaccatggatcactgatttaggccgtagagttcaacattatggatatcgttataattataaaaaagctaagttagatcgtcatataactttacctccaattccatcttggttaattcgtatgcaaaaagatcttatggatgaatgttcattagatcttccgcctaatcaacttatcattaatgaatatgaacctggtcaaggaattactgatcatattgatgcaccagatgaattcggagaaaccataattatggtttccttgggttcaagctgtgtaatggatttcacatcaactgaatcaaatcaaaaagaagctattttcttagagcaacgtagcttattaatgataagaaatgacgctcgttataaatggaaacatggcatcgcaaaacgtaaaactgatatctgggaaggcattcaatacccaagatgccgcagagtttcattaacttttagacacgtttctaaataa

SEQ ID NO: 67383 - DNA, 936 bp, Acinetobacter baumannii
atgacggcaaacacattagaaaccaaacttacaaaggtaattcgagaactttgtatcgataatattgataaagaagctatctgggaaaaagttgttgaatattataataaaagagaagaattgttgatttgggatgatcttagtcctgctggccgtaaccatcacttacaaacccacatacgcgagaatatacttaaacaagggaaaacaccttgtgatacagaggaactagctaatttatatacatatatgtatatgttaatgcatattgatgcttttaatgtagctcgtcttaaaacttataattattcatttagcaaaacttatgatgatgattatgaggaaatccttttagttgattttggttgtggttctggcacaattccattagctctagcagagaacaataaatccaaagaaggctttaatatcaactatttgggtatagatatacaaccaagtatgttgaatttagctaaagtttttttagaaagctcccttttttcagaatctttaaatgtaactattgatgaagatgccattcgtgcagataaccatattgagcccaaaaaaataatttttgtttttagttatttgttcagtcagcctgatattaataaatatcttgaaaaacttattcaacgtattaaaagtattatgagtagtcatcccactgctgaagaatttcatttaatgtatataaataaagattatacaggcgaagtatataaggaagatggaaactctaaggaagcatggactgagttccttaatatgttaaaatcggaaagcatggtgagcgagtcattaggtgttttttcgaaaaagctcgactatagctttagaaaatttaataaccttgatggtaataatattgataagtttggtagccttcggcctgtgtatgccaaaatttttcgattattcaaatcttaa

SEQ ID NO: 67384 - DNA, 300 bp, Acinetobacter baumannii
atgtccgataaaaattcttccgaatcagcaattttaggctggaaatttgttctaatcgtcggtgttttaagtgcgatcttccttggctttttctatttagcaatgagtaatgagcctgactatatgccaggagcacaacgcaaagctcaacagcatgaaatgcagcaaaaagctgagaaatcaacagatcagcaaactcagcaaactcagcaaactcagcaaactcagcaaactcagcaaactcagcatgacaatatgcctgaaatggacatgcaagaacatcagcattcacatcagtaa

SEQ ID NO: 67385 - DNA, 1086 bp, Acinetobacter baumannii
atggtatgtatcacagagactcatccatggggtattagaacacctctatatcagaatgaggctttatcctcatggttgatacgggctgctcttgattgtggttgtgatcccctgagtttaacaggaatactttggcctaaatggaggccttggacgctagatattgatcaaggtctaaaccaagaatattcaaaaatattagttagtgtaaccagtattactcaggatcaatttgatgcagctacttttaaggatttgtatctgcaaaatagtgaagtaagctttaaatcatggattttagcgttaggagcgaaaaatcgtaaacataaaggtggttggcaatattgtccaaaatgtttacaggaagattttaatgcttattttcggctgaattggcgttgcatatggcatgttggttgtactaagcatgatcaacgtttattagatcaatgcccttattgtcatagtgctattcaaccgagattattggaagctccagatagagtgatatattgctgtgctatatgtaaaaagcatcttttcgatgaaaaagaatatcctatagatcataatgctttggcatttcaggaagattttgatcttttcttgaaacaaggatatgccttttatactgatgttttaatttcaatatcagagtggttgaaagtcattcaattattcaatcaattgattcgaaaagttctaactggatctttagacagtagaggatggaaatttttacatgaattgggtattagagtccctcataatcaacttatatcgacgggtttagtccttaaccaactttcagttttagagcgagagagaatcttttcttgcgtctatcaacttttaaatatttctcatgaacaatttgttgaaacagcatgctctttaaatatgactatagcttcattttgggataagagatatgaactaccaacatcgttacttactattgaaaagcggttgggcacagtttctcgaggatactcctcactaaaagtatatccccatgttcccaaacctagtaataaagaagcagtactacgtaagattttgagattgaagcggaaaatcttataa

SEQ ID NO: 67386 - DNA, 1431 bp, Acinetobacter baumannii
atgcctcaatgtgatgaatgtcgtgatgtagttgaaagaactcataagatttataagcagcttaaattctgccataaatgctatatgcgagtttttaagaaaagagtttgcccctcatgtggaaaagtagctagattaagtaagtatgataattcagcaatctgcaaaaaatgtgaaaacaatagaccatgtatacgttgccaacaaattaattatccaatagggagaattacaaatcatgggccagtctgtaatagctgctcagtttattttagagaatttcaggcttgtgagcgttgtggaactctttcacaaaagctctcccgcattagccgttttgccgataatttaagagtttgtcctaagtgcgcaactcgtgattataaaacttgcccaaggtgtaaaaggtatcgtttgcttgaggtagaatctttatctggtcaaatgttctgcaaaaaatgtttaaattattcaactggtcattgccaagtatgtaggcatcagattcctgccggacgtggagatctttgtgaaagatgctcatggcatcaatctctggaacgtaggattgttaaactagtaaataatttggaaaatcattctcttagagaatattttaaaaattatactaaatggcttgaacaaaaattagggccacataaaacagcattagttgttagtaaacatataggtttttttgaagaaacgagtgatctttggacaaataaagtcccaatttatagagtgcttttacaacggttaagatcaagtggtttacgtaagtatgtactacctatgcaatggttaattaaagtacataatcttaagatagatataaaagctaaagaattttgctcagaattggatcagttgaaaaaattgactagcatttgcccagaatcttcattctctgcccaagttattcaagactattatgactcgttaattaatagagtgaatgaaggtaaaataagtattcgctctgctcgattagcaatgaaacctgcttctgttttgatgttacagatgagtaaatcaagatttgatataccacggatatggcatatcaaacactatttatctctgcatcctggtcaggcagctgctcttgtaggatttataaattttttaaataagaagtttgatgctaatttaaatatttcatttatattgaattttaattttttaaaagatataagaaagcaaaaattggaaaaagagattctgaagctgattagggatgctgagatcagtttcagcctcttgaggtgggtcagagtttgtttaaaatattttcataaattaaatgactatgattcaaaaaaagtaacactaagtatgattaatgaagtagaggatggatatattgttagttaccaaaacgaaggatactggctaccaaatagatccttaatacatcacacggagtga

SEQ ID NO: 67387 - DNA, 849 bp, Acinetobacter baumannii
atggaaattgcagaacttaaaacacttatttccttagttgaaacaggtagtgtgacaattaccgcaaaggaactaaatagagttccatcagcaatcacaaccagaattcaacagctagagagtaacttaggtgtacaactattcgctcgagagaaaaaacgtctaattgcgacgtctaaagcattagaattatatgaatatgcttgtcagattataaagcttgttaataccgctgaaatcaatataaaagtagataaacctggaggaaaatttcgtctaggtgctcttgagagtatggcttcaacaaggttaccggctccattagcaaaaatgcatgaggagcatccgactatagagttagaactaactacaggcataagagatacactttatagtgcattaatacatggactatatgatgcaatattgattgccgatgcacctattgatgaaagattagaaagaagagccgttttccaagaagcccttattattgttgctcctaaaatccatcccaaaattagaacacctaatgatataaactgccctaatattctagtattcaaagaaggatgttcatatcgtgatcgattgttagattggtatgattcctttaatgcacaacccaaaagaattgctgaagttacttcataccatgcgattttaggaggtgttgcttcaggtatgggaataggtatcgtacctaagatcatgtttgatcaatttgctaataaacacttattaactgcacataccattgaaggatctttgggtagaatccaaattgatttgatttggaagaaaggcttgttatcagctaatactagcgctctactgaactatctttga

SEQ ID NO: 67388 - DNA, 207 bp, Acinetobacter baumannii
atgccttacgtcaatattaaagttacaggtggtaaggaagcaccgagtgctgagcagaaaaaggaaattattcagagagtcaccagtttattggaagaggttttgaataagaatcctgctactacaattgtaatagtggaagaagtaccaatggataattggggagttgcaggtaaaacaaccacagaacgtcgacaagaaggttaa

SEQ ID NO: 67389 - DNA, 693 bp, Acinetobacter baumannii
atgaaaaagcttgggttaattggtgggattggtccagaatcaactcttttatattataagaaattagtttatggagtgcaggaaagagttggagatagattttttccaaatattgctattgaaagcttaaacgtatttgatgttttagatttttgtgaaaaaaataactatgatgggttagtagagtatttaatgaagggtattaataatctcattactgctggagcagagattatagcattaacgggtaatactcctcatattgtatttgaaaaattacagcttcaatcaaaagttccaataattagtattattgaaataactagccaggaagcagaaaatagaaaatattcaaatattggattacttggtacaaagtttaccatgcaagaagaattttttaaaaaaccatttattaataaaggtatacaggtagttgttccttctgaaaaagaacaggtaattattagtgaaaaaatatctaatgagctagaacatggtatcgttttaggaaaaactcaaaatgattttctggatattattcaaagaatgaagaatgaaaaagggattgaggcaatagtattaggttgtacagagctcccattgttatttaaaaatatcaaaatacctttaccggtgttagatactcttgatcttcatgttagttcattaattgaaatggttttagagtga

SEQ ID NO: 67390 - DNA, 756 bp, Acinetobacter baumannii
atgttagattgtgatattactagttttagaaaaatatatatatttcaattaggaactcctccagacaatatacgcgagttgcaaggtgatatctctgactggttttatacagcattgaaggattatgtagattacatcgaggtgattagagtatttgaaggtgcagagttgccagaacctaacccaaagtgtattgcgatattaactggttcttgggcaatggtcacagataaagagccatggagtgaaagaacagctatatgggttcgtaatgctatctcggaaaaaatgcctatatttggtgtttgttatggtcatcaacttattgcatatgctttaggtggagaaattaattatcactctgatggaatagagataggttgtaaaaatgtacagctttctcctctagcccagaaagatccattatttcgtcaatttccattacatttctcagcttatctaactcatcgtcaaacagttactaagttacctggaggggctttaaacattgcatcttcacagcatgatcgtcatcaaattattcgctataactcaacaacaatatcgactcaatttcacccggaatttactttcgaaatagctgaaacactcattcttaaaagatgccacaagttgcaggaggatggattaaatattaattcattgcgtaaggagttgaaatcatcaactccagaagctaggaagttactcattaattttattgaagcacacttctttaagacagattttctttag

SEQ ID NO: 67391 - DNA, 1755 bp, Acinetobacter baumannii
atgctggatactttttcaaagatattcttctttaaggcgactgtttgtgtaattactctatttagtactgtgcaaacatcagctgattctacagctaaaaatactcttgcacgatatgattatgaaaatgatatttttcatccaattcgtgcaaaaaatgggatggttgctagtgaacaagaaatagctagtcgtgtcggtctagatatcttaaaacgtggtggaaatgcaattgatgccgcagttggagtgggatttgctttggctgtagtacttccaaatgcagggaatataggaggtggtgggtttttagtcttgcacgatgctaaaacggggaaacaatttgctttagatttccgcgaaatagctcctaaaacagctagtacaaatatgtatttggatactcgtggaaatgtaattcctggaaggtcaacttattcccatgtatctgtaggagtacctggtacagttgctggtatggaatatgcattaaagaagtggggatctttatctcttgcagaagtacttactccatcgatagagttggctgaaaagggatttcccgttaattattctttgggaaaaatgttaaatattgagcaagataatttgggaaaatgggaaagcacgcgtgagattttctttaagaataataaaccattacaagaaggagacatcctagtacagaaggatcttggccattcattaagattaatttcgcaaacaggaagccaagttttttataatggggaaattggaaaaaaaataatatctgagatacagcaacataatggcattatgacaacagaagacctccaagattacaaagttattgaaagaaaaccacttgttggtacatatcgaggttatgaagttattacgatgcctcctccaagttctggaggagtccatgttattgaaatgttgaatattcttgaaaatttccccatggaaactttaggtgtaaatagcgctcaatcaattcattatttagctgaaacgatgaaactcgcttatgcagatcgatctaaatatttaggggatcctgattttgttaaagtcccagtaaacggtttaacttcaaagcactacgctgaaattttagcaaaaagtatttctattaataaagcaaagccttctagtgtcatacaacccaataatccactaccttatgaaagtgaccaaacgacacacttttctgttgtagataacaaaggaaatgctgtttcggttacttatacattaaaccttaactttggtactggaattgttgctaagggaacaggaattcttctcaataatgaaatggatgatttttctgcgaaattgggtgaagccaatacttttgggctcataggtggtaaagcaaatgcaattgagcctaagaaacgtccactttcgtctatgacgcctactctagtgctaaaaaataataagccatggttagttactggtagtccaggaggttctaggattatcacatctgtactgcaaacaatcgttgatatggttgatttcaaaatgaatcctgcagaggctgcctcaacgccacgaattcatcatcaatggttacctgatgagcttcgtatagaaaagggaattagtgcagatacggtagcgatactaaaaaatgcaggtcataacgttgtacagaaatcaactatgggacgaactcaaaccattcaagtcttagaagacgggttatatggatattctgatccaaggaacccaaatggagctaccgtaggtttttaa

SEQ ID NO: 67392 - DNA, 1284 bp, Acinetobacter baumannii
atgaagaattttaaatttagccttgcatggcaaattttaatcgctttaatcctagggatagttgtcggggctgttttacataaccagcctgaaatcaaagacagtattgtgaataatgttcttacaccacttggtaagatctttattaacctgattaaaatgattgttattccaatcgttttctctaccttgattttaggtattgcaggtgttggcagtacgaaaagattaggacgacttggttttaaaaccattctctattttgaaattattacgactattgctattttggttggcttggttgcagcaaatatcttccatccgggctcaggcattgatatgtctcagttggtacagtcggatatttctcagtacaagcatacaactgaagaagttcagtcacagtctcatggcatcatgcagacaatattatcgcttatcccaacgaacattattagttcaatggcgcatggcgaaatgttacctgtgattttctttgctgtgctatttggtatcggtttatcttctttaccagcaaccactaaagacccgttattgaacgtatttcatgctgtatcggaaacaatgttccgtgtaacgcacatcatcatgaaatatgcaccagtgggtgtgtttggtttgattgcagtaacggttgcaaacttcggtttcgcttcgcttatccctttaggcaaattagtcgtgttggtatatggcgcgatcttgttctttgctttggtggtacttggtttaactgcaaaaatgttcagcatcaatatctttactttgtttaagattttgaaagacgaattaattttggcctattcaactgcaagctctgaaacagttttaccgcgtattatgcaaaagatggaagcttatggcgcgcctaaagcaatttctagttttgtaatcccaacaggttattcatttaaccttgacggttctacgctttaccaaagtatcgcggcaatctttattgcacagctttacggtattgaaatgtcaattagccaacaggtcattttagttgtaacattaatgattacttctaaaggtattgcaggtgttcctggcgtatcgtttgttgtgttattagcaacattaggtagtgttggtattcctgtagaaggcttggcatttattgctggtgttgaccgtattatggatatggcacgtaccgcgttgaacgttgtaggtaatgcacttgcagtacttgtgattagtaaatgggaaaaacaatatgactttgaaaaagcaaagtattatgaagaaagcttatga

SEQ ID NO: 67393 - DNA, 1821 bp, Acinetobacter baumannii
atgactaactctaccaatactgatcaaaatacaaactccttagataaaaagaaagcagatactttgtggaaaattcttgaaccatataaagataaatacctacaagtatggtggtatgggggcatggaaaaagggaaaagaccaggagatcaacctcaggtacatgtcttatttagagaggtgcgagaggattttagccccacggataatttttttcagattacagctaatattacagaccttgtttcgtggagagttgataccgtttggcatcagcaaagaaaagttaagagcttaaatgatgacgcctataaattcgttattgaccatactgatttcgaattcaagtatctaaaaatttataaggatgtaagcaaaacaaaaaaattcgatttttttaaaaaccgagaagagtatcaaaaggaagattttcaaaaagaagattcaaaaagaaaaaattgcctttcatttaaagtagagcatcctgaatttgatgaaattttaataccttgtctggaatttctcactagagcttatggtttatcaactgagctcattcgagttcttactacttataacgaaagagaaagagagttacgattatatatcccacataaaggtgaacaaggcctttggacggtccttcttggagatggcattacacgagcggatcacgtttttgtcgcatattataaatatactgaacttgcaaaaaatgccgcccgtattttatacagtagtattgtaggaaacactcatttaaaacacactaatatctatccaaaagtcgttccttggcatacagaaaccttaccgattagggtgtcggggttccgcttagcgggaacaaaaacctttgttgtgacaaggatcagagggataaaagtaccaaaagatgatcacattagaataatacctaaagtaactgaaagaattaataccacgacagataatgatcaacctaacccgccattgcctcaattagggaatggcgatattaatgtttcaactaatcaaggagggcgacgtccaccatcagaccatgaattaattgaagatgattttgaatggatagatggcggtccagctaatgaattaagtaaatataaatttgtaaaacaagttaaacgcccgaaacgaaaaaagaaattcatagaaacgcagacgattggaacaggagctccggacaattcgcccgaggtattaaatagccaaatagtgccatcgacaaacaattcaaaagagtttcaagccccccaagatggcagaatcattggattatggaaagcttgtgtaaaagcaatggaaattaatccatacttaatacaacaagtgaactactacacatttgaaaagggatttaattattccgaactcccgatgttgatcggtttttttacagaatctgagtctcaatcacataaaagttggtgttatgcaaactcattaaaaacccatacaagaggagcattaattatccgattgactgtatctggggcagaaccaatttatatttttgatatacaaccaacaatttatacttctactgaagaaggggaaactataaaaaaagaaaaaggccatgctggtttagtatttcagatgaaacaagaaaaagatcttaaacaatttatctctgatttaatgtaccttcttcctcttcacgagggttcataccctccaaaagtgttccaaaatctgctggccactcaagtatttttatttcgacactccaatacaaaagggttaactgaaggcgagtcaaccttattaaatgctttaagaaaaataggaatagataaagtatcgttcaaaaaatag

SEQ ID NO: 67394 - DNA, 984 bp, Acinetobacter baumannii
ttgcttactccttatacaaaacaacatctatcaactgatcaacaagttgctaaactaaaacattatggtcttgtcattcataatgaaaattatgctaaaaaatgcctaattcaatataactattatcggcttagtgcatattggcatatttttcgttcaccaaatccttcaaatccctataagaagttaagtgtttttaagccgaactatactttcgaaaaagtaatccaattatatgaatttgataagaatctacggaatctgatttttaaagctattacagaaattgaaacttttcttcgaacccaaattgcatatcacttaccgtcaattaataatgatgcatttgcagtctatgatatttcacttttccagaataagcagttttgtaagcatactgatcttattaaaagtatagatggtgatgtagagcgtggtagcaaagaagattttattgaacattataaaacgacatattcagcaacacagactgccaatcgtcaaccacagttaccattatggatgttgactgaaatattaagttttggcaccttaagaaaaatttattgtggattaaaacccattcataagaataaaattgtgtcatgttttaatataaaaacaagtacaacatctaatccattgaatatataccacgttatagattttaaggatttcgatagttatttattcttaataaataaatatcgaaatatttgcgcccatcatggacgtttatggaatagaagagtagcaaatgtactaaaagtgaatgctgcaaataacttaaatattatgggccatacacatggtggattatatgcaatccttatagtaattgctcgtttaatggagcccactggccatgctaaagagtggaaggattctatttatactttattaaagaataactttcctctggatgatatctgtaaatatacaacattacctaataattggcatgaacatacggtatggaagtaa

SEQ ID NO: 67395 - DNA, 705 bp, Acinetobacter baumannii
atgcaagaaattgatttaggtcataatttgattgagcattatgataagcctatagaaggccgcctttttgtagttggtgatcttcatggttgttataccctgcttatgaataaattaaaagaaatggaattcaattttcagcaggatttattagtatctgttggagatttagttgatcgcggtagtgaaaatcttgaatgtctgagtcttattgataaaccttggtttaaagcaatccgtggtaatcatgaacagatgtgtattgaagctacctttgataaagaaatgaaagatatgcattctcatcatggcggtgcttggctctatgaattacctatccatctacaacaaaccattgttgagcaatgccgtaatttaccaatcattcttgaaattcagcacaaccataaggtttatggttttgttcatgcagatatacatatgaataactgggaagaattcaaacaagaagttctaaaaaacgattattttattgaaggtgagcagtccgctatacaagttgctttatggcatagaggacgggtccgatttagtaaacataatccaagctatcaaactgtaatagggattgatgaaatctactttggtcatactgtaattaaagaacccatccaacatcataactgttttttcattgatacaggggctgttttggggggggaattaacagtaaaagaaatctaa

SEQ ID NO: 67396 - DNA, 261 bp, Acinetobacter baumannii
atgaaattaaagcactctttacgaatagcggttatacaagatgtgtgtgatatctgtgataaatcaactcaattaaattatggtttattgaaagcagaatggagctctaacacctcggatagaactgataaatatgaagttcgtctatgtaaagcatgtttcttaggaacactttcttatttaagaaaccagaaaaaattgattcacttatttgatgaaaattttgactttaaccaactagataatcttggtttgagataa

SEQ ID NO: 67397 - DNA, 495 bp, Acinetobacter baumannii
atgatgattgatatgacgaaaagacaaattctgcaaagattgtttttacgttttcttatgaaaaatacattttataaacaagactttgtaaagatatggaatctatttgcaggagaaaacaagtatttcaatactgatgaaaactttgaagtagttcatagcttttttatacagaatttagaaaaggagcactttattgtggatactacagctattcctcgaaaatacacttctacatatcacgcatatcaattaaagaagatttgtttacccgtagagctacaagagccttacgaatcgatttgtgaaaagacttaccagcttaataaagctgtacaacagaatgagctcgaaattgaatgtctgaatgagtgttttaaggaatttcctagtattagatttcaaattgaacttttgattcaaaaaaaacaaaattatcaattttcgcttcaatcaaaagtaaatgtattaaaagagctaatgcaaacattttaa

SEQ ID NO: 67398 - DNA, 246 bp, Acinetobacter baumannii
atgagctcaatacatgaccccagatatattgatttaattcattgtttaatttctatacgtgagaaacaaaatataactcaggtagaagtagctacatctttaaaaaagcatcagtcctacgtggccaaagtagaaaacttagatcgaaggctcgatataattgaattatatgattggttaaaagttcttaatatgtcgctttccgagtttattgaaatttctaattttgaaaaattattaccttaa

SEQ ID NO: 67399 - DNA, 480 bp, Acinetobacter baumannii
atgaaatattttctaattttcatatttgttcttttagtagtgcctgtctttatctttggacaggaaataaacttaacagagcaattcaaaattatagaaaatttaaaggcaatctttgcaatattgtttgctttatttggtatatggattgctatatgtaatcctcttacaagtgatagtgaaaaacttgaaaaaataagcttcgataaaattttagaagctctttttttatgtattttatctttaataattatcggctttatattctttttaactccaattttaaaaaatataaattatattcaatcacataaagagatgtttagggccatcctatttgttactgtttatttattaacattaattcaagtttacactttaattatatctttaaaacccaatgatttaataaaagactatcttgacaaaaataatgaaaggaagaagctattaaaccaaagaacaatcttaaaaaaataa

SEQ ID NO: 67400 - DNA, 1038 bp, Acinetobacter baumannii
atgaaagaaacagcaaaagtaacattatatgaaatcaataaatgtgggttatataagctaaaaaaagataatactcctgtatttggtgatttaggtgatcttttaaatcaatttcacacttgggcaaaacaagatggaatgctcttagcaaatacttgtacttatgctccgataggaactgacgactcatataaaacttattgctatgatattatcgttgataaagatttagtacttttaactacatggaatgaaacaccaaaaactagcggcaacaaattgttaagcgtaagtggtacagctacagtcggtaacgctacaattaacacagcctctataaagaaaggggacattccggggtatgcagcttattttatttttttcactaatgaaaataaaatggcgactattaattttgaccattctttgaatggaagattaaatttagaaaaactatttactgagttcatatccaaaatctgctcatatgctaattctagaatagagcaagatattgatggagatgacatagaaataattgaatataaggcaaatccagaagatgagcctcagttcttaactgcttattttgaaacgaaattagttagaaataaaaccaatattgaatatcttattactaattatgacttaatcagaaaaattcataagcataatgaaattccattctttaaatttgaaagtcgtgcatattggcaaaagatcccaggcatatacaacaaaaaagatgatgaactcacagcaaaatacagcctagaatttagatatactcccaactcagaggaagaaatcagaactataatcaatgactggcaagaaaatcataaagaaactaaatgggaagacttaggatttactcttattggaaagagctctccaatttggcttagtggtacaatagctagaaatgattttgaattagatatacggagaaacaaaaatgaaattgtcgaacctatagatttattaactcaattaaagaaaatatctactcaaattttaaacctgaaatccacatga

SEQ ID NO: 67401 - DNA, 468 bp, Acinetobacter baumannii
atgccttttaatttttcaaaaaacttcattcaaaatttagatccagataaagatcaaatttggtattgtctaatcatgacacccatctatttatacataattactttattcatatttttaacttcttcaatcatccataaagatttttcttttgagaatctactaaatatccctctcggactgctagctattgcagctatttattacatattagtttttatacctgcatattttttacaattattcttgttgaaattcaatttccttaatttcttctccatccttgcaagtgcaattattctcacctttttaatacctaatatcttaatatttttttttcgagactcatgggaactaatgccattagagggcttatttttcttcagttgtttttctttaattttcgctattacatattggatattactacttaaaagtataaaaaagcagctaaaccatcaaatctga

SEQ ID NO: 67402 - DNA, 471 bp, Acinetobacter baumannii
atgaaaaaatctaattttaaaattctcattcaaaatttagatcccaatcaaagccaaattttatatagccttttaaaagtcccactctacttatttatacctgcctggcttctatggatctttaccataacgctgaatgaagggttcagtttagaaattctaaaaactacagcgattttgccagtattactctttgcggttgcaatgacttattacacatttgcttttatacctgcttacctatttcaactcttcttgcaaaagtataatttcataaattttttctcaattattactagtgcgatcatacttactacgctaatccttagtttaatgtacttagaatttgcaccaatagaaatgattattttctttagttatttttctgtaattttcgctattacatattggatattactactcaaaagtataaaaaaagcagaagaatctcaaaaccaaaattactcttag

SEQ ID NO: 67403 - DNA, 1230 bp, Acinetobacter baumannii
atgaatattcgtggagatattccacatgcaaaaattgaaaatattaatattccattaaatcgaaggaatttaattattactggtaggaatggaagtggaaaaaccagttttttaacgacattggaaagaaatatattaaataaccttgaaaaaaaagatcagcaattattacagtctcaaagaaatattgagagttggataaattatcgtaatactcttgcgaaaacatcggagcaatatattagtatatctaaccagatagaaagggaacaagaaaaaattcaattattaaataatggttttcaattagattttaatagctttgatgaattacaatcaaattatgatagttttaaagcaatttttagaagttttcctgctatgcgtatttcttcgatagatcatgcaacacaaaccacgtccctgatagaagaaaaaactattgcaaagcaaaatttcaaacataacttaggatcaaagcttgaacaacatcttataaatgtaaaaacatctgaagcttttgctaaaggtattgaaaaagatgaaattaagggtaagaaatttgaagaatggtttaacctatttgatacatctttaaaaaaattatttgaaaataataatgctaaattagttttttcaaatgaagaaagaaaatttcgaataactgatggtaaacttatctcatcttttcaagacttatcatctggttataaagctatttttgatatttatgccgatttattattaagaacagagttttttgacattacaccatctgaacttcaaggtattgttttaattgatgaaatagatgctcatttacatatctcacttcaaaaactaatattaccttttttcagcgaatcttttccaaatattcaatttattgtaagtacgcactctccgtttgttattacttcaacagataatgatactgtagtttatgacatttctagcggtgaattttttgaggatgacttaagctattattctcatgaatcaataataaaagagctatttcatgtaaaagaagaaaatgaaaatctaaaaaaactttcaggtcaacttttagaatttattgaattgaaagattcacccaaagacctaaatacaattcaagacttattaaatgaaattcataaaaattttgaaaaattatcagtagaactacaactccagtacatggttgctaaaaataaacttgctaaattaaaacatgagggaaactaa

SEQ ID NO: 67404 - DNA, 672 bp, Acinetobacter baumannii
atgttttcagttactcgacctactacttttcctaaaagtttaacaaaatctactaaagactatcgcgccgcagatgttgttgaagtacttcaagatatattttttgcaaaatgttatctatgcgagagacaaggatttcctgatgtaaatatcgaacaccgtgaccctcatttaggtgatgatacaaaaaaatatgactggcataaccttttttatgcttgtgtaagatgtaacagtattaaaggtgatacacatataaatattttggattgttgtcaatctattgatgtatctcaagcaattgaattacattgccctcttgtcaataatgaagctcataaaataactgtacaattaggaaatttacctaatagtttagagatttcatcaactattgaacttcttaacagatgctttaatgaaacaaatactgcattaagaggtataagtagacattcattaataaaagaaattcaaaaatatcaaatccaattgtccattttgaaaaataaactactttatcccgaattacctttaacatccaaagcaaaaactgaaattctcgaacaacttaaagctatgtgtgacaaggaatttccattttctgcattttggaaatgggctattactcgtgatgatgacttatctaaaatagtaggtaatgtattttaa

SEQ ID NO: 67405 - DNA, 1077 bp, Acinetobacter baumannii
ttgaaaaacgtttgcttcttaattggaaatttgaataattcgggtggcacagaacgtgtcactactttggttgcgaacgagctttcaaaaaggggcgggtatacaatatcaatcctaagtttggtagatggcttaaccccttttttttctttaaatgaaaatataaaaatttattctctttataaaagaaaaatttcttttaagagaaatttttttggtgcagtatggtctattagaagatttgttacagagcataatattcatactttaattgttgttgatagtatttcatgtgtttttactgttccagctctatggctcaaaggtataaatcatatttgttgggagcattttaattttaaaaatgataataatgttaagtttagaaaaattggaagagaatgggctgctaaatactgtaactacattgtgactttaacttctagagataaaactttttggcaagaaggattaaatagtattgatgcaaatttgattaatattcctaatccaactagttatgaaaataattcttatagtgcagacataaattcaaaaatagtgttagcagttgggcgcttaactaaggttaagggatttgatttgttgataaaaacttgggaaaaagtttgtaaaaacaataaagaatggactttatatatagttggaggtgggccagaagaggaggggttgaggaaattagctgaagaattaaaaattagtgatcgaattatatttacaggaatgacatctgatgtttctaaatattatatgaaaagttccttattttgtctaagttcaagaaatgaaggtttacctatggttctcttagaggctcaatcttatggactacctatagtatcttttgattgtgatacgggacctagtgatttggttgaacataatgttaatggctttttagttcctccagaagatatatcttctatgcagtattatttagaaaaagctatgagtcttgatgatggtaagtattccgaaatggttaatgcatctatcaaaaatattggaaaatttagtattcaaaatattgtaaatgagtggtgtaagattatttaa

SEQ ID NO: 67406 - DNA, 975 bp, Acinetobacter baumannii
atggtcttagtaaagaaaagcaaaatcatgtctatattttatattcttttgagtattttatatggctatatttttattttgattcctcattcctactttaaagatcgtgttaattatttatcttatgctgagaattatgacttttttattgatcttaaaggaagtgtttttagtttagatggtgaaattttctttttatatataaacaaatttttgtcattgtttttttctccagaaggagtggtttatttttttgttttttttataaactttactttgtgttttattttttttagttattctagaaattttttattaggtttattaggacttttagccttttttttattgccttttggtttttcttatcagttggggtctttgaggcagagtttagctgtttcgatttttttattagcagttttttatataagaaaagttaatataaagttaattttagtatctattatacttggctttattcatacctctttttttattctgacaccatttttagttgcagattattttttccttaaattttttcctgtagatcgatggttttatagaacagggttgcaggctttaattgctctaatcttcgggttgttactatctgtaatttctaaaattttttctgttggtaaattggagggatatttacagttagatacaggttttggattgttttttattttctttattccttttttaattgttaatctctatagatactataaattgaaacaagtggattattttgtttttttatcaattgttggtgttttagcttatacaattttttattttttatcccctatcgcaggaagattgattactatttttattccatttatatttatatcgataattaaaaagatggattttttaaatatttttttattgttgtatagtatttttgttggtgggtggctttttttaaatggtggctataccttgattatgaatatttag

SEQ ID NO: 67407 - DNA, 1089 bp, Acinetobacter baumannii
atgaagctattatatttaataacagggttaggcatgggtggagctgaaaaagttgtagttgacttggctgataatatggttaatttaggccatgaagtgacacttgtttatttggtaggtaatgctgaggtggtgcctgtatcttccgaaatagatctaatttttttagatttaaaagctaaccctatttctgcaatttggaaatttataaaaatattagaatctaaaaaaccggatgttgtgcatagtaatatgtatcatgcaaatatattttctagaattgcaagattatttaagcctttcccaaaattaatatgtacttcacatagtgactttgaaggcggtcgtctaagaatgttagcttactacattactagtcctttaatgactattgctacgaatgtaagtgagcaagcaaaaaataaacttattcaggttggtgcagtcaagtctaatagaatgttggtaattaataattcaatagatattaataagtttaaggtcaatgatacttttagggaagaatatagggcagattttaatcttgaagataaagaaatttgtttgttggctgttgggcgttttcaccctgcaaaggattactcaacattaataaaagtatttaaaaaattaagtcgtgaatataataatttacgattgtttattgttggagatggaagtttaagatcttctattgaagctgaaataaagtctttttctttagaggataaagtatctctattaggcgtgcgacaagatattcctcaattgatgaatatgtgtgatatttttatttctacttccgcttgggaggggtttggccttgttttagctgaggctatggcatgttctaaaattgttgtagctagtaataattcaggttttttagagatcctcggggaaaagtcaccttatcttgcagaagtaggtaatgttaacagtttttataatattttaaagcaaattatttctaaagatgagaaagatttggctgcaattagaagtgctaataggcagattattgtagagaactatgcttctcacataattatgaagaaatggttagatctctatattgagaataagtga

SEQ ID NO: 67408 - DNA, 252 bp, Acinetobacter baumannii
gtgaatattgaagctaataaggcctatcaggtcgactatgaattaaacccaaacaatagaaaaggctgcgcattttggattattgatttagaaacaaaaaaagcagttacagagttagttgatggagtagagttatggcgagcgaatcctattacttataggccaattcagatttttttagaaccaagacctagtatgagtaatagctatactgttcctattacagtaatcaataaaattgggcataattaa

SEQ ID NO: 67409 - DNA, 2226 bp, Acinetobacter baumannii
atgatgaaaaaattaagtgtaaatttagagaattgctttggaataggtaagctaaatcatgaatttgatttttctaaatcaaattcatcactgatatatgctccaaatggcaccatgaaaacttcatttgcaagaacctttgatttactttcaaaaaatgaccctaaaaatattcctagagatagagtatataaatctagagcttccaaatatgaagtcactgttaatggcgtagaaattgagtcaaatagtattttagtcattaactcagaagataatagttttgatgggtcaaataaaattagtagttttttagctaaaaaagaacttaagcaaaaatatgatcaaatctataaagaactagatgaaagaaaaaatgaatttgtaaaaaaacttaaaaatatttctcaaagtagtgactgtgaaaaagaaattttaaatacattctcagatatttcacaaacatcattatttgaaattcttagtactataaaagatgaaattaaaaatgattatataaaaatatcatttaaatacaatgatgtatttgattcaaaaggaaaggttttaagttttattgagaaaaataaatccatattagatcagtatatttctaactataaaagtgtagtatctaaatctagtttctttaaagaaaataacagtggtacctttggtacatatcaggcaaatgagattattagatctatttccgataatgcttttttttatgctggtcacacttttgttttagaagataagacagtcataagtgactctatggcattgaaaaaaattgttgattctgagctagaaaatatcttgaaagatgaaaaattgaaagcagctttcgaaaaagtagataaagcgatttcaaataatattgagcttcggaattttcaaaaagtaatcgaaaaagataatttaatattagtagagctagaaaattatcatgattttaagaagaaagtatgggtttcatttttatctgaaattaagacagatactgaccttttaatcgagctttatctcgataagaaaaaatatttagaagaaatcatccaagaagcgaaaaaagattcagacatttgggatcgtattattgatacttttaattctagattttttgtgcctttcaaagttgttttgagcaataaggaggatattattttaaagaaggacacagcaactttagatttcctttatgctgatagaaatgatgaaccggtcaatcaagataaaaatagcctgattgatattcttagtaagggagagcaaagggcatattttatccttcaatttttattcgagttagaggctagaaaagctagtaattcctcaaatttattggtgttagatgatatctctgattcatttgactacaagaataaatttgcaattattgaatacatttctgatctaacagaattagacaactttaaaattattattctcacgcataattttgatttctatagaacagttgcttcaagattaaacttacatagatcagtaatttatatggcaaccaaaaatgatcaaaaagaaatctttttacaaaatggccaatacttcggtagtgttttttcgcatcttattgagaaatatcaagaacctgaaatctttattagtcttatcgcatttgtcagaaatttaattgaatacagcgaaactcagaatagtccagattttttgacattaactagttgtttgcacttaaaagatgatagtaatagcttaattgctggtgatattttcgaagttttctcaaaaaaaataacttttttgaatggtaaaaacatcacatttagcgatgaaaaaatgcttgatttaatttaccgtacagctagtaatatagctcaagatccaaacgttaatgaaatccttctccaaaataaaatttcattagcaattgctattagattaaaagcagaaaactacttaatttctaagttaccaaatctagatttacagaaaattaaatcaaatcaaactagtgctttatgtagagaatatattaggctctatcctacatgtgagtatctaacattaattagtaagatcaatttaatgactccagaaaacattcatatcaatgcttttatgtatgagcctctaatcgatatgtctttacaccacttaattaaattatatgaagaagtatgtgttttaaatccgcttaatccactttcattaggtcaagctaatgcatatacagcagtttaa

SEQ ID NO: 67410 - DNA, 642 bp, Acinetobacter baumannii
atgaaaatgagcaaaacaaaaattacggctgtagcttttgctttattgttcacagccaatcccgctaaggcttgggacgttgtttttgacccgactgccgttgctaacatggtgaagcaacttgctcaaatgaagcagcagtatgaaatcatgaaaaaacaatatgaaagcacaacaggtaatacaggtattgggacttcaggcgtaaagactgttactgatgttgtagctggttcatggcaagacgttgtttccaatcaaaagtctggtgctttcggcaatgcacaaaaaacttatgacaaggtgcttactactatcggcaatgaaggcatgaatcagcttctaagcaatgatcagtacaagcgtagctataacactgttaagacaggttttgccttcagtgatgcttcttataatgctttgaatgaacacgttgcaaaccttactactttaaagaataagatcaattcgactaagaacattaaagaagcacaggacttggctaatgccattgcaattgaacagggttatatcaactctatcggtgcgaagctggctgcggttcaaactaatttagcttcaaacaatgcttcatcaggtgtcaccagtacacaaagttttaaatcatggtttggtaactaa

SEQ ID NO: 67411 - DNA, 2712 bp, Acinetobacter baumannii
atgagcaaagccactgaaaaacaggaacagaaagaccttttatttgcgggtcttgcacgagtggcaagggtcgtaaatattccagtagatattttcgctatcttttttattgtcggtggatttctcattactatccttgccttgctaggaaaagtaatgactggcttcttcatccttgcggggatttatttagtccttaatgcactgacctatgaagaagatagagggattcaatacctacttttttcactgaaaaggaaattttctagaaaaatggttttcggtggttatagctttgaaacccataccaaaaccaaagatgagggaattgaatatgatcaaaaacaactagcgagtggtgaactaatggaagtgagcaatttaccctatctgacaccaattgacagccacaatattaagctcgtaaacggtgatatttttacaatcctgaagatcacaggttttgcatacgaaaccaaaagctatgaacagttgaagatgcttaaacgctatcgagcagaaatgttcaagcagctcggtagccgttttgttgttagtgtttactatgatcgacacgaagtagaaacagaaataccagaacctcacggcaatgaattttctgatcacttccaacagaaatattatgaaaagctaagtcaggaacatatgttccaaaatgacatttatatttctctccttgttcgcaaagctaacccaagtgaaccgccatttacccgcctaaaaaatacattcttcagagtagataatgaagctcaaatgctcgcagaattaagcaatgctgtaactatgtttaaagagtaccttcaggatgctaaccctcgtcaattgggcgtttatcacaaagatagtgtgatgtattccgaagcggttaattttttgggctacatggtgaatttagaaagagcagagatacccctatacccgacagagatcagaaactatttgggctttgtccgtaaagtatttactccggatggaacaattaagttttatcatccaagtggtgaagtcaccgcaggcgcgatttacagcctaccaacgcctaactaccctgaacataccgatcacacgatgttagatgagtttttgaaggtagatcatcctctacttatttctcaaactttcatgatgatggacagaagaaagtctatcaacatgagtatccagcgtcagaaccagttaaaaaatgcgaaagataaatctgaatctcaaattgaagcgattaatcaagctgtagatgatttggcttcaggtcgcattctgaatggcatctattctcttaatgtacttgttacagctaagaatggtgcagcctttaaagatgctatgcagaaaactagtggggctttccagcgaaatcacatgctgcctaaaaaggaagatttaattgctgaacctactttttactcaacgttaattggtaactatcatttactccaacgtcctgcaacgatcaatacaactaactttgctggctttgccagtatgcacaatagctctattggtaaaaaggaaggcaaccattggggcgagtatgttttacagttaaagactgaaggaaataccccttattactttaatttccatgagggtgatgtaggtcatactcgtattacaactggtactggtggcggtaaaacaactttaattaatgctttgctcacagcagcagataagtttaagccctatatttttcactttgattttgaatattcagcgtcagtttggattcaagcaatgggcggtaaacataccgttctaagtgaaatggtgccgactggttggaatccgcttcagttagatgacaccgatcagaatagacttttcctgaataaactttttgcattcatggggcaagactataacgaggctggaaacccgaaaccattatcagcagcagaagaaaacaaaattaaagaagttgtagaagcagtttacagctatgaaaaacctctccggagattaagaaactttatctcactgtttggcatggcagagaataataaccttgctgaacgcatggcgaaatgggcgaataatggtcattttgccaatatctttgacaatgagggtgacaatttctcaattgaagatgctcgtatctttggttatgaaatgaaaaatgtcattaaaaatgatgtggtgctgggtgctatgtctatgtatatctttcaccgtattgatatagctatgtcagagggtcgtccgttcattgtggtagttgaggaaggtcagcgttacatcagcaacccgatcaacttagcttggctgaaaattatgttgactacataccgtagacgtaacggcatgatgatctttgtaacccctacccctgaagtgatcactaaggatgacgatctgatcgggcagtttaaaacctcaattctattgccgaacgataaagccaacccagcaacgtatatgggtaatgatcaaaattcaggattaggatgcacacaaacagaatttgaatggattgttaatacaccgccttacttacgtcagttcatgattaaaaactctcatgattcagttattagtaagctcgatctaggaaatatgtcagaaattatcccagtattttcaggcaatgaagtacgccacaagatgcttgaagaaacactaagtaaaaatgaaaacttaacctactcccaatgggttaatgaatttaatgaaaaggtgaaatcatga

SEQ ID NO: 67412 - DNA, 294 bp, Acinetobacter baumannii
atgaaaaagtcgaattttattaaattggcacacctccctgtagcgttttttgcattgatctttagccaggtggcaaacgcagcttggggacaaaagtttgcttcaaagctgaactcatttaatgacgaattagtaattgcagcagcagtcgctttcgtaactggtgtgatctgtttagctctcacaatgatgggcggtggtagcgagagagttaaacgctggggcgttggtttggtaatcgctggcattctttgtttcattgcccctgatttgggtagcttcttcttcagctaa

SEQ ID NO: 67413 - DNA, 714 bp, Acinetobacter baumannii
atgttcagaagattaataatcagctttatttgcacaactcctgtgctggtaagcgcttcaccttatgaggatttaatttacaagcattctgtagctaacggtttagaccctaagttagttacagcaattatggcaagggagagtgcatttaagcctaatgctcgatctcccaaagatgctagagggcttatgcaagttattccatcaacagcccggatggtaggcgttgaccctagaagattatttgaacctgaacaaagtattattgctggtactcgttaccttgctttcttaaacaaacggtttaatggcaatctgatcaaaatcatagctggctataatgctggacacggtgcggtggaaaaatttggcggcattcccccttaccgtgaaactagaaactacgttacttacgtcacaagtaaatatcaaaaattgctaggcggtggggcattacagaactttaatgccccccaacccagcccgatcttccctgaagctaaaagaaaaaatgacatggttgtcttagcttcttggcagcaaaatcaataccccgactattccgcagaatacccacaagatcaaagctatatcgcacaagctgaacctgtgcgagttcgtataaataatcagccttcaattcaacagcctgcacaaccaacctcatttgtgcagtcgctcaattctaatgggcgttacgtccaagttttttaa

SEQ ID NO: 67414 - DNA, 201 bp, Acinetobacter baumannii
atgaaacgtgaacaactatacgtgagcgatgaatttgcagctgagtttgacgagtttttcttacgctataaacgtggtgaattgaaagttcctgaagaactacagaaccgcagattgacaagaaatttaatattcctgatcgccctcgatcaatatttcaaagagaaacataatttttcaaatagtccttttgaggactga

SEQ ID NO: 67415 - DNA, 1521 bp, Acinetobacter baumannii
atgatgaatgatcaaagccaaaagatttttaatcagtctatcctgattgttattttttccgtgatcacggcatgggtagtattactgcctaagttttttattatccctcaagaacagaaggttaaggctattctgtatgccttgccattgacctttaaaacgcctttatacgttttgattctcttagtggtattggtcattagctgggtgatcgcttggttttattttcagaacaataaaaccccttttgctggtgaacggtacgttaaagttttgcggggcttacagctagttagcccttataaatttaagaaactgacgacagaaaaaggctatcagattcgtttttgtggtatgccagttccgaaagatttgaagtacaaacacttccttttaactggtggtactggtcaaggtaaatccgtttctattagtgatttcttagattcttgcgtatctgatgcccgcagtaaaacccgcttaattgttgtggaccctaacggctcatatacaagtttgttctataaaaagggcgatgtgacttttaaccctttcgatgctcgatctgtaagctggtcaatcattaatgaagtaagaaacccttatgatattgaaacttactcagctacattgattccaaaatcttccgatgcgaaacatgaaaactttaatagtatggctcgtacaattattaagtctactatgtctaaagttctggaaatgccagacatatcaaaatcagcaaaagcacaattgttcttagatacgttattaaactctagtgatgatcaattaagagatttcttgatgggtacacctgcatttagtctgctaggaaatactgaactggtcgggacgctgcgaagcatcatcacaacttatctcacgccacatacccacaattcaattggtgatttttcctttagagattacttaaaagatggtgaaggcaatatttttattacttggcgtgaagatcaattaactgcattacagccacttgtaagctgtatcactgatgttgtttgtagctcattactttctgatttcgacaactattcagactttgttttttgcttagacgaactaggctcattaaatcgactttcatacttggaagctgtgctgacgaaagggcgtaagcacagacttattgctttggcgggtattcaaagtttagcccagcttataacaatctatggcgacaaattctcaatcacgctaaggggctgtttttcgtcatttggtgtatgtgccgtaaacgctcaagacacttataccccccaagaatatgaaaagtctttcggtgcaatcgaagtattacgaagaatgaaatctagtcacaaggatgcaaaaagtgagttggtaaaagagaaggaaaatgttgttaaagctgaagaaataagcagccttcaaccacttcatttttatttaaagttttcaggtcattacccgcctactttagtaaaaatgaagtaccgctcttatgataaagttgcggcttcttaccaacaaaactga

SEQ ID NO: 67416 - DNA, 1248 bp, Acinetobacter baumannii
atgaagataaaaaaattatcacttctaatattagttggattaagcagtatcagtgttgcgtctaatcttccttatcatgatgtagtcctttctgcttcagctaaatatggttatgacccgcttttaattcatgctgttatcgaaaaagaatcttcacatagaaatacagcaagatcaggtgtcggggcgcaaggcttaatgcaattaatgcctgcaacagcaaaatctctcggtgtatctaatcctaatgaccctgttcaaaatgtgaatgctggtactcgttaccttaagcagcttaactcgcaattcggaaatatgccccacgctctttatgcgtataactgggggatgggtaacttacgtgcttatctgaaaggcactaaaaaagtaatgccaagagaaacccaagagtatgtaccaaagatcgcacagttttataaaaactatggtgggtcaggtaactatttcggtggcaatgttattaaaggcactaataatgctcaaggcaagccagctacaacggcaattgaaaatgaaaactccaaaaagattcgtgaaaagctggaagtccaaaatgcttgtaagcctgtaaaactgcctgaagccgaacaggtagatattgattcacctatcactctacctcctatccctccggttactggcggggcggggaaaactgtttttgaccctactaaaaatgctgatgctgcattacaggtagaggagttaatgcgccagattcaagtattacgtggacaatatgacagcattacaaaaggtttagcgggtcttggtcttttaaccaatgtcgctcaacttgctggctttgaactgcctaatggcttctctgctgaacctacaaatatctttaatacccctaaagaacaaaatgcctataacgagcttcaacgtcagatcgctacggatacaggcgtttatgccagtaaagaactagggaagatccaaaatctcactgctgcaagagttaataccgcttatgtggaagcagaagttgcttggacacaagttaattgcagttttgaaaacctcaagtctttggctgcggtcaataccaacactttaaagcagtcaaaagatttagcaaatgcgcttgctgtagagaacagcatgatcgttgccaatcaagctaagttaaaagccaacatgcttatgatgcagtcgagcatggagagctacaaagtagcttctcatcaggcagtacagaagtttttggggtcagtgaaatga

SEQ ID NO: 67417 - DNA, 459 bp, Acinetobacter baumannii
atgaaaaaaattacccttgctgcttttgtctttgtaagtctgaccgcagccgaagcacagttaccgcagacttttactcaagtgcttcagtcttttgctcaagataatcgcttaatctacattcctgaaacccctaatcagggcgattacattacttataaattttctagtgatgccagttgtcaatctgaaagctgtgccgatctgaaagtctattacagcattgaccccaactgtgtgcctgccagtgttggtttatttggtgaactacctgtacgtattccaggtgatgcaaaagccctttttatttctcccactatttctgatgtttctagccaagctaaggactttctacgtgttcaagttaaaggtgggtgctatgagttttctatgggagaaaaaggctcacattttaaaactctagtggatttggctaaccgtttggctgctgctaagtaa

SEQ ID NO: 67418 - DNA, 327 bp, Acinetobacter baumannii
atgaaaaaaataatattcatgcttagttttttagcttgtgcagcttgctcatccaaaggcatagatggcgaatataaccgtattgaacagacagcttttgaacaaaccaacggaatgagtagcggtctgatcgttgccgatcaaggttccaaagtcactttaaaaaatagttggggtgatgtggctttaaacacagttaagaaagaagaaaaactggttatccaatatcaaaaccaagatgcctttctgctggaacagaaaggaaatgtgatcacgctgactgatgtagataatcctgatcagacatacaaatttaaaaaggactaa

SEQ ID NO: 67419 - DNA, 1032 bp, Acinetobacter baumannii
atgtctattcttgtccttaaagatttagagaaagcctttggtgaagatattaacaatgatgatattactgagatttcagtaaataagccttgtgagtatttcgtggctatgaaaggcacaagggacatgattaaaagaactaatcctgatctttcttatgcactgttaaaacgtcttgctgaaagcattgcgactactactgaacagacaatttcagaagcccagcctttgctttcggcacagattccttcacctactcatgaaggcttatatttccgtattcaattcgtgcgtgaccctgctgttactacagggtctatcgctttatctatccgtaaaccaagtgttctaagcctgccatacagtgcttatgaatctatcttgaatgcagttgaaccgttcaacgctatttcttctaaagatcaagaattgcttgatctctatgaaagtcgtcaatttcatagctttctgcataaagcagttgcctatgaaaagaacatcattatttctgctcaaactggtgcaggtaaaaccacactttttaactctttaattcatgatgctatccctttgggtgaacgcctaatcacgattgaagatgctaaagagctacgcccgccacatgaaaataccttgcagctttactactcaaggggtggacaaggtaaggctaaagttactgctcaaacgcttatggaagcctgcctacgtttatatccaaaacgtatcttacttggtgagattcggggggcagaagccttcacttatttgaacttaatttcttcaggtcatgatgggtcaatcgcaacccttcacgctaatgacccgcttaatgcaattgatcgtctaactctcatggttttacaagctggtactacgctgacaagtgatcaggtcaaaatgtttgtaaaacaaagtatcgacattatcgtccaactcggcagaacggaaactggcggttatggctgttcagctatctacttcaaaacttttgaggatttgaaaaatgaaaaaaataatattcatgcttag

SEQ ID NO: 67420 - DNA, 1353 bp, Acinetobacter baumannii
atgactaataaaaatgaattcgatacccctgataacttcagtaccaatgatcacgttttttatggtgatgagaaaaaagggaaagatgattttgagatcaaagatgatttttctgaaaagtctaaaacgtctgtaaaagacatggataaggcaaagttaatcaaagtaggtgtaatcttatttgtagtgattggcttagttatttctgctgtctatttcaagctgcaaaagaacaaagaatcacgacttgaatcaggtgttgaaacggctgtcgctaaacctgtcaccaatattgaaggtacaggtctaagtgaagatagattcggcttcggtggaccacaaccgattccagctttaacagaaccgaacccactgccaacggctaatgaaaagtcacctgaacagctagaaatggaacgtcaattagctgcacagcaacaacagcttgcaatggaacaggaacaggcacgacaacaagccattgcacagcaacaagcccttctaaatgcccgctataagtcgggaattatggttactggtcaaagtcaaagtaatagcgggattagtcctaataatgctgctggtgatatggctggcgtaccgcctgaacttatgccgttatttatgagtatgcaatcatcccaggctaacaataacggtggtgcaaatacttctaatgtgaaccctcgtattgcaaataactctgcatcttctatgggtggtcgtttcgattccagcactactaatcagaaagcccctatcgctcatgcaagctataacgctgaccgcagactactcattcaacagggcaagattgttgatgcagttttagaaactgccgttaaaagcgatctgccaagtaacattattgcccgtgtgacaacagatatttacggtgaacaaggtcgaaatcgactgctgcctgcgggtactcgtctttttggtcagtattcctcaattgtaaatgatggacaggctgaagttgctgcggtttggaatcgtgcaattactcctaacggtgttgagatcatgcttgatagccctagcacaaatgggctgggtgtcgctggcttaggtggcaaggtaaacaaccattacggcagaattttcggcacagctacgcttttaagtgtgatcggtgcgggtgtaagcaatgtaggtgtaagcagtagtgatcaaaataatgcgtcccaagcgtaccgtactgaagtagctaactctttcggtaatcaggctgatcgtgttctgcaacgcaatctttcaattcctccgacaattacagtgccacatggcacacgtattaaggtcttagtcgctaaagacttggatttttctacaatctttaatcaataa

SEQ ID NO: 67421 - DNA, 738 bp, Acinetobacter baumannii
atgaaaaaaacgctcatctcaatactacttgctgcaacgtgcattgcttccgctccaagttttgcaaagcaaatccctgtcggcttaaaaactgatggtcgaattaaaactgttccatattctgaaaaccatgttgttgaactttctacaactttcggcattagcactgtggtcgagtttggaaatgaaactatccagactgtagcgtctggtgacacgattggctggcagattatcccgcaggggaatcgcctttttgtcaaacctgcagaaaagccacaagcgggaatgaaccgtacaaacttgaccgtgatcactgataaacggaactactacttcaaccttttcaattcaagccagcctgtctatgtacttcgttttaactatgcagacgtaaataaaacgaaccgtttaattgctcaacagaatgcccctaaacgtgcattgggcgaactccctatgacaagtatcaagtggggcatggatgccactcatagcaaatcaatcaaggtcttgggtgtttctgatgacgaccaatttacctttattcgtttaggtaaaaattcacctcgcccagccgtttatgcggtgaacggtgaaggctatgaagaactaactaactcacgccaagagggtgacgtaatcgtgattgaaagcgtgtcggatgctttcactttgcgtctaggtaatgaatatgtctgcattctgcgtaaacctaacgtgatcggagctaaataa

SEQ ID NO: 67422 - DNA, 786 bp, Acinetobacter baumannii
atgctgcctcaaactaaagatcagctagacgctcaatttaaagcccttcaggaaagcgttaaaaagagtgaaaaccgtaacggcaaaattacactgtggtcgctgggactttgtggggttttagcagtaggaaatattactcaagcaattgctaactacaatctaactccattaaaaacaaccgaaccgatcattgccgtgattgattccgaaacaggaatcatgacccaagttgaacgttttgattcaactactgaccctaagctaatcgaaaaacttgttacttcttacttttgggacacgatttctagccgatatggttattacggcaaagtcggaaaagatcagcttgcagctcaatacagtaaaacttccactttcttagatagtaaagatcgctctgattttgagaatgaaattagcggattaaatagcaattcaccttacaacttactcggtgaatcaggctctatcacacctaaaattatttcattgaactttctaggaaataacaaggtacaagcgaatttcaaaactaccgttgttaagggcgcacaagtacagcaattcagctacacagttaccgcagattatgtgactgacaacttcgatgacttatctgtaaaagatcgctggattaacccgttcggggtcaaatttaagaattggaacttaacacagaactcgtctaatgatgccctgattgcaccgccaagcagtccggtacttcctacgcctgaatctgtgtctgcccctgaatctgcaactgcacaaacaacaaattaa

SEQ ID NO: 67423 - DNA, 1077 bp, Acinetobacter baumannii
atgaaaaagatcatttatgttttctttctcttgtttagcttcataagtcttggttctgcttatgctgaagattactacactaatcctcaagacttagggcaggggacagaaacagtcaacaatgccgatgctggtactggtgctggcaataacaatattgctgattcaatgtcccaggtgacgcaaaacggaatgcaagagcttgattcagtcgttgatagcttaatcacagatgtagataaaaatattaaagacaatattcaaggctactaccaaaaagtaactgctccaattattccagtctttgcaggctttattgtcatttggctgacctttcaaggcatgaaaatgatgctgggtatgcctgttgagattcagcaagttattgcgactttcgtgcttatgctgctgatctggacaatcgttttttcatgggatgccttctttccttatgtagctgaagttttcctagatgatgtgccgaacctgatcactgaaatgacaggcaccgattccaaaaccacacttcaatcatttgtttctattatttttgaagctatcgcactggcttttaacaacattgacacaggcatcaccaacgttgtgagtggctttttcttcgtcctgatttactcctttatcttcgggctggcttgtctagtttgtgctttgttcttcctgatttgggtcatttgcaaagtaatcatcgggattttaattgctgttgcccctatttttcttgctgctgcaatgttcccagctactcgtagatatgcgaccaactggcttcaagcggtattaactccaaacgtggttttactactactgatcgtaagctgcgacctagttttaacttcagtagtgaagggtatccagcacttaaatgataacggcagcaccttcacaggggcttttgtcatggtcattgttctgcttgttgtagtaggtcttttcgcaattattccaaaaattgcaatttctcttgtcggcagcggttttgaagcttcaaccagtgcaactacaggtgtaaccaattctgcgactaatgcagttaaacgctttgggagtaaacgataa

SEQ ID NO: 67424 - DNA, 420 bp, Acinetobacter baumannii
atgaaagtcagtaaaaccattgtcgcaccttcactgctgctttcccttagcttggctatgacagggtgctttacttctaagcccgatatttcaggcgtatggattcctgaacacacgcctaaatcaacttttttctatgattactatgtgatctctgaagctgataagcagggcaattttgcagttaagaaattcagctatcagattcaaaacatgaacgcttttaatcctgcaaaacttcctaaactaacaggagaatcggcaggggtcttaactttcacaaaagatgatacttactgctctgaaggctctttaacgacttgttttatttactctgaaggtacgctacgtaaatcagattcatcaaaagtattcatattgtctaataagaatcctcccgaaattccagtgatccgctaa

SEQ ID NO: 67425 - DNA, 369 bp, Acinetobacter baumannii
atgaaaaagtttgcacttcctttgatcgcttcagcgtttcttatggcttgttctgacgaacctaaacagcctgaagtgaacggaaatgattacgttgggtcatgggtgaatcctgtcggtcaacaatctcaaaaccccaatgacgtaattattaatgaccgtgtaatcattgcgccaagtgacctagaaggcgtttttaaagtttcgatactggctaaaggtgttttcactgacatggaatttaagcctgaaaacggcttgttatgtgctgcgaatgatgcctgctttcagttagttgatggaaagctgaagctcggtagtgaagcgggtattttgacctatgagcgagaacaatatgaaagtcagtaa

SEQ ID NO: 67426 - DNA, 192 bp, Acinetobacter baumannii
atgaaaaaaatgatcattacaaccatctgtatattgagcattacatccttaaccgcttgtgcaactaagactggctctcaaaaaggattaaaaaaatctccatgtgcttgtgtattccagtcattaccaagtgcagaccttcacaaaagtattgacgctatcaacccacttaacgaaggaagcccagcatga

SEQ ID NO: 67427 - DNA, 255 bp, Acinetobacter baumannii
atgactactatcagaagaagtaccaaaggtcttactcgatcaacaatgatcggcaataagaactcagtcaaagaagttgtaaaagaagatcgtttccaagctcgaattaattttgaagataagcagaaactcattaagtactgcaaagacaataatctttctcttacggattatctgatcagcacaatggttgataacggcatacttcctgaaagcagacgaccagctacaaaagaaactaaccaacctgaataa

SEQ ID NO: 67428 - DNA, 705 bp, Acinetobacter baumannii
atgaatactaaaacagaaaaattatcgaaagtaatcgccctggctaatcagaaagggggtgttgctaaaaccacaacctcaattaatttagcatttggtctgtcgctgcgtggttatgatgttctgttagttgatggtgacccgcaggcatcttcacttgaatgggctacagtacgtgacgaagctgatattgatttaaatatgactgtgatcggtgtgcctaaaaccaacttggctaaagaagttgccaaactgaaaaccaaatatgattttgtcattattgatggtgcaggcagacagtcagaattaacccgattagccttagttgcttgcgatattgccattgtacctaatactacctctccacttgatgcgtgggctactaaagcgactatcgcatccattaatgagattcaaagctaccgtgatttttctgcttacttcttacttagtggcgtgaagaagaacactaagatttttactgaagtaaaagactggttagctgaaacttatccgttgccgatcttcgatacagttgttgagctaagaactgcatattcccgcagcttgggtgaaggtttaacagtctttgaatacaaagatgatagcgggcgaatggacaagaaggcgatcattgaagtgaatgcgttaattgatgaaatccttagccgtgaaaacattgtgcagcaagaggaagccatttaa

SEQ ID NO: 67429 - DNA, 390 bp, Acinetobacter baumannii
atgagagcacctaaaagcattgctactgctactagcaatgctcatctggcaaatgagaagtcacacgttgttaattcaatgaatcatgacaagattcagaaaatcgcaatcaatcccgacctgtataaaaaaatcgtgaaagtagctgataagcgaaaaatggtactggcagacattgcccgaactgcattagagttttatttaaatcatcctgaaactgaatacagcgaagaacttagcaagggcaattcaaagaaactgatctatacgatcaattacttgcttgatattaagattgataacttcaaagcgaactatggtatcaatcgaagtgaccagcttagaaatgctctatcagcttggttgatcagtgagaacctactcaaatag

SEQ ID NO: 67430 - DNA, 186 bp, Acinetobacter baumannii
atggaacaggaacgagcagccagcgttattattaacaatgatgttgatcagaagaattatgaatatttactgacgcaagttgatcaggtcgctattgaatatgcagtaaacgaactggcaacacaaaataaacgaccctacttgtccaatatctttaaagtgttagatatatcgccccgaaaataa

SEQ ID NO: 67431 - DNA, 948 bp, Acinetobacter baumannii
atgtcaaatgatctagtggttaaggataatgttttaattaatgcaagttataacctagaagtcacagaacaacgactaattcttttatcaatcattacggcaagagaaacaggacaaggaataacccctgaaagtagattaaagattcatgctagtgactatgcagagcgattcaatgttagtaaagaagcttcatacgatgccttaaaaaatgcagtgaataatttatttgaaagaaaatttacttttaaagaacaattagataacggcaaagaaattgtcgttaaatcacgttggatttcgcaaatttcttatatacctcacctggcaatcttagagattattttctctcctgcggtagtgccattagtcactagactggaaagacattttacaagttatcagttaaagcaagttgcacaacttaccagtaagtatgcaattcgactttatgaattattgattgcttggcgcagtttagggaaaacgcccattcttgaaatcagtgattttcgtcaaaaaataggcgttcaagatactgaatataaaacgatgagcgactttaagaaaagagttttagagcctgcgattgaacagatcaacaaggaaacagatattacggttaagtatgaccaacataaaacaggaagggtagtatcgggctttgagttcaagtttaagattaaaggggaagcagctagtaaaaagactactacccaaaagaaaaaggttgaggaactattctgtaagatcagtgataaacaggttgaaatctattctaataaactttcaaaacaacacgaattaagcgatcttgctggcaataaagattatgctgcattcgctatatggattggaaatattctaagagataaggacagcgtaagacctgaaacagcaaaaagaatatttacagcccttcatacattaacggactttaataagtaa

SEQ ID NO: 67432 - DNA, 228 bp, Acinetobacter baumannii
atgcagctagattttggttttcctgttgtcgaagattacgagcaagacagcaacgttaaatacacagttgatatttcccaccttcattacttttatatattggtcaattcttgtggtgtcctagaaaaaagtaagtctaagatacatgcaaaaattgacgactttactgccattctggaatgtgacaatgagcagattgcagattgcagattgcagatgaagtcttaa

SEQ ID NO: 67433 - DNA, 864 bp, Acinetobacter baumannii
atgaatctatatgaacaagttacaaaccaaatcattgaactgatggaaactgcaaccagctcacaagagctatggtcaaagatcggaagcactgatctatttgcaccgaaaaaccatgtaacaggcgacttctataacggcattaacattctgattctggcagcagctatgcagaaattcggctaccagcataatgaatggcttacattcaaccaagctaaagcaaacaatctgaaggttcgcaaaggcgagaaatcaacagtatgcgtattctataagccgattgaaaaagacactgtaaaccctgaaagtggcgaagtagaaaaagagcgttttgcgattgctaaacccttccacttgttcaatgttgcacagcttgaaaacgtcactatttcaaacaatgaaaccagcctagaaaatgaattttctaaaattgaagccggtgaaattatcttgaataaccttattgagaagaaaggcgcagctattcagatcggttcgagtgattcagcgtactacgtgccaagcgtggataaaattgttttgccagctaaagagcagtttacaaaagctgaatatttctattctgttctattccatgaagcaagccattggacaggaaataaaagccgtttagaccgtaatttaagcgggcgttttggctcacagtcttacgctatggaagaactaattgcagagctatcaagtgccttcacttgtgcgaaaacaggcattgtgaagcatacaattgaaaaccatgcctgctatttaaaatcatggttacaagtcctgaaaaatgacactaaggcaattttcacggcagcagcccaagcccaaaaagcccacgaatttatcatgaactaa

SEQ ID NO: 67434 - DNA, 285 bp, Acinetobacter baumannii
atgaaaacccaagtaagcccaaaaacagttttaaaccttgtagaaaatgttttgttgtcaaaacggaatgctacaaaggtgatgcaaggtatctatttaaagaaaagtaaagctgaaattttcattgttctaggtcagcacaaagcaatcactatcttttttaaaggacgcacagagttgtttttagaagctacacggcatgaagatatggacgatgctatatatcaagccaaagactatttaaagcgaatctatgagattctggatgaagtagcaaagagataa

SEQ ID NO: 67435 - DNA, 474 bp, Acinetobacter baumannii
atgaccgatttagttttattaaatgccgatgaaatccaagcagcaagctatgacagttttaatgcaattgacttaaagggatttcaaaccatgcaagatgcagatgagccacgttttactgtacctatggggctgatggtgttttattgggaatctgcgctttaccagtcagctagtaatctttcagattcatacaatggcggattctggaaaactgaaaacggattttttgagctacagactgatgaaagttttgttttagaaaatggatggggcagcacgtatgaagtgacagcaacagaattttcaatgattgctaatttgtatgcactttcgcacctggcaatggcaacctatgaatctaaaccagctatcaaccgcagagccgttttctttagtgactacatcaaacaactgatggacaaaaacagagggattttaaatacaaatgctatctatttgatgattgactaa

SEQ ID NO: 67436 - DNA, 324 bp, Acinetobacter baumannii
atgaatactaaattttcgcatcttgaaactaaactgattatccgtgacctactggaaactgtgccttttgctacattctcaagcccataccgaagcggggcatatctgatcagtaataaaaaatcgttttatgtatcatttggaaattgcgacataggtacagctaatatcatcactatttttattaataaagcaccttatgagttttactttaccagtgaacacggtaaagctgaaacggcatactttgaagcccttagtatttttcaaaagatcattgagtattactttcaatatcaaaatgcagatgaagatgaattttga

SEQ ID NO: 67437 - DNA, 171 bp, Acinetobacter baumannii
atgaaacctttttcatctacacttggacatacaatcgtacttggtaacaatggtaagacaagttcaggtaaatcaacaacatttgaagcaatcaaagcggatatgctgaaaaataaaagttcttatcgtgatattaaaatagatgatgtggctgaaataaaaaataaatag

SEQ ID NO: 67438 - DNA, 126 bp, Acinetobacter baumannii
atgaagacgcttagatattcaaatttagaaaagatcatgaccatttatactgaaatttctacttatattacatttcataatgcgactggtttaacagatataaataaatcaatggaagatttttga

SEQ ID NO: 67439 - DNA, 879 bp, Acinetobacter baumannii
atgaaatgggaaaatagagctatagctaagatattcaatagcaatgttcttaatagcattgctagaggtgatttttcatatctagaaagtcttcatgaacagaaaaagattgatatcaatggattgtcattaagtgatttctatgaaaaaacttatgagcatctagcaaaaaattataaaaatgaatatttatataagaatttgattataaagaaaatacttttaggtcgtcattcacttaatacagcgacgatgctttccgaatttagagtaggtttaaaaaaagcagattgcgttattctgaatggtaaatctacatgttatgaaataaaaacagattacgatagtttgattcgtctggaagaacagttagattcatatttacaattatttgatgaagcttatgttgtttgttccgcaactcacctacaatcagttttaaatatagccccaccgtgtgtaggcatattagtcttaaatgaacttaatagatttactcaaattagaaaagcgagtaaaagaacacaaccattaaatcgtggtttacttatacagtctttacgccaagaagagtataaacaacttgctgaaactcttattaatgatgaaataaatttaccaaatactttactttataaggagtgcctatctatttttgaaaaatatagtgatgaatgttttttaaacactaaatttatagaaatcttgaaaaaaactagaaaaaataatgatagactaataaaaagtttacctgaatcattggctaatgctgcaattagttataggtttagtaaaaaagaagcagataacctcatagaatactttaaaaaaggggaacctatacatgtattatccgattttaagaggaaagttaaatga

SEQ ID NO: 67440 - DNA, 267 bp, Acinetobacter baumannii; identical to SEQ ID NO: 60595

SEQ ID NO: 67441 - DNA, 357 bp, Acinetobacter baumannii
atgaatacatcagaacaagttactactactgatgttttaatcattggcgcagggattgcaggtattagtgcagcctatcacctaaaaaaacatcgaccaaatactacatttattattctagaagcccgagatacatttggtggcacatggagtcaatttaaatatccagggattcgatctgactcagacatgccctcttttggattcggctttaaaccttggacccatcaaaaagcaattgcccaagcaaatgtgatttgtgactatctacaagaaactattcaagaaaataaaataaatgctcatattaactatggctataaagtcaataaggctgaattttcatcagatgaatag

SEQ ID NO: 67442 - DNA, 900 bp, Acinetobacter baumannii
atgttatttgatctttatgacctttttgcaaaattgaataaaaatggtgggagaggtttatttatagtaggaatgataggtgctttcggaattgcattctacctatcagctctttatttttttgatgaccgtattgtttatttgaccgcatttagaaccttaataccatttatggcaatttttatatctgcaattataacaccattactattaaggtatctaaatgactctaaatatgaaattagtgtagaaaacaatgaggaattaggtttaaaggtttatgaaattgaagaaagattgtttgaaatagaacgattatcttttgataagagtttagttgaaagttcagcaagtgatagtggtgagcataaaaaagaaaatttatggaaactaatttcaaaatactcctatgaatcagttcagagagtaaagattgaaaaagaaagtttatctagaagaggtaatctaaatcttattataggtatgttcttaagtatcagtggaatagctgtactaggtagttcggtttttaactttattaatattaatgacttaaatgatttactaacaaaaatgattccaagatttttgtttgtaattttgattgaggtgtttgcttatttctttttaaatttatatagaaaaagtcttgaagatattaagtattatcaaaatgagttgactaatttagaggcaaaatatttgtctttgcaaacatcacttgctcttaataattataagcttaccagtaatgttatcgatcaacttgttaaaacagaaagaaactttattttagaaaaagaccaatcgacaattgaaattgaaaaagaacgtatcagttcaaacaatacgaataataccttactggtactgaaggatatttttaaaagtaaagtttga

SEQ ID NO: 67443 - DNA, 696 bp, Acinetobacter baumannii
atgggcatactggctgattatattggggagataaaaaaagattccgcgagtggttggcttgctggcgttagttatcaacgaccagaatatgcccttaaaagctcactgacttatcgctctaaaattcgacataagcaacactttcaggaacaagtcagcacagttccagctatccctttactcaatttagcttccgaccagaacacaactatagaaacacctcaatcagtcaaccttgagtttcaatctggcataacagccaataatttaatttatggatcagtgcgttgggtcaattggccgaattttaaaattgtttctcccttgatgagttcaggtaacgctacacctgttcctttagtggattatcaaacagatcaatggagcacaactttaggtctggcgcatatactgaatgacaaatggacattgatgaccgatataggacgagatagcggtaccggcaatcctgcttctacattaagcccttcagatggtttttatagttttggtgtaggtggtttttataatattcactctcatttatttattgctgccggcatgaaatacttaaagctgaataaagcaaaaattcagcaagttcaaaatggttcaggcagtttatttggacctttatcttcggtaaacaataataatgcagttgtttatggggtcaaagtaggttatcgcttttaa

SEQ ID NO: 67444 - DNA, 3546 bp, Acinetobacter baumannii
gtgttcaaaaataatatacacgactttttattgaatctaggttacgaaactaagaaattaccgtttcaatttgtaccagaaaagcattatcgcatcccaagcatcggaaaaagtcaaaaaaaccgatccactgacgttgttttgaaatccaatggcacgtatttaatttacgatcatgctactggtgaaagccattcattcaatcctgaatggtcacagatcaaagccgagcgtgatgcagcccagattgaaaagcgccgttttgaaattgagcagcagcgcaaagctgaagttctagccaaaatcattcaattcaaaacaaaagccaatgaagccaaaacaatttgggatcaggcccaacattgtgcagatcatccatacatggccgttgcaggcattaagccaattaatgcgcgaacaatgccagtggttagaacttcaggcggtcagacgttcactgatccgctaattattccattgtttgatgttcatacgcatgaaatcgtgaatctgcaattcatcacgccagatggggaaaaacggccattatcaggcgctcaaagtaaaaattattactttgtgattgaaggtacagagccgacaatttttgttgaaggttacaaggatgcttgcaatgtgcatcacgctaacggacggcgcgtcattgcatgtatcactgctgacaagatcaaagaggtctatccagtcttaggaaagcaacaggacgctattctttccgacaacgacaacaaagcaaagctcaatgatgatgaatccagaaaggttctctattcactgaagcagatcactgctcacgggaaaggtcataaagttgcaaccgaacttggtgcaaagttttatctagcacctgtacttggttctgatgcaggtagcttgtcgcatgatcagatcaatgcactgcttaatgataaagccacttcagagctgccaatttttgacgtttggtcacagttaaaagatcagcattgcggtattgatgcaaaattattgcttagtgcgctgacagatgaaaaagatgctcatcaatgcgccattgtggcttatcagtacatgattaagaactcggtgcatgttccatatagaaaaagcctaatcgagcttagaaacgaaatagagccgttttgcgtgggccgtgttcatcctgtcactttggataatattgttctatatgttcacaaaagaattgagttcatcaagacacaaggtctaacggcggtcacgattcaagattataaaaatcataatgtaattaaattagattcattggatcagtttaagccgaattatcgcggtgcgtacctaatcaaagcgccaacaggatcgggaaaaacgcaaaaagtcggacgacctttccgcaattggtgcgactcaagcggttattcattcttaacaattgcacatttgcgtagtttgatccgtgaaatggcttcacgtttgaatacagcccattatgacgatgagaaaaaaggcatagcagaagcgcgtaaaatcggtctggatgctgctttaagtcactcgattgaatcactgtctgtctgtctgccaagtctggcgaatgagctattcaagccatttattaagaactgcaagcatgtgttcattgatgagatcagccaagtgatcgaaactttcaacagtgacaaactattcaaaagaaccgacattgaacacgtttatcagttgctaaagatcatcattaagaatgctgagtgtgtcattgttgcggatgccaatattaaccaacagacgttggattttatcgagtcatgccgagtgggtgaaaagctgaatattgttgaggttgatccaaagaacgaaaacaaaacggctcacttgtataacagttttgcagagttgcagagcttcatgctgcaacgggtcatggtcgaaaatcaaaacgtatggattacatgcgattcaaagagccacgttcaaacgctgcaagccattctcaatgatttggacgttaaaaacattgcaattgtcgggaacgaaaacgtaaaaaaagaaacagccgaatttctgaagaatcccgaagctgaatctttgaattatcaagttgtcatttctacaagtgcaatcgcttcaggcgtatcaattgagcatgatcattttgattttgttgctggattctttacgggttcaagtgttcagcctactgatgcttatcagatgcttggacgggttcgccagtgcaaagagttccacatatacgcggatcagagcagacgctatgtgatggatgttttagacgcattacaaggaaagcaacaggccagtgcattagaaggatcaaaagctaaaatcacagagttctcattatttaaaacagaacttgaaaaggtacgtgaaacgcgccgttccaatttcgccaataatctgatttggattctggaaagcaaaaagttcgctgttaaacgtgtgcagcagtttgatacttcaggtcatgcagagatattcaagtacaccaaggccaagatcaaggtggatcatcaagaacggattaaaaacgcttacaagattgatgcagatacagcgcaaagacttcagcgcaaagacttcctgtctgatcctgaagcatacgccctacaagctcatgaaatgcgaatgaagttaggacttcagcatgatgcagagttgaatgatcagcactttgatattgatttaggtcaattgatacgttttaacgccttcatgggccgttttaagacaagccaagataaggccaaagacttagcagttagacgataccgcgaagctatggggaaagtttacagactggccttcgatggtgtgaacatgcagccgaatgcagtattcacagaaacaggtgccaaagcacttattcagcagatcacaaaatacagattgctgcttgctgccattggtgcaatcccaactcgtttcggtgtgccgtcatggaaagcgtccgaatattcatccagggatttaaacgagattctgaagcatatcggcatcagttacagacgttgcagaaatccatttaagccacatgagaaaagaaaaataagtgtgcagatgccccataatctatatataagaatagagccatctgcacagataacggatgattttgcttataagattgatgcggaaaaattcagcgtgatgcagcagctttgtgattctctattcaatgccagtgaacagcagatcacgactgaagatatgcagcagtttgctgatgttgtcgcttcagtcgggaagcctgactttgtttctgatgttgtttctttggatgaggtgcagattgatattgcatccgttgcagtcgtaaccacagcaacagaacagcagcttgctattgagccatgcaatgacgcggtattcattgatgtgatgcaggagcttatgcggtcagacttaacccttgctgatttgtaccgtttgaaagattacgcagagcatttaccgaaacagcacgtttctgctggcagtgctcaacaggtattagagctggatttaatcaattcaatgatcagtagccgggcgtcgattggatag

SEQ ID NO: 67445 - DNA, 579 bp, Acinetobacter baumannii
  misc_feature (563)..(572): n is a, c, g, or t
atgagcacttcacgagtaaagctaactaagtcatttatcgatcaacttgaactcacaccggctatttatcgtggcagtgagattattggctttgctattcgtgtaaataactcttataaaacttacattgtggaaaagaaagtaaaagggaaatcaattcgttgtaaattaggggattacgaaaaaattactcttgaagacgcccgtatacttgcacagcagaagttaaaagagttaactgactcaaactctttaagcattaaaaataataaaatattaaaaaatagtttaaatgagaaaattgaccagccttatctcaaagaagctttccaagtatatataaatcaccacgagttaaaagaaaggacattagccgactataaagaagttatagaaaaatatttaatagacttaagtgaacttaaactgattgatattactgaacagatgattgaagaaaagtatattcagttatctcagtatagttatgcaaaagctaatttatctatgcgtgtacttagagcggtctatcatttttcaattaagtattatcaaaataaaannnnnnnnnnattgtga

SEQ ID NO: 67446 - DNA, 819 bp, Acinetobacter baumannii
atgataatagaagaatttataaacgataatttgttgtatggaagagccttaatagatttacaagtttgtaataaagggtcgaatcctttatggacggggtttgtctctactaaccaaggagaatacccagcttatattaagaagtgtcgacaagctgatgggttatgtattgaaattataagttctctactgggattaatgcttaacattcctatacctaaacccatacttgttttagttgagcctggtcatccacaaattgttgtagaaaaacccactttcctttttggctctcaaatgtatgatatgccttcatttgaaagattcctaatggatcatgaactaagtgaagaatgtttgctagatttttctggcttgcattcaattgtagcttttgatgagttaatagccaatcctgatagaagtaaagctaatattttatatgatggtgattcatttagatttattgatcatgaaaaagcattttctacttctcaagatcctagattaccgattaatgaaatgacaaaggttggtaatatttcagatatcattcaatactataaaggagagaatgaagtatatatacataagttaatgaccagaatcaaaaaatctattagcgaagagatgtgggcgtcaaattgtgacactctgaccaaacaagctaaagaaaactcgttactggccgaatataattccatcctagaaagggttagaagcttcttaatttcgagacacacggtcttggcagtattaattgagaatgctataaagccaccactacaccctcagcaactggacttaataggaggttaa

SEQ ID NO: 67447 - DNA, 834 bp, Acinetobacter baumannii
atgtttgataaaatttcgttcccttctgctccaaatttctttgctgagtggagaacggtttattttgagccaattccaaatagtggagaacgtatagcgattctcatcacaactaaagatttaagcgggaaaattgaaatttttgatgcgttacaccctactgtaattgatagtttatacgggtctaaagctgcatcatttaatggttatattaaattaataaaagcaaatattttaaagaataatggagaatctactatagatggtgtttctattggggaatggcatgcttctcaatcagaaaatattcaaggaattgtacgtcaagctctatataaaacagcaagcttaggatctgttgctttaaaggggctatttgagcaagatgatagcccaattgaaaatgaacaagtagatagccgttggtccaaaaggattaaaaatgcagtattagaaattgattcatcatatgaacatgcttttgatataaagataccaatagggaaagatgtaaaaatcccttgtggttttcacactgcacgttattctgcgaaatttaatgtctgtacttcacaaactattacgcggatgaaatcaaatctaatggatttacaaatttttgattctcataatatttccaataaatacgatttaataatacagatgcctacagatgataacttacaagttccattaaaatcattatcaagaatgagagaaaatattgaacttttaaaagaagaagttgcatcaaaaacacatatccaaattttcacatgtagttctgaaaaagaaggcgctgctagaatttttgatatgctaaaagccagctaa

SEQ ID NO: 67448 - DNA, 441 bp, Acinetobacter baumannii
atgaacgtaaaagttaactcattcaactcatttgcatttgtcagcatggctgctcttgcaatctctggtggttctttagtcgcttgccagcttcaaccagctttccaaacacaagaaaaaccttccctatttacccctaagactcaaccaagcacttacggtgtcttaactgccaaaatcacaggtaaacattctggtgttgccgtcatcaaattagatagcttccgtttaaatgtgagctttgattttgaagctcattcagacagttacggcgttccgggttctgaatttaccgctgttgatattactcaactcacagtaaatgaaatcactgatattaacggtaagtcatataacgattttaccgaatttgaagacatccgaaacatcaatggccttctaaaaggcttcatcgaacgtaacaagttggtggaggcttaa

SEQ ID NO: 67449 - DNA, 606 bp, Acinetobacter baumannii
atgaaaaaaaatacttttaatgatggttcattcaaattttttattattctaattattattttttatgtactggttgtatatctctcagttcataatgtaataaaccttaatattttagcagccccaatcacaatcgcattcggtttatacttttggaagcggcaagagctgatgaagagtcaagcattaagtgcggaaacaatgttcaaagcttttcataattatgctattcaatttgtagaattatattattggatattaccaagtttagaaaagtgcagtgaaatttctcaagaagatttagaagaattaaaaactcagtataaagaactaatcaaatcaagaaatttatactttgtagaacgcgagagtttttataggatcgcagatatacctgaaaatgttcaaaagagtattgagcaagagtttcatgtctttgatatattaaattacaatataagagaatttttagatagtaagtctttaaatcctaaagaattaaaatcttgtaatggtgtaaatgattttcagcctgataatgattttgttgtaactattgggaaaagaattgaagatcttataaagccatttattagataccattga

SEQ ID NO: 67450 - DNA, 1350 bp, Acinetobacter baumannii
atggcaattaagaattacgatagaaaaacatttggcaagttattaaatgaagttgtttcaccttctagaccagtattgtctttagagcatttaaaaggaagagaaaatcaattaagtagaatccaacaagcactttatgcaacaggaagaaatgtttttatttatggtgaaagaggtgtaggtaagtcttcattagctgctaccgccgctaatgaatggtgtggggggcatgattgttatatcgatatttcatgtgctccagatactacagtcttgtcgatgatctcaactatcgcaactcaagcaatcaataaaactgtattaaaaaggaaaaaagtaaaaaataccttccaaattggctttaaatggttcactttcaaaagagaaagtgaaattgaatatataaactttaaaaatgaaattaagtgtttaagtgatggaattgaaatattaaaagagctttcagagttttttgatgaacctttattagtagtagttgatgaagttgaccgaataaaagagttagaagaggtagaaaaatttgctgactttttaaagcaattaggggataagcgagttgatgttaaatttatctttaccggtattgcagacacacttgatgaaatactaggatcgcatcgatctgcaatacgtcaattagaaactatagagttgcctaaactatcttgggatgctcgatgggaaattgctatagaggcaatgaaagcatttgatataagtattgatcgttcaatttatatcaggattgcattgatcagtgatggttatcctttttacgttcatttaataattgaaaaattattatggctactctacgacaaacctactcaaataactgaagttgaatgggaggattatcacgcagcaattgatatagcaatcgatgctatacatacggaattgtctagaccatatgaaaaagcaataaatcaacgttctcgtgattacgaagaagttgtttggtcaactattgtcgctgaggataatattggtgaatacataaaaagtatgtatgaccaatatttaggaattatgaagcaatttaaagatagtgaagtcttagatataaagaaattctctttaagggtaagaaacctacttaaagaggaatatggccctattttgaagactggtttaaaaaaggggcagttcatttacaatgaaaaaatgttacgaggatatgtacgtcttagggcagaacaaaaaggtgtcgaattagtattagaagctaaagaaatctcagagcttaagaataaaactcaagcaacagctaaatcaaataaagcttattttcctcatcctccacgaacccgttataagtctttttaa

SEQ ID NO: 67451 - DNA, 483 bp, Acinetobacter baumannii
atgaatatgccagtacaacaacacattttacaagcggtcgattggtctaaatatagtactgaagattggtttcggcaatttggtgcatggattaatggtgattctgaaagaaaacagaagttttataaatctatgcccacaaaaaaattaactaaaaaacaaagagtagaattgctagcccgatatttaagtgatgaaaatttcaaagagtcaacatatcccaaagggatttcttgtcagataaatgacaatgaagcacgcgcttttcaacgtattattttagatttaagaaaatacaatagtgaagtttttcaagaatggttagatgtgatttggtgcgtatatgttgacaataataaattaagaaaagcagctgctttatttgaaacgtctacaattcaaattcgccaagatttaaaatgcggtttagcatttataagtggtagataccctaatttaaaaacagatttgctaaatatttga

SEQ ID NO: 67452 - DNA, 195 bp, Acinetobacter baumannii
atgaacaatgaagaactaagtttcaaaaaaggttatgaaattctcaagaaaaatgccgaatttcttgaatctcaggaagaactggatattgataacctgatggcgatcgttgaagagtccatgactgcctataaagcctgtaagttacgtattgatgctgtgcaacaggcgttgaatgacacctttaaagaataa

SEQ ID NO: 67453 - DNA, 918 bp, Acinetobacter baumannii
atgagttcaggcgcaaaaattcgattatatgcttgtgaagaagcggtgctgggaacaactccggcaaacccgatctggtacacggttcgccgtgtcagtgatggtttatctgaaaacgtctcaactgaagaaagcagtgaagtggtagattcacgctaccgtcaagggggggtggtcacagaagctgaagtagctggtcagttagagtttgaattgtcacttggtacctttgatttattcttaagtgctttagctttcaataactgggcagcaaacagcttaaccattggtggtaccgtacgtaagtcattaacgctggttaaagtttttgaagatattgggcaggtgtttatctaccgtggtgtgcaggtaaataccggtgaaatcaccattcaaacaactgggaaaatcacaggtaactttggacttgttggtagctcatttacccgtcagcaagtcaatcctgtcactaatcctatagcggcttcaacccgtccattggtcagtatgccaaacgtggaaaacttgcttattaatggtcaatcaattcaaggtaaagcgtgcatgcaatcgcttacgctttcaattaataacaaccttgaagcaatccgttgtatcggctcaggcaaatacacaccagagttctacattgaaaagatgatggatatcgaagcaaatgcttcattcatgttctcttctactgcggcaggttggattgatgccattaaaacccgagatgtgtttacactgaccttcgacatcagagacagcaaaggaagtaaatattcgttcaacttcccgcaattggaagtcatggaagccaatcacccggatggtggtggtgatgacatcattactgtagatatcaactttgcccaagttcgtacagctccaacgattgtacgtgctcttgtgtaa

SEQ ID NO: 67454 - DNA, 966 bp, Acinetobacter baumannii
atggcaaatctagtctttaaatattcttgggatcatcggccttatccctataactcagctcaaggtaagcggcaatttatgctgccttttgcttcgggtattccaaatttgacacccaatatatctcaagtacaaggagcaggtacagcagcgcaaggtacattaaccattgctcgtgatgactctacacctggacgagtacttaaagttggagatttcggacttggtacgtctatatcgcattctgaaggaaagatcttatataaaactggatttcagggtttagctggcagtgtgacaggcttaagctttccacttcaatgtgctgtatttggttggagtaattcagcatctgtactagggattagtgctacgactaaaagaatgtttttcaataatattccagtcaatgttgaccctcagattcttaattcagactggattgaagttcgaacaacagcaaatactacggttgatgccaatgggtttgttaaggctgcctcaccaattgtaaagctctatgccaactcgattgagttgaatgatgaagccaagaatcagccaatcagttttgaaaaattagatgttggtgactacctgattaaaggctcgttaggttttgctaaagagggctggtatatcgaaatgcctaaggatgctaacggcaatgttcttgtggccgtatcatatgagcagcttgaagatggggatatttcagtaaaaacttacaagaaaaagttcgatattgcgacatcctcaattattcctgatttcgataatcctgtagatattcctgaatcccgctggattgatattcgattacatgaagaacccgaacccgtgcctgaagaaatattaagtgaaacaccagttgagtttcagccgacaaatctggctcaagctgtagcagctgccatggatggtatggaaccgccggaagtatcagataccgatgcaacaccttaa

SEQ ID NO: 67455 - DNA, 876 bp, Acinetobacter baumannii; identical to SEQ ID NO: 8076

SEQ ID NO: 67456 - DNA, 654 bp, Acinetobacter baumannii
atgagctaccagaaactcagccgtgaccagattgcaaagcgtgtggcacaagatattcccgatggtgcctatgtgaacttgggtattggtttaccgaccaagattgccagctacttacctgctgataaagatgtctttctacattctgaaaatggcctgttggcttttggcccgccaccagcggcaggtgaagaagaccctgaactgattaatgcgggtaaagagtttgtgaccatgcttgaaggcggcagctttttccaccatggagactcctttgcaatgatgcgtggtggtcaccttgatattgcggtgcttggggcatttcaggtggcagccaatggtgacttggcgaactggcacacgggtgcaccggatgcgattcctgccgtaggtggtgcgatggatttagcggttggtgccaagaaagtatttatcactacagaccacgtcaccaaacaaggtgagccgaagattgtcgctgaactgacctatccggtaacgggtaaacactgtgttgaccgtatttacactgacctgtgcgtgattgatgtggccaaagatggtttaaaggtgattgagaaagttgaaggtcttagctttgatgagttacaggctttaaccggtgcaactttgattgatgcgactcaagggtaa

SEQ ID NO: 67457 - DNA, 654 bp, Acinetobacter baumannii
atgagctaccagaaactcagccgtgaccagattgcaaagcgtgtggcacaagatattcccgatggtgcctatgtcaacttgggtattggtttaccgaccaagattgccagctatttacctgctgacaaagatgtttttctacattctgaaaatggcctgttggcttttggcccgccaccagcggcaggtgaagaagaccctgaactgattaatgctggtaaagagtttgtgaccatgcttgaaggcggcagctttttccaccatggcgattcatttgcaatgatgcgtggtggtcaccttgatattgcggtgcttggtgcatttcaggtggcagccaatggtgacttggcgaactggcacacgggtgcaccggatgcgattcctgccgtaggtggtgcgatggatttagcggttggtgccaagaaagtatttatcactacagaccacgtcaccaaacaaggtgagccgaagattgtcgctgaactgacctatccggtaacgggtaaacattgtgttgaccgtatttacaccgacctgtgtgtgattgatgtgaccaaagatggtttaaaggtgattgagaaagttgaaggtcttagctttgatgagttacaggctttaaccggtgcaactttgattgatgcgactcaagggtaa

SEQ ID NO: 67458 - DNA, 240 bp, Acinetobacter baumannii
gtgcttgagtatccgatcaaggctgactttgccctgattaaagcttacaaaggcgaccgctggggcaatctggtttaccgtaaatctgcacgtaactttggcccgatcatggccatggctgctgatgtcaccattgctcaggtttctgaagtggttgaattgggtggattagacccggaacacatcatcaccccaggtatctttgtacagcatgttgtacaagtacagcccgcacagtaa

SEQ ID NO: 67459 - DNA, 240 bp, Acinetobacter baumannii; identical to SEQ ID NO: 67458

SEQ ID NO: 67460 - DNA, 366 bp, Acinetobacter baumannii
atggatgctaaagattttaaagtgggtgacttaataacttataacgagtcagattttatttataaaatcgatacgctaaatagtgatggattccatgcaactactgtacatcccgtcaagcgttgcataattgcgcttttcgaacacgacaatattaatcacgcctctcctgaagaaattaaagcaggttgccgccttgatgaagatgtggtgcccgtttacgtcaatcctcaatttgcctacacagtgttatctggtgctcaagttggttcagtgcttcagctcacaccacaaattgatgacatgggcgacgatagcaatttagatcatcacgtttcacctttctgtgaggtgcgtgacgtatga

SEQ ID NO: 67461 - DNA, 360 bp, Acinetobacter baumannii
atgactgaaggtcaaaaatttgataacgcgaagccacgtttctcgttaattccaaaaggttcgcttgcgcccgtaatcaatgtacttgaattcggtgcgcgtaaatattcagaagacaattggcgcaaggttgccaatgcagaaacacgatatttcgatgcagctcaccgacatttaaatgcttggtgggatgggcaaacagtagaccctgaaacgggtgaaccacatttagcacatgcagttagctgtttgctttttctcattgcattggaaaagaacagtattcgtgcaatgtgcattacttgcggttttcatccgtgccaatgtgcgaagacctcttacgacatgaaggtgggttga

SEQ ID NO: 67462 - DNA, 1263 bp, Acinetobacter baumannii
atgattaataaaattgatttcaaagctaagaatctaacatcaaatgcaggtctttttctgctccttgagaatgcaaaaagcaatgggatttttgattttattgaaaatgacctcgtatttgataatgactcaacaaataaaatcaagatgaatcatataaagaccatgctctgcggtcacttcattggcattgataagttagaacgtctaaagctacttcaaaatgatcccctcgtcaacgagtttgatatttccgtaaaagaacctgaaacagtgtcacggtttctaggaaacttcaacttcaagacaacccaaatgtttagagacattaattttaaagtctttaaaaaactgctcactaaaagtaaattgacatccattacgattgatattgatagtagtgtaattaacgtagaaggtcatcaagaaggtgcgtcaaaaggatataatcctaagaaactgggaaaccgatgctacaatatccaatttgcattttgcgacgaattaaaagcatatgttaccggatttgtaagaagtggcaatacttacactgcaaacggtgctgcggaaatgatcaaagaaattgttgctaacatcaaatcagacgatttagaaattttatttcgaatggatagtggctactttgatgaaaaaattatcgaaacgatagaatctcttggatgcaaatatttaattaaagccaaaagttattctacactcacctcacaagcaacgaattcatcaattgtattcgttaaaggagaagaaggtagagaaactacagaactgtatacaaaattagttaaatgggaaaaagacagaagatttgtcgtatctcgcgtactgaaaccagaaaaagaaagagcacaattatcacttttagaaggttccgaatacgactactttttctttgtaacaaatactaccttgctttctgaaaaagtagttatatactatgaaaagcgtggtaatgctgaaaactatatcaaagaagccaaatacgacatggcggtgggtcatctcttgctaaagtcattttgggcgaatgaagccgtgtttcaaatgatgatgctttcatataacctatttttgttgttcaagtttgattccttggactcttcagaatacagacagcaaataaagacctttcgtttgaagtatgtatttcttgcagcaaaaataatcaaaaccgcaagatatgtaatcatgaagttgtcggaaaactatccgtacaagggagtgtatgaaaaatgtctggtataa

SEQ ID NO: 67463 - DNA, 1146 bp, Acinetobacter baumannii
atgatgaaaaaatcgttatgctgcgctctgctgctgacagcctctttctccacatttgctgccgcaaaaacagaacaacagattgccgatatcgttaatcgcaccatcaccccgttgatgcaggagcaggctattccgggtatggccgttgccgttatctaccagggaaaaccctattatttcacctggggtaaagccgatatcgccaataaccacccagtcacgcagcaaacgctgtttgagctaggatcggttagtaagacgtttaacggcgtgttgggcggcgatgctatcgcccgcggcgaaattaagctcagcgatccggtcacgaaatactggccagaactgacaggcaaacagtggcagggtatccgcctgctgcacttagccacctatacggcaggcggcctaccgctgcagatccccgatgacgttagggataaagccgcattactgcatttttatcaaaactggcagccgcaatggactccgggcgctaagcgactttacgctaactccagcattggtctgtttggcgcgctggcggtgaaaccctcaggaatgagttacgaagaggcaatgaccagacgcgtcctgcaaccattaaaactggcgcatacctggattacggttccgcagaacgaacaaaaagattatgcctggggctatcgcgaagggaagcccgtacacggttctccgggacaacttgacgccgaagcctatggcgtgaaatccagcgttattgatatggcccgctgggttcaggccaacatggatgccagccacgttcaggagaaaacgctccagcagggcattgcgcttgcgcagtctcgctactggcgtattggcgatatgtaccagggattaggctgggagatgctgaactggccgctgaaagctgattcgatcatcaacggcagcgacagcaaagtggcattggcagcgcttcccgccgttgaggtaaacccgcccgcccccgcagtgaaagcctcatgggtgcataaaacgggctccactggtggatttggcagctacgtagccttcgttccagaaaaaaaccttggcatcgtgatgctggcaaacaaaagctatcctaaccctgtccgtgtcgaggcggcctggcgcattcttgaaaagctgcaataa

SEQ ID NO: 67464 - DNA, 534 bp, Acinetobacter baumannii; identical to SEQ ID NO: 19180

SEQ ID NO: 67465 - DNA, 318 bp, Acinetobacter baumannii; identical to SEQ ID NO: 19179

SEQ ID NO: 67466 - DNA, 426 bp, Acinetobacter baumannii
atgcttaaaattttagtgattgaccggtgccactttacccgcacagggatagaggccttgcttaatcattctggcaggttcagctcctcatttctggtatcaggaatcaataatctcctgttagcaaaagagcatattttgcaatggaaaccgcatctggtgatcgcggatttatacagttttattagcgagacgcactccagtccgccaattaaacctttttttatgagttgtggcgtcatcccactaattttactgcaatcagcagacagacagcatgcacccatcgtgccctctcaatccgtagcccattcggtcttgaccaagcacaccacgctgaacacactctcccacacaattcaggatttccttatttgctcaaaaagggcacttccacagcccatgtttatgcactccctcccgtaa

SEQ ID NO: 67467 - DNA, 534 bp, Acinetobacter baumannii
atgagtggatttgaaaacctgaaaattgctattactgaagatcagcccttaaaacttgtttgtgatttgctgattgaaattggttatagcccaattaataaatattcaattgagaattaccataagtttgtcaccacaaatatcaagggccatataacaggttggaatttaaatttgctttcagatacggattttaaaccaacctcattaagtgatttgatcaagttgcgtaataaagttaaagcggaaagtaaggagggtgaaatgttattgactactgatgaagttgaactaatcaaaacatgtgatgaaagccctgaacaatatgatgcagtttttcaaggtcaacagattggatatctccgcttaagacatggtgaatttagagttgattatcctgattgtggtgatgagacaatttactattcacaagaaatgcttggtgatgggaagtttgaagatagtgaacgtgagcacttcttattgaaagccaaaaaagcaatcgttaagaagtttaatgaaatggaggggtga

SEQ ID NO: 67468 - DNA, 246 bp, Acinetobacter baumannii; identical to SEQ ID NO: 59301

SEQ ID NO: 67469 - DNA, 468 bp, Acinetobacter baumannii
atgctttgccccttgcaagaagggtatggctttacaccaggtaatgatattcgtgaacaaaaaacagaaggggggatgccaaggcaagcccccttttttgttggttcaccgcactcggttaatgtctctgtcttattaaaagacgatgcagaccgccaatatttttgggctttttggagaacaaaactgcgtaaaccagaaaattggaaatgggagctatcattagaccatgggataattgaagagtgtgaatgtcgcttcacttctgaatcattacctggtgaatcaaagcgaaatggcgttgtagtcatggttagctttcaagtgattgttaaacctattaaaagagatccagattttgacagagatgttgttgaagcacggcaaggtatcggaagtggtgattttgcttcgatagaaaaaattcctaacaagtggtttcctgatgctttagggggaaatcaatga

SEQ ID NO: 67470 - DNA, 480 bp, Acinetobacter baumannii
atgaataaattaagtattgaagatattttatctggcgctttggttggtaaacctgaactaattgaagttgatattgttgtaagcggtgaacctcgtacatttgagacatatattaaaattatggattacgagacagccaaagctcaaatgaatgccaacacagaaggccgtgaaggtttggcttcgattcttgctgattgtatcgttactgaaactggagaacgggtttttacagaagaacaagtacgcctaaaattcaataaacatttaattgatgcaatttggcaaaagattcttgaaaagaactttttgggaaagtcgagtacacagaagaagagttcaacgaacttgagttctgggcagaactcgtccaaaacggtatcgcgggggcaacgatcagcgaagcaaaaacgaaactcagttaccgagaattcatcttctggaaacaatatcgacagcggagaggtagcctcaacttag

SEQ ID NO: 67471 - DNA, 1842 bp, Acinetobacter baumannii
atgcgtgattatttcaaaatcgcgctccaatattgcaatgatgtgcgtactggagtgcgtacagcagggttatatgaaaaaaatgcagtaaaaagatttatatctgatctttcacgttcaggttatccattcggccaagctgatgaagaaactgaagaacttttgaaggttcttaaagttggtgctaaagctgctgatataaattttgaatatgaaattgaccatgagaaagccaatcgagcttgttactttattgaaacgtgtcctcatgtcaaaggtactttaggaaaaatacaaagagatggtagccgccttaaattggtgatggaaccgtggcaagtctttattacttttaatctctttggctgggtagatgcttcgggtttacgtcgatttatttactattacattgaggttgcaaagaaaaatggtaaaagtacgtggctttctgcaatgggcgtttatatggcgttcattgacggtgaaccaggagccgaagtttatgcggctgctacttcaaaagaacaagcaaatatcgtatttggcgatgcaaaaaagatggttgagtattcaccatttatgcagcagcgtttcggcattgaagtttcgcaatattcaatctctcaaccgtcaacgaactcgttttttaaagcgctatcacaggatcgtggcgggacaaaagatggtttaaacgttcacttcggtattattgatgaattacatgctcataaagattcgagtatgtatgacattgtttcagatggtattgctgcgcgtgatcagccattagtaggagcgatttcgacggctggagacgataatacgggtgtttgttatcgtgaaagaacaacagttgttaatattttaatgggtcaatcttcacacgaacaatatttcggcgtgattttttgtttagacaaaaaagatgattggcgtgatcccaaaaactggcctaaagctaacccaaattatggtgtctctgtcacaactaaatatcttgatgcgaaatatgcaaaggtaaaaatttcaccttctcaagaagcatttttcagacaaaaacacttaaatgaatgggtgggagctgtaaacggttggattgctccttcagagtgggaaaagtgcaaaaaagaggtgaagttatctgattttaaagggatgactcgttttggtggctatgatttagctagtcgactcgatttagcagattggggcgaacttattccaaggttagaggaagacggcaaaatccattggtatgcatttgttcactcttatattaatgaaaaacgggtcgaaactaaggaagcaattaatggtgaaaagcgaccagatgattatccagtttggcgtgaagatggttggttaattgcaacatctggtgagtctacagattacaagcgtattcaacgagatattgaagaatctcatgttgaaagtccattttatgagattggccatgatccttaccatgctgaacaattaacagcaaatattcttgaagaaggaattacagctgtagaagttccccaaaagacagaatttctaagtccagctatgcgttggattgaggtgttgattgcggaaggtcgttttcatcactgtggcgatcctgtttttacttggtgtgctttaaatgtagtggttaaagaagatgctaaggaaaacatttttcctagaaagatttctccagccaaaaaaattgatgcaatggtgtcaatcattattgctgctgcacgtgcaaggcattgggatgatgagtcagtttttgacttaatacccggtgaagaaaatgggaattttgatgattttctgagtggtatgattaaggtatctagacgatga

SEQ ID NO: 67472 - DNA, 510 bp, Acinetobacter baumannii
atgtctagaactggtagaccatctaagccacttcaagaaaaaattttaagtggtgctcggattcgtcctgaccgtgatgaagaagctcaggtagcaaatgcttctgtcgatctaggaatgccaccatgtcctagttgggtaaaaggggcagcgaaaaaacattgggaagtcttagggcctaaattagttcaagctggtttgctaagtgttgttgatggtgacgtatttggtttgcattgtgacaacattgccgcttacgaacaggtttgtgaaaagctaacaaaatttgatgactggattgctaagacaccaaacgattttgttattcaatctgcgtggcttcagattcgaaataaattacaggaactaataataaaaactgctcgcgaatttggattaactccagccgcacgttcaaacgtaaaaattaacaagcaacagcaacaagatttatttggagcaagtcagtcaactgaatctgataacgatccatataaaaatttctcttag

SEQ ID NO: 67473 - DNA, 192 bp, Acinetobacter baumannii
atggcaactaaaaaagccggtggatcgacgaagaacggtcgtgattcaaacccaaaaatgttaggtgttaaagtttacggtggccaaactgtaactgctggtaacatcatcgttcgtcaacctgacggcgtagtaaaattcgaagtgaaaggtcaatttggccgtcgctacgtaaaagttgaaactgtttaa

SEQ ID NO: 67474 - DNA, 492 bp, Acinetobacter baumannii
atgaaattaatctctttcaaagctaaaaaagtttttggtatctttgattttaatatagactttaatcaagatattaaccttattattggtaaaaatggtactggtaaaactaccctcctaaaaataataattgcaatattttccaaagattatatatatttatctcaaataaattttgaatcaattgaattaaatttccaaaatgaaaataatgataatatatctatattacttgatgaatatataaaaaattccattgattatgatatagaactaataagttatagggtatcagcaaaagaactagattgtgaatatatagtttctattagagataagaaactctttgagttaattagacttccagaaaaattaagtgaagaagccttattaaatattgaaactcctatgttcttaggattagatagaagatttgtaaacaatttaaagattctgctaaaaactttttatttaattttgagggagagataa

SEQ ID NO: 67475 - DNA, 243 bp, Acinetobacter baumannii
atgcatatggcacaagtgtggaatatgcttaaagagcgaaatgctatagaacaattgggtcaacattttggccatgatttgtttgagtgtgaagtcagatatttgtgtgaatatgaatgggctcacacagcagaagatatactttggcgcagatctaaattaggtttggcatttgatgtaaaacaggtaaaagttttagaagcctatttatcagaacgtcgattaaaagacgatgccgcataa

SEQ ID NO: 67476 - DNA, 306 bp, Acinetobacter baumannii
atgaatcactcaaatgatattgtaagccgtgatgctgaacgagatattggtgctgaattacttatggcagtagatgaaatgcttgccaatgctccagtcaaaacttataccattactcaaactgatgtcgctttagctcgccaaaaatcagagttaagccaacgtgaatttgccgaaactttaggtgtatctgtgcgtactttggaaagttgggaacaaggtgtacgtaaaccatctaaagcggcacaatccttaattaagctgtttatcaaagatccttcttttgttagagaagctcttagctaa

SEQ ID NO: 67477 - DNA, 321 bp, Acinetobacter baumannii
atgtatacaatatgcgaaacatctttgttcagtaagttttattcagactattggacagagaaagaatataacgagtttaaaatttttcttgcttccaatcctgaagttggtgatgtagaacctaactcaggaggaatacgtaaagttcgttggggatctggtaagacaggtaaaagcggtggagtcagagtaatctattacaaccgtctagctaacggacaaatatggttacttaccatttatgggaaatctgctgttgatcaactcgataaaaaagtactacgtgctttagtggagaagttaaatgaatcactcaaatga

SEQ ID NO: 67478 - DNA, 432 bp, Acinetobacter baumannii
atgaccttattaaaaacacatatagagtttcgatctgatgacttccctccaacttctgaggaaatagaagagtgggatagacaaatttggggacaggcattagctaagtacttatcagaagaacttcctaagcatggcgtaaatgtattggatttcgtaaatgaggattggggatatttaatacctttagcagacgaaaaatttaagggtatttggattggatgcaatcattatcaagagtatgaaaatggttttttagttttcatagatccttgcaggccaataattaagaaaggattttttaaaaaaattaatatatcagagcaactaacatttattgctaatattttgaatgaaatacttacaactaatcctaaaatttatgcccaacattggtgggatgaaaaggatatgaaactaattggtgagtaa

SEQ ID NO: 67479 - DNA, 303 bp, Acinetobacter baumannii
atgaatcacttatcaataaatactcagaataaccggttaattaaatcttggtttggcttttttttagggttaattactgttggacttagtgtgaatgggctatctgaatcttttacattatctagaattctaagcactttaggatttttatgtttttggtatccgtggactcaacttacttggaatcaatcaatgaaagagcttattcaaattaatagccaatctatgggcaaatcatgtatttacttaggattcattgccttgatcttgttcttaagttctgcacttgtacatttactatga

SEQ ID NO: 67480 - DNA, 402 bp, Acinetobacter baumannii
atgaaagaaaaactccgatggatcattcttgttgtaagtttagcttttttatatggggttacttactttatatttatcaatacttctactggaaagcccatttttggggggatacccgaaattttggcatatatagttcctgcatactttattacaagcattctcatcgaagttctacttaatgatatacctaataaaaatgtaaaattaatgcttggtaaagcacttatacttttgctttcttttttagcctttacagtaatttattggctattttacaaaaacatcattattgctaatgagttagaaaacacgtttattgggaaaaactcacacttcatttttatttggctgatgattttcttcggtatcaaatttgccaacaaattgtactttaaatga

SEQ ID NO: 67481 - DNA, 474 bp, Acinetobacter baumannii
atgaaatgtaccaaaggtattaaagcatgcctttttataggtcattttattggatgtttcatactgctttgtctattaaattttgttttaagtatatggccgtactatcttcagtatatagtgcatagagcaacagtaacggatttcagcatagacaactttaatttatatgtcattggatatactttatttttagttgttatcacgtactttgccccaatcattaaaaaagaggatcatattctttggtctctttttggtgtcacattagcaatattatttgttttctcaacagcattcttagggtttgaatatcatgactatattacgaatggtaaaaattactctaaagaactgaaaaaatttagtttttttatggcaaatatttttattgggttcaatgtttttttgacattctgtatagcagttgtgcagtcagttagttatagtttatcaaaaatgaaaaaagtatag

SEQ ID NO: 67482 - DNA, 477 bp, Acinetobacter baumannii
atgtctggattcttactcacaggaataatagttgctgctttggtttctattgcatctatggggttagcagtatctttacttttttctaaaaataaagagcttttgaaacaagtaaaagaggaagttttttcagaggataagacttcaattaataatgctatagccatggtggaatcagagataaatgtttcaaacgagaacaatatttctgaaacatctaaagatatatcaccgaatgattttttagagcttattagtccatttgagttaaaaacgaaaacaggttttgtctctactaggttttttggttcaattttggcaacaactttagatgtaaaaatcccaaaaactaagccatatagtgctcaggtattaaggaatatcaatcaaaaagcacttgatacttcaccgttacatgaagtatcaagaccatctacattctctgatacagaaacatttgttagaagatattcatga

SEQ ID NO: 67483 - DNA, 777 bp, Acinetobacter baumannii
atgaaattagaaaaaatatcggaaagaatctttttttctaccataaagatgaatcttgtaactaaagaagaaacgaatgttatcgcaacaggattttttgtctcaaaatcaataaataaggatgaatttgtaatctgtttagttgcatcgaaagagttaattgataattcaattgctgcttctttggtatttcatgaagctatagatcaggtaaatttggatgtaaatgagaaagaaaaaatacatatccgtattggtgaaagtgattggaaggatatgtggttttcttcagataagacgaatgattttgtaatagcgccaatcatgcctatagtaaattttatagaaggccaattagataagttttgttttttacaaccaattgatttaacaagtatttccaagggtgagcaattaaaagatatctcgttatctgaggatatattatttcttacctatccaaatgaaattattcaagaagatgaatatatgccagttctcggcagagcaaaattggcaacagcattatttaaggactttaatggtaacccagaattcctaatccaatctcctgatacatcgaatacttctggaagtcctgtatttattctaaatgagggatcttttatgacaaaaaatggacaggttttaggaaatagattcctttttcttggaataatgaatgggtctatctcaaatggtttagcaagagttatcaaagctaatttattaaatagtgtagtagatgaatttgtagagagcttaatcaaagattaa

SEQ ID NO: 67484 - DNA, 618 bp, Acinetobacter baumannii
atgaaatatattataggtgtcttatgtgttacatatcttcctgcatatgcttttgctgaacagttacaagacaatacgaatgtgccggttccaagtattccggatacgattgacagcaaaagtaaaaacacgcagataaagatgaatgaacaggagcaagataataacgttgcacagctttttttaaatatttctattaattccaacccttctgaggatttagtagccgtaagacaagatcaagataaaaaattatatatccgtgcccgtgacttaaaaactttaagactaaaaatggatgattccatttctgatagccaatggatttgtcttaatgagcttaaagatatccggtttaaatacttggagaatgagcagtctttaaacttacaagtacctcctcacatgatgacaggctattcggttgacttaaaagggcagcagatcaccagtccgcagctacttaaaataaagcctttaaacgctgcaatcctgaactatagcctgtatcacaccataactaatgatgagaatgttttctccggttcggcagagggaattttcaacagtgcgatcggtaacttttcgtctggtgtgttatataacggaaatgattaa

SEQ ID NO: 67485 - DNA, 720 bp, Acinetobacter baumannii; identical to SEQ ID NO: 49085

SEQ ID NO: 67486 - DNA, 225 bp, Acinetobacter baumannii; identical to SEQ ID NO: 25145

SEQ ID NO: 67487 - DNA, 1035 bp, Acinetobacter baumannii
atgaaagaaatattaaaaactttaactgaagcaatgacgctacctgaagatagctattctgaacaagatgctgagtttcttgagatcttcattgaagaaattgaagagatttttgttgatttgcaacctttgataaataaatggatgcagtctgagaatattgctacgctcactgaaattcgtcgtcatttccataccttaaaaggttccggaagaatgattggcgctaaatcttcagctgagcttgcgtgggcagttgaagatacactcaaccgggtaatcaaccaaagcttacaattaacgccaactattcagagctatgtgcagttagtatttaagttctatttccttaaattagtagataattttaagcaaaaacgagcacataccttagatttcagacctcttattttattaggccaacaactacaacaacagcaaagtttagagccagctttagaagagcttttacaactttcaaatacgcttatggccgaaacagtgactggtcttgagctagattatattgaacaagattcgttagccgagccaatcattcaagctacacatactgaaattgaaataaatctagatgaaaccttgaccttatttatggaagaggcggaagaacatttagccacgattcatcaatttttggatcaagagttacatcagtacgacagttataacgctttaatccgcgctttacatactttgcgtggtagctctgcaatggcacaggtcgaaacaattttcgaggccagtaccaaagttgagcatttatttaaaatactgctacaagaagagttatcttctcactctgaagaaattttattattacaagaatatcgtgagtttgttcgagatagcttggaactactatctagatatagttcaagtgaacagctcgaagcgagattgcagcaatttaatcaatcttgggatgcatatgttgagcaacatggtgaccgaacagatccgttaatgccttctcatggcttggtatcgcaattatttacaattagatgtttctga

SEQ ID NO: 67488 - DNA, 234 bp, Acinetobacter baumannii
atgggtgcgaactttccaagtttgattcctaaatcgagcgtagcgagaaaaaaagctcatgagcgaagcgaattccgagctgcttttgatcttgcttttgctttttctcaaattcacgaaaatatgaaccaaaaattgccccaacgaatcgagcgaaagcgagattcaatagagtttgagcgaagcgaaaaccaagggcaatttttcatgaaatatgcttttaattatttttaa

SEQ ID NO: 67489 - DNA, 720 bp, Acinetobacter baumannii
atggcattgagccaattcgatattattaagtctttaggtgaatctattgaatggtttgaaaaagaactctcttggggaatgcctattgcagaattaaggcatttaacaggaagaattggggaactttatgtagctatgatgaccttaggacaattagctgattcagttaatcagagaggttatgatgtagtttccagtactggacaaagaatttctgttaagactgttactacagcaagtcatgtcgattttaatcttaaaacgattgagttagtggacagaattattgttttaagaattaacccagaggacctctgtattgaagtagtctatgacttaaatatggagcagtttcaggctaagtcacgagaatacaaagggaaatatattttaggtatttataacaaaatacttttagctaattcaaaaataaatatagggttaaatattcctactgaaacagaactgaaagttgaaaataatcatgagctattgattttaaataatattttttatgatggatatgagataaaacaatatgaaaatgcaaaaattgaagtttataaggatggtgaaaaacaaccatcagctaaagaaattttgaggcagatagccctccctttaaatgtctctttaaataattcagccggaaatcctaaaaatactcagcaattaggggatcatgtgatcaaggcaataaagaactttagatcaacctga

SEQ ID NO: 67490 - DNA, 1116 bp, Acinetobacter baumannii
atgaatcctaatgaacaaatagaacagcctaaaaacagattttctttaggtcaaaatggactattcgctattggattagaaatatggaaagaactttacgaacatgaagaatgtgggataaatgaaatggttgtttttttatctctagcatgtggaactgacgctagtcacattaaaagtacttggagtattaactcagttaaaaaatacattgggctaacagaggttcctgcaaaaaaagccttaaagaacttaatcgatacaggcttcgtaaaagttataaaaccagtattaaaagctggagatcgcccagaatatgaaatcaaaaatactactaaagaagaaggaaactatatttggctacctaatagcttaattgttggcgttaaaggtgagtgctctcctgtgaatagattgaaaaaaagaaatgataagaggcttttatattattttattcgattatatttttttcaagatatgcgagaaacaggatgtatatcggagaaaattatttgggctaacccatatgaaaatgaagaaaaattacatacatcaataataacaagattcaaccattgcataaattttcttaaattaaattatcaatgggtttgctctggtgatagtgacttcggtatttttggtgaatacaaagttgtaggtcgtggaaagcacgaacgtaaagtatgggaagctgaatattgtcctaaattaaatgagcgaggtacatggatcattatgcgccctttatgggatatgcaacttattgaacctgtattcttcgttactgactcaccagatgaggtaccagatgatgaaaaaatctttatgtatgagctgttcacagaagaccaaaaagctatatcagataagattctttcaggtggatataatttagaagagtctatgactactcaactaaatcacgtttctaagcgcggaacttcagtatcaaaaattgccttcggatttgtagattgtgactatgctaatgcctcaataaagccaagatttagattaaaatacagaacaaaaaatccctatagtaaaaatcgaataagggatcaaagtaagtttgaacgagagttaatacaaaaagcagaaaaacagctttga

SEQ ID NO: 67491 - DNA, 249 bp, Acinetobacter baumannii
atggctaataatgctaaaaaaacttccagcaaagtcgcttctaaggcatcagagattttgcgagatccttcatcttcagctatagcaaaaaagttatcagcttctgcattagctcaaaccaaaacaaataaacagacagggaaagaaatggaaactactgcttctgctgtattaaagagcaataaatatagtcaagaaactaaagagattgcggcttctcttgtttctcaatcaaataagaatcgataa

SEQ ID NO: 67492 - DNA, 405 bp, Acinetobacter baumannii
atgttaaattttgaattaaaagagaaatggggggagacttctctaatactaggttttactcctgttccaactactttaatttatgctcaaaaagaattaggtctctcttctatagaaattaatgttttacttaacttgttaacacattggtggaaaaaagaagaattcccatatccctcacaagcaggaattgctcaccgaataggtgtatctactagaactgtacaacgaactctagcagggcttgaaacaaagggatttataattaggaataaaacttctagagacagcaataaatataaaggccgaagtatctatgatctatctccactagtgaaaatcctggaagaaaaatcacccgaattagatatagtaaaaaaacagaaaaaaaataagaaagcgtag

SEQ ID NO: 67493 - DNA, 327 bp, Acinetobacter baumannii
atgttcactagaactgttcaaacgcttaaaaatagtactgacttagttcagagatttactatgcctgaaattaaagaagattttgaattacgtaaactttctcgtagagaaagaaataatcattacattttaatttttaaaaacgtcatcaatcaaaagaaagattgggaagacgtaaaagttgttgctgaaattcaggaacgaaatagccggctaagatttaatatcaaagcatctaaacagtatccagaattagcttcttatgagaaggttttagaagaaaaaattaatgctatcattaatacgaattctttattaatctcataa

SEQ ID NO: 67494 - DNA, 732 bp, Acinetobacter baumannii
gtgtccccacctcatatcttacctgaggaggattataataagcctcttcatacaagacctttctgctttaattatgatgaaacattagaaattagttttttctttaatcctagagaagcagctatttttaaaattcaagaatataaggctcaagctgggagtgaatatagcggttgtatagaagtatcttattgccattttaatgaaatggcattggatggggtatgtgctgtcgctgaagattttcaagatccatatgaagctgctaacgaagcattaaaagcatttgatatcgaagatgaaatattaataggacgttatgcgtttaaagattttgaagtccatgctgaggaagtaaaagttggtaaacaaataaaaggagcttatgttgttccagattatcaagagagcggcattagttcatttgtatataaacacttaactaagaaatatggtcttttgatttgtgataattaccaaacatatatggggcatatgttgtgggtattgagtatcctcaagtggggaatcattaaggtttatgactgtgtagaaaagaaatttataggagacgttgaatataaagactgtcccgcaaatttaaagccttggtctatcccttttaattttcctatgcaaaatgaaaaatatctaagattagatatgtgtgtcagaacagatacccagtttcacaatattgtattagttgcagatacaactctcttaacataa

SEQ ID NO: 67495 - DNA, 558 bp, Acinetobacter baumannii
atgaaaaaaaaatcagcttttttatattatttagatgttacagcaccattttattatttttatcttgtacctactgtaatcgcattagtcatagtcagttttgatttctcatttcagggcttatttccgaccacaattgactcttcgatttcaagccaacataagtttctaaatgactattttgcaatatgtaattttttcgtgattgggcttattgttattaattatttaagacacccactaccagccaaatatgtaagacaaatacgtcagcattatgcaacattaaataagaaccagcagtctatcaatggctggcttggcattgtatttttctgttttactttaggcctaatgaacctgacttggtttattattaatgatgagcctctcccaccatataaagaatggcgcaaaggcgatactcttacctacttaaacagtttcgcacatccttatatttctgctattgcttttagtttgcaatatgccctcatggtattctttacattaatatttatgaacatatttgataatcgtaaatatagacaaaattaa

SEQ ID NO: 67496 - DNA, 876 bp, Acinetobacter baumannii
atgacaagtttagcattaacctttaatgaagtgaacttttcacctgtacaacataataaccagatctggctttcggctagtgaattagctaaagcacttggttatgaaaaatcaaatgcggttactcaaatctatgaacgaaataaagatgagttcgcaagtgatatgacaacgaccctcaaagtgagtgttgttaattcaagctgttccgtcgagaacctcaatttgaggctctcgaagaaaaccgaaaatctagaaaaaactattcgtgttttctcgcttcgtggttgccatttaatcaccttctttgcacgtacttctgtagcaaagcagtttcgaaaatgggttcttgatgttcttgataaagaaattggcgcaccagttgccaaaactcacaaatcagagcgtgaacctttaaccaatgcagtaaatcttttagtagctaaaactaagcatttgaattacagcgatgcttataaattagttcaccagcgtttcaatgttcagcatattgatgaaattccatatgatgtaatacctgtggctgttgagtacgttcaccacttaattgctatgtacagcaatgcggagaaatacaaggatacggaacctcatattcacacagtattacgcgataagaatgttcagttcttgatgtggtacgttccaatacttactaagttcatcaaaaatgagatttcccctgcactaatagcgatccaaagtagttatgcaggacgcttatattccttagcccaagaaacagcttgtcatgttaacgttttaaaccgtaaagcgattggatatggcattactcgtttagagcacgttgattatcagcctgttcatacaatcgaatggtatctttctaaataa

SEQ ID NO: 67497 - DNA, 1275 bp, Acinetobacter baumannii
  misc_feature (1235)..(1244): n is a, c, g, or t
atgcaaaggactatgaaacactttcaaattaatgcattagcacttgctatagcaatgagcacaatttcagcgcatgcagagactgatcagcagacttcggaatatggaactcttcctaccattaaagtaaaagctggaagtggcgaagaaaatgaaaaaagttatatagcagggaaaacagaaacagcggtaccactgggtttatccgttcgtgaggttccacaatctgtttccgtcattactcaacagcgtttacaagaccagcaattgtcaactttggttgaggtcgccgaaaatgttacaggggtaagtgtcaaccgttatgaaaccaaccgaggtggaatctattcacgtggttttgtagtagataactatattattgatggtattcccaccacatatagcttaccttggtcttcaggtgaaattttctcaagtatggccttatatgatcatattgatgtagttcgaggggcaacaggtcttacatttggtgctggaaatccatctgctgcaattaatatggttcgtaagcgtgctacgagtacagagccaacagctaacgtagaagtgagtgcaggtagttgggataattaccgtgttatgggcgatattgccaactcccttaatcaatcaggaacagtacgtggacgagcagtggcccaatatgaacaaggcgacagctataccgacttgttatctaaagaaaagctatctttactgttaagtgctgaagcagatttatctgaaaatacccttttatcgggtggggtaacttatcaggaagatgatcctcgtggaccaatgtggggaggtttacctgtctggtttagtgatggcacaaaaacgaactggtctaaaaataccactacaagtgctgactggacacgctggaatgttaaatataccaacctatttgcagatttaactcataaatttaatgacaactggtcagctaaactgtcttattctcatggtaagcgtgatgctaattctaagcttttatatgtttcaggtagtgtagataaaaatactggtctagggctatctccttatgcatcagcgtatgaccttgaggtagagcaagataacgcttctttgcagctcaatggtagttttgatttgtggggcttagagcaaaaggttgttttgggttatcaatattccaatcaggactttacatcatatgctcgttcaactgatacaaaaatggaaattggcaatttctttgaatnnnnnnnnnnagccagtgtggaatgcacctacactcaatga

SEQ ID NO: 67498 - DNA, 666 bp, Acinetobacter baumannii
atgaaaagcaaaaaagtaaatttaacattagttttattgtggggtgtagttgcttatgcaattgcacttcttacatattgcacaatgaataatttcttaaattcgtctgcagatgatatctctgcttttggctcaatacttggagcatgtggtgcgttctttgctgcatttgttgcaacttacttatttaatgattggaaagagcaacataataaacaagttacgaatactttagccttacaagcttatcaggaatttttaagctttgaaaaaaatacccttgaacttgctacctatatttctgatcttgaaatgttaatacattcttatgagtgtgaattggattacaatacattaagtagatctgatgatttaatatatatacaaaatatagtaaataaaaagtcagaaatgaatataatcttcttaagttttctatccaaactcagagcttatataaatattagagataggtgcaatatttttgatgaaaaacaaacattctactattctaaatttttatcaataaacaaaaatgatttcaaaagcaatactctaattactgatttaaatcaatgggaaaccaacttattaggctacaaagacctaattctaatattaaagcaaaatgaaataaatcaattgttaagtgatctaaaggtttaa

SEQ ID NO: 67499 - DNA, 477 bp, Acinetobacter baumannii; identical to SEQ ID NO: 45054

SEQ ID NO: 67500 - DNA, 522 bp, Acinetobacter baumannii
atgaatcatttcattaatgcattagaaacatctataaaaacagaaaactggtattcagtactgtttatttcactatctctacctgatatatgtggaaaaattgataatcctacagctggctctaaaaaaagatctattgaatggtttgataaatacatgaaaaatttatatatatataaaattgggccaatgggaaaagaagtttcattcttaagtggttcagatttttatgcattgaggtgtgcatatcttcatgaaggcagtgatgatattacaaaccaaaatgcacaagaaactttagagaagtttgaatttattgagccaaattcaaatatggttaaaatgcatatgaatttgcgtggcaaaacacttcaacttcaggttagtgagtttggaaaagaaattttgacagccttaaaacaatggacaatagatgttaaggaagatcatataaaacaagataaaattactaaacttctaaatatccatatattagattgctctaatggtatttctttctaa

SEQ ID NO: 67501 - DNA, 1182 bp, Acinetobacter baumannii
atgaagggtgggcgttacttaagaaatacagcgttagtgaaagcaactattccacgtcgttcagaaaatactggatatttacagtctgtttcgattgaaagtaatcatttagcactttgccgcaaaattattgactctaaacgtggctttaatattaatttcaatcgaaattttggtgaatcttgctatggcggtttgtatatcgatggtgagggaagccctgcggttaatgtagttagatgtgaagggaatttgtgggaatctggcggagtttttgcaaaactcggtgcgacttatgcgggaacttttataggcaactattttgaaggtaatagtgctgaagatgttcctttattaaaatgtatgattgaacttggtaaaactggttcaactcaatattcgagtggtgttacatttatcggaaatcaatttggtgcatcagcaatttacaaaactgatccagattattgtgatgtaaaattttcatcagctctttcaggcactggacttgataatttaacgccacctgtatttattggtaactggaccaatggatatagaatgtggcaagaaggtcaggttttaactcagtttggtaatacttttagtgggggcagcgcacgtagacatggtgctccaaaattacatacagaggcgcgcgtaacttatgatttatcccgtaaagattttttaagttcaagcggactttcgggtggtgtacatgtagtctgtgaattagaaacctcattgttagaggcattaacctcacaggcaaatagggcgtgtagtgcagatttgaatatttttatgcagatgaaaacttcaaataatattgtactcggatcagctcttgctaaaatcagtttattggttcaaggggcggaaggtattagtgtaggtgctgtaaatagtgtctatctgggcgctacattaactggattcactcaaatagatggtggtctaattgatagccaaaataatatctcgttatttaagcattttacaaatccagtactttcagtacagcgtgtaggtacaaagtaccaactaaagttatctggatatgcaccactaactggtactatttatggtgatagtgttaaaatttcttccaatagtattatgacaatttactcactaaatagtggtggttcattggctggacaaatctcgttctcataa

SEQ ID NO: 67502 - DNA, 267 bp, Acinetobacter baumannii
atggcagacaatctgcaaattatagatacgtcgacagcattgacgacgagtaaggccgcaacttatgggggaagtatggtaggtgctgcttcagcttggattggttcaatcgaccttgctttctgggtcagtatcattattggtatcggtggttttctaatgaactggtattacgctcgacagaaaaataagcgtgatgaaattgagcataaagcatatttaaaaagtttggagcctaacgggggctgtgatgtcaaaaaagattaa

SEQ ID NO: 67503 - DNA, 609 bp, Acinetobacter baumannii; identical to SEQ ID NO: 59805

SEQ ID NO: 67504 - DNA, 474 bp, Acinetobacter baumannii
atgaataacacttctcctattaatgaagagccacaagaaattgttagtaaaaagctaacatggggtaaatatacttcaaatttaggctactttttaaaagatattcaagatataaatttatacatagaagacacagctactgaagcagagaacttctataaagcattattaaagaatattttaccagatctaaaagtaaataagattattggactaggtggtcgagataatgttttaatggcatgtgcaaaaaagaaaaaaaatgtaaaagaattatatattatagatggtgatctttactgttattatgcaaagcctatatctttagaaaacttatttattcataatgcttattgtgttgagaattatttaattgatgcctatgcaactttaacttttattgaagattctttagctataagctttgaagaagtattagagaaatgtgattgggattattttttccagagataa

SEQ ID NO: 67505 - DNA, 213 bp, Acinetobacter baumannii
atgagtgaaaaagcatttaaagacttaaaaattcgcttccatttggctattggtgtggctaatggcgatcgtgaggactttgggaaattatcggattggatcgaagaagaaaactggaaaatgatggatgaggaagagcagaaagatactctttcagaaattgcagaggaatgggcgcagcagtatttagatttaggagcgacagtcgaatga

SEQ ID NO: 67506 - DNA, 339 bp, Acinetobacter baumannii
atgaaaactcactctcaacctatggacctaagagactactttgccacagctgcgatgcaaggaatggtagcaaccatttctaatcagtttgaattagatcgtttgcgtgaatgggcaaaacaaaatggccaaacattgagtcaatttattgctagtgactcatacaagcaagcagatgcaatgatttatgagcgtgaaaaagggactgtggaaagtatagatgcgatcaaacaaaagctaattgaggctattggacgtaagcattccagtctacatccaaatatgtatatgactgtcgatcatcttatttttcaacttgaaacgggtctgccattttag

SEQ ID NO: 67507 - DNA, 132 bp, Acinetobacter baumannii
atgaaaagtaaacctaaatcaattcttatgttctggttcttagtagctgttgcgattgttgtattaggttcagatgtttacagaattgtagtgcttaaacagcatccttattcaactgtaaaaggggaatga

SEQ ID NO: 67508 - DNA, 2625 bp, Acinetobacter baumannii
atgacagttccagtttccgaccgtttaagccaactttacgttggaaacggcacaaatacacgtttcgattttacattccgtatttttcaacaagaagatgcaacaggcgttgctgtacggaaaaaaggtacaacagattttgaaacaattgaccctgcgacttacacagttaccataaatcccgatgatatgggcggatatattacatttaataccccaccgaccgttggtacctatttttatatcgcgggtgcatctcctcttgatcagctcttagatatcacaaactatgataatttttatcctgatgctattgaacgcgcacttgataaacttaccgccttgcttcaagagtggggaacgaaattagacctcgagaaacaagccagaattttagcggatattcactacgattcattagcaatggagcgcgaagaaaatcttgaaaatcgtttgattagttatattaatgctgttgttgggattactaatccaaatatttttgacggtatttctgaccgtatgattattactaaagatggccgtacgcagcgagaatttaacgataccttgccgtattggacggacgattacgccaactttaaacaacaaacatttttgcgcgaagaacaaattttagaacatgttaagcaagaagatgcgtcattagatcaaaaaattaatgctgaaaatattagagcaattcaagcagaacaggtacttgacggtaaaattgcagcaataggtgggggcgcatctcacgggtatacctcctacactgaaatggttgcagatgctgcaaacattcctgcaaattctgttgttactgttgggggagatcctgactccacgaaggacggcgattatatttataatggaacaacattttctaaatcgccttatgatccattaacacagtcaaaaaactatacaaacagctttagttcattaacaaaaaactcaactgtggtttatccgttcatttcgagaaaacgaaataatgttaatgaaagcgcggttccagtaactcatgaagcctttttaaagccttacattctaagtgttcgcgtaatgaatgcgaataaggaccattattaccgtgttcaacaaatcagtaatccagatcacgctacagcagcaaatcgttggatttttgaaatattagcccgcggtaactttgaaacagccgaaacgcgcatttcgacaatcacggcggttcttccgattgtaaaaaactcaggcatacgagatttcttggtcgaatatggcgatgtaaaaattggtatcacattagacaccaacaaatgcccaacgtttgatttttattcagtcgcatctacggataactcgtacacatatatatttgatccgagtttgtattcttatgcagcagtagggtcttccgatttagcagcacttagcacacgtattgacggatttattaagcctatgcaacttaaaaatttacttaatgatttgcgtaacccaatccagtctgtccaaataaaattgattggtgactcaattacttatggactaggagctactgataatggcagtggtggtggggttctcggtgtccacggaccggctacaacaaaaacgtgggcaaaccttttgcgtaattatcttggtacagcattttgtacaagcccacgctatggtgatgatacgattgtacagactggagaagcttatttcacaagtgatggtactagtgttttaagtgcagaattgtccaattttacttttaaaaacagtgctacaggtaaagaatttacagttgcagaaatgcaagcgttagtaggatcaattgctagttcacctgtaggtacttttattgacttgagaagccctgcgttaacttcagtaattgcgcctactgacatggaatttttgtttaacgggaatgagttcacaattaatcatgcaaggctaggcaatggaagtgcaacagagtcatttattgatgtttatgtagatgatgttctgcactctagctttaatgtatacacagcatccacgcccgattttctgggagcttatacagtaagtgggcttgctgatggtcagaaaaagatacgtattgcaaaccgattaaccaacacaacaatctatgcccgtttagtttcaattactgcaacacgcaagatttctgtaattaatgagggggtttctggctggaatactggaagctggttatctggtgacaacatatctaataagatcagcattaaagataactacgttattatgatgctcggaactaatgaccgtcatacaacacagaaaattggtacgttcaaaaacaactatcttcaattacttgaccgtatcggcgctaagaatagtaaggctcaaattattgttatggccccgccagctgtaacacaaagtgaagatccgagcacaggtcgtttattccgaattgcagatttaaactatgcaattagtcaaattgcacaactacgatcaatctctatgattaatttgtttgaggcaacatctaagttaaaagctcaaggaattgagtttctactgcctccaccagatcaattacaccctaatgattacggttatggagttatcgccgagtacattatcaatcagattttgaacgcataa

SEQ ID NO: 67509 - DNA, 165 bp, Acinetobacter baumannii; identical to SEQ ID NO: 53990

SEQ ID NO: 67510 - DNA, 816 bp, Acinetobacter baumannii
ttggcgacaccatatataactataggctgccctactactggcggtggtcaagtaatctcagggaatagtatgttcctgattgacggaattcccgttgcctgtgttggcgacaaagcaacttgcccaactcataaagtcgttgcgactattgtctccggtgatccaaacatgcagatcttcggcaaagccgctgctcgtgttaatgattcactctcttgtggttgcaaattactgcctcaacaaaacttagttgttcaagacaatggtggtgcagcatcatcgggtgcaaaatcctcatcagctccaatgtcacaaaaacagcagactactgatagttttagagaagaaaaatatgaaaactattacattgagcagtataaaactgatgtctacattagccataaggctgttcttttaggtgatgaaggtgtaacacctctggatggagctgtaagctattttctaaactacaaagttcaaggcaaggaactatttttaagtgtagttattaatgcagctccattaagccacaagggaactgtttacccttttgggaccgcaattgtttcacgggaaggtaaagagattgccagaaccaagttaaaaagtgatcaaggatattggccaacagataaaaataaggcccctttgggaagttgtactatcaagttgccagaaccaaatttacagctcgttgatgtagaacttgaattaggatataccgcagtaatttcggataccgtgggttctgtacatcccatgcctcctattaaaaaatataagttttccttaaactctgcggcgcgcaaggtgtaa

SEQ ID NO: 67511 - DNA, 264 bp, Acinetobacter baumannii; identical to SEQ ID NO: 53998

SEQ ID NO: 67512 - DNA, 2565 bp, Acinetobacter baumannii; identical to SEQ ID NO: 67282

SEQ ID NO: 67513 - DNA, 819 bp, Acinetobacter baumannii
atgaagtctatagatgaaataaaagctcaagaggtatgtgtagctattctattagataaaaaagctactaatacgcaagccaagatacttcctagtgaaaatataatcattgataggttacttgagcgtaaagttgagttacaacatgcttatagtgagttgtattcaaaactagggaaatatcatcaagccctcacaaattttttagatttgttagtaggaattacttcaatgcatagtccagaggaagtaataaagtctagggctgctcagaaaaaattgaatgagattaatcagcaaatttctattaaagctcatgaattagcagctctcctagaaactagatccgagttaataaatacttctggctttatgacagatacccattatcacattggtaatgtaattcgtgaagcatctcagaataatccgtattttagaacatctttgctagataaattaaagcaactccaaggtcagtttgatcttaaatattggcctcggttagatgatgtaatgaaagttatcgctgaagatgcaagaatggccgtacctattgctattgattctattactgaagtggcaacaataggtgagagagcttccttagttgattattttagagctttatttgaagctattgaatgtaatcgtcagaaagaatatggtttcttacctaatgactttaagttaacagataatacaattgctaccttagcgaattgcgccttagctttagagccaaaagaaatgattgatggcctatatgtgaaaaattttagaagtcgtgagcgcaaacgcataggtagtgactcctaa

SEQ ID NO: 67514 - DNA, 213 bp, Acinetobacter baumannii
atgcttactgtatttaaacttaatcaagaattacgttcgcggtttaacgcgatttatatgacaggttactttgctggaggcgctttaggcacaacggcaggaagttatgcttggaaacacttcggatggacgggcgtctgtattttaggcttaatttttgccgttttatgtctttattattgtgtgagtgatgcaaaaaatcagcacaattaa

SEQ ID NO: 67515 - DNA, 219 bp, Acinetobacter baumannii
atgagcaatcaattaaatgcacatcaacttaaagaagcactttgggactcattaaaggctgtacaaacaggtcagatgcaacctgctcaagctgactcagttgcaggtcttgggcgtgaaatcctacgcacagtaaaggttcagcttcaagtggcaaatcaatctaaacgctcagtacctttagatgttctagattttgctgaaaattctaagaagtga

SEQ ID NO: 67516 - DNA, 534 bp, Acinetobacter baumannii
atggcattgggcaattatgtttgcgcccactgttctaaagagtttcagcgggagcgcggggaagctaaccgaaccctaaagattaaaggttatctcttctgttcaagagcatgtgtaggaatccataaaagactatacaaaaccagtgaacagaagaagaaagaaaaggctgattacgacaggcagtaccgggaaaagaatcaagaggcacttaaggtaaagaaggctgattatttcaaacgtacatacaaccctgagcaggcagcaatagaacgtaagaaaaacatgcacaagcatgtcgagtattgcaaacagccaagatacaaggcttacaagcaaaagtatgaccaatgctatagagccaaaaaatattacggtgaattttgggaatgcgctttagtcctaaatcgcttggaaattgaagttagaagccgagcagattttacagaacgagcaagcctaaaaggaacattaaataaagcacagaataggaaacgagaatatgagcaatcaattaaatgcacatcaacttaa

SEQ ID NO: 67517 - DNA, 252 bp, Acinetobacter baumannii
atggagtggattagtgttgaagagcgattaccagttgaatgttgctactgcttagtttcaaggaaacattacacaggtggggacttatccactcactactcattttttacacctgatcgtgaagtggcaaaaaaaactcatggtttgtactcacgtaaaaatcaggggaagcattccatccacttttcagcaagtgagtcttgctttgttatcactcactggatgccactaccagaaccaccaaagaattag

SEQ ID NO: 67518 - DNA, 435 bp, Acinetobacter baumannii
atggataactacaaaatcaaagttaaagatgaagctgagagcaaagaggctcaggagttgttttttgagcttgggtatggatggatttcagttggtaaaaattacctgcgtattcaaaatgatatgacccatattactgcatatgctgaagattatacgctggcaatgggtatgggtaatgaagcagctatggaaattactttatctcagttaaaaaccatagttgtgattaagcgtaaaagccattcagatgcaacacatattgattcagaggatagattctggttcatccctgacgcagttggtaagcatggctattggtggacagaaagcaattggcattgctctttaattacaaaatgctttcgtaatgagttaatccctatcagtcgaattctaagaattgctgagcttctacgaggtactaactcatga

SEQ ID NO: 67519 - DNA, 366 bp, Acinetobacter baumannii
atgacaaacaataacgaattcctaaacatcacatcaaacaatgttggtgaagtaaagattaatggcaaaagctacttcggtacatccgtagttgttaatggcacatcagtaaccgttgatggcaatacagttagcggccttgagccaaatatcaaagtcgaggttcttggttcttgtgaatcagtgaacacaacttctggtgatgttcatattaaagaagctgcacagcaagttaagactatgtcgggcgatgttacttgtgggaatgtatttggcaacgtctcaacaatgagtggcgatgttaagtgtggtgatatttctggctcagtttcaacaatgtctggcgacattttgaataaaggttaa

SEQ ID NO: 67520 - DNA, 282 bp, Acinetobacter baumannii
atgaaaccagagcagtttattcgtgagtttggggttgatgaggctaaagcggttgtccgatcctctgcaaatgctttagttgattgcggcgatggagaaacattccatgtgaattacctaaaacgattattggaatctgtctatttagttcttgagcattacacggttgagcgcgcaaagatctatgcagactctccatacaccgcgccagaagtgaagcaagcattagagcaagctattcgtgattacgaatcaatatacggaggcagtcatgaatcttaa

SEQ ID NO: 67521 - DNA, 285 bp, Acinetobacter baumannii
atgaatcttaaacaatggcaacgaagtaaaaagataaaggctgaagcagaggcagcagctaagcgcacaattgagcgtgtattgaatgcagtaaaggagccagccatgagtgagtttaacgatattgatatgccaactttacccaagccaattgggagcttacaagagttacatccagagtttgcaaaggttcttaatgagaactttctagagttgcttggcgacgacttccccatagaaaaccacatcagcccacattgcaaaacgataggggaacaatcatga

SEQ ID NO: 67522 - DNA, 402 bp, Acinetobacter baumannii
atgcaagcaaaagcctatgaaagtctggaaggaactcatgatgaaaagacacaaaaatttattgatatagccaataaagtacactctggtaagtattcatattcaaatgcaatctacaagaaagcaaagttaaaattgctagttacatgtaaagagcatggtgatttcgaagtttccccagacaatcataaaagaggacgtggttgccctaaatgtagatatatttctgtaagtgaaaaaaagaaaaaagcaccaaaagatttaatatcggactttgttgccgttcatggtgaaaagtacatatatccagaaccaaaagcgcggtacggaacgaaggtaaaaatcatctgcaaagagcatggtgaatttttgcaagatgttacggcccatcgaagtggatag

SEQ ID NO: 67523 - DNA, 414 bp, Acinetobacter baumannii
atgcaaacacctaccaagcacctttcagggcaaaaatgccctaaatgctctataggttcaccatatcgtagaagcttatatgttcagcaatgtgacaaatattctgatgggaaatcaaatttatatgttgtagaaatgagtttcaatgatgagaagttcttgaaagttggtattacaaatactgatgttaagactagatatcatggaaattgcaaacctatttaccatattgaggaacagcatttcattaagggagaagctggcttcatatgggatttggagaagaaactacacagaatgctaaaggaatttcatgttgagcctgctcatccatttggaggttctaaaactgaatgctttagcaggctaacagagcaagttgaagagattcttttaaaatacagtggcacatag

SEQ ID NO: 67524 - DNA, 504 bp, Acinetobacter baumannii
atggaaattaaagctggggataaaaacagttataaaaatttaggaattaattcagttaagcatattgcaacattggatttgaactgctgtttaatatgtgctgcttttgatggcaggattacacatgtcgataaagccaatgatcaccctttacataaagattgtagttgcttggttatccctgttgcaggcgatggaacaacaattggaaatcgaccctataagattattatcaataataaacatgaaattggcacaatcaattccaacattacatttgctgattggtttcaaacattagatgaagaaatacaagccatatatttaggcgagtttagatttaacttatacaaaaacaatgaatttcaactaagagattttgttaatctggaagaacatagagagttaacacagacagaacttgaagttaaactacacaaaaagtgtatttcacaaaaaggattcttagctaaagtttcaaaattttttaaaggcaaaatatga

SEQ ID NO: 67525 - DNA, 525 bp, Acinetobacter baumannii
atgaataaattatttttacttggtttggtggttttattaggtgggtgcacacaagcacaagttgataaaatgagtgtggctaaagtggttacaagtgattttgatggaagtaagactatttccagccaaacaatgcctgcttatgtaaaagaagggtggaatctaagaggtgtatcttttggggcgcactgggttacatcagctaaaggttatgtggcatttgatgtggaatttaataatgctaccactaatttaaataaactttatttaaatattgatggcagcattactgaacatgaaacattagggaaaatgaccaaattcagaaacaatggagcatataatactagtaccaatagttttattgttccattgtcggtagcaaataagttggttgattccaagaatgtaaaattcaaagttacaactattagtgatggagcaagagaaggttacttaattgaaggtgacaaagtaactcctgctgctaaaagcctgattaatgttattaaacagattcaataa

SEQ ID NO: 67526 - DNA, 2703 bp, Acinetobacter baumannii
atgcctgaatctgtaagccgcttggttattgtggtagatgccaaagatggcaaaaaagaagtcgatgctttagataagtctctaggtaatgttgagaaacaaggcgataagacttcaaaatctattaaaaatgtaggccaagagacaggtaaaactactgatttattctccaaatttaaggagcaaatcaattcatctttaggcaatacacgcattggttcagtaataggtgatgtcactgaaaaagtttcagctttgcgtggtggcgctttgatggcaggtgcagcacttacaggaatggcggtgggtggtgcagcagtagcatttgctggactttctgcaatggcaattcaagccgctaaagcggatgctgagatgattgttttagcaaatagagcaaacactagcacacagaactttcaaattctttcacatgctgctgaacagcttggtatgtcacaagatggtttggcacagtcattagctgatgcacaagaaaaacttggcgaatttactgcttcaggtggttcaggtgaggcagcagatttctttgacgcattaaaaaataacaccaaaatgacagatgcagagattcaaaagtttgcgaagactttgcagggtaaagatggtgttgaagcacttcagctaatgaaagataagcttgatagtgttggagcatctgcacaagaacagagatttgtctttgaaagtcttggtaatgatttaggtaatttactcccattgttcgaaaatggaggggctttattagatcgttatggggaggcattaacagaagcggggattatcaaaagcaaagaagctattgaacagtctcgactgcttgctgctcaaactaagtcagttcaaacccgttttgagggatttaaaacccaattagcatctcagatgatgcctgttttgaactcacttttaagtagtttcttacaaggggctgaagatggtggccaatttggttccgtaattcaatctgtaggtgtaattgctaagggtgtggcagtaggaattattgggctagcaagtgcaattcaggtcgttatacgactcattcaaggctttgtagagcaagcagcaaacgttggcgctacatatgcaaatgttatgacagctgatggagttgttgctaaaggacaggctctagttaatggttttaaaaatggttggtccatcgctagtgatactgtaaacgattcagtagcgaccattaaaggctcaatgaagtccatgaatgatgtgctggatgcatcagttcctaaacttgataagcttggtcagttgtattacgacaccagtggtgcaatagacaaaaccaacaagggccttaaaacaaacgcaaaagaagctaaagacgcagagaatgctgcaaaaaaagctgctcaagagtcgaaaaagcatgctcaagaattagagaagatcaatgaagaacgtctcaaaattcagtatgaatactctgataaatccaaacaaattgagatggatttgcagaaggaaattgagcgcttacagaaatacggcatgaaccaatatgtgtctgtagcgattcagaaagcgaatgatgcaaaactcattagtgatgctcaacttgcttatgatctttactccttcaagatgaatgagcaagagaagcttacagctcaagcacgtataaatacgctaaaaatcaaggctagcagtgaatattcagaagaagagaaaacctctcgattgaaagcactaaaagcacaatatgattatgacttggcagaatttaaaaagaatgaaaaacggaaacgcgatgaagcctgggcaacagttcaagctattagtggcgcattggaagaagctcgtgtaaatgcggtttccaaaaccagtttaagtccattgatgcaatcaagatttgacttaaattctgcacaacaaagtggttattctcaaattggagatgatttaaataacggcttaaatgcaatcaacgaaaatgagtatctggatgagcaacagaaatatagtgaaagactagctctatttgagcagttcttagcagctagaaaagcactaaatgaacaatactcaaaggaagacagagacctacaagatcaaaacaatgctgcgaccttagcgggctatggagcaatgtttggaatgatggggtcgatgttagataactttggtgcaaagtcatctggtgcttataaagcagcttttgcattacaaaaggggtttgtgcttgctagtgcgatccttaatgcaaagggtgcgatattggctgcttggaatgatccatccaacactacaatttggcaaaaaatggcagcagcagctgccacagcagttcaaacaaatgaacttatgtctgctattcaaggtgttgctttaagtggattcgctactggcggctacacaggtaacatgggccgaggtgatgtggctggggtagttcatggtcaagaatatgtacttaatgccgcagctacaaaacgcgttggtgttgatacattgaatgccatcaactctggtgggagtttggagagaacagtttcatcttctggacagcctgtcactattcaagtgtacgtaactgattcaggggttaatactaatggtgctaatactcaggatcagaagcagcttgggcaaatgatcggcaatgctgttagaacgattatccggcaagagcagcgacaaggcggtttattatcaaagtaa

SEQ ID NO: 67527 - DNA, 612 bp, Acinetobacter baumannii
ttgttatatggttcgaatcgtgaacgttcttatagtcgtttagcggtgatggaagcagggcgtatcttggagcagtttggtgccgaagtaagaatcttccatcctaaaggtttacctttacctgaagatgcggacactgagcatccaaaggttaaagagttgcatgatttacttgcctggtcagaaggtatggtttggtgttcacctgaacgccatggttctatgagttcaatcttcaagtcacagattgattggattccacttgctggtggagcaattcgtgcaactcaaggaaaaaccttagcacttatgcaagttagtggtggttcacaatcatttaatagcgttaaccagatgcgtattttagggcgttggatgcgtatgatcacaatcccgaatcaatcttcaattcctaaagcttttttagagtttgaagaagatgggcgtatgaaagcatcttcctattatgatcgtattgtggatgtcatggaagaactctataaattcacgctactgacacgtggacaaagccaatatctaactgatcgttattctgagcgtaaagaatcggcagaagaattatctaagcgtgtaaatcagaggagtttgtga

SEQ ID NO: 67528 - DNA, 819 bp, Acinetobacter baumannii
atgttgaaaaaaatattattatcacttgttaactgggttagaaaaagccaaatcatcagcacaataagaagatttgataaagatgttgaccataataaatggtgtggcgctgaattttttccaaactcttttgagcctttttatcttagcccgccatcaaattacaatcctcaaggtgtgcatcgcaataatataattgaagataatatcggagacgtagcagcaaaagtaactgctcagtttaaagataagatcgtagactttctaggtgcggacgttcggcttgatgatatttacatgttttggtatgaccccaataaaagaaaagaatggagcctatcaaattcgtggcacgatgataatgtagggcatcgtattaagatttttgtttgttttgaggggaacggcaatactcctacagttgttattccaaatagctataataaaccttataagccaaatactagcgagattttaagattcgcaggcaaaagaaatataaatagtaataatggcgaaattaaactagcttataaatcaggtgatattgcgatgtttgataccgcctgtttgcatcgtggattatatgaagagccagctgctattagatcagtattagttatggaatatatagaccggaataaagctaatattattgcggggaaatctccttgtggccctggtatgagcagaacagggaaagtagtttttaaagaaggtgcctacaaagcattaaaaaatactggtctgatagacgaccaattaattaagaaagaaaatgatgagtatatttattcgttattaaacttagccagttaa

SEQ ID NO: 67529 - DNA, 2820 bp, Acinetobacter baumannii
atgacagttcaggtatcggatcggttaagtcaactatatgttgggaatgggattaatacgcgatttgattttacatttcgagcttttgagcaagaagatgaaacaggcataggtgtacgcgtaaaagttggtaatgattttgaatttattgatgagtctgaatatgctgttactcttaatccagataatttaggcggatatgtaacctttgttgaaccacctagtgcagttacctttttttatatcgcaggcaaaactcctgtagatcagcttcttgacattactaattatgacaatttctatcctgatgccattgaacgagcattggataagctgacagcaattttacaagaatggaaacatcttgttgatttcgaaacacaagctcgcattttagcagatattgattatgatcaattggcaattcaacgtgaagccgatttaaaagcgtacattgatgggattgcaagctccattattgggcaacctgttgttggtttaccagctcagttcgttatagatggcactgaaaatcagaagcagattaataataaaacaatccaatatgttgactctatttcagaactgagattgcttaacccaagaaaagacggacaagaagtatttttagttcaacacacctccgaaggtcgcggggcgggttggttcgtgtgggacgcatttgacactcagacagataacaatggaaccgttgtaaagcgtgacggtatcgttgttggttcgtggaagagaagatttatctctctaaaaacggatgattttggtctgcatgaagcgactggtgatactactgctattcttcaattaatagactcccttgctgacacgattgttgttaataatggtgaatatttaatttcggactttaaaccgtcaaagaaatatatatttgaagataacgcatggtttaaaacaaatacgacagcgacaagtaatggggtaattgctcaaacaggtttgaaaatgatcagacctaagattaagcataatgtgtcagtagctccaacggatggagactacggcaacgctattcgtatcggtacttatcgacaagcaaatgatttaactgtttctgttcacgatgtagttattgatgcgtcagaaatccaacttattaatacaacaaatgtgggacaaggcatcgaaatcttaggtaatgcctatgatgtgacaatctctcgcccaatcattaaaggaaaagggcttgggattatctgtcattggggcggtgatgtcggagaagatggacactcatctactgtgacgtattcataccatccgcacgacattaagatcatcgatcctgaattttacagtacagctacagatgcaaccggacgtatgcaaactgggcttatcttgtcagcttgctacgatgtcgaagtcacgaacattaagtcagacggtgttgctactactttgtataactttgttggtgacgtttacaatcaggtcgctgtggatcgggacaaagataaagtttgcactaatgttaagattgatggggtaaacattgataactttgtggatggctccacaccagttcaagcgattggttattcagcaacagtacgcaccgcacagggcatgacgattgcaattgatgatgatcaatatatgcagatgagcatgaagggcatcgttattacttctcgcaacgcagcaaatacaagcgacctgattttagtatcgggcgtaaaaaatgttgattttgaagctgaaatcgttggtgttgagcatgacgggcgctttgctcgtattcaagcaaatcaggactgtagcattaaaattacggggtcatctaagcgcggctttatcaatagaggaaatcataacactgatattactgtaaattctgtttacaagacaaagagcagagtaccgtctgaaagaggtatggaaattcaatcttatgagtttgccactagtggttttaatgcagcacagggggctactagtttatcgttttctgtatcaacgacaacacttctgtacaaaggttcacttgtactaaaaaataacaccccagttgctcgtgtaagcaaaacaggttactttgaaaatggtgtaacaaatacacttcaaattgacggtttgagtgaagcaataacaactagcgatgtagtaaaaatccttcgcgcaaatgacgggtgcgtggttaaaggagtgatctcgaactactacaataatgtatatggcactaatccagttggtaccataattcagtcaaaactttatggcggttataatcgtaatattatgttcgatggagcatatttgattaatgtcgatataactgattgcaaactagaaaaagttgggcttgaaaactcaagtatgagttgcgttgatataacagttgattcagcaactattagaggactacgaatcaatgataataaatttgatcaaaactcgacaaatcctaaggcaaatcaaaggatatatatagacacaacaaatcattctggagtcactatttctaggaatatcgcgtccccatgtctaagctctatcccagtaaatattaaaccttctactgcccccggctataaacagcaagcacagatttttgctaacagttttggagacgtaaatactactgtagctacagcttatagcggattctatgttggcaatacttatacgggctttgttcgaacaaattatccatcatctggtgtctggaatgttggtgataggcttttaaaagaaaacgcagtaattggtcaaccacaaggttggatttgtacaactggtggagcttccccatcgtggacaccattagcaaatatttaa

SEQ ID NO: 67530 - DNA, 2253 bp, Acinetobacter baumannii
atgcgtattccacaatttaatcgacaagtttctgacaatagcgttccaaatgttcaagttaatgggggcatatcagcaggcgaagcggcaagcctagttggtaataaaactgatagcttagttggcgcacttaattcaggtttgaatgcgtaccaagcataccaagatgaagcggaccgcgtacgtgttattgatgcccaaaataaactcgctgaattaaaacttcatttgcaaaataatgatgtcgatgggtacggcaacaaaaaaggggtagatgtagtaagttttgatgatggcaacggtggagggtttgtagattactatacaaaagcctatcaagacggtattgggcaaattgcaaatactttaggtaatagccgtcaacgtgccttgtttaaagaaatgtcagaacgtgacgcggtgcagttcaaaggctcattacaaaattactttgtacgtgaaaatgacgtttatcaacaaagcgtttattcatcatcagcagatcgttttattcgagaaataaacgagaaccctggtgacttcactaagattgatgaaagccgtgctaatcttaaagcgtctttaggtaaattaatgaatcttgaaggaaaggcagcgactgaagcagaaaacatttatcttaaaaatgtctcggtggcccacatcacaaacattagcgcctttgtcgaaaatggtgatttaaaagcagcacttgcctataaaaataaatataaagacgagatttcattagcagatagctttaaggtagatcagcgtattcatcaaaaacttgaagatcagcaagtcgaatctttagttaatatggccacaactggaacacaagaaggcagcaaccctgctttaaatgttcccccacaagcatcagcaaaaattgctcaggagcttaaaagtcttacacctgatcagatgaaaaacatcaaatacaatgatcagcgtttggatgtttacaccgtacatgcagcaaaagaaaaagacatggattgggccgcaccacttttacttgctattcgtttatctggtgaaaaatcaaataacgatgccgtatcaccaaaaggtgcaaagtcggttatgcaatttatgcccgaaacatggaaagagtacagtaataatggcaagcgggatattaataaccccgcagatactattgatgcttcattagagtttattgactggattagcaaaaaatataaaaccaaagacccaatggttattgcggcttattataacggcgggggcaatgccgctactgctgttttaaaagggggacaaccccctgcgactgaaacacgtaaatacattcagcgcattgataaatggttaactgaagattttggtaagtatgcaaataagcctgcaaaaacacgggaacaagcttatgaagatatttggaatagcaacgttccggtagatgttaagcaaaaggccttgattgctacagatcggtactatagcggacaagataaagccaaagaagaacgtcaaaacaaagaatacgacacattatacaaaaacatcgtgtctggaaaatatacgtttgaacagatacccgcagggagcatcacatcattagagcctaaccagatcgatagtttgcgttcggtgagtaagtcgatttactcgaaagatgttaaaacggatcctgttgttttaagcatgattacgcttaatcaagaagaacttttaaaaggtaaaccaaaatcagttttacatcagtatgctgacaaattgtcgccttcagattaccaagaagttactaaaatgtacgctgaacaaaacggccttaaggatggtaaaaaagaaaaaccaaagactttcttgatcgatgacaacactgtatcgagtgcattaaaaccttatctcggcactattggtattactgatacaaaagataaaaagcagcttttacactataacgcagttaaaacggatttaatgcaaactctaagagaggccgaagctaaaaacgggggatatctaagttgggaacaggtaaaccgtgttgttttgaaaaatattaataaccaagtgcgtgtcactacttcacggcctttctttgaagataaagttgaaatgaaccgtgtttatgcacaagtaaaaagtaaagctgatataactgattcaatgaagacaaaaattgataatatatttaaaaagcagggtagaaatcctaataacgttacggattcagaatatatcaatgcttactattcaataatgcgaaggggtttttaa

SEQ ID NO: 67531 - DNA, 183 bp, Acinetobacter baumannii
atgtctcagcgttcatttactttaaaacagacatggcaacggccaatcattttagtacaaggcttagtactaccattattgttattaggcttatggcaatacaactcaagcttaggtgccagtcatgcctatgcatttgttcctctacaaaacatttattttcgcatttatcaaattgcttga

SEQ ID NO: 67532 - DNA, 522 bp, Acinetobacter baumannii
atgaataatcgtttagatgattttgaataccacttattgaatgatgagcaaagtattattgatactcttcgaaaagttgaaggcgaaactgagctgcgtcgctttatttcatattggcttcaacaaaatagtcgaggtgtctataccgtaacgcaagaagctgtagtaattacagaaaagagaactgatattagattactacccactgctatggataagtatgcagcaattgaattaaagcttgatgataatcgaaacaaatggactggagcagatttaaaagtagcattggttgaccaactcgttggtcgatatttgaatcatgaacgatgttacgttggttgtcttcttattggtatgagaaagactcgcaaatgggaaaatccagaaacaaaagagaagatgaaccttaatgaaactgtgaattggcttcaaggaattgcatacaaaataatggatgagcgcccagagctttatatttctgtcaaaggaatagactactctatagttgctaatgagtaa

SEQ ID NO: 67533 - DNA, 693 bp, Acinetobacter baumannii
atgaaaaataatacactgaaaatgactacattatgtatgttgaccataggtataagtcaatttgcatcggctgaagcgacgcgtgcgacattaccattactcaaagcagagcaactcccagcatggtgtgattctaatttaaaaaaaattcagcaagagatttctagttttgaaaaaacgcctgttaaaaacgatgctgccgctgctccgatattagccaagtgggataaaatttttgctcatcttgaagatttttcggggcccataggtctatatagtaacgtcgacccagatgcgaaattacgtaaggcagccgaagactgcgaaatcaaaattaatcagtttcatactgatatcttccaaaattcaaaactatataacgtaattaaaaatacaaaagcaactgatccaatagataaaaaataccgtcaggatattctcgatcagtttgaagacacgggggttcaattagaaccagcaaaacgtgcaagaatgaaagtcattctggatgagttgactaaactcgaacaagaatataaccgcaatattcgtgataaccctgaaaaacttgaatttactcctgaagaaatgaaagggctgccagaaagttatatttcagggttaaagaaaaatgctaaaggtaactatctattaggttttagtatccggaatatcgtccatttatggagctag

SEQ ID NO: 67534 - DNA, 1173 bp, Acinetobacter baumannii
atgccagccaatacccgtattaatacaccagaaatggctgaacatgtattagcgtcgggtcatgcggatatggtttcaatggcacgtccaatgcttgcagatcctgattttgttttaaaagcaagtgaaggccgtagcgatgaaattaatacgtgtattggctgtaaccaagcttgtctcgaccacattttctctatgaaaattgcaacatgtttggttaatcctcgagcatgttatgaaacagaactaatctttaaagaagcacaaaatcagaaaaatattgctgtcataggtgcaggaccagcaggtttaagttttgctgtatatgcggcagatcgtggacaccaagttaaaatctttgaagcaagtcatcaaattggtggtcagtttaatatcgctaaaactgtgccaggcaaagaagagttctacgaaacattgcgttatttcaatcgtcaaattgaattacgcccgaacattgaacttgtattaaaccatccagccacttatgaagagttaagccaatcagactttgatgaaatcgtagttgcaactggtgtaacgcctcgtcaattgcaatttgaaggtattgatcatccaaaagtgttgagctacttacaggtgcttaaagagcgtgtagcagtaggtcagcgtgttgccattattggtgcgggtggtattggttttgatacggctgagtacctaacccatgaaggtgaaagtggcagtttaaatccagaaaaattttatgaagagtggggtattgatactcactatgaacatgtcggaggtttaaagcagccaaaagttgaagcttctgaacgagaaatctatttgttgcagcgtaaagcttcctcagtaggcgcagggctgggtaaaacgactggttggattcaccgtaccgggcttaagaacagaaacgtgaaaatgttagcaggtgtgcaatacgacaaagtagatgatcaagggcttcatattactgttgatggcaaaccaacggtacttgaggttgataatgttgtgatttgcgcgggccaagaatcatttactgcgatgtatgaccaattaaaagcagatggtaagaatgttcatttgattggtggtgctaaagaagcaggtgagttggatgctaaacgtgctattcgtcaaggtgctgaactagcagcggttctttaa

SEQ ID NO: 67535 - DNA, 1047 bp, Acinetobacter baumannii
gtgaaaatctgttttgttgttaattctttaaagaatcgctcaggtgtagaaagagtattatcgcttttagcaaattattttactaaagaaggttatgaaataacggtattaaatagagataccaattttgataatgttgcttttgatcttgataaacgagttaaggtaattgctctaaatggtaatattttagatttttctaaaaaaataagagaacactttttaaataataactatgatgtagctttaatacataatatgggaaagttaaccccatttttcgctctttcaaaaaagaatattccaactattagtttggagcatattgcattcaaaactagacctaaatggctgaaaactatatctaaaatactttataaaaatatagatcatgtggtgactattaattcagatgatttgaaatcatttaaagaaatagggtgttctagagtttcagttatacctaacccatcctcatttcctagtgtttctcttaatgaagtaaataataatactaaaaaagttctggccataggccgtttgacatatcaaaagaattttcatgcattaattgaagcttggaagcttttaaatgataaaacattaggttggcatcttgaaatatatggtgatggagaagataaagattctttaaatgatttaattattaagtataagttggaaaatgtttttattaaggctaatacctcatctttaagtgaagtctataagcaagctgcttttcttgttatgagttctcggtatgagggctttggtatggttctagtagaggcactttcttttggattacctgtagtttcatttaactgtccgcatggaccttcagaaattattgatgattctgttaatggttttctagttgaagatcaaaatattgaaaaattaagtcaagcgatgttgcgacttatagaaaatccagaacttaaaaataaattaagtcaaaacgcattagagtcttcatataaatatgatattaataatattggacagtattggaaggatctatttaaagatatggtgaattaa

SEQ ID NO: 67536 - DNA, 954 bp, Acinetobacter baumannii
atgaagccatttagccaactacttgctcagtatcaggcggatatcgaagtagaaaatagtgataaatcacaaggcttgagtcgggctgagtctgaattaatagatgcctcagtaaggattaaatcagatccaccctcgcccaatgatttcacttttatgcactcaatcatgtgccaagtcggtttgcctcgttcaagagtaaatggatctgagtttgagaggcgttgtggtgctgctggtctatacatccgagcgggtaaaatttgggatggtaagcagtttctccaacagcctgttccgtatggtcccatgccaaggcttgtaatggcatatctgaatactcaagcgttgcgttcaaaatcacccgagattaatgtcggcaatagcgccagtgctttcctcaaacaactgggcaaggagtcatcaggaggaaaaaatgggagctatacaaacttccgtaaacagcttttggcgttatctgcttgtagtattacccttggttttagtaccgctgataaagcgttcacttacgatggtaagcccatccaaaaatttgaggcttggattggtaacagcgacaatcaaggtgctttatggcctggtgttattacattttcacacgagtattttactacgctaagcgaacatgctgtaccgcttgatttaagggctctaaatcagcttaatagcagtgctcttgcgatggatatttatgccatgctttcggatcgtttacatcgaattagcggtaggcctgtcgtattgtactggcgtaatttgcgcgagcagtttggtcaagaatacaccggagacgacgctgacaggaactttaaaaaggtattccttcctgctctaaagagagttcttactgtttatccggatgcaaaagttaagaaagtgacaggcggaattctgatgatgtccagccccccaccgattccataccgtaattga

SEQ ID NO: 67537 - DNA, 228 bp, Acinetobacter baumannii
atgcagcaaactttaaatgaaaaagattacagtcacctgcagatgatctctgtgtatgaggtgactgccctacttaaaatctctgtgccaacgcttcaacgaatccgcacaaacgacccttcatttcccaaaccatataaaatcagtggcgataaaacactaagatacaggttagatcagttggaggcatggcttgattcccgcagggtaagtaatgaagccatttag

SEQ ID NO: 67538 - DNA, 2760 bp, Acinetobacter baumannii
atgtccactatgccgcccatcatgacgaggtttgttgcctcgctcctatgtttaaccatctcagttcttccgatacattcttatgcgggtaatcaggaacctaacatcggagctgttggtcgtgatgccaaacaatttggtttatctattgcgaacggagttaagcaaaactctgctcaggttcaagatggtaaaatttctctaccagtcggtaatggtcaatcaacatccataaacataaatgaactgtttcctggagttcaacctggtcaaaataccgcagagtatttccctgatgcagcatctccagaggagctagaacagatatttagtgatgctgatgctatggatcagtttggtaatgaggcaaaagccaatttattccaagacgccaacagctccaatccctcaatatcaggttctgcatatcaagttctcatggatgcggccaatcgctcacgccctgatttcagtaatgacccggtattgaatctaagcaaaaagacctatgaggatatggacctcatcgcaggtggctttggggattgttctgccgaaacaaccattaatcagaatactatcaacgcccacattccagagtatgaacggtgtcagcgtgttgtagatcaaagcgcggactgtgaggttgtccatgactacgatgcctctgtggtgaagcactatgatggcccatacaacctaaagtcctgtggtgacggatgcacggagctctggattggtaaggttggggacgattactgggctggtaactgtaaaatctatgaagagtacacaagagtccaggttagtaacccggatgctatcgtttccgcaacacttgaatatgttaagtgggatgattacatgcaagtgtgggtcggtaagtccggccaagaaactaaagtgtggtctggcccagatggcaacttccctccagaaacagccggtagatgtgagctctccacgagttgggagcgaaaccctaatgttgatgtcactccctattttaagaacgtgaaagatggtgatgttgttacattcaagatccgtgtttcagtaactggtgaaggtgagggttttggccgcataaaactccgctatgacccatcgaaagccattaccaaggatgagtgggctccacagagctgcatggattcagccaaaggggttgtagatggttttgccgaaggcgagataacatgtatagatgacccgactgatgctacgggctgcacagtcatcaacggggtcaaagtttgcgaatcccaactgaaaccgtcacctttccctggcattccaaagctgtgcaaaaaggttcgagttaaagccgactatgacttttataaggggcaaatggactgctggacagatcctcaaggtgaaacacactgccctgtaaatactggtggaaatctcaacagttgccagatgtatgaggataatcctcagtgtggatttattagttctgaatgtattgatggagcagagggttcctcgggtaagtgttatgtgtttaaagatacctacgactgcggaacggacatatcaatacctactttagagaaagaaacgacgtatcaatgtggtggacccattaggtgtatgggggatgattgtctcgatataacaaagtcacaaagcactgatttcgctcgtgcatctgcattgttgaatgcagctcagttcatgactcaggatatgagttgtactggtcaaaattatgatgataaccccactggtgaagaaaatgtgatgtgttcagcttttgccggtgaggctggggaatgcaagattgctgtgggtggtgtctcagattgttgtgaaaagccgacgaatatttcgtttgctgattatctcaatttgattatggccgtgcctaagctagacggtgccgttatgggactctctgatggcagtgccgtgaaaggagcataccaagtattaagagaccccgtaatgtctggctggaccgaaataacacagccttttgcaagttatatagaaaatattagtggagcggttgatagttttctccagcctgttcaacagtttgcccaggagactattggcgcattaaaggagcaaattaccaagctgacttctgaagctctaggaaatgcttctgcgacgggagccgctggcgtacctgctggggctcctgaatcaatgactgaacaaatcctcggccaacaaggtgccgccatgctaagcaccgttatgactgtttacacagtctatgtagtgtcgatggtcatgatccaaatgatttggaagtgcgaggaaaaggagttcaccatgaatgctaaaagagcactaaatagctgcacatacgttggatcttactgcaagtccaaagtactgggagcatgtgtcgaggagcgagagtcctattgctgtttcaactcgccactctctcgaatcatccaagagcaagtgcggccacaacttggccttaactttggtgatgcgcgcacacctcaatgcggcggaattccattggatcgaatagcggatattgattggagtaaggttaacctagacgagtggttgggtatacttcagcaaaatggaaaacttcctgatcccgcatcgttaaacttggatgctttaacgggagctggaagtgattttaatattgatggtactcgacaagacgcctcagaacgtattatggagcggctggaagggattaatgtggacaaaattagaaacgacaaagcgcgtgaaatctttcctgacttggatggcaatggtggttga

SEQ ID NO: 67539 - DNA, 534 bp, Acinetobacter baumannii
atgagtgaatgttttacatctggttcgttatctcgctgggtaaaagcaaggcacatggcattggcgggttatatcacaaagataattatcctagagactggtttgacttataagcaagttcgcaggctgtacgctgagcttgaatattgcggatatgatgtgaaggataagaaatccaggacattccgtggtggagcgacgctgatccacagtcagacatctaaaattcaagcatcgcttttaatgcagctctattcaaatcttggaggggaaaaagttaagcgttctgtagatattagcgctctgaataaagcgtttaggatgtatcacgctatccgtaaagaagtaccaggtatgaaaggaggaaaatgggagcccttcgacattacagatgcctggtgtcttgcctctgaactgcgcaatggagaagcaatgatagagcattgcgagcaatgccaatgcactttttttacgtcaattaatcagcgaacatgtgttgaatgcccattctgccgggtctcaaaagctgcctga

SEQ ID NO: 67540 - DNA, 612 bp, Acinetobacter baumannii
atgtatgccttagagccgttagaacgtgatgttattggtagctttgacaggtttgccgttcaattgagtgaagagaagccagaccaagatatttatgagttcgatttgactctgtggacactactgaagcttttatcagccaatgcgccatcccaggttagcaatcatttttctcttccagaagatcttgttaataaattggcgtcaactcctgacagttatctttcacaattagcgagtggagttcttctgagctttaaacttgaaacagatcaaatggaagtgatcgatactcttgccggtagctacgattctgtcatatgccttaaaaatgttgtggacgactttgacgcagcgtactggctattgcttaataagttagctagtagaaacttggacatggcgatgcaaatttttggtgtatcttctggtcttgcttcctcagtcgccgcctcctcaaacagccagttaaggtcgttatcgcatagggtcgttattagattttcattgagatttgatattggcgtactcgatcaattcttatcagcagctcttgccgatacaacgccgattttattaaaaaagattcagcaatctttggtgtggagataa

SEQ ID NO: 67541 - DNA, 210 bp, Acinetobacter baumannii
atgaagcatttagatcgtgaaactgaaaagcgattaaacacagtcgttaaggcaatcggaacattgtttattctaagctttcttgctcacttggttatctcgtcgtggagagatgaccaatatggatttaccttactagcgttgattgcagggagcgcgttagtttcaatcaatctgggccgcagaaaaaaaggtaaggaggactactga

SEQ ID NO: 67542 - DNA, 291 bp, Acinetobacter baumannii
atgaaaaaggcgctattctctttgtttttaatcgtaagtttgttctattcgtacaaacttcttgccctatggtcgctcatattttttgtagtcggagtttctctgctggcatctttaaagattggtaaaagagccaatctaatcagtagttccgggagtaaaacgaacacattatctgggcgagatctgtttgcagacgtcacatacaaccctgccacaggatctccaatggtaagtgacgtagatgtatccggaagcttctatggattgaataaaaacaaaggctcctga

SEQ ID NO: 67543 - DNA, 255 bp, Acinetobacter baumannii
atgagcagacgagctgaatatagacgcgccattaaagagcttaaagtgatgatattactgggggaagggagatggctaaacgaaaagccaatctcctgtggaaataaaaaatttatcgtcgatggttcggtgttgaacaatgtaatcagagagcatccggaacttaataaacacattttgataggttttttttcgtcgcctcaacggtatccgttattaagatataaagataggcagttaacgttaagtctataa

SEQ ID NO: 67544 - DNA, 3405 bp, Acinetobacter baumannii
atggattttagtatttattccgtcggtgatgccgcatttctagagcaaataatgattgctgtggcgatggctactggcaccggtgattttgaacgcatggtaagtattggccttttaattggcgctcttgtcatctcatttcagtcgttattccagggagctaaatcctgggatttacatcaagtttttgcttgttggctcgtgtatgccatttcctttggatccggcgttacggtaactattgaggacgcgtacaacggacaagtgcgagtagtggataacgtacctgttggtccagccgccgctggttctataatctcaagcgttggatttggtctcacaaaattatttgaggttgcatatagtcctgtcgcgagtgtgactgaatcaaagttcatggattctttagagctattatcaaagctcagaaatcacgaaatggagtcagcactatggactgtctggaatgattccctaggaggcggtgctgttgatatgaagaaaagcctgactaactacatatcggaatgcacagcaattaaattttcattaggtgagtcaaatgaggatcaaatcaacacagagaattggcgtacagctctcagatttgattcacaaatatatgggacccgattgttcctgtctccatcaggcccgacagatcccagttgtacagatggctggattcagttgagccaatcctttgaaactgcattcaattctggcctttcgcaacaagcccttggctatttgctgtctaccactgatgctttgaatgctacatctgacgctttgtatcgcctgcaggttacgaatgtggccgcaggtgattttataaaagccaattttctgcaacctatcgtacagcgtggctttgctcagtactacagtgatatgaatgatccgtacgcacaaatcatgctcactcaagctgagtctcagcgaaatacgcaatatgcagccgaacagtctttgtttgtaaaatcgattcaacctcttatgaccttggtagaggggtttgcctatgcgattacgcccatagccgcatttgtgatggtgctaggttctaaaggtttgctattggttggtaagtatcttcaaatgcttatatgggtacaactttggttgccaattatgtcggtaatcaatctattcatttacataatggggcagcaggcgctcgcaaaatataccacagggaacttatcctcatttgaaggcgttgcatatgctggggccgaaattgagcgttggatagggataggtggaatgatggccgcagcaacgccagtcctatcgttgatgttagtaactggctcagtatatgccttcaatagtctcgcccaacgagtgggtgcgagtgatacagtcaatgaaaaactaatgtctccagacttagtggaccgtggttctgttttgagccaacaaccacaatttaatcaatcccgaattgctggaacaatgacctctggaggtgagtcgttagttgatagtattaacttaggaagtaccgtaagtaatgcccttagcagtagttctgctgctactgcacaggcccagaaaggctttgctagccaattaagtaatagtgtgttttctggacatggttcagaacagacttattcacaactacaatcattaggacaaaccctgagagcgtccgattcaactcaggctaaaagtattttgtccgcggcgcagaactacgttactgatcgtgggataaatgcttctcacacggatgctgtggcaggagctattgctatgcgtgctagcgctggagtggatgccggaaaacttgctgctgcttttacaggaccggttggtgccgctgtaaatgccgctaatccggtatctatgaacggtagtttagatgtatctgcgcaatcgcagagtcaggatagtagacagcagcttagttctgatattgactctttatctcgcggactcggttttacaaaagatgacagttcagcattaacgagtgatttggcacggcaagtgtctactgataaaggtcaacgttttacccagagtttaggtgaagagcagagaaagcagctcatgcaatccagttctgatcttttgtcttcgcaacaaacctaccaagagttatctcaggctcagcaaactatcgggactactagcaacaataatattagcgcgttagctgacaaagttctgaacaactggtcagccggtaagtcattgtcagatggtgttagacagtcatcgccagagacaagagattttgcgcaaagaaaagcccagcattaccaagatttaggtattgattcccagagggcaatagttggagggcagttgtttgctatgctcaattccaactctccatctgaacaagcaattgcagccagtgcaatagcaaaggccactggtggcaacagtggtattgactttaatcaacctggtcaaagtgcaatgttggtaaaggatgctccgcgctatgtctcgccagttgaaaattcgagcgcactttcggcaccggaaagaatgagcaatgaacaaaagcttttagctgaatcaggcagtattggatctgaaaattctgttcgtgacgctcatgaaaagggtatccagcaacttgagcagagttatgggacaagcagaaatgaatatcttaatgaccgcttgcctgcgttaagagcacagatcatggcatccgatttggccccgtcaacatccagtgctttgtttgcaggtgctgagggcgcaggtcgttttgtacagcaagttgtgggtggcgcaggagccgccaaagaagggttcgcagagagttttgggcaatcgatgtctaagttagcccagatgactccggaacaacgagatcagtttattgaggacacaaagaaaggggacgattacgtcaagcaagagtatggtcttggaggcttcctggctgtaggtgctgcaaatctgggtagggatatcattggtgtggggatcagtggatttgaagccggtaaagaatggttaaccggtaagtcagatctttcagaggcagcacagggaatgtctgttagagaaagagggatgttttttgcttctgcattagcaagtgcaagcgaggctggagctggaaaggctgctgagtttgttcagcaatatggtgacgaattcaggcagatagcaatggatactgcaagatatgattatggtttgaatagtcaggcaggagcagaattgtttgctgcatcgttgatgggcggcgattcatcgcgctctggagaactaagagaaaatctcagagaagaggttggtgataacgcattggcagataaaatggctgcgattattgaaagttctgcgggggcaggtaaagaccaagcgggcggatatttagcgcctgtttcaagatacttatctgtagccaaaggaggccgttaa

SEQ ID NO: 67545 - DNA, 1425 bp, Acinetobacter baumannii
atgagagtctctcccccttacattagaacactatctgcctcttgtttaatcatcttctctgtcgtcgccactcatgcctcggctgaagggcttcagtccgagatggatagactattcaacgaaatgagtaatacaaccagaccgggtattcatcagacacaacgccgtggagttattgcgggtgggcgtgtgaccaccaaagcgcgtatttttgatgaaaacctagttagctttgtccctccatcctggaaagctgggtgtggtggcgttgatctattcggtggttctttatcgtttgtgaatgcagatcagattgttcaactgatgcgagctgtggcagcaaatgcaaagggctatgcttttcaactagctctggataatgtttttcctgatggtgccaaatggatagaaaactttcagaagaaagttcaggctttgaaccagcatttaggcaattcttgtcagttagctcagggtattgttaacgattcactaagtgcttttgacacaaaactaaagaacgatactcgtacaaaagcatcgaccaaaggcttatttgaagacatgttttctgcaacgcaggaaacggatggacaaacggcaatcaagacgctgaaagacaactcgcaacaggcctatcaagagatgataggtaatattgtctggaagcaactcaaaaagaatagtgtaagctcatggttcctgtacggggataacagcctgcttgaagccatgatgtctataactggtgccgttgtcattggtgatttaattaatgatccaaatcttgctggagcagacaacagtactaatcccatcgtcaccttaccggggaatcgaattacccttggagatctcatttcaggtggctctgttaaagtttattcatgtgacagtgatacggttaactgtatttctgctggttctgagctgaagagtgttcagctcaggggtattggcaatcaaatgtcagatttacttcttggttctgattcttcacctggattgatttataaatatgcaaacaatgttggggcgttaagttctgccgagatagcttttgtatcaaatctccccagtagctttggctcactcttccgaaatcttgctgctgtttccagtgatacagcagagcagtttgctcagcaagcacagaccatcatagcgctagatataacctacaggtttattgaggagatataccgggcaacaactattgcgttagctaacagtgataatgcctatcaacaaaaagctgttgatgtacttgatgcttctcgggctgttgtcagacaagagtatgaccaattaattgtgagacacgggaagctaagtgatctgatggggtattacaacagcttacttgatgtcacaaagaagcagcggcttttacttgcggcccaagcatcagggaaaaaggagtaa

SEQ ID NO: 67546 - DNA, 858 bp, Acinetobacter baumannii
atgaaaatgaatatgtcaacttccgtaagttcagctacagccttgttcgccgccattatgctcgcaggctgtgctacaaccccaaaatcctataatccagagatgtccagagcgctaaacttggcaagagctgggggtatttatgaccaagatctgagagactcagaagatgggcggaactcatataaacagtctctattgatgaaagcgctaaatgtcacaagcttggcctcatcgcttgatgctccattaagaggattgaacggtcagcaaactctcatgtttaacactgcaagcattcttacatcaccggataacccatccgctaggccaagtttgatggcatggatgcctgcatcaatggctaaatcctcagaagatgcttatagcaactatataaacctaattgataatgccgttgcggtagccgcgaaatctatgaacctggatttaactaaaatagtggaaagtacagcgcctaagattgatggaaaccccttaattatgtgggcagtaatggctccgcaatttggctgtgatggctcaaactgcgtaattgcatacaacgttacaatgccgaatccttggaaaacaccagcctttgtgggcaatggtaatattgatagctttaatctggccgctaataacacaaccaaatattctcgattgattttcacccaggtcagcgacgtgaaatcatttccaatggacgatttttacaaaagtacgagccgagcgctgccggaatgggcagtcatgtatttcccgcccagtagtgtgttccaggatggcaaagctttaccatatccagttatctatgaaaaaggccagcaattgctatttaggaaggcacaatga

SEQ ID NO: 67547 - DNA, 396 bp, Acinetobacter baumannii
atgagtctgtggcatgaagaactggaactggctttgctaaatctggaggattcaaaagccagttgtgatgtgatgacttacgtgatcagcaacattctagccaaatcagacattccacatcagtgcagagtagggtttgttgaaacagtacatagcaagacacaaatcaatccgcattgctggatagagctaaaggatggatggggtatagatctgactttacgccggtggttgggtgacgaggaccgatggccgtatggagtatttaggctttcagactatccacaggttcaattctggggaacgcccctgtttgccccgaagctagacgatgaggaaattaacgctatgtccgatcatctaattgagaaagtaaaaataccagtttgttgctga

SEQ ID NO: 67548 - DNA, 270 bp, Acinetobacter baumannii
atgttgggacaaaatcaaacagagatccatcaattcgatgtgtgtggccgcgtgtattatcgtggggttaactacactgaaaaagaaggtgagttggctgttgaaacggtagaagctacttctcatgatgaagctgaagcgatgtttaaaagcctgcaggttgagtatgcttgtgagtgtaatcggactgttgagcgaatcgatatcactttcactattgacttgacgatagctgaaagcgacaacgatgaaccgtacttagtgatgtaa

SEQ ID NO: 67549 - DNA, 186 bp, Acinetobacter baumannii
atgtatcgactgattctagtaaacaaaaaaaagcgaacgcgagagtatcagccttctgatgctggttatagggcagctctcaaagccacgcgcaagtttttggaacaaaatccccagggaaatgcggtgctttacgggcatggtgtttgtgagtccttcactatacgcaacatgcctgaagcctaa

SEQ ID NO: 67550 - DNA, 318 bp, Acinetobacter baumannii
atgtacttttctacgttcgttttgatcatgattgttaccgtgggcgtcattgctttcggggctaacattgtcgccaaattactaaataaggcttcgattcttgcatatcgatcattgagaaaaacgcggcccgtacgggtcgtcagtccattggtaattaatagcagttcattgtgtggtgaatggttgaaagctgcctccggtagcaatcaacctggtgtctccgatgctgtcgaatgcgctccgcttgagggtgagctggttgcagaacgcgctgtaataggttccaccaggaaattattgtcagctcaaagttga

SEQ ID NO: 67551 - DNA, 966 bp, Acinetobacter baumannii
atgcgttcagagcggactaatccggattcacggaattttggccttcgtagccgagatataaacaaggctgccctgaacgctctcaaggaggggatgaagagttttcagtccatagccactattcatgaccgatggagcgtttttagcgcttggattaagtccgaacagggcataaaggacatgcgggatatagaaaaggctcatttggtcgcttatgcggcgcaccttaatgatcgctacgagcggggagaaattgcgccatccacggcgcagaactacctgagcgcagtgaatcgggtgatggagattgcgcgtggcgaccgacaggtacgtgtagatcctgtctccgaggggggacttccaaagcgctcaggtatcgccactggcgaccgaagtgtttcggaagcttcccataatgccgcaatgggggcagcctccgagcgccttggggctttgctggaactacagcgtaatttcggtctgcggttcgaggaatcggccaagctggatgcagccagagcactaagagaggccgagaaaactggctccgtgagcataaaagatggcaccaagggtggccgggcgcgcactgttccgatcaccagtgatgctcaaattacggcactccagcgagccgccgccatacaggatggccgcagcatgatccccgccgagaagaattatcgtgagtttcggcaagaagcctaccgggagatcggccgccatccggtgaacttccacggcgaacggcaccactacgctcaaacgcgctacaaaactttgatgcgtgctgattgcccggtaaaagcaggtgttaaacatgggcgagagcactatgaatatttagccaaagaacttggagtatcaatagctcacgccaaaatgctggacaaagaaatcagaactgaagtggctttggaattgggtcacggtcgcatcgatgtgacaaatagttatttggggtaa

SEQ ID NO: 67552 - DNA, 462 bp, Acinetobacter baumannii
atgctaaggccaacgttgggatcttgcccaaacacaggacagttaaacccgatgtccacggtcattaattacgaactgtactgctatggagcgaactgctcattccattggctggtctgttccgacggaacaaactgccagcagatccggctggtactgtcgtgtcattctttggaaaggaaagcgcgaagcgcgccaaccgccgaaggcggtataattcgcgcacattcgtgcgcggtgcgaaagcctagagcccttgaggctcaaggcttccgtcgggggctctacccccgtctctgtttacgcctacggcgacagagacggggtggagcatcgagcaagttgggtattccaacactcgtcctgattttgagggtggtcctctttggtttggcagctcggaatcgagtaccaaggacacgatattgctttgagcaaaatcgcggtatggaagccttttaa

SEQ ID NO: 67553 - DNA, 936 bp, Acinetobacter baumannii
atgcactcagtacacatgtcatcattcagagttttaactaagcaaagatcaagaaaatcatacaagcttggagagttaaatggtgataacaaactgagcgcctatgaaattacaaaaaaaatactccaaagcaaagttaacatccctctggaagatcaagattcaaaactaattgtatctataccaacaggaaacttaacttttgatgattcaaaaagaattatatatggctatgtaaatgcgggccgttatggagaaaactacactgttagacagaagactctatcatcaacaaatcataaaaaagtaactcatgatgaagtcactgagaaaaaaagatatatttttatctatctaccggatagcttagatactggaatttttgcattccatgaaacatctcgattaaatgcaagaactccaataaaaagcacagtagaacttgggtttaaagcgcacaatccttcattggaagcgagaatactaccattactacacaaagatatacctcaaactattaaagactcccctgtaatagaaataaaagctattggctataaaacaagtaaagacaccgcagatgccatgcgattaattggtgacagaatgaccgccgactttgtaataaaaaacaaaggttattcaatgggctatatcaatgattatctcggaaaatctccttcacaaaataagttaatagatattttagagccaaatagtgataaaataaaaataacagcacaggtgaatggaaaaaataaaatttatgatttaagaaatataatagcaaaaggcgtatctgtaacgttggatgatgcaagtctgaatataaatccaataaccaacgaacctaatcaagccgacctacataactgtgtaaaagaagagataaatgattatatttgtgaaatatacggcaaaggatattgtatatga

SEQ ID NO: 67554 - DNA, 537 bp, Acinetobacter baumannii
atgaataaaataaatatatttttcttgataaagaatcacatctccagttttaaaaatgaagattcagatagtttatctaaatcagatattttctttcatcttatattcccaatcatagcttctggaacaatatgctttttattcaaagtaatgccgagctcagtagttggcataatggttaatttcggagctataacaacagcattattaatgagtgctgtcgtaatggtttatgatcaaaagagtaagctcatagataaaaaagataatgagactatcgcagataaaataacctcttacttgaagcacataaatctttacaaagaattatgtcacaacatttgctatgcaatccttacatcaatactaattgtaatactttcagcagtaatttccttctacgattcgaaaatcaacactgggtttagttactacttttttattacatgttcatttttttgctattcattatttatttctacaatgataacatttctaatgatattaaaaagattcagtattatattagataactaa

SEQ ID NO: 67555 - DNA, 1092 bp, Acinetobacter baumannii
atggagagagcaaacttgagctggccacatgtaccaagtctggaggtgattgctgaacgcttacctctaatattccctgaagggacagaaaatcgtaattatgtcatccgagaaatggctgcaagaactctctatgttatgttctacgcaggagctgtcgagggtgctgatcgttggattcggccaagccaagtaaccgacatgtctgatgttcaggctgctctcttgacggacgaggagcgtcagtcttgggttaagcaggcgctatctagtaagaaagataggcctgttacgacctggtatgctccaaattctcgagaacctgtcagagatgaaactattcgatatgggtttatagcccttggtgccgttattgaacgcactggtttgcccgtgacaactcctcttcctaaatacgcaatgtcaaaagcatttgcagctctgttcaatgtagatttaattggggatgatttagaggctttaattcgtagctggcagaactctcatcttaatgctgccgctttaagtcgaattcgattacttggtgcgcatgccactgccgcagcatcagatcagataaccgcgacattacctaattctgggttagtaatgcttgagtctggtccgtcaggcgtaataggtaaggcggtgatcgaacaattcgctcggaagtttttaaagacgccagccgtattatggttgtctcagtcaggggaaaaggttggtattgatcttgcgagtaggttaaagctcaaaattgacccttcaaaaacgttacctgacgttattttagttgatcttgggaccaagactgacggtagtgacatgttatttgtttttattgaaattgttgcttcagatggtccaattaactctatgcgtaaacagaagctaactgagatagctattgaagctggcttctctgcccagaatcttgcttttgtaactgcatttcaagatcgttcagccgctccattcaaaaaagcaatgtcagaactcgcgtggggaacttatgcgtggttttgttctgagccagataatttaattgagctaagagatggcagttctataatcttgtcagagcttttatga

SEQ ID NO: 67556 - DNA, 1830 bp, Acinetobacter baumannii
atgaacgctttccactttcaggatcttttaagtgagtcagcagagcctcttgttcgttatgaggcctgcaaaggtatggctcgtggttatgctcactctatcatagatgaccagtatcgacttaaaatcgccaggtcttattgcgcagctttaataaaatcttattgggacgaaattaacgctaggcacaatagcaagcttaaaattttttcaatcccaactgattccgaattggccgaaattactctcgatgcagaggatgttgctaaaaataccggtaaagtgatcgcacaattccctgatattgatgcgggctatcttatcggatcaatatatacagccatgttgcctactgcttatcgatctgatttaggagcttattacactccgccacctttggtatctaggcttcttgatttggctgaagaagcaggcgttgatttcagtaccgcgtcggtaattgatcctgcatgcggcggaggtgctttccttgcgccagtcgctatgcgaatgctccaacgttccaaacatgcttcaagtgaatggaagcttgcgcaaataggcaagaggctcaagggggttgagatagatccatttgctgcctggatgacgcatgtcttattagagtgtgtattaatagaacattgcattattgccagaaggcggcttgaaaaaagcgttatcagtatttgtgacgctctaacgtaccagtcacctgtagattttgatcttgtaataggcaatcctccatacggtaaagtttctcttgatacagaagttagagagaagtttagtcgctcactgtttggtcatgccaatttatatggtcttttcaccgacctcgctttaagactcgccaagcctgaaggggtaatagcttacttaacacctacatcatttttgggtgggcaatatttcaaggcattacgtgagctgttaattgatgaatctgcaccacgagcttttgattttatatcaaatagagagggtgtttttgacgatgttttacaagaaactcttcttgcaacattcaaaaagtcagcaagaaaaacaccggcaaaggtttcattgttagtaccggaggggcttaacgaagcaagagtagagcctattggaaaggtatcaattattaaaggtgatggtccgtggctaatccctagagtagctgaagacgctgcattgttaaatcgactcaagaagatgaagacccgtctccctgatctgggctacgttgtttcgactgggaaacttgtttggaatagacataaaagccagttacgtactgaaaaaacaaaaggggcactacctcttgtttgggctgaatcggtaacttcaaatggctttaaattctcttcggtgaagagaaaccatgttccttatattcaaattgaaaaaaaccagcgacatcttgtaactactgattcatgtgttttggtgcagcgaaccacatctaaagaacaaaatcgaagagttctcggtgctgtcataccacaagactttattgatcgatatggtggtgtcgttgtagagaatcatttaaatatcgtttacgcagatacacttatacgggagttgagcgtagaaactatcaacggattacttaattctcaggtctttgaccgtatataccgttgcataagcggtagtgtagctgtttctgcttatgagcttatggccgtgcctttaccgagcttggacgatatgaaaaagctggagaagatcattgcagcaggttctgatagactctccatcgagaagtgtatcgcaggattgtatggagagagcaaacttgagctggccacatgtaccaagtctggaggtgattgctga

SEQ ID NO: 67557 - DNA, 588 bp, Acinetobacter baumannii
atgaatcaaagagtcggctatgccagagtatcaactgatgaccagaacctgcatctccagcgggatgcgttggttgctgccggttgtgaagtcatttatgaggacaaagccagcggtaaaagtactgcccggccagaactagataactgtctaaaggctctcaggccaggtgatacgttagttgtttggaggctcgatagactcggtcgcagcctgggtgatttggttaaagtcgtgactaatttgattgatgaacggggagttggattcctgagcttacaagagcagattgaaaccaatagtgcttctggaaagttgatttttcatgtatttgcagctttagctgagtttgagcgtaatttaattagtgaacggactaaagctggacttgatgctgctagggctcggggacgtaaaggtggcagaaagccgaagctcgcaccaaaggatattcgagagattaaggtattactaaaagatccaagcatacccgtttccgatgtagctaaacgatttggtgtatctagaacaacaatttataacagtgtcggggtcataaaacctgaccgtgagggggcaagtatatga

SEQ ID NO: 67558 - DNA, 1035 bp, Acinetobacter baumannii
atgccaacctatgcaaaatcgttagtaacttctaagaaaggtattaactacgtaagaggagttatcgagggagttggctgcttgtttcaaaagattgagcaggaaaatgatcttgggatagatgcgatttgcgagttgataaactcaaatggtcagccagaaaaccacctttttgctttgcagatcaagtctggtgactcttactatgatagttctaaaaactcctgttcatttaggataggaactcatagggattactggacaaattataaggtccccctttttgctgttgtttacataccatctctcgacacggcttattggacagatattaagaaatttctgaagagtaacgttcacgctagctccattagtttcgatttgagtcgtgccaatcactttgatgaagagaagttcatttcttactttaagcccttggttactgggagagggccaaatatttctctggaagacagtttaagacttgttagaagcagtaatgatgacgaggcttggcttggtttaacaacgttatttaggcgatttcctaatacataccaaacctgggatgagttggttagagctttcaaaataagaagtattgccaaaattcctagattactcatttatcttctagcccatatcccttggcatggcgatatttcatacagtggcgaagatataaagtcagagattagatgttatgccgctgacttgtttaattcgtttgatgaaggtgacatacgtaagttactgtccatgatcgatgacaacggaatacagaggggagctatcgggcaatcggtcgaagctgtaattaactgtgtaggtagtgcatcacagtatctaatcagaattatcaggaatggctgcgacagtatggaactaagagaatcagcagcgttcattttggccgtcgataaaggtgttgaggctataccgtaccttcgagagttagcatctagtggcagcgagatatccagtttgattattcaggatatcgctgaacatggtgggttttacccatactcttaa

SEQ ID NO: 67559 - DNA, 822 bp, Acinetobacter baumannii; identical to SEQ ID NO: 59049

SEQ ID NO: 67560 - DNA, 510 bp, Acinetobacter baumannii; identical to SEQ ID NO: 50811

SEQ ID NO: 67561 - DNA, 777 bp, Acinetobacter baumannii
gtgccacaaggtcagattgagtttaagcaactgaactttaactacggcaaagcagcaggtgaacatggtcctgtgattgatggtctggacttgtcgattaaacccggtgaaaaagtaggtttagtcggccgttctggtgctggtaaatccacgctggtgaacttactgctgcgcttttatgatgtcaattcaggccagattttgatagacggtcaggacatcaaaactgtatcccaggaaagtcttcgcgctcatatagctatggtgacccaggatacctccctgctacaccgtactgtaagggaaaatattttatatggtcgtcctggcgctaccgaagcggaaatgattgaagcagcccgtttagccgaagccgatgcttttattcaggagcttaccgatcctaaaggcaacagtggctacgacgctcaggtgggcgaacgtggagtcaagctttctggtggtcaacgtcaacgtattgcaatagctcgggttttactgaaaaacgcccctattctgattttggatgaagccacctcagcgctggactccgaagtagaatcagctattcagcatagtctgactcagttgatgataggcaaaacggttatagccattgcacaccgtttatctaccatagcagctatggacaggctgatcgttctggatcaaggtcgtattgtggaacaaggcagtcatcaggaactgatcgccaaaggcggtatttacgctcaattatgggcgcatcaaaccggcggctttattggtgtggaataa

SEQ ID NO: 67562 - DNA, 858 bp, Acinetobacter baumannii
gtgggtattcagatcgcccctggtttttatttcagtagtttccactggccacgtcgtcagattgtggtgatcgatcatcaccatcattggcgcgaaccttactactatcgcagtcatcagattattcaccataagaattctcatcattggcgtcataacccgcaccacaggcgtggtgtgagctaccacgcgggttatcagccaacccgtgagttcagtggtcagcgcagttatcagaatagagaacagcaaagagaatgggccgcccagacccgcgaaaataagggttatgctccggatcgaaaagtgaatactcagaaagagcagcgctttgcagaaaaagatcgtcaatttgaacgcaataaaaaaggcgatgacctgatgcgtcgtgccaaagaagaaggtccacgcgctcaggtagagccgacaaactcccgcgagttgagggacaggcagcaacagttgcgtcaggagctaaaaaataacaatcgtcaggatcctgtactagaccgtacggtaaggcaaccaggagcagaaatgatccgccctgagcgcacttaccagacccaaaggactgaacaagcgaaatttgagcgtcctgtgcaacaaccacgagtggatacggtgcgaccagagcggagttatcagacgcctcgcattgaacagcccagatttgagcaacctaaagttgaacgcagctatcagcagccgcgtatcgaacgcagctaccaacaacctcgtgttgagtcgcccagagtagaacgtagttatcaacaaccaaggcaacccaggatggagcagccacgagcgcaaagcagagagatgcgtggcggtgaaggtcgccggcaaatcgaataa

SEQ ID NO: 67563 - DNA, 606 bp, Acinetobacter baumannii
atggcacagggttttgatagttttatcaaactctgtgataagaaagacttcgacgatgacaatgctataaatgcctgggcggcaaatgttttgaaggagtactcgaactaccaacttctgacagctctccgagagggcccttgggggcaaaagcagattaatcaaactatggagcagttattgcgttcgggccacggtgcttggtaccacggccgtccagtgattgtaaccacaaacgactacagtctgaatttgaataatggtgacataggaattgcactgatacatcctggtgaacaacgcctgaaagtcgtattttcagctccggtcaatgctaataatccgtttggagtgcggtggattttaccaagtcgcctaaatgcagtggaaactgtttatgcaatgacagtgcataaatcacagggttctgaatttcgtcataccgttttgattttgccagatcgtccaacgccagtcttaacaaaagaattaatctatacaggcattacccgagcaaagtcagatctgacgattgtcattcctaatcagaatgtatgggaactcggcgtattaacgagaatagagcgtttaggtggacttggttag

SEQ ID NO: 67564 - DNA, 414 bp, Acinetobacter baumannii
atgagtgatgacaacgatattcgacttggacggcactgcgttttcaagatgcacgtccatttggtctttgtggcgaaatatcgccgcagagtgttcgacggcgacgccatcaaccggctgagaacgatcttcgccaaggtttgcaccgacttcgaggcgcagctaattgagatggacggcgaggacgatcatgttcacctgttggtggagtacccgcccaaggttgccgtctccaaccttgtgaacagcctcaaaggcgtgtccagccgtttgctgcgcaaggagcggcccgacatccagaaacgctactggaagggcgttctgtggtcgccgtcctacttcgcctcaagttgtggtggcgcgccgatttccattgtgcgccagtacatcgaacagcagcaaacaccccactaa

SEQ ID NO: 67565 - DNA, 624 bp, Acinetobacter baumannii
atgcgccgcttcgctggctcgtgccggttcgtctacaacaaggcactggcgttgcagaaggagcgctacgagcgcggtgagaagaagctcggctatgccgggctgtgcaagctactcaccgagtggcgcaatagctcggaaatggcatggttggctgatgcgccggttcacccgctgcaacagacgctcaaggacttggagcgggcgtattccaacttctttgccaagcgcgccgacttcccgcgcttcaaaaagaaggggtgccacagtagctttcgctatcccgatccgaaacaaatcaagctggagcagcacaacagccgcatctttctgcccaagcttggctggattcgctaccgcaagagccgcgatgtgctgggggcggtgaagaacgtcactgtcagcctctcgggcggcaagtggttcgtgtccattcaaaccgaacgagaggtcgagcagcccatcccgcagggtggcgcggtcggtatcgacatgggcattgcccggttcgctacgatctcggacggcaagttctacgctcctctaaacagcttcaagcgacacgaaaagcgcttgcgctgcgcgcagcaagcgctctcccgcaagggtaagcgtccattttag

SEQ ID NO: 67566 - DNA, 264 bp, Acinetobacter baumannii
atgcgcatagaagacctaaccttagacgaattacacgacctgaacgagcttatctgcaagcggatagggtacttgcgtttgcaaaacgatatcactgttctaagccagctacgtttaggccaaaaagtgcacttcaaggccaaagaaggccaagtgttcggggtggtcatcaaaatcaacaagaaatcagtgatggtggtcagcgacgataatcgccagtggaaaatcccaccagggctggtgcagatcatgaaagacgtctag

SEQ ID NO: 67567 - DNA, 1659 bp, Acinetobacter baumannii
atgaaaatcaagccttcatcctcatccaacgcggcaacagacgccgagacactggttaatttgaccagtgaaatcgcgcgtctgcagagtttgttgcaacaggcttctgcagagaatcaggcttggtcagaaaagtacggcaagctggaaaccgagcatacgtcattgcgcgaaaccttcgccgggattcagcagcgcttagcctggtttgagaagcagctgtttggtcagaagtcagaaaagcgcgccctggaattgggtatgcagttaagcttactgggtgatatggtgccagcgctgacccagcctgaaggcgaaaccgaatataccacctacacccgcagaaaaggcaaacagcgcccggatgattgcgttaatgacagtggcctgcgatttaacgataacgtaccggtgaaagtgattaccttgatacccgatgagctaaaaggggaagaggccgaccagtatgaagtgattggcgtaaaaagcaccttccgcttagcgcagcgcccagcgagcttcgaagtgctacgttatgaccggcaaatcatcaaacgcaaaggcagcgacactctcctgccaagtcaggcgccctttaatgtattggataaaagcgtggcggatgtgagctttatcgtggggatgctggtcgataaattccaataccacttgccgctgtatcgccagcaccagcgtttagttgcagcgggcattactttaagccgcagcacactgggcaccatcgtggcgcgcggtattgatttactctatccgattgtggatgcgatgctaagtagcatcttacaaagccaggtgctggcaatggacgaaacgccgattaaagcaggcaaagccgggccaggtaaaatgaagcaaagttacttctggccggtgtatggcgataaggatgaaattgtttttaccttctccaccagccgcgggcggcaacatatagaagagatagtaaagcatcgctttaaaggcaccttattaagcgatggctacagcgcctatgccagttatatcaaagccaatgaaggcttaacccatgcccagtgctgggtgcacagtcgccggcaatttattgaagcggaaaacagctggccagcgccggccaaagaagcgattaacctaatcgctaagctgtatgagatagaagagactatccgaaaccaaaagctcacggatgacaaaaaacgccaataccgccttacacacagcaaaccggtggttgaccgcttctttacgtggtgtgatgataccctgcataacctgacgctgctgcccaaagaccccctctccaaagcgattggctatgtacaaagcaaagaaatggcactgcgcgtcttcctggaagaccctgatgtaccgctggatacaaaccatctggagcgggcgcttcggcccatacccatggggagaaaaaattggttgttctgttggacagaaatcggtgcagagcatgttggcgttatccaaagcctgatagtgacctgccgcttacataatatcaatgtaaacgattatctgaccgatgtgctgctgcgcatcagccaacaccctgccagcctggtgcacgaactgacgccacggtattggaaaactaagttcgctgataatccgctgcgctctgacctctttgctttacccactacttag

SEQ ID NO: 67568 - DNA, 351 bp, Acinetobacter baumannii
atgtttatccctgctgcgaaccaaaaaatctggctgtgcaccacacccgtggatatgcgtaaatcctttaacggtttaagtgccctggtgcgcaataaactttgccataatccacaaagtggccagtactttgtatttatcaatgcccgcaaaactcagatgaaggtgttgtacttcgaaagctctggctattgtgtctgggctaagcgcctcgagcaaggccagtttccggtgaaaccgcatccgagtgggatccaatctcttaccggctgcaccctgcaaatgatcgttgacggaattaccgtacttcgccacaaacaagcgaagcgctatgggcagtcaagcgcttga

SEQ ID NO: 67569 - DNA, 282 bp, Acinetobacter baumannii
atggcaaagcgagcttaccgcaacgctgcacaatggcagcaattaatcgacttatggcacacatcagagctgagcatcactgaattttgccaaacccatcaactcagtaccatgtcattttataaatggcggcaacgcttggcttcacaaactgagcaagcgcctgttcgccaggacacacagtttatcgatttatccgcgttggcacaccaaggcaacacccgctggcatattgtgttgtcactgggcaatggcgttgaactgacacttagccagcagtaa

SEQ ID NO: 67570 - DNA, 627 bp, Acinetobacter baumannii; identical to SEQ ID NO: 67130

SEQ ID NO: 67571 - DNA, 345 bp, Acinetobacter baumannii; identical to SEQ ID NO: 67129

SEQ ID NO: 67572 - DNA, 4437 bp, Acinetobacter baumannii
atgcgggtttttttatggggtgagaaaatgcctttaccaagtatccaacaatttatagcgagtgatgtgaccgaggcaggatttaaaaatgcgatgtctcagttgattcaataccttcagacgggcgtagcttcgaatgaagattttaaaaaatttataaatactgcacagttaattggattgtcgggactggctgatacaaatcaaaaaaataagtgggctgtaattgtttttgataccccacaagatgcgtatgtccaaaaaactgatttttctgatctttataaaaatccaatagttttcaaaggatttgtgaacgatgtatctgcggaaactcgtttaacttatccatacaccaatatgatttttagaagtattgttactgtggaagataatactgtaatcaactttgatagttttatggttgatgatgcggtgagtatttttgtggatggtgtgaatgtacatgttcaaacaggcacttcaacacaatctaatgtttcgttcgaattaacgaagggttcgcatattatcgatcttttggttaataatggtgcatcgtggggtgggtttgtagctaacccttctttatcaagtcaagttacatcaatgtatgcttctgagcttccagtcgttagctcaaagtttgatgtaaaaaatactagctttgaagtggttaactcgcttaatagagccttaaatggattctctataaacaaatttatatctcaagatgatttttcttttgttgggcaagttgtttattcttcttctgtcgctggagagaatggtaaacttctacaatttgatccactatatacaactgattttattaaagttaataaaggcgattgtatttgtgtatatgtgccaacttaccacgattatcattacacgccgattactttttttaacacaaatcaaatctacgtaggaactttggcacatggtaagccaagccagatagctaatcctattaaaaaaacgaatttggaaagacaaagacaaaaagcatatggtgatcaacaagaaaattcattttttatatcaggaattgcaccagcagatggctatgtacgtattactgcaccgaaaggactgtggttaaatcctgttgaagcgagtccgattttcggagaaataagtgcttttattgtcaaacaaaatgagttttcgtctttagaaaatctgtacgttgcacctaaaaacttatttaaagcgttagagcaaaaatggtacacgccaagtgtaacttcattttttactacagtgaatgagtcgcgtcaaacacccggtaatcccatggtgtttgatacatcatggcaaacgagtatttttaaagtgcctgttgtagcaggtcaatatttccatattattggttcgcgtgttaatgctgcaaatatgctttttctaacggactctaatgataaatacttgcaatctattaggttaacactcaatgaagtaacatgttatcaaactaacgttaatcctgttgctaatgtaaatattcaaattccacaatctggatatttgtatattcaacaaagttcagaggttgcaagtctttttgcgatagctttcacggatcagcctgtttcgtatgagcgcgagtattttaaaaatgaagatcaaatagagtggttagatgcttcaatttttggaagttctgttaatactatgtctgggttatttgtaaacaaagcaagtcaacgggggttggtgccaaatagtgcgagttatgtgcagcccaattacgggaactttgtttcacagccatttatcctgaagaaaggggatattctagaatttacctctaaaattgctatgccaatacatatgcatgcatttgaattggataaattggatgtggatacaaacagttttaatgtttataacttggattcagttacagaagatgttcggttaagtttattaaataacacaattgatttaactcgctggtggaatcctgttgaatctacatcatattactgtaatgaggatcaagacaccctgatatatttgtgtgtagatcgtcgtaatgaagtttttaagcaggttgcgcgggctaaaatcattagtcgtgagcaatacatagaaaagcgtgaagagttattaaaaggcaatttagctgctttgtgcaaattaacttacacaactatctcattaattagtaatacggagattggtcttaagcctattttggtttttaaagatgaagttatttgttatccatgtccaacaatgtacgtcgatatagcatcaacaaattttgatggtggagatttatcgtcatttacaagctctgcaacgcagataccgggttggacgcctgaagcggttgatccaaaagatattgttattggtactcaagggtacgcaaaacagactgtgttagttaaaaaaacgggctatgttctttggtctagaccttattatttaagtgatcttagtgggaaatactcatctactaatgttgcaaaaggtgtaagaaacttattggactatattccttttaaaatacagcataagaatgattttaagcccaatggagatatggagacatatattcgtcagtattatgtttttaaaaataatgccggcaatccgcagtatgttttatcaaataatgatgcaagtttaaaattttcacctgtaattaaggggaaaaaatataaaattaaccggaatgtttctggttatttaacgtctgctcaaacttggttttttgatatagaaacaagagaaatgaattctattttcttcacagatgtagacgacaatcctcgtgtgctagttcatggacaaggtgctcaattctactttgaagcaccagcggatggttacattattgtgccaagtgtctataacgatatttatgcgcctgaatctaatcatagtattgttgaattgactaatgatcagtggaatcgcgaggctgttccaacaaatcaaactgtagtttatttgccagaaacaccggcattgcggattaatcttgctaatgttttgttgccatatgactcaaccaaagaaacaacagttcgtggtcttgctcaattcaagttaggagatcaaatcctaaatactgtaaattgtgacttcactgttcaagggacaggttcagctacattacctaaaaagaattgggatatggattatttaaaccaagatggatccgactcaattgatgtgaaaatcggtgattggttagctcaagataatcttgttctaaaaggtcaaggtgttgatgcaacgcattttagaaacgaggcaaactatgagttatgggttgcaatgcgaaagcatgaaccttatccatataatatgattgttggtaaagaggcattagataatcaaacgttaccgctttggtttacagatgcactatgtcatccgaaggggttagtcacagagttgtattgcggcgaggtattttacggaatttacacattgcgtatgaaaaagaaacgtgagcaatatgcgatggtgaaatccaataaaaaccacattatgcttcaagcagaccctacaatgaatgcatcaattccattcagttggtcaaatatctcactagcgaattgggagctgagaaatcctagcatcaaaacctattcagaaggcgatgattcagtggatgatagtgtcgtacaagcaagtttggatcgctactttaactggattagatcagtttttgatggaactaaaacattgaagtcaacttatcaacaatatatcaacttaaacagttggttggattatatcctgcacgttgagttgacagatcaatgggatggtttaaccaataatatgatggtcgcgacatgggatgctaatgtttggcatgcaatgatttatgaccttgatcatgcaacagaccgtggctatacggtgtgccacaccatgatctctaaccaaagcaatctattctttaagtttttcttcagtgaaatgcttgcggaaatgaagtccagatggtctgaattaagatctagcggtgtgttaagcatggcaaaaattcatgaatatcatgctaaatatgcaaaccgtgttgctactgctactcgtcataaagatgcagttcgttgggggtatggtcgtgaaaatgatatgccacgtatttttacaatgttttctaaaaaaatggattacatggatgcgtattttgattataaaccggctgaagcagattggtttggtaattggaaccctgataatttacttgccttcactagcaagtcttacgatttcaatgctccatcttatatggttggcgatattgttaaatatagcttcacgcgagattttgaattagcaggaactacacttactttttcagtcgttgaggacggaaaggtcagggttgttcataataatccaacagctaatgctgtaaacatctcgacaggagtattaaaaatatttaagaaataa

SEQ ID NO: 67573 - DNA, 555 bp, Acinetobacter baumannii
  misc_feature (500)..(509): n is a, c, g, or t
atgggaaataagataaaaagtaataaactttttactaggaagtctgaagcaaaaaatatcattccacttctatcacttggtggagccatctttctctcaaactcggcctttgcagcctcgccttctgagacaacagatgctgaaaaaaaacctgaagcactccctacaattacaatcaccgcttcacgtgcagatgaactttctacatctgccaaacaagtgaccaagctagatgaaaaacaaattgaacttttaagaaatggttcatctggaaatattgcaactgttttagctaaagccgtaccgggcctttccgactcaagccgaaccattaccgattatggtcaaactttacggggccgtaatgccctcatcttggtcgatggcgttccaatgaacctgacacgcgacacatcaagaggtctttcagctatcgaccctgaaagtattgctaacattgaagtcattcgcggtagtaacgcaatttatggtggtggcgnnnnnnnnnncttctggcggtattatttcaattaccacgaaagctgctggcggtga

SEQ ID NO: 67574 - DNA, 600 bp, Acinetobacter baumannii
atgcattctaaagaacatcatgctttccatgtcagtgcacaacaatatggtttaaatccagaatcactagagaaagctacaggtattgttcttaaagctattgagaaagtttttagtaaaaaatggaatttattggtaactgttggattagaacactatacagctgttctggtagtcagcatgatgcaatctgtaaatgagcttatgaccgacaacactattcgcaacttatggttatggcacagtgttgaagaaaccgagcataaagctgttgcattcgatttatatcaacatctatatggcaacggattagatgcatatattccacgtgttgcagtttttacattcagtttagttctgattacagccttttcaactatttaccatattgttctaatgaaacgagataagcaactgaccaatttcaaaacttggcgcaacttttttaactttgcgagcaaacaatataaagtgttgattcctaaatttcttgaatactaccgttttgattttcaccccaaccagacagatgaaaaagctttagttgccgctacaaaagtaaaacttggaataagtgatagatcacccctcttatcttaa

SEQ ID NO: 67575 - DNA, 588 bp, Acinetobacter baumannii
atggcaattcatgcgggtttatcattttataaagcactagcgatgtcaggaattgtgtttgctggcgctgcgcaattagtaagtttaagcatggtgatggaaggtgcatcgttattaaccatctatgtcactattttctttcttactgctcaacattttatttatgctttaactttaagaaatgacgtttctattttacctctctcaaaaagactaactttagggtttctgcttaccgacgaattatttgcagtaagtgttcctaatgagaaaaaacatcctcaatacttattcggagcaggtctttgcttttatttattttgggtggtttttagtttagttggtattttattagcaaccgcgctacctaacttattaaattatcatttggatttttccattattgctatttttgttgccatgattgttcctatgtgtaaggggaagcctgtaatggcaggcattttaatgacttgtgtcagtggttttgtacttaagtattttcatatagaaggagccattctaatttctggtttattggggatgtttattgcggtaatagtcgaaaataaaatgggagaaaaataa

SEQ ID NO: 67576 - DNA, 1251 bp, Acinetobacter baumannii
atgccattagggggtcatttttacactgccgctaacattagaactctttcagcctatcctcaagttatttatcaccctgatctaaatattgagcaagtcgtttacctaaaaattgattgttcgcataatggttccttaaaagaaatttgcttaaatttcttccgagcattagatcaagtccttgatactcaatatgagaagcaatatgggctaaaacgctacaacattcaggcattactcactaaaatgtcacaactagcgaatgctcatgcattagggctattggtcattgatgagatccagcatttgagtcgctcaaaatctggtggtcctcaagagatgttaaatttctttgtcacaatggtaaatactattggtgtacctatcatgttaattggtacacctaaagccagagaattttttgaggctgactttcgctcagcacgtagaggagctggttttggcgctatattctgggagccattacaagaatacattgataatcagcttaaccctgaatggatagcttttacagataagctttggaaacagcaattacttaaccaaagagatgagttcctatcagataatattcgacatatttggtatgacttgagccaaggcattattgatattgtagtgaagttatttgttcttgcccaattaagagctattgcaacaaataaggaacgaattacatctaagctgctgcaacaaatttataatgaagaattgaaacctgtacaccccatgctagatgctttacgatcaggaaatattgagaaaatttcacgctattctgatttagttatccctgatatggatcgtaaaatttttgatcttcaacaaaaaatcaaaagtatacctgttgataaatcatcagaagatttttttagacaattggttactgaggatgagcgtcgtatttatactatgttcaaagatgaatataagccccaacacctgatcgaatgtatcaagactgcatatcaagagcagccgacagcttcacgccaacagattattccaattatttttaacttattatctgctgatagctattcatcaagtgatattgttaaattaataccccaaaaatcagaatacttaaagcctaatcaatgggatacattgtcccaagatgatttacgctttattcattctcaattgctcacagaaaaagatttacataaatcacttttagaaaaaaatttgattttagagatagagaaagttttattaaagacttga

SEQ ID NO: 67577 - DNA, 1251 bp, Acinetobacter baumannii; identical to SEQ ID NO: 67576

SEQ ID NO: 67578 - DNA, 141 bp, Acinetobacter baumannii; identical to SEQ ID NO: 67127

SEQ ID NO: 67579 - DNA, 927 bp, Acinetobacter baumannii; identical to SEQ ID NO: 67128

SEQ ID NO: 67580 - DNA, 198 bp, Acinetobacter baumannii; identical to SEQ ID NO: 50572

SEQ ID NO: 67581 - DNA, 291 bp, Acinetobacter baumannii
atggctaaatcaaatcaaaaatcagatagtaaagcttttgttttagcattgaatcatgaaatgatttatgcagataaaattcttaaattcggtatcggaccatctgtatgtaaattagagataggcaatgagtctagtgaggaacatatcatttcacatactattgctcttagcacagcccacttcttagatgctattgaacatatttatgaaactataaatacagatgaagcaaaatcaaaactgaagaaaaatttacaagaccttctatcaagattagacgataactaa

SEQ ID NO: 67582 - DNA, 678 bp, Acinetobacter baumannii
atgactaaatcattagtgtgcatacaagatagctctggaacattttcgttagaagatgatgagctaaaattcttagaagcattagtagaagattttgattttgacaatgaagaagatatttgtgatttttctaaactagatgcatttgaaataaaaaaagaaatgatagctgatcacatcaaatcattagttcatcatattggtaaaacacattcagagttatgccacgatttaggttggaaaaaaagcagattttctaaagttatatctggtaaagctaacttaactttaaaaacaattttcgaaattagtatagccactgggtatgatttcgatctcgtatttaatagtaaaaataaaagagcctgtgcccaaccatggaacaaatacgattccgaagtagaagtattttatgaagaagtacctaagcgttcttctttaccagtagttgattttattgatccttataaattaaacacttatatggataatgtgaatatagcggaagttgaatgccttttggctgtaagaaaacagagtaataagctaaaagatgtatatgaagacattaagagtattgggaattcattttattcaatacctcttgctgaaaatagacatatagatgatgactatttttcttataaaatccctggaaagtgtgtggttgaaggataa

SEQ ID NO: 67583 - DNA, 504 bp, Acinetobacter baumannii
atggatatatactttcatttggtcgaaggatttggttatccagatcctttaaaagcacctcttcgatcggataacgcatggaaaatctatatgatttgtattaaacctcataagaagtttagtctaatctatgctgatactgctcgattagaggcaaacgaaaaggttgttgtttctcaattatttagtagcctattgattgcaactgcttctggtcaacctttaagtgctcattatcacaagaagggagattgccatccagcatttgagatgtcatataaggatcatgaaggcaaacacaaaaaaattactgtacatagattaagacaaggcgatgttcgcctctactttgtctatagaagtgataacaccatcattttattaaagttattagctaaattcacccaaaagctagaaaagactcatcaaggtgcaattacgaagcttgctcaaattgtacttaggcttaaagaccctgaacaaattagggaaagagtaatatga

SEQ ID NO: 67584 - DNA, 267 bp, Acinetobacter baumannii
atgttgtatgcatcaaataaaggcaaatatacgcaaactggaatttgtatggtgaggcaagatgtgtattgtactagtacacccaaggtgaactactacaattaccgccaacaattcgctattgctcaatgttggatcttgtcttatggagtttctttgttaatagccatgcttcgcataaggcgtattatgttaattttaggaaaaattaacatattaataaaacttaaaaatttaaaattaattagatatttttttaatttataa

SEQ ID NO: 67585 - DNA, 204 bp, Acinetobacter baumannii
atgtatgacagagagaagctacttaatgcatttaaaagtgctaaagggattgttgatcatgagttttcccaggacattattgatgcctgtcatgttaaagatcaggctagacagcagcgtattttagagggtgaaacgacttttgaggaagaagatgctgttttaatggctgaatggagaaaattgaataattcttcgtgttga

SEQ ID NO: 67586 - DNA, 192 bp, Acinetobacter baumannii
atgtcaacagagttggtcaattcggcaagtattatttcttttcctaaatcatgtggaatttgtgaatcaaaggaaaatgttcagatgtttgctggactaatgctttgtcgccactgtcaggagaatattaggattactaatcctggtctgtttgctgctaatgaaataattgaacctaaagcccaggattga

SEQ ID NO: 67587 - DNA, 1263 bp, Acinetobacter baumannii
atgttttttagttttctttttacttctcctgtgttcttttggtcatatattgccctgtgtgttccccagccatataatcgtggggaacacgggggaaaaccatcaatgaaagtatctatcgaaaagcgacagccagaccgcgaaggaaaacgctctttgcgcttggtatattactacggttccaacgttgaagacgggcaacgtaaactgaaacgttcacacgagccactagacatcttcatctatgacaaaccgcgctctccagcagagcgagagcacaataaagaagctttaaggatcgctgaagctgtgcgatctaagagacttcttgagagcgagacatcaaagcataagctggaggatcgaactaaactctctgccagtttcttcgattattacgattcagttaccgttagcaaagcttctggcagtaaatccaattattcaatttggatctcagccggacatcatctgagacgctaccatgggcgagcagaactcacattcgaagatattgatagagcctttcttgagggttttaaaacttatcttttgaaaagtgcaacgacgaaatctgatcaactgctgtcaagaaatacagtaagcagttacttcaataaaataagggcggccctgaatcaggcataccaagaggggattatcagagataaccctgttcggacggtgaaaagcgttaaaccagaaacaaaccaaagggtttatctgactctggaagagataaaagctatggcaaaagctgaatgtcgctatgacgtgcttaaacgagcctttctgtttagctgcacaacaggactgcgctggtctgacatacagaagctagtttggtcagaagtggaagaatttgagcaaggccattttcgaatcatttttaagcagaaaaaaatccagaatagaggaacggcacttcaatacctcgacttaccagattcagcggtaaggttgatgggagagcgcaaggataacgatgaacgcgtgtttaaagcattgcgatacagcagctataccaacgtagcgctacttcattgggcaatgcttgctggaataaccaagcatgtaactttccatgccggtcgccactcgtttgcagttaaccagcttgcgcggggcttagatatttattcattatcacgcttgctgggccacagtgaactgaaaacaactgagatttatgctgatatcttagatcaaagaagaagggacgcaatgcggagctttcctgatatttttgccgacagtctttaa

SEQ ID NO: 67588 - DNA, 573 bp, Acinetobacter baumannii; identical to SEQ ID NO: 50482

SEQ ID NO: 67589 - DNA, 549 bp, Acinetobacter baumannii
atgataacttcgtcttactttaaaaaacacaagaaaaattaccgctccctaaaggaccagcagcttacaatcgcagccaaagcaaatatttttatttgtattattttttgcttgttttggactatatattttgcatttgcccaaatgtgggtgattgtttatatggatatctgtttcacactaatttccatatttagcttttttcttatttatataaaccgtatttcggcagggatacttttatcacaagcggttctgctggtgtttccagtggttttttgcttatttttcgatgttgctacgcctgatcgccctcgagtggcccatttgtttttacctgccggagcgatactgggatatttgaattaccgtagggagccaagcttcttacaaattgttttaattttactgtcgattggctgctttatattttttagtggtagctcttttactctcgataatgccatacctttatcagaagatattcgtgatcatggtgggtggatagccacttgtgtcgctactcttatgatttgtatttcaatttag

SEQ ID NO: 67590 - DNA, 942 bp, Acinetobacter baumannii
atgattaaaatagatgtgaacgatatcgtagatagagaaaaactagctcccctccagtgggtagtctttgttttaggtttcttagtatttttctgtgatggacttgatactggaattataggttttatagcaccacctttgttagatgaatggcaaatttcaaaggccgaattagctcctgtatttggtgctgctttaatcggcatgagtattggcgccttaatatcaggtatttttgcagataagtttggccgaaagaaaattatgattagcagcatgctaatcttatctatatttacaataatctcggcttactcgaccaatacagcagaactcattatctatagatttatcacgggacttgggttaggtgcgacgatgcctaatgtaagtacaatcgtttcagaatatatgcctaaaaagcatcgagcatttctcacgggtttagctggttgtggatttctaatgggagtatcttctggaggattcctttcagcttatctattgaaaatttttagttggtctgaattactaattattattggtttgatacctgcattacttacccttgtactcatttttaccctcccggaatccacacaatttcttattattaataatcaaaagaaaaaagctcttttaattttagaaaaaatacatggtaaaaaaattgataaagagcttgtcttatctatagctgaaaaggaacttgtcgaacagaataatccacttaaagatatctttagcaaatacttatttggttcattaatgttatggctttgctcttttatgagtttattagtgttttatctttttacgagctggatgccgacaattttaaaaactgttggttttgatctacaacaattaagtcttatgtctactttattcccattcggggtaagcatccggctaacacagccttaccaagcggtcctataa

SEQ ID NO: 67591 - DNA, 162 bp, Acinetobacter baumannii
atgcgtactaattcttctcatttattggtttttgccaaagtctttttgtctataccacttaaacagtctataaagcggttgttttgcatgtctgtttttagcgctcaatttaagagtgacggcatttctatctcttttatatacaacaaaaaattattttaa

SEQ ID NO: 67592 - DNA, 333 bp, Acinetobacter baumannii
atgaaaggctggctttttcttgttatcgcaatagttggcgaagtaatcgcaacatccgcattaaaatctagcgagggctttactaagcttgccccttccgccgttgtcataatcggttatggcatcgcattttattttctttctctggttatgaaatccatccctgtcggtgttgcttatgcagtctggtcgggactcggcgtcgtcataattacagccattgcctggttgcttcatgggcaaaagcttgatgcgtggggctttgtaggtatggggctcatagttagtggtgtagtagttttaaacttgctttccaaagcaagtgcccactaa

SEQ ID NO: 67593 - DNA, 678 bp, Acinetobacter baumannii
atgaaagcaaaaaatagatactattcccgttcaaggatcgcagaagcaaaattcaggcaaatcattcgcttttttgccatggattttactgcatctgatactgctaaacttaccaatatttctgttcgctccatcaatacaatttatatcaaattgcgtaaaaagattgctgtccaatgtgaagaaatatctcccttcaatggcattattgaactggatgaatcttactttggtgctcgtcgtgttcgtggtaagcgaggtcgtggggcatcaggaaaaaccattgtatttgggttgctcaaacgggatggaaatgtgtacacggaaattgtaccagattgctcaaaagctacgctgcaagggattatccgtgggcatatagaacttgattcagtcatcaatacagatggatggagggggtatgatggtttagttgatattggctttgataagcacttaagagtaaatcacggtgacaatgaatttgcttgtggggaacgtcatattaacggtatagaatccttttggggctatgcgaaaaagcggctcagtaaatttaatggaattgacaagaagatgttttatttgcatcttaaagaaacggaatatcgcttcaatcatcgccatggtaatttatacctcgatttgcttaaaatactccgtaacaaccctctttaa

SEQ ID NO: 67594 - DNA, 510 bp, Acinetobacter baumannii
atgccagttccaaagcattcaaaagagttaaaattaaaagtcattcaggcttatttagatggaagtaaaggctacaaaatcctttcacaagaatttaatgtagatctccaaacagtccggctatggattgaaaactataaggcacaaggtgaagatggcttaaatatcaaaactaaaaaaacctattactcttccgaatttaaaatcaaggctgtacaaatgcttcttgataaggtacctgtaagagaagttagaagacggttaaatctgagcgggacgtcaattttaagaagatggctagctcagtataataaagaagggattgccgggtttaataccacgaggatttataacaatatggttaaacacgataaaactaaaataaacaaaccggtaaaagatgacaaagataaatctcagcaggagctcattgatgaagtgaccgctttacgtgcggaggttgcctttttaaaaaagctaaaagccttaaaactgaagcaacgtacttaa

SEQ ID NO: 67595 - DNA, 483 bp, Acinetobacter baumannii
atgtcaaatgcttatcagctcatttggtttcgccaagatttgcgtatacatgatcatgcagctttatggcacgccagccagcaaggaccttcactcggtttagtcatcttatcgccagagcaatggaaacaacacgccgatgctccaataaaaataagtttttatttacgacaactcagaacgcttcagaaagagttagcagcacttcatattccactagttattcaagtcattccctattggaaagagatcgcaaactttatttctgatttcagcaagaaatataatattgaaaacgtgtatgccaagaactatttttattccatgaccgtactatttttcctttacgttcaatccgtaaccaatcacaacaaccatatcaagtatttagtgcattcaaaaaagcttgttatacaaagctcgacacaagcggtttatctcaatgttatccggtccctaataaacaaaatgaagtaccactag

SEQ ID NO: 67596 - DNA, 390 bp, Acinetobacter baumannii; identical to SEQ ID NO: 65764

SEQ ID NO: 67597 - DNA, 549 bp, Acinetobacter baumannii
atggaattgactaaaattttatttaatccatggattgtcggtatcattctagctgctattttagctgcggttatgagtacattaagctgtcagcttttggtatgttcaagtgcactaactgaagatttgtacaaaggcttcattcgtaaaaatgcatctcaaaaagagcttgtatgggttgggcgtatcatggttcttgcaattgccgttctagcaattgtgcttgcgggtaaccctgacagtaaagttcttggccttgttgcttatgcttgggctggttttggtgctgcatttggaccactcatcatcttgtcattgttctggaaacgtatgactttagaaggtgctttagcaggtatgatcgtaggtgctgttgttgtgatcggttggaaaaaccttttcgcaagcactggtgtttacgaaattattccaggctttatctgtgcatttatcagcatcatcgtagtaagcttgatcagcaaagcgccaaactctgatgtgactggtcgctttgagcaagcagataaactctataaagaaagtacataa

SEQ ID NO: 67598 - DNA, 246 bp, Acinetobacter baumannii
  misc_feature (191)..(200): n is a, c, g, or t
atgacaaatatgatcaataaagcccaagggttgggtttatcgctgatcacaaaactagctggaagcgatgtacttgatcaactcaaactacgtaaatttcttgaaaggtctctttaccaaggttcaaaagctggttttagagcattaagtcagactcagaaagcatttaaacctaagcaaattccccatcnnnnnnnnnnccccaacaacgcctgcgtcaacagaagaaaaacctatttgatttaa

SEQ ID NO: 67599 - DNA, 297 bp, Acinetobacter baumannii
  misc_feature (4)..(13): n is a, c, g, or t
atgnnnnnnnnnnagttttttgaaattaaaaataaactagaaattgattctagagtcttgaaacatatcggttcaattctttttaaatgttttaactcaaggaatgttcggtgtcgaaaatatgaatatagttttattgatgatgaatttttaatattgctttatgtcgatagaagttttgatgagattgacgctatgaattcagaaatatttagtaaatgctatgatgagggtttaattgatgaactgaataaactttcatattttattattccttatgaagtgggcgtggattga

SEQ ID NO: 67600 - DNA, 261 bp, Acinetobacter baumannii
  misc_feature (217)..(226): n is a, c, g, or t
atgacacaaaaaaatgaactagacaccaagtatgcagtgatagttgctggtggtaatggagctggtaaatccactctgatagacaatgtgataattccaaaatttaatagtttaaatcttgatataaattttattaatgctgatgtttggcaattacaacactttggtcattttgataataccaatcctacccatgcacgcgaagctcagaaatggnnnnnnnnnngaaatgggctgaagctgaacgtcaaaaacatttag

SEQ ID NO: 67601 - DNA, 666 bp, Acinetobacter baumannii; identical to SEQ ID NO: 65833

SEQ ID NO: 67602 - DNA, 666 bp, Acinetobacter baumannii; identical to SEQ ID NO: 62920

SEQ ID NO: 67603 - DNA, 780 bp, Acinetobacter baumannii
atggaattgcccaatattattcaacaatttatcggaaacagcgttttagagccaaataaaattggtcagtcgccatcggatgtttattcttttaatcgaaataatgaaactttttttcttaagcgatctagcactttatatacagagaccacatacagtgtctctcgtgaagcgaaaatgttgagttggctctctgggaaattaaaggtgcctgaactcatcatgacttttcaggatgagcagtttgaattcatgatcactaaagcgatcaatgcaaaaccaatttcagcgctttttttaacagaccaagaattgcttgctatctataaggaggcactcaatctgttaaattcaattgctattattgattgtccatttatttcaaacattgatcatcggttaaaagagtcaaaattttttattgataaccaactccttgacgatatagatcaagatgattttgacactgaattatggggagaccataaaacttacctaagtctatggaatgagttaaccgagactcgtgttgaagaaagattggttttttctcatggcgatatcacggatagtaatatttttatagataaattcaatgaaatttattttttagatcttggtcgtgctgggttagcagatgaatttgtagatatatcctttgttgaacgttgcctaagagaggatgcatcggaggaaactgcgaaaatatttttaaagcatttaaaaaatgatagacctgacaaaaggaattattttttaaaacttgatgaattgaattga

SEQ ID NO: 67604 - DNA, 420 bp, Acinetobacter baumannii
ttgttaagacttggaattattggatatagtccgaagaatggtcatccctattcattctcatctattttaaatggatataatcgagaggcctatctgaaaactgaatggttaggaatacttaattatttagaaaaacgtgagcaagatgaaattgcttctttagatgctagagttactcatatatggactcaatcactggatttaagtaaacaaattgcgcggtgtagtaaaattgatcatgtggtttccaattatcaggatatgattggttatattgatggggttattatagctagagatgattatgagattcataaagaaattgcacagtgttttttagaggaaaatataccagttttaattgataagccattacctcaggattatcttttattatattttcaactcttcttgaaatag

SEQ ID NO: 67605 - DNA, 270 bp, Acinetobacter baumannii
gtgagttatgcaattggtgttgcagagccaacgtctatttcaatcaatacttttggtactgcaaaagtttctgatgagttaattatccagttagtacgtgaacatttcgatttacgtccgtttggtattactcgcatgcttaacttaattcaacctatgtataaacaaacagctgcttacggccactttggtcgtgaaggttcagatactgcatttacatgggaaaaaactgataaagttgaagcacttaaagatgccgcaggcctttaa

SEQ ID NO: 67606 - DNA, 861 bp, Acinetobacter baumannii; identical to SEQ ID NO: 61659

SEQ ID NO: 67607 - DNA, 732 bp, Acinetobacter baumannii; identical to SEQ ID NO: 61660

SEQ ID NO: 67608 - DNA, 660 bp, Acinetobacter baumannii; identical to SEQ ID NO: 64545

SEQ ID NO: 67609 - DNA, 237 bp, Acinetobacter baumannii; identical to SEQ ID NO: 44371

SEQ ID NO: 67610 - DNA, 390 bp, Acinetobacter baumannii; identical to SEQ ID NO: 45813

SEQ ID NO: 67611 - DNA, 918 bp, Acinetobacter baumannii; identical to SEQ ID NO: 46092

SEQ ID NO: 67612 - DNA, 516 bp, Acinetobacter baumannii; identical to SEQ ID NO: 46093

SEQ ID NO: 67613 - DNA, 654 bp, Acinetobacter baumannii; identical to SEQ ID NO: 53578

SEQ ID NO: 67614 - DNA, 957 bp, Acinetobacter baumannii; identical to SEQ ID NO: 56988

SEQ ID NO: 67615 - DNA, 1065 bp, Acinetobacter baumannii
atggctaaggagagccaagagcataaattacttaaatataatattgaaaatagtcttaaagttgataaagattttgacaatatcagagttgaaagtgtatgtaagagtattgatttatctgaatggcgtaaacccgatgtttctgctttatacttaaataagctaatagtatttgaagggcagctttcaactacttttttaaatgttataatagataggaaagttttttatcaagataataatgcttgtctgatatggatttttgatcgttttaaacctaatgaaaaagttatgaaacagtctattcaagatatttattataataacaatgctaacgcattcgtggtagataatttcacattattggaatcaattaaagaaagaaagtttatattagagtgtaattatttaaagccggaagtaaaaaataataaaatagtaaataaatgggaaaagaaatttattagttttaaagatttaaccttaaataaggaaactaatcaaatttattactttgactatgagtcagaatactttgaactcaagaaaaaactaggtttacggatagattatttagaagaagatagagaaataagtttaaaagataaaaacgaattgcttggagattttattgatttatggagtaatgctcgatatctttcagaagcgcaatttaatgctaaatggtttttaatttatagtgacttggaaaagttaaatattaatgtaccaaaaaatatcttaagatctccttttaaaacagtgattaactcgattttaagtgccaaattaggatatgttataggttatcaaataacggacttggttggtgttgctcaaaatttaatggaacatcaccctgagtatataaaacattttttactaactttaaaagtaactaaaaaaaataatttggttaaatatgaaagatggattaaaagatattcagaatatatacgacagcctgatagtttgaaaatttataaacatgacttaaatgattttatagaatttttagttcctgagtttgaggggcgtttgaaagaatggggttgtaaaaattga

SEQ ID NO: 67616 - DNA, 252 bp, Acinetobacter baumannii
atgaagaactttctcaccaagaaaatgtacgcaactagagctttattttttgctgtaggtgttacggctttgaatgtttcccctattgttatttctactactcatgcagcgacagaacaaaaaatggataatttatcgactacactttcattaatttttgcagataaacccatagaagcttctttatttagccctcaatttttaggacaagttcccatcacacaaattcaaaaactctttaggtgctcttaa

SEQ ID NO: 67617 - DNA, 834 bp, Acinetobacter baumannii
atggttaaaggtctacatgaaaatgcgatcggtaaaacttctcttttagttattgtagataacaagcctgtggttgtagaaaatgataaaacccctatggctgtcggttcgacttttaagttactagttttaaaagcttatgaagatgcgataaaaaaaggcgaattaaaaagagaaactattgtttctttaaaagaaaagaatcgctcgttgccaacaggagttttacaaaacttgcctgctggtacacctataaatctcgaacttcttgcgcagttaatgatacaaattagcgataatacagcaacagatagcttgatagatgtattaaagaaacctcgtatagaagcgttgtcacctagaaattctcctctgctgacgacacgagagctatttcaactgattgattcaagtaatgaaaagctcagaaataagtttaaaacaggaacaaagtcggctcgtctggaagcactctctgagctagacaaactgccactaccaagtgtgagtagcattggaaaatcggctacttggcaagatgctgaatggtatatgtcagcccatgagatttgtcctcttcttgaaagtgttcaagatgctccggctctgaacagttctttaaatccactttttaaaaatttaaattggcaaaagattggtttcaaaggtggttccgaatacggcgtcatcaacttttctgtaattggaaaaactcaaaaaggtcataacgtgtgtgccgtatttaccgcaaatggaaatgagccacaacccgaatcaaaactagcaatattatttacaggcatacttcaagctgttgattctatgagtcattag

SEQ ID NO: 67618 - DNA, 432 bp, Acinetobacter baumannii
atggaagcttgtaatcttaattgggacttggtgataaagtttattcaaataataattccacttggaattgcattatttgtttatcatatttggcatgaacaaaaaggaaaagaggtcgttgcaaacgaaaaaattgaaagattaaataatctcactcaaattaatatgcgcagcgcactttttatagaaaattgtcttcatgaaaaagaattaggcatgttatttactaattataatatggtgtctacagatacttatgttttacttagaaataacgcgttgaaagctaaagatcctaaagaatatatgaattttaatattcaatctagaatcaatttagatgcatataacaaaccaacagaagctataattaaaaagttgtccccatttgcaatatatacaaagaaaataagtttgaaaaagtttaagtaa

SEQ ID NO: 67619 - DNA, 3705 bp, Acinetobacter baumannii
gtgaaaaatacccagctctttctcgacgcaaacattgaacaatcaaatctaagagtaattgagggagattattcaaagattaaattgaagcaattaaacaataatgaattatttgattttactatcgcaaatccaccttttggcaaaatcgataaaacttcacttactttgaatcaagcgggatcattagaacgtttaaatttttctactcaaaggttagatcataaaattttattagagacactttctttgagaaaagacaaaggaagaagtgtttttattattggttcagacagcttttatgaagctggcgtagtcaagggtggaagtaaaaatttattaaattatctctatgataattacaatgttgaagcggccgtagagctcgacgggagtttatataagaaacaagggactcgcgtcaatgttcgtgttcttgtcattggtgatcttctggaaaataaccgtacttatgaagttcctcatgagttgcccatcataaataatgttcaagatttatggagatggtcggaaaatgtcctacagaaaagattacaacctgagttaagttacgatgggccctccccttctattaatcaaagtgaatcagttatatccgaagctaattttgaccagaatttagatgtggtagacgatgctgatttcttaacaagtgcattggattcatatttaaatgatcaaatagttccggatgagtccggtaatgttggggacttgaataaacctgatgatgacgacttctttggtaatgaggaagaagatacggctgttaaacctctttctactggagatgaacaccagaacaatgagattcttgatctagaaatagtagaggatgaatctcaagctcaggaaattatttttgaatctaaatcattgcaagttgcatatgtgccagtttcacaactaagcttgccagaaacaatgttgccagcagatcaagcaatacttattaaacaagcgcaagataatcagattaagaagatcttgcttttagctgaagtaaatcatgaattgcaaaaatctatcgatttagccaataacaatcctttcgacggctttctactttacaagctacagtattcagatctttcatctctttctaaagctttcagtgctgaacaggttgatgctgttacttccgcaatattaagcattgaaaatgaccgctcttatattcttggtgatcaaacaggtattggtaaaggtcgctctttagctggcatgttgcgttattctttaatcaatgggtttagaccagtatttttcacaaggaatgcacaattatttaatgatttatggcgggatatcgtagatacaggaacagataaatttatttctaatccttttatctttaatagtgatggattcattacgcataaagacaaggttgtttattctcctatgaaaaccagtgatatctataatctagatagaattggtaatcagtttgatattatctttagtacatacagtcaattttctggtagaagcggtaagaaagaaaatctttttctatcaagtattgataagaataccctattatttttagatgaatcgcatgtggctgcaagtggcgaatcgaatattagccggttcctttcagtcgttaaagagcgtacaggtcctacttatcattcttcagcaacagatagaaagaaagcaaacaatctacttttctattctgatattttccctgcatcttttaaagggcaattgaaaagcttaatcgaaaataaaccatctaatgaattactagaagctatttctatggctttggtcaaagacggtgttttcttaagacgtgaacatgatttttctaaacttgaattccggacatatcacgcatcgactcagtatcaaactgcttcacgtgagttatccgatcaattagctcaggtactttcaaaaatggcatacctttctggtgatgtagaagagaaagttgccaaaatgaatagtgagattaaacataatcttgagcacatgaaggagggaagttggcaagagaatcgtatgcaagtgaattcgatgaactttgcttcaagaatgcacaatataagccgccaaatccttctctcagttactacccctttgattattgatcaagcacttgagtctctcaaagaaaatcggaagccggttattggtttggaaaataccggtgaatcgttgcttaaaatgttgcttctaaaagattcaaaagcatttgaattgctggaccagattaatgaactcaaggattcttcagattatgatcgagcactgagtgacctaaactcagggaaaatgaatcaaattgaatttgatcaagagccaattattgtaaaactaaaaaaattagaacaggatctagctcagttcaaacaagaagatactattcttgcaaaaccaccgacgatagctgacttacttgagaatatggttcataagttagatattattcaagttcgtgaccgatatggccaagtacgaagtgaaaccattgatgacgaaatctattctgatttcaaacaagacatcttggataatattcggaaattaccagacattcctttatgtcctttagatctgataaaagctgagctggagtctcgtgggtataaagtcggggagatttctggtagagagtatcagctcaaaaaaattgattctaatcaaggttcggtttttaaagttgaagtacgtcaagaaaataatccgacagcaaagacgaaagcttgtaatgaatttcagtctggcattcttgatgcaatgattattacgagagctggtagtactggcctttcattacatgctattcccgttaatgatggtagtcctagccaatcagatcatttgaggcaacgtgagttccttacaggccagtcacctcaagcaattgatgaattcctacaaatgattggacgtgttgatagaaaaggccaagttagtgcgccgattatttcccaatttgatactgggcttccaattcaacgcaaatttctaatgatgcataatgctaaacttgccgaattatcagcgaatgtcacaagtaaccgtgaaaatgttaataagcaggtaactgacgtcgatttacttaatagttatggtgatgatgttgctctggaatatctagtccagaatcgctctgtagctcaaatgcttgtcataaatttacctaaagaaaatgataaaaatggcgctgaaggtatggttaagaaaatctttaaccgtcttaattttgtttccatttaccagcaagagaagattatcgatgatttaacttttgcttataacgaaaagattcagaaacttaatgaaatgggaattaatccattcgtagttcaagtatgtgattggaaagctcaaactatctctaaacaagagttacaaagtggcttgggcattatgtcgcatgtttctgatagtgcatttttcgaaccggcttatttccaaaaagttagctataaatctgaaacaaaaccttttcatggcgatgatgttatctctttaattgataagtcgagacagcttacacgccagcaattgttcaagcatttatgtaattttgatgataattttgcttctactatggaaggaaaggatcaggagctatctttatctagtttaattaagttctacaatgatgctcaaaaacagattctcgaaagagaattaagagagtcaattaaatacgaataa

SEQ ID NO: 67620 - DNA, 165 bp, Acinetobacter baumannii; identical to SEQ ID NO: 53990

SEQ ID NO: 67621 - DNA, 264 bp, Acinetobacter baumannii; identical to SEQ ID NO: 53998

SEQ ID NO: 67622 - DNA, 258 bp, Acinetobacter baumannii; identical to SEQ ID NO: 46547

SEQ ID NO: 67623 - DNA, 1281 bp, Acinetobacter baumannii; identical to SEQ ID NO: 49183

SEQ ID NO: 67624 - DNA, 306 bp, Acinetobacter baumannii
  misc_feature (283)..(292): n is a, c, g, or t
atgaaaaaaatcgtaatcactaacgaaaagggtgggattggcaaaacctctgttgctgttcatttggcacattactgttatgagcgcggtatgcgtgttctatttgtagacatggataaacaaggtaatagtggtttctcacttagtaaagttgcggttgagattaaagatacccatagtctatttgcggatatccaaaactttgaaactttagataaatactttgttctttttaaaggtaataagagtttaaaatcactttttgatcctacagaacaagagnnnnnnnnnngaacaagagtttaa

SEQ ID NO: 67625 - DNA, 411 bp, Acinetobacter baumannii; identical to SEQ ID NO: 49191

SEQ ID NO: 67626 - DNA, 327 bp, Acinetobacter baumannii
  misc_feature (311)..(320): n is a, c, g, or t
atgactaatttagcatctatgccctatgctcactcattatatttgaatgagccggcagagtggaaaaaacagtcatctgttcaattatcattattggatgatgtacaagagccttctgtagttgaacgttctttacctgctttaccattaaaaagattttctaaattgttttcatttttagatttcgattttgatactaagtcatatgaatatatggtcggatcagatcgatttactattgaaactaaaattgataaagccgatcaagcttttgtgtgtttaattaatgaagttttaatggcttataagcnnnnnnnnnncttttaa

SEQ ID NO: 67627 - DNA, 1155 bp, Acinetobacter baumannii
atgaacgtacaatcacaagaattgactagttctgacgcagagagcttgtctcctgctgatctgggctatagtcaagctaatagtcttagtcaagggcacccaaatttagcctcttttaagtatgagacagagtttaaattgccagtttcattaattcatgtgactcatgaatgttcattagttgaacataagatttggttatgtctcttgaatcatgcttgtgaaattcttgaaaattttcaagataatggttctcatcctattgttaattttaaaataccgtttgatctattaagattcaaaacaaatagtcaacacagacttaaggagattaataaatcactaagtaatttaagagatgctgaaatacaaatcgatatcttcaatgcacaaggattaaagtcatcttcctcacaattcagctttattcaagattttgcgatttataataaaaatatgatgcttaatcgagaagaggtggaagctgataacaaaccagactaccaaagtcttgaaattgtatattcattacctcctttttttagttcaattattactgattctatatcgattgaaaaagtaaaacgtttatttagttggacacaaatacagtctttaagtacatcaacaggaagaaatggaaaaattgaattattaatttataaattactggaaggaactgatgagccaattactttggcatacgaaacattcaaacagtatctaggctatggtgatgtagaagaaaatcgttatttcttgcgtgatactcttaaaccagctttaaaaaattttaatgcaaacgaattgcttgaatatgaagttgaaacagactttataagaggtaagcgtcaaaaaatagagtcgataaaactattcaaaaaatataagtttgttgataatgaacaagctgctcatgcatggcaatcactcttagatagtccacctgagaatacaacaaatttacgaatccgtattaagcagttagtgccggaaaattatgatatcgatagtttaacagatgattctatatatacgattctatcgcgtcttaaacaatggataaatggattgaagaaaaagggccagacaattaactttgtcggggcatgccgttcagcatttaaagataagagctcgatgatgttgttgtga

SEQ ID NO: 67628 - DNA, 627 bp, Acinetobacter baumannii
atgttcgctcttttggatgattggatagaccaggaagaactatcgcagtattggcattccattactggtgattcaatgattgtagatatacgcaaagtcaaaaaggaaaaaggcttaggctattcaaaagcagctgctgaggtgtgtaaatacgctctaaaatttggtgatttgtctgtagaaaatacatgggaagcatttaagatcttgaaaggaaaacgccttagcggtgcatttggctctctatacggtgtaaaaattcctgaaaatcttgctgatgaaatgccagatgaaaacgatcttccatacttagaaatgctttataaatttgtttttggtaaaaaatcttactacgacttaaccatgacaagacatgtagagccaagggctcaagatgatcgaccgatggagaaggagcttcgacgtccgaccgagggagagagtccagagccattaggctcaagcggttgtacgaggagcgagcgcgatgagagggcccgcattgtcgcgattgccccacagtacaaacgcaaaaagcaacactggcaagtatcgccatacacccgtgtacgggtgaaacaacgaatcaaaagatgggatggttatttgtgtgttatacacatgtaa

SEQ ID NO: 67629 - DNA, 654 bp, Acinetobacter baumannii; identical to SEQ ID NO: 54029

SEQ ID NO: 67630 - DNA, 390 bp, Acinetobacter baumannii; identical to SEQ ID NO: 65764

SEQ ID NO: 67631 - DNA, 2436 bp, Acinetobacter baumannii
  misc_feature (2403)..(2431): n is a, c, g, or t
atgaacattgaaatttgtactcctaattcagctacaacaaaagataaaggcgacttgcttgaaaaattaagtaaaaatatgctggaagctcaaaattatcatgttgatgaagaagtacgtaaaacaggaagtgaattagatttactatgtaagcataatgtctctaagaaaaaaatttatgttgaatgtaaagcctatcgggataaaaagattgatgcgacgataataagacagttacttggtactgttgtatttgaggactatgacgaaggatggctaattgggacttctgattttagtaaggatgcaaaagggctttgtgaagagttaccaaatcgacctcatggaaatcgagtaattatctacactcctaaagatattgttcagtcattacaatcttctagaatcattagcaatattccaaaagaacatttagaaagttatattgatctgaataaggttggagaatggtatttattaataacaagttttggaattttttgggctgttactatcttaaatgcaggtataccaacaaatgttatctgttatcatgctaagactggaactttagtcgaagatcaggcacttttagataatattgcctcaactgactgtagtctatctaaactagacttttccaaacttataaatacaaagaaagatattaaaagttctcttgattcccaaatagaagtagtagaagtgcaaagaggtgaggattggaatgactatcgacctgcacgacctcaagactttgttgggagaacgaaagatataaaagaaatatttgatttttttaaaaaaataagagaaaaagaaatcggtacacgaattttcgcaattactggtaattcaggtttaggtaaaagctcgttaattattaccctttctgaaaaagcaaaaaatcttcatcagaaaaaaaagttgttcttatatgctattgatgtaagggcagcaaagtctcctgactatatatattccgcattattaaaaacactaaaagaagcacaaaagaagggattcggtaattcaaagattgatttacaaattacaaatgttaatcatccactagaatcagaatctatagcagaatatttaaatagtcttaatacctcgaaacaactcatagtattagtttttgatcaattcgaagaattatttagtaaacctgatttattggaattatttaataatgcaagtaatattttattagatgcagctagcttaaaagctaatttatgtattgggtttgcgtggaaaactgatagtacaatgccttcagaacataatgcatatttcttttggcatagattatcagattatcggattgttagaaaattaaatcctttttcagatagggagtcgcatgcagtaattaataagtttgaggaagtaattggtgaaaaaatccatagtgatttaaggcataatttaattgttagtagtcagggatatccatggttattaaaaaaattatgtatccatttacatgagaagattttatctggccaaaaacaagaagatctattagataataaactggatatatctagtttatttgcaagtgatttagaagagctaaattctaatgaaataaaagctctaaaatttattgcccagaaagcaccagttgatttagttgacactattgatacgtgtggtgaagatatagttacaagtttactgcataaacgtttaattataaaaagtggtattagattaaatatttattgggatatatttagagagtatattttaacagagactgttcctattatctcattaagatatttgccttctaatgatttttcaacaatatggaatgttgtaaagtatttgtctaagaaaccaatttctattcaacagttgcaggaaaaaactgatttttcagagggtacaattcaaaatataggaactgatgttttattatttggtttagcaactagagaaaactcacaatatgtattatcggaagatttgttggaagaagaaaatacacaagagaatattctgaatataattagagaaaaatttaagaaacatattattactttacatctaaaagacctttcaagtggaacattattaacaattacaaatttcatagatttaatgaaagaaacttatcctgataataaatatgcagataagacttggagatcttatactattagacttattcgctggttagaattaacaggtttcttacagccagctacagagccaaatacatggatttataaagatttaggaagtcccaaaacttctgtgatgagtagaagacgtacttctaacttttttgtgccaagaattacacctcagttatttatatcgatatatcctcagattgcaggtaagaatcttcaagaattaataaatgatggtagaactaataaggcnnnnnnnnnnnnnnnnnnnnnnnnnnnnntttag

SEQ ID NO: 67632 - DNA, 216 bp, Acinetobacter baumannii
gtggtttatgctaaagctaattcagaatttagtatccaagctatgcttgaaattaaagagctatattctgctgataaactatcaggacaggctttaggtaagttgcttaaagaaaaatatgatttaaaatggactgatgtaactactcaatattcaggcaataaattgaatagttgggctaaatgggttaaatcttatgaagtgaaaaatgaataa

SEQ ID NO: 67633 - DNA, 639 bp, Acinetobacter baumannii
atgatcgcattcaatcacgttgttccggtacttaatctgtcggtgttcaacgtcagacgggcaccggccttcgcgtttgagcagagcaagcgcgcgaccataggcgggcgctttatccgtgttgatgaatcgcgggatctgccacttcttcacgttgttgaggattttacccagaaaccggtatgcagctttgctgttacgacgggaggagagataaaaatcgacagtgcggccccggctgtcgacggcccggtacagatacgcccagcggccattgaccttcacgtaggtttcatccatgtgccacgggcaaagatcggaagggttacgccagtaccagcgcagccgtttttccatttcaggcgcataacgctgaacccagcggtaaatcgtggagtgatcgacattcactccgcgttcagccagcatctcctgcagctcacggtaactgatgccgtatttgcagtaccagcgtacggcccacagaatgatgtcacgctgaaaatgccggcctttgaatgggttcatgtgcagctccatcagcaaaaggggatgataagtttatcaccaccgactatttgcaacagtgcccccataaataatccagtaccaattgcaccaccgattgcgatcatttga

SEQ ID NO: 67634 - DNA, 402 bp, Acinetobacter baumannii
gtggttggctatagcttaaatgagcgcatgacaacacagcttgtttgtaatgcgctaaatatggctattcacaatcaaaaaccaaccaaagaactgattgtgcattcagacagaggaagtcaatattgcagccatgaatatcgaaatatacttgagcaatatggttttcaaggttcaatgagcaagcgcggagactgttacgataatgcaccgattgaaagcttttggggaatactgaaaaatgagttagtgcatcattacaactatcaaaccagagaagaagccaaagcagatattataaaatacattgagttattttataatcatcgaagaattcaaaagggtttgggttttaagacaccaaatcaaatggccgaagacttttataagttggctgcctag

SEQ ID NO: 67635 - DNA, 414 bp, Acinetobacter baumannii
atgaaacaaaaaagatattcttttccaattaccttaatggctcgattacttcatgtttcagtttcatgtttttatgattggctcaagagaggcgtgagcaaaagaacgattcaacgaaatcaacagacgatattggtgaaaatagcccatgaggagacaaagcagagctatggttatattcgattaaccaaatacttacaagctcagggcataaaaatgagtatgtacgctgtacgtcagataaaagcgctgaaccacctgtattgtaagcgacacaagcgttttaaaaggactacgaatagtgaccataatcgagcgatctatgaaaacctgctggagcaacaattctcaatgactagaccaaatcaagcatggtcaagtgatattacgtacatatggactgttgaaggatga

SEQ ID NO: 67636 - DNA, 300 bp, Acinetobacter baumannii; identical to SEQ ID NO: 44684

SEQ ID NO: 67637 - DNA, 261 bp, Acinetobacter baumannii
atgatcaaaattgatacctttgatactatgcaaataaagaagtcctttaccactctaaaagggcaagaaagaataaagcagatcttaagaaatgctgaaatagtttttcttactaaaggttattccggatttagtatgagaggagttgcaactcaatcaaatattagtttaagtactttgcaacattattttcaaaataaagatattttattaaaagctttacttaataaattaatttgtgactatatacagcgtatttaa

SEQ ID NO: 67638 - DNA, 468 bp, Acinetobacter baumannii; identical to SEQ ID NO: 46236

SEQ ID NO: 67639 - DNA, 606 bp, Acinetobacter baumannii; identical to SEQ ID NO: 53590

SEQ ID NO: 67640 - DNA, 246 bp, Acinetobacter baumannii; identical to SEQ ID NO: 63561

SEQ ID NO: 67641 - DNA, 612 bp, Acinetobacter baumannii; identical to SEQ ID NO: 60368

SEQ ID NO: 67642 - DNA, 384 bp, Acinetobacter baumannii
atgactacaaataatcagacatccatcgcatctcttgcgaaaaaacgaagaacatacagtgctgaatttaaacagcagatcgttcaggcttgtaaagcaccggacgtttcaattgcttcggtcgctttgcaacatggattgaatacaaatcttgtatccaaatggattcgcttaattgatgctaagccagggaatgatcgctcaccactaccgaataaacctgcatttattgccttatcttgctctgcaccattagatcctactcctactgacatgttaacggttcaaattactttaccccactcaaaagcagaaattggcttgaaatggcaagtatcagaaatatctgctttagcagaattactcaaggcacttgcaacatga

SEQ ID NO: 67643 - DNA, 471 bp, Acinetobacter baumannii
atggcagcactaaaagagcctgtgaaaatatttattgttcaagctcttgcatgccgtgatacccctcaagaagtggttgaacaggtcaagcaagagtttggagttgatattagtcgtagccaatgcgaatgctatgacccaacaaaatattcgggcagaaacttaagcaagaagtttgttgagctttttgaattaaccagagagaagtttgataaaggcttaattgatattcctattgctaataagtactaccgactgaagcaataccaaagacagcttgagaagactagaaacgtcaaaacagccttaaaaattcttgagcaagccgctaaagacattggtggtcaatttactaatcgtcaagaaattacaggcaaagacggcggaccagttcaaacagttaattctgaaattccagttccaatggaagattacttaaaagcgcggagggaagtcttagatgagtactga

SEQ ID NO: 67644 - DNA, 3423 bp, Acinetobacter baumannii
atgtctaaaataagtactttgaccctaaaaaaagggcaatatttaagtaatttatcactgcctgttcaaaaaaataagttcacccttattcaagcgggtactggggttggtaagacgacaaccattatggaggattatccgaagcagcaccccatcattgttatgcttgtgccatcagttctgaaagtgaaagagctagagacaacttatggagatgtttctggttccattcaatatcgcttttattacgacaaaaaaagtccgactgaagatgaactcagtcaacagaatggacttgttgtcgttgcaacttacgacaaaatggaagcaattgtgagtaagttatctattgctcaacgtaagagtacgttattggtggttgatgaatgtcataagctctatgcagcaggaagttatcgggatgatgccattaactctattatttttcggattaatcataagaaaggattcagaactgtcctctttctaacagcgactttcactgatcattgttgggaaactctaaaactacctctggattacatctataaggttgatcttgaagaagtcggccttaagcggtctctagaaatgttattgattgataaaggcaatcaatttagtttcattccttttgttattgaacgcctcaagaaaatgcaggaacaaggtacacggaagaaaattattatacgtcttaaccaccgtaccaaatgtgaacgtgttgcagcactgttggagagatttcacaacgctcatactttaactattcatagcaagaataaagatacgactgaggtccagaacttttttacggctcaaaaaatcccgagtgatgtagacgttgtattttgtacttcaattatggatgaagcagtcaacatcaacaatttaaatgatgagctagattctgtttttgtgattggaacagatgctcacccagaggaattagtccagtttcttggtcgtttacgtaaaacagcagtaccttgttttatggtgaaccatacaggtattgaacttaaccatatcgtagatatgcatgcgttaaagcaaaagaaattagagaagaatgagcggtttattaatcgtttaaccgaaattgctaatcttttgtcagaacttatggacgactatgatttggatatagaggaagtaggagaagaggttaaaagtatctataaacgtgtcacatatctgaatgagacatttaacgaattatcaggagctaagctgtttgcagtgcattgtggcaaagctgttcataatatcgccagtattgctgccaattattatcgtatggataagtccaattgttattctaacttttatcttttcaaagagcgtgtaacagagcttttgccaacatgtacagtgaagcaccgtattattaacgattgtactttgcctagctatattaaagagtttttagacgaagagaagaaagccagtgatgacgcttataaggcgagtattgttccagcatttgaaatttttttagaggccaaaaaaatctcttatgtagaaattgatttggaggctgaatttgatgacattagtccgattatagctcaaaaagctgaagtagcaggtcaaagtactgataataccagtcaggataaagaagttactgacaatgtgagcgaaaagtctgacgagaaaactcaagtagaagaaaatgctaagcaacctgaaaaagaaaacaaacccgctaagagcggcatagcagcgctaaaacagcagggaatcatcccaaataataaaatggacgatgaccagaaggctaatgaaaagcataaaaaagagccccctacatcattccaaaagcttaaagaaaagctgaagaaagagaaaatgcggtcatcaactgtcccatgtcctattgagaaggatgctaatgatcattcagacaatgaacgcactatgctcattaaaaatgaagctgttaaggtacataatgcaaatgctgaaacagaggatgtttttgatgaggatgatgaccagaaggctaatgaaaagcataaaaaagagccccctacatcattccaaaagcttaaagaaaagctgaagaaagagagaatgcagtcatcaactatcccgtgtcctattgagaagggtgctaacgttcaatcagacaataaacgtactatggtgattgaaaatgaagtagtgaaggtagcagatacaactggtgaaccagtcgatgtttttgatgaggatgatatcgaggattctcaggaaactgaaagtgctgtcgaagtgcataatgaagatgaggacatgactgatgaagatattatcgaagaaccttgtcatgaaaaccaaataacagaagatgttagcgaggaatctgatcaaggagaagaaatagctaatgatgcgaccgaggaaccttgtacagaggacaaagtaactgatggtactgctgaagaatctagtcaaaaagatgaaggagcagaagaacctagtaatgagagtaaggtagctgtcaacgttgacgaaaaacctagtcaggagagtgatcaaacagataatatttctaaaggctctagtcaaaaaaatgaaggaacaaatggtgcttcaaagaaaaaaaagaagagtcaggctcacaatagctcgttaaggcttaaagatattggtacaagtattcttcgtcgacaagaagaagatgagcaattcattgagcagcttgtagctcaatatgatgtcccctctcatgcagttactgtagaaattctactgcaaattgcacatctgtctacagtgattggtaatctaaacgatatctacacaatcattgagaaaaaacagtttagcactgttatgggtatcgctagagcttataagtcaaatgtcgtcgtacattatttcattaagcggttttatcgctattacccagaacgctacttagataacggatttcaattaactcctaacgatgcagctgattggctattaaagggatttaaacaggttcagaaagagactgccattcctttcaagaaggtaataaaagataaacttgtatctggagttaaagtagactctaagaccaaagaagtcagtatcgacccaagtaaagctgcaaacttcttcgctaaatatttttctgtgaatgaccgtaatgctaaaaaacctgcatcacgctatttagaatttacgggaattgcttacgaaaattatcaattccttgcaatcgctaagtatcagcaaccttatttaaaacctctagaagagttccaattaggggagcgaatctttaaccctgttacaggtgttttgatctcagggcctaaatctccgtttaagattatcactccttctgatcagccagactatttcgacgaagtagaggatgaagatgaaatcgaaggtgaaggtgaaggtgaaggtgaaggtgaaggattagatcaggtagcataa

SEQ ID NO: 67645 - DNA, 186 bp, Acinetobacter baumannii
atgatgttatatgaactttacctaaaccttcaacaaatagaaaagctccaagtaaaagcattacagaataatataggtctgatacattttcttttaagttctatcgaaaatttgaaatatacgataagtaatttaagtaactacttgcagggcttctcacatttgttagtattcccatccaattag

SEQ ID NO: 67646 - DNA, 345 bp, Acinetobacter baumannii
atgacagatttgaataagttaagaagcgagtttgaggctcaacacagtgacaaggttttcaagatagtgaagtttgatgaagcaaccaatgcatattgcttacatgcttatttgccactaactgaaataaacctatctgccctgggtgaaattaattacggatggggtttgtggcaaaaagccaaagctcaggcggtgccagagggttatgttcttttaccaagagtaccaactgaaaagatgttccaagcatatgaacgatattcagtcgcgccgatgtcgacgctgagtaaaaacggatataaggcaatggttgaagcaagcgaatcgggggctgagggatga

SEQ ID NO: 67647 - DNA, 705 bp, Acinetobacter baumannii
atggataactacaaagaatatttagatccagcagatggatatgccttagtaaagcagtcagtgaatatgccagtacacccacattggattggtgtacctgatggcgctgagctttatgtgtattggcgtgaaaatgacacttataactttcaggttgataaatcatattttgaaaatggctcatggcagccttgtgcatggacagtagaggaaattaagtctggtaaggcaggcgcaaaaatactttggaaacgtccaacccaagacccagccttgattagcggtgcggaggcagaactagttgcgcaagctaagaagttcatcacatcagaccatttaaatcgctttgaagcagcggaggcgcatttagaaggtcatcctgtgcagtttatgttggctaacggtgatttcatcgatattacatcagataccactttgggaatctttgaaaaggatggcggctattcatttcgtatcaaaccccaaaccatcaaggttgaacttgagctgccgaagccttttgagcctaaagtgggagatttgtattggtgtatcgctatgacaaatctccgaggatatacgcaaaaggtctacaaagatgatggcgatgatgagtgcttaattcatctaggagcctaccgcaccgaagacgagatcaagcaagtcgtagagcaactcagaaagatacgaggtactaactcatga

SEQ ID NO: 67648 - DNA, 735 bp, Acinetobacter baumannii
atgaatccattatattttactgctaaaggacctagaagctcaaatgaagatagctatctcattcacgcgcttgaaaagggtatattactcatcgttgctgatgggttgggaggacataagggtggaaagtatgcttcccattatgcaacgacaaattttcttaataaacttaattctttaaatgaaataaatattctaaatttagaaaatattctgcaagatattcatgaagagttaataattttaggctcagaaaataaagatttatatggtatgggtactactcttacttgtgcttatattgattctgaaaataagttgataggggttcatactggagattctcgagcttacttattaagagaaaatggtttgatacagttaacaatagaccatacagaagctcaaaaattgtttgatgaaggattaatcagcaaagaagaattattgaattatcctcggaaaaatattttagtaagtgcattaggtgctagatctaaccaactattagttaattctttcgaatatcaattagaagttaaagatagattattacttagtagtgatggcttttatgcttctattacaaaaaaggagataagagatatctctataaaatttgaagagttttcagaatttttctttaatattctttgctatgtaaaaaatactgaacccaaagataattattcagtagttggtattgaaattgatttatatgagtctaaattatag

SEQ ID NO: 67649 - DNA, 516 bp, Acinetobacter baumannii
ttgaaggggaaaacttcttatgatgtagggtttcttaatacagttttaaattttttagaaaactcaaattatattgattctcatactgtttttattaatcttgaacaagtaatgatagaaaaagtaattgcggtcaatgacttaaatatcattagtagactatgttatgtttactctaaatggctgtctaatagtagttttgatttttcgatgtgtgatgtgttggcatcacgattagatgttttctggaacgttaatgacccagaggtacgtagtaatgtgttattgggtttattaattatgggtacaaaccataaccgttggtatgtagaacaaaaatttgtttctagggtaaaatcttgtgatatgttaacagcacaaagatttgtgctagaaagtgctgtacgaagacaacaggttagtgcatcaattaatcatttgccaaattctattcattttaatcgtttagaattgcccccaatcattcaacaaggttttgcaacctattcaatttaa

SEQ ID NO: 67650 - DNA, 549 bp, Acinetobacter baumannii
atgaatctttacaatataatgggcagaataggacaaggtggatttgctgaggtttctgcaatttcatttgaagatggaactcaagcggcaagaaaggaatttcatccaaatcaggctcagccactaggtccggcagaaattgaacatattaaagaaagatttaaaagagaagttattattctttcttctataaatcatccaaatgttgttaaaataatttcttcagaaattcatctagaaccacctgcatacataatgcctttagctgattcaacattggcagatgatctcttaactattcgtggaaagccttttcaagatagaatcaaagtatttatggatatattagctggattagaagcaattcatgatttaagtatctatcatagagatttaaaaccacaaaatattttaagatttggtaatgattacgctataagcgattttggtctaatttccttagataaatcccaagtttcagtgttaactcaaactggtatgaatatgggcagtgatagatataccgctccagaaattactagtgaatga

SEQ ID NO: 67651 - DNA, 804 bp, Acinetobacter baumannii
atgtattttttattttatatttgcttgcttatatttaaatatttgatttataaatataaaaggcttctagtttctgataggttttatattgctggaggacttatatttgcagtagggatgttttttttaaattatcaatatgtgaatataattattggtatctcaatcatattaattgagataggttttcttaattggatttttaatttttataaaaaacacattaaagatgttgctatttataaaacaatttattggcttttaaatttttttattttatggttttctaatgttatttctcaatatttagttgagaaaacatttggcttgcctcctaaggattttgatttaactttatatttttggacccttatctgttatattccggcttggctttattttgcaacttctatatgttttgttttttatttaataataggagtgggttggacaattaaaaattttttagaagttttttttgatatgtttaaacctttatttaaaatgtttgtaataaataaacgagaagtaaaaaaaagaacagatatttctcaaccatttcattttgttgggctatttattacgcttatagtcttttatcacttaggtttgactataagtcgtaatgagatgcttatatatcctctagtcaaaaaaattgcttattatactgattataaagaattgtcaaattatccaggctcaaaaaagagtcaaaaaattattttacatgctaataatgtggtttccattgctaaagaaaatggaaataaaattgaaattagtgtgaaaaagatcgagtaa

SEQ ID NO: 67652 - DNA, 603 bp, Acinetobacter baumannii
atgaactattacattgaagcaacattaatggaaaatgatcaattttctccttatgaattatggtcacaactttatcctcaattgcatcttgcattggttgaagccaaaaatgctgacaataaagtgaatattggattttcgttccctcaataccgctttcatcaagataaaggtgttggatttataggtacaaaattacgtttatttgctgagtctgaagctgatttgaagaaactggacattcgacgttggcttgagcgtttagaagattatgtacatgtcacttctattcgtgaagtacctaatgatattaagaactatgccatttataagcgtaagcaagtgaaaaccaatgcacaacgtttggcgcgtcaccgtgtaaaacgtggggatattggctttgatgaggcattagccagatacagcaatgtagttacgacaaccaacatgccttatattgaaatgaaaagcctgagcacttcagatcagcaaagtgaaaaacgttttaaattgtttatcgaaaagcaatctgctgaaaaatctgaaactcaggtttttagcacttatggattaagttcagtatcatccgtacccgaattttaa

SEQ ID NO: 67653 - DNA, 1032 bp, Acinetobacter baumannii
atgcaaatcattattgaatatgagtcttcatggcgaaattcatttttagatggctctaacaatgaacctttgcctaaaggcggacgtaattttattgcttcaatgacaacattaaagcaagaaggcaattacaagaagcgtagtatttcaaaagataccgtcatgggtgttctaaatcgcttgattggcgatcaacgtaaactctatcaagcacggcaagatgaaaattattattttactgaagttgagaaagtacttcaggagagtgatattgtcgatcatgctctaaatagtaatgagatggtgtatatccgtaatgtttcaggaagtaccgatcaaaactcatttacaggaatgattaaagacaatcatccaacattcaagtccgactattctgctgaattttggggaatattatggcttaatacattagagttaatcgattttattttgaaagatgattatctagtaaactccatcgcgcaagatcaattaagctccctaactattgcgggaaaagcaaatgaattggataagctaaaaaatgtggctcaagacgaaaacattcttaaagccattgaaaaattgaacagtcattttccaaatgaggcatatatagaaaaaaacggatcaattaaaatagttcgtttatatgctggggctttatatctgcaatttgaaagattgaaatccaagtttaatatggaaacagcatgcaataaacgtggtgaaaatatttttatttatggattttccaaacgtggatttaatggttctagggatttcatgaaaaattttattacaggtaaagaaaaaattatttggggtaacccatatttaatgattgaaagaaagaaaggcgagggtgaagtcgtatctgttttaaccaaagctagtggaaagctcattataaatttgaatatttctaaagaacaagcaagagatttagaagaaaaaattgaaaatgcaggggtttcatctttttacttaggtaaaaagggcttggcttatgtcacggatattagaccttaa

SEQ ID NO: 67654 - DNA, 999 bp, Acinetobacter baumannii
atggctaaagtaacaggtgtaaaaagcgtagattttaaaattacagcgtatggttatggggtggtgaattggaatggtccaactacattggtagattctagtaacaataatcgtgataatcatagcttaccaaagttacgaggtttcactaacttaaatggacgtactaaggacaaagaagacggaagtgtttatcattataaaaaaaatgttaatgaaataaactttactgaaaatcctctttatataagtcaaaactgtattcgtcaccatctattccgtgatcaatcttttgatttgcattatgctaaagataaaaatttaattgatgttctagcatctattacagggctaatccgtggctatgtggtgccatcgagtcaatgtaaacgtacaagtccacttttgattacagatttcatcgatcaattaggtaatggcaattttgaacagttttcaaatgcgagttcagcagaggaaactatacagtcagatggctcaaaaacatataagcgtggtgaaaactctattttctctaaaacgacgtttggcgatactgaatatatcgcttatggctcaattagcattgagcagttgcagtttatttcgctcgataaaaaattcgatcgtgcatcaatgattatcaaagaaggtgaaggtgaaaaaattgctgaacgcgtacaggaatttattaagagccttgatccatcgaaagaaccaaaagcgattttccataagaattatgtgcgtaagggtacgatttttaatgaaggtgaagtgggtatattacttgacaacactgcgattgatattttagttaaagaaaccctttcaatgcttgaagaactcgtcattaagcaagcgaaaggctatatgtgtgtagatacagtcgaagttgattataacgatagtcataaaatgatgcgtatcaagcgtaatccagatcaagctaatcctgagccacaacaagattatgcgttttattttgaagcgcaataa

SEQ ID NO: 67655 - DNA, 2949 bp, Acinetobacter baumannii
atgattgtgacgtttattagccaatgtgaaaagaaagccattccacgaacgcgtcgggtattagatgcctttgcagaccgaattggtgataacacctggcagacagtgattactgaggaaggtttaattgcagttaaaaaattgctgcgtaaaaccgtgaccaaaagtactgcggtcagttgtcattggattcggggtagacgtagaagtgagttgctgtggattgtggggaatcggaatcgatttaataacattggggtggtgcctgtgaatagcacgcaaaaagatgtatttatggatgttataacaatgaaagcaaaacaagatgaattttatgcgaatacgcatttacaaccactcgcagaacatagttttgcaattggttatttggcacagaaattatttaaaacagtagtggataacgatgaatatgacaacttatctaaagttgcatttttagcgggttgtttgcatgatttaggtaaattagatcctctatttcaagaatgggttaaaaaaggaaaacaaaaagatcctgaagatgatggtcagcatatcgatgttaaatttacctttgataaacaccctcgtcataatgaggtgtcattattgctatttaatttttttgaacagcaatgtaaaggattgaataatcgtcaaaaagaaagtttacagcatattttgtattggcatcatgcgaagccatatcgtcaaaatgatgattttacaggggtgtataaagcctacgaatacttaatcaaaaacattcaagcagatcagtttgaaatcttgattcaacggacatctgacttagttaaaagaattaacaacctatcaaaaaattattatgccaatgaaagtatcgaaaagcatattgattggaatgtggatgatgcgaaagaactaaaagagaattttgaatatcaatttaagagtaaaaactttccagaattcaagcactatacaaatactgattctattgatgtattacgtgataaggttcgggtaaatgcagaacataatttattacgtgcctgtgtgattagcgcagaccgtttgatttcaaaactatctgcgcaagatttaatggaatatattgttgagcaacgcttagatgaattattagaggcacaggaagtgctttctcatctatcggaacatttaagcaatgtttcgacaaagttcccgaacagtcaacgcactcagaaacaaaacgaaatcgcacaacaacttgcagatttaagagatatcgctgtacttgcaggtccagcaggctgtggtaaaactaaaattgcattagagtgggcaaaactgaagaatgcaaaaaaaatattttggatttgcccacgggtacaagtgtgtcaagggattttccaagaactgacagaaagctatttgccagatgcaaaagtagaaatctttacgggtgaatttaagttcaccaatgcttgggataaagtgacacctgagcatgaatatctatcgggtgatgtggtggtgacaaccattgatcaaatattaggatcaattgtgacacacagcaaagtggacagtttaattccatttatggatgcacatgtagtatttgatgaataccatgaatatattggcatggagattttcaacttattattcgctgagttgattgtcaataaaaacatgcgtaaaaaatatgaaaaaaatacattattggtttcagcaactccacattatgcgtatttaaaacaagtcctaggcttgcatcaagatgatgtgatcgcaatgccatcatttaatgatcgtgactataaaattgagtttatagactatgatgaatccatcatttcaggaaatccattttaccaagtctatgatggacaaacttttattatttccaatacagccttaacggcacaattgggttttatttatcagaagaaccaagaaaaaagcgtgcttttccattctaagtttaaacgcagtgataaaaaatattggtttaatgaagtatatgaagcatttaaaaaagagggcacacacaaatttgaggtattgcggagtggtccaattgtccaagcgtcattaaacattacagccaaaaatatgctgactgaaatgacatcgcctgaaaatatgctgcaacgcttaggacgtttagatcgttttggtgaaagtgaaaatctgaatattttaaaagttgggattactgaacatgtaaaaaacggcagttgcaaaggttcgttggcatatttcctaaatcaactcaattgcttgcaaacgacaaaagcttggtacgactttttacaagatcaacttgcaggacaaagcttcaaattatccaagctttatcaactttataaacagtttcatgaatcacaagatcaagaaaattcagctgtatctcaagatatgcaaaaagcattaaagaaaagtattgatcgaatcaataacaaagttacagaaccaactaaggtgtcaaaaccgaaaacggcagaacgtaaatcaaaaattagtaaaaattcattacgtggcgatagccgttttgttcagttggcgaaattgaacttaaataattatgccaagccaatttttgaaaatgaatatgcgtatcaaccaccattagatgatacaactgaatatgacaatctaaccgagtctttaattattattcaggaacttggattgattcattttattgctcaaaaacatggcaatattgatccgtcacatccagtgaaaggcattcctgagaaaaaacaaaagtcacgatgtatagtcttagaaaattatgctagagatgctgattttcctttgtacttaagttatatcgaagatgacttaaataaagtcgggggcacaggggttcgacatcctgaagcgatttattatgcagtatgtgaccaacaaccgattggtgcaattacattagacaaactcaatattttagcaacaacgtcagagggaaattaa

SEQ ID NO: 67656 - DNA, 969 bp, Acinetobacter baumannii
atggaacagcttaatccatcagatctaaaagcaatattacattcgaaacgtgccaatttgtactatcttgaacattgccgtgtgatgcagaaagatggtcgagttctttatctgaccgaggctaaaaacgaaaatcagtactggaatattccgattgccaatactacagtgattctattgggtacaggcacatcaattactcaagcagcaatgcgcatgctcgcaagtgcaggtgttctggttggttttgcaggtggaggtggcacgcctttgtttatgggctgtgaaattgaatggatgacaccacaaagtgaataccgtccaactgagtatatgcaaggttggatgcaattttggtttgatgaagccaaacgcttagatgttgctaaacattttcaattggcacgagttgaatatattcagaagatttggtctaaagaccgagatttaaaagaatatacctttcatgtggatgatttagatattcaacaggctttaacgggttatgcagcaagaatttcacaacaaactaaagtcggagacttactacttgcagaagctgcaaccacaaagcaactttataaaattgcagcgactcgtacaggtttaaaagattttagtcgcaatcctgaacaaggtgatttagccaatgattttttaaatcatggcaattatctggcttatggtttagcagcgacaacactttgggtacttggaattccacacggttttgcagtcatgcatggcaagacgcgtcgaggggctttagtgtttgatgtggcagatttaattaaggatgctgtggttttgccttatgcctttatttgcgccaaagaaaaaatgactgaacaagaatttagacagcagattttgcagaaatttaccgagcataaatgtctggactttatgtttgatcaagtcaaagcacaagcttgtaaaaatcatgatgtagatggagaaacattatga

SEQ ID NO: 67657 - DNA, 1209 bp, Acinetobacter baumannii
atgcgaatcttagttcttagtactactggccatcctgaagcaaatttagaatctgcccgttatttcatcgaaaataagagcattattgataaaattacagtactcagcaccacgtatatggatgaacaaggtaagactgatcttttagtgcaaagtttaaaacttattagccaagcaactattgagatattaaatattccaaacggctatgaagaatctaatatgtttgccatccaagaaatgattttgaattgggcaaaccaacatccagctaaagatcgttttatctttaatactacaggtggcacaaaactgatgagtattgcaatggatcgtgcatctatgcttttgggttcagcacgtgccgaaagtttttaccaaagtcgtggtcagcacgttgtttggtatcaacggcagaccaaccaaattgtctacccaatcaacagcaatctaaatctgcagcaacgtgtgctgtcacgcggctaccagattacaaagcaacagccaatcaccgatatttcacttgaacaattgcgctatgcacaaatcttaattgatgtaatgaaaaatgatttccaaaaagggcgacgcttttgctcatttattaataaattggcttctatgtcggatgatgaaaatagtttgaatgttcattttgacaatattcaagcggaacaagccgaaggtttagaggtcctagcacaaattactcaagaagctttcttttcatttgacagtagctcaagtgtgattcaatttaaatctgaagaaacacgagattatatgaaaggtggctggttggaagtctacagtggctatgaatgctataaagcacttattggcttaaacccgcaggcagaacttgcgattaatgttgaattaaaaaagaaagatactccaaatgaaatggatgtcatgtttattcatcatgctcatttatattgtatagaatgtaaaacagccaaaacgatggcacatgaacaagctaaagatgttttgtataaattatcttctttgcaagattttggtggaatcaaccaaaaacaagcagttgtttcgctgtatagtttgaaagattacaacttaactcgtgccaataattctgaaattcgcatattccaagaacgtgatttactcaatttaagtcagcttatttcagaatggctacagcccaaatcgacaaatatcagtcaaggcataagcttatag

SEQ ID NO: 67658 - DNA, 303 bp, Acinetobacter baumannii
atgaccgtttactttattactcgccataaaggtgcattagaatgggctaaagaggagcatgtacattacgatgtgcatgttacccatctagcaaattttaatgaactgcgtgctgaagatacggtaatcgggactttacctattcatttggttgcagacttgcatgtgcgaggtattcggtatgttcatttatccatgcatgtgcctgcgcatttcagaggtttagaattaagcgcacaacagttacgcgattgtcgtatccgattggaggaattttatgttgtacgccctaacccaatttga

SEQ ID NO: 67659 - DNA, 294 bp, Acinetobacter baumannii
atgacgtgttatttaaatttcgaagatattgcattaggcttaagcgtacatgcctataaacgacgtacacaacgcggtatacagcaacaacatattgcacatttattacgttttggccgtaaacaatttcaccgccatgcgatttactacagcattggtcataaagaaataaataagtatgccgatatttgcctgatgcttaaaaatatgaatggcatgcatttagtcacagccaccaatggcaaagtcctgaccatgttccgtaaccgagattttcgtctacttaaaaaatag

SEQ ID NO: 67660 - DNA, 498 bp, Acinetobacter baumannii
atgaatcctttaattccgcaaacagcaggcgcaatggtacttagcgaaggtcttaacgctgtcagtaatatggccagtgaaattgcgcagtataaacgtgccgttgccgaactcgaatgtcagcgtaaacaaatgcatgagcaagcaaagcttatacgtgcagaaattgagcttaatcataaaaaagaaatcaaacgtattgatgcattatctagcgcatttaaagcgtgtttaaaacaaaataagcagttcattacattgcaaaaaaagcagcaagatgatgcccaagagcaatgtttgatgatcttaaatctgattgctcaagaaccagatccaaccaataaaacggcactgatgtcaatgtggcaacaaatgctgaagcagattgaattaaatcgtgaagaaatgtcccgattacagcgtacgttactagatgcttatcatcagtttggtatcgatttagttgctccacaactagacctaaaagacgttcattaa

SEQ ID NO: 67661 - DNA, 567 bp, Acinetobacter baumannii
atgttccctatagttgcaggtattgccattggagctgctgttctatatttacttgatgccgaaaccaaatcacagcatgatcgctgggagcgtaaacgtagccaagtacgtcgtgaaactgcacagcaacgtgaaaaaattcaagctgcattaaaaagcacagccgagtatcaagagtataaaaaatacatcgagatgcaccatgcttcaaaacaaacggctgatcaagcatttgagttatatgcaagtacaaaaaaagtactgagtgggttgtacacccaattaaaaagttcaggagaaactattgggcaactcaaacaacaacgccaacaagctttaggtgctgagaaagaaaaaattcaagagatgcttaagcaacaacgtgaaatacatgctcaaataaaaacggcaattgaaggatataaagcggatagcgagggccttttacaagagttacgtagcttgaatgaagccactgctcaacttaaacagcatatccgtttaaatacaggcaagcctggacgtgagtggtttgctcgactcgaacagcgccgattaggcgcttaa

SEQ ID NO: 67662 - DNA, 909 bp, Acinetobacter baumannii
atgacatatttacctgtttcacgctaccgcattaaatttaaagccaatcaaaatatccaattaccagcatatgcaggctcgtctttgcgtggtgcatttggacatgccttaaaaaatattgcatgtttaacagcaagcttgaataaaggccaatgtaaatgccaacctgttgcaagctgtctatataggcgaatttttgatcctgttaaacagcaactgaatttacaagaccgtttgcaagatgttgcacccccttttgtgattgaagcacattcattatcaactgaaataaacgcaggtcaagaagctcatttttatatgactttattgggtgagtttgtacatagtcagcagatgatgattcaattggcatggcaacgggcattagctgtaggattgggacgtcagcacagcacggggcaagcacagtcgcaaatgttatctttcgaactgtgtgatcgcccacaattgaattggcaaacaagtacaaagttaagagtacagtttttaagtcatgcacgtattcagcaccatggtcaaattttaactgtggaaaattttgatcctgctattttttgtcgttcagttgtgcgacgttatctcactttatcggaagcgtattcagaacagaatttgtcaccagtatttgttaaatcattatttgacgatgtaaaccaagtaaaaggcgaataccgtgtcgatcctgtacgttggtctcgttggtcaaatcgtcaaaagcaaaaaatgcaaatggatggtctgttgggagaggtgacactgcatcatgtgtctaatcaattggcagatcttttgtatttaggacaatggttacatgtcggaaaaggcagtgtttttggtctagggcagtatgtgttacaacaaatacaggtagaacaattaagcgcctaa

SEQ ID NO: 67663 - DNA, 1128 bp, Acinetobacter baumannii
atgaaaatattactttgtgccgccacaggtcataaccctgtcaatattttacccttagaatcggatcatattaatcctgatatgatctatgttgcgattacggaaagtatggagcaacaaggtgataatttgattgcagaatttaagtcaattggtaaaaaagcaactgcttttaagctcgaatatgaacaaagtttacggtctttgattcagcaatatgaaaattggcttctagagcatcaagatgacgagattattgttaatcttacgggtggcacaaaaccaatgagtattgcagcttatcaagtgtttaatagctatggttttcgatgtttttatcaaaatctgaatcccaatcaactcgtatggctggatgatgaaacaacaatttcggatatcggctctaaaattagtttagaacgttatttaaaaagctatcaatttgatgtggttaagaaacaaaaactgcatgaagtcgatctcaattataaaaaatatgcatcacttttatatactgaactctgtaaagctggacgctatcaacacacttgccaactcattagtaaattaaatgcgcatgcctcagaaaaaaaattgcctgatttaaaggatttttcattaactcacgatgatgaagcatttttaacccatttaagttatgaaacaaatttatttaagttaaaaggaaatagcattgagtggcaaacagagcaagaccgtgcgtttattgcaggtagttgggttgaatatttaacagcaagtttactgtgcaatgaaaaatatcgtgacatttcattaagtgtggaaattgccaaaagtacacaacgtgctaaagccaaaacattccaggaaattgatgtaatggcaatgcaacagcaacaattatttatggttgaatgtaaaaccatcaattggaagagtgcaaaaaatccatccacttatgcatctgaggcaatttataaattaagtgctttaggggatattgggggattaaatacgaaagctatctttgtatcgctctatgatttgcctgatgcagctaaaacccgtgcagccgagcacaatattcacgtcattgcaggacaaagcgcaattgtacaacttaaacaacgtttgttatcgatctaa

SEQ ID NO: 67664 - DNA, 1164 bp, Acinetobacter baumannii
atgacagcacttgtacgtaaacaactcattccgttgttgaatgctatacaagcaaatgatgatcctaatgtcggtttgctgattcaacgtggtttgcgagtttgggattcgacagataaagccaaggcagataaaaaagacttgatcgaagttattacccatacaaagccttcggatttatatcaattggcttttgatcgatggttattacaaactcaacaaaaacagaacttcgctgttctacctgcaacgattgacggtcgtttaatgacaggtttggcattaggtggaacgcttgaaacaggtgttacgacccagcatagttatggtatgccaatgctggcgggttcttctgtaaaaggtgcggtacgtgcttatgcagaaaatatgtttagtcaaaaagatgctgatggtaaggtcattctagatgaaaaaggtaaaacgcagattgatgttgcgatgaagccgattttagatactttatttggggcagatgaagatgctgaagcaaatgctggttatttggtttggcatgatgcttggtttattcctgcattaaccaaagagggaaaatatagttcagctgaagaagctaaaccatttgttggtgaaattgttacagtacatcatcaaaaatattatgcagggcagtcaaacgaagcgcttgatatggagtctcctgtccctaaccagcaactggctgtacaaggcagtttctattttgtggttgagggtgcaaatcagcagtggctcgattttgcaaaacaacttcttgaaaacatgcttaatgactttggtatgggagctaaaggggcatcgggttatggttacttcaaacctgctagtgatttagaatctttaatgacatcactcaaaaaacgacttgtcagcttgcagtcagaaagtgtcgatgctactgatgatccttatgcgaaattaagacttcagataagtagtatggttgaatctgacttagtcgaatcactttctaaaaatttgaataaatttttaaaatcattcaatttagtaaaagaaaatgaagaacactgtaaagcggtggcagatattacatgggatgaacacgaaacagtacttaagacttgggctggacaatctggtaataaggaaaaagccttaaagtttgttaataaatacaaatcctag

SEQ ID NO: 67665 - DNA, 354 bp, Acinetobacter baumannii
atgcagattcgtactcataaatatgcagaagatgcttttcctttagtgaaagcaatgcaaaaagatcattttgaagctaaatatcgtaccttagcacttaactttccaaccatggttatgcaatcaggtttggcgcaagcgattggctttctaatggcgaagggtaaagataaacctgagcataatattattttagagcacattcagactattttagatcgcccaaatttacatgcggatattttagcctctgacataggacaatatcagttgttaacacgccaaaccttagatgcaacggcatggttgaaacgttatacacaagccctactgaaaaaagaaggtgaggcatga

SEQ ID NO: 67666 - DNA, 882 bp, Acinetobacter baumannii
atgcaaactcgtatttttcatttacaagcattatcggcattacatgttgggacaggccaaggtgtgggtatcgttgacttaccaattgcacgcgcaaaagccacaaatttaccgattgttgcaggctcagcactcaaaggtgtgctacgtgacgaagcaaaaatccagttaaaattagatgaaaatcagattaaaactctatttggtcctgttgattctgatgctgcacatgcaggggcagtagcatttggtgatgcacaattactattactaccaattcgttcgtttgcaggcacagtagcttatgcaacatgcccatatatcttgcgtcaatatcaacgtgatgtcggtagtgatttagatattcctcaattagaagcagataaagcacgcgtgacagaagacagtgcgctatttgtagccaatgggaagatggcattagaagatttggatattgaagcatattcaacaggactggctgggcagtgggcagatcaaattacagcacagttatatcctgaatctgttgcacagtatcaacaatggcgtgatgcggtcaaagcacgttttgtgattttacccgatgatattttttcatttttagcggataccgcaactgaaatacgaacacgtattcgtattgatcgtgaaacacgtgttgtcatgaacggtgcactctggactgaagaaaatttacctgctgaaacagtgctatggggtgttattggtatttctgcatcaagaaataaagacaataaaaaaactgcagaagagctttctgaactgtttccaacagcacaagaattatcaatacagctaggcggtaaacatactgtagggcgtggtttctgtcgtcttttattagaccaagcacaggtctga

SEQ ID NO: 67667 - DNA, 561 bp, Acinetobacter baumannii
ttggacttaaaccatcaattacaaggacaacggattgcaggtaaaaagtgggatgatgaacgttatggctttgttgtatttacagagcaacaacttactcaagacttagcgactttaggtggagagcgacgtttatcatactttaaaccagtcaaatccactcaatatctaaagccctcagatgatttgctagaaaaaattaaccaaaacaaaggttttagtctaagtttgcttacacctgctgtttttgaaaatggctatttacctgcatggttggatcaaaataccttatgtggaaaactgcctcaatctgatgttgaagtgaaactagagtcggtcgccattgatcgctggttacctgtatcgggttgggattctatagtatggaaacctaaagcaactcgtaaagctgtgggtgcaggggctgtgtattggttcagcctaacgacccagatggatgaagaaacgttgcaacaattgtgggcgcaaccaatttcagatcattcacaagatcgaaatgatggctttggtgtcgcaatcgttagtgcttggtcaaaataa

SEQ ID NO: 67668 - DNA, 693 bp, Acinetobacter baumannii
  misc_feature (658)..(667): n is a, c, g, or t
atgataaagcaagcatatttaattgaatcacttgcacctttagtatttcgttcaggaaaaccttttggatctgttgcatctgcgcaagatgcaacattccctttgccatctgcaatagcagggatgatccgagcaatccagattgaacaacatgcggggcaatatcaagattatcaagggcgtttaaatcatgaggattaccagaagattcttagtgttcaatctcaagggccttttttagttcgttttaatcctgatcatttagatgattatacaattttggttcctaaacctgcgaatgcactttattttgaaagtcgagaagataaaaaaacacatttagtgcgtttagcaccaaaggcatttgattctgaacgttgtggtagtgacttgccaacaggcttgttacctgtacagatgcaaaaaaatttaaaaggtaagcctcaaagtggggtgacatattggactttagaacattttttgggctggcaacaagggcaagaatttagctttgaaagtattgaggccacaggtttaaaaaccttagctattgacattcgaacacatgtcaaaatcgattctactagtgcatcaagtgaagatggaaaactctttcaatactgtttaataattacaaagaaagccactttatataagnnnnnnnnnncttccaaacagccagtttggacttaa

SEQ ID NO: 67669 - DNA, 1812 bp, Acinetobacter baumannii
atgacagaatatgtagtaattctttccgtaggtccagtgcagagcatgattgctgctgctcgtaaaagtcgtgatttatggagtggttcagcacttttatctgaacttgccaaagcatgtgctttatcccttaaaaataatggagcagaactgatttttcctgctattgcgagtaatgatcttacaagtttggaaaaaaactcagatttttctgtaggtaacaaaattcaagtatgcctcaatgctgaaaatgagcagcaattgcgtgaagttatcgaacaagcgaaacaagcaacaaaacagcgttttttagatgaagtcgaagaggtatatcaagatttaaaatcatctgaaatacgtgtagatatttggaatgcgcagcgtaatgactatgttgaagtgcaagcagcatgggcgattatttctgatcagcaaagttatagtgatgctgttgcactagcatctaaggtgcttgctgcacgtaaggcaacacgggactttacgcaaattattgcaaatccttatgctgaggaatttatgattccaaaatcttcattagatggtgcacgtgaaaccgttctaaaggaagataaaaagcatgccttaagtaatcaaacacgtgcaaaattagggttatctgcctcagaacaacttgattgtttaggtatcgtaaaacgtttaggtttaaaaaaacaagcggatcgttttactgctttcacacgaattacggcacatgcatggatagaaaaaatttctagcgatgaaaattttgcagaacttaaagaatgttatgagcgtttagtgaaaaatgatctagcaacacgtgtacgaggtaatcagggaatttacgatattttcccctatgatgcacagtttttgtatcgctctcgcttagaagctgagttacgtaattatccagatgcggattctttcaatgatgcattaaatgcgttattaaaaatgctaaaacctttttggaaaacatatggtgaaccatcagcatacggtgttctattactagcagatggcgatcgtatgggtgagcttttagataaagctcaggacaaaaaagcacatcaacaaatcacagttgcattgtcagaatttgcaggtggtgtggctgaaaaaatgcgtcaatatgatggacattgtgtttatgctgggggagatgatgtacttggttttgtaccattgcaccgagcttatgagtgtgccaaagccttaagtgagtcttttaaagaaaaactacagaccattgcacaaacactaaatgctgatcaagtaccaacattatctgtggggcttgctattgcacatcatacaacaccacttagtgtcatacgtgaatatgccagccaagctgaaaagtttgcgaaaggtgatcatatttcggagccgaatcagcgacgtaatgctttaggtattttactcgatgttcgctcaggtaaccaaacaaagctacgctttggctgggatgatcacaatgcacatcaagcatttgctgaatgggtaaatttatatctgaataaagatattccatctcgtattgcatatgacacacgtgcgattgacctaagaactaaaaatattgcagctggcaaaaatatccaaaaagatattcaaactgctgaactgacgttaatgctaaaaaaagcccgacttgcaaatggcgctgagattaagaaagttcatgtcgataaacttacaaatcgtgcgactgaaattaatttacaggctttatctgatgagttgattgtcgcacgttggtttgccgcaaaaacgcaacaagatttagggaaagatgggcaatga

SEQ ID NO: 67670 - DNA, 1254 bp, Acinetobacter baumannii
atgggattacgtagcccaagtgaggctattcagcttcctatattagaggaattaaaagctttaaagtggcacactttagagtgtgaattggttacgcctatgtacggtggtggagtagatgctgctactgtagatttaaaaatgccgattcgtgtcagtgctattaaggggcaacttcgtttttggtggcgtttacttgcaaagaataagaaagatgacacttggaattttaatggcgatttaaaacgcattcgtgatgctgaattttcactttggggtgggcaaggcgatgatgatggtggaagagcaagtcaggttttcttaaaagttactcaacctaaagtaacacaccatgatctagtcgaatacacagaatatctagatgcaaatccgaataacaagaagctttcttatgtgttatttccagcatcaaatgctgaagacaaagttagtaatcctcataaattgctgaatgctgagaaagcaaaatttaaactcagcttttccctttcaaatactttaaaaaatcaagaaaagatgacccagcaaattgtagaaacattgcgatggtgggcgaattttggtggtgttggtgcaagaacacgtaaggggttaggtgcaatacacatttctgaatctttggattatccaatgatttgtcagcctttgattgaatctgaaattactgcagcgaactgtgctatgaggttgaaaggaaagtctgctaacgcattagcacagctttatagtggtattcaaaagctgagtgattttagacaaaaagctgaagttgggcgtaataaagggcaggtacctaagccagcaggtcgcagccgttggcctgaacccgatgccttaagacgtatccaaagaacccaccatgaaaatcatgcacctgaacatcaagcaggtaatgttttcccacgtgcattttttggcttgcccattattttccacttcgttggtcatggtgagcctagggatagccaacttgcaccaatcgatggtgatcgtttagcaagcccattatttatccgtcctttttatttaggaaaaaatggaaaaggtgagaaagaatgggcaagttgtgccttagtcacaccatatgaacatattaaaaatatgaatgtgtcacttggtcgaaatgaaacctatcccgtttggaaaagtgataccgctcaacatattcgcccaattcaagatcaacaaggaacagatccattagatgctttccttaaatattttgcaaaataa

SEQ ID NO: 67671 - DNA, 1140 bp, Acinetobacter baumannii
atgtcaaaaaatattttattacttgtaacgggcggaacacctcaaatcattacagaaacgatttgggcgttagcatgtgatccacagcataatgaacaatgggttccagatgaagttcatatcatcagtacacgttatggtttaaatgaagtaaaaaataaacttttgggcaaggataagattcttactcgaatgaaaaacgaatatgctcaaattgctaatctgagattagaggagaactttctgcactgttttaccgatcaagaaggtaatgagcttgaagacttaagaacccccgaagaaaatgaatttgcagcaaatttaatttgtgaaaaaattcgtcattttagttctgatgaaaaagtgagcttgcatgtttcaattgcaggtggtcgtaaaaccatggggttttatgcaggttatgcgttatccctatatggacgtgcgcaagaccgtatgtcacatgtgttggttgatgaaaaatttgaaaaaggaattaatttctactatccatcaaaaaatgaaaacgatttcattattgatcgagaaaataaaaccatcggtctttctaaagatgctcaagtgtggttggcgcagattccttttgtacgtttaaaagaggcggtaaaagataaacatcaattaaaaggtgaagatagctttagtacagttgtccataaaattaacgaatcttttaatgatgtgaaattaaaaattttagtgcatagccgtgaagttttgatcaatgataagtttgtcattaaaaacttagcaccacgtgaatttgcaatgttgcattggtttgccgatcttcgtaagaaaggtttcgatggtattgttgcaccgactaaaaaaattaacagtaaagatataccaccgcaggaagcaaaatatattgcgcaactttccgaacagtttaaacagtattatgaagaatttaagaatacagaggacattcagctagatgtagataagcaattttttgaaagtgtaaagtcacttttaaatacagctttattgggccatttaggattggagttggctgaaaaaattagtctgacgcaaaacaagaaagggcaacctttttatctgaatgtcaaaccagaaaatattgaaattattgatcgctttaaaaattaa

SEQ ID NO: 67672 - DNA, 630 bp, Acinetobacter baumannii
atgtatattgcattagaaggcacaaaaggaacaggtaaatcgactatttttagtcagttggaaattgcacttcagtatgatggaattgaatttgcaacatttagcccaaccaaaccgatgccgactgatttgtggtgggaaaaagcctatgctcagtattctgaagtggatcagtttattgaagagttatatcatgcaagatcgaaccatcatgctaaaaaaataagttttgatgaacctttggtattaggtgatcgaagcattttgaccagttttgtcacacggtggccacaagaaagtcagaaactacatgaatatattcagcatatacgagctcaggaatatgcagttcctgttccagatctggtgatttatttagacttgcccatagaggtaacgttacagcgtcttgcgaatcgagagagaagttatggtctttatgatgagcagattgaaaatttgataaaggcaaaaaatgcttatgaagaattctttaaattaaaaaatgaattaggttttagtgaaatgcgctatcagatttttgatgcaaatcaaaatgaagaggaattattctcgaaaattcataatttagttaaaattgaactcgaaaaaagtatgaattttcaatag

SEQ ID NO: 67673 - DNA, 408 bp, Acinetobacter baumannii
  misc_feature (396)..(405): n is a, c, g, or t
atgatgacattagcagaaacgattcttatgactcaaataggatatgaaaacttacttgcgaaaattgctgaaaaagaaaaggaatatgaccaagttcgtgatcatcgccaagtcgcttttgaactgtcaggtgatggctggcatgacaatccagaatttaatcgtatgcagcagcttgaagccaatttaaaccatacgcttaaaacactcaatgaccgtttagatgtcatgaaatttattgatattcatgatggtatgcgtaatgtccaacaagttgaaattggtagtattgtgaaattacgtcgctatgatttagcggatgactcagaaacagaagaaatatgggaaattcgtggttttgatgaaaccaatatcaaactcaagcatttggcatannnnnnnnnntaa

SEQ ID NO: 67674 - DNA, 399 bp, Acinetobacter baumannii
atgctgcctaagcactgtctttttatcgatcttcttgaaatgaagcgtatccaatctgtcagtcaacagcaggtggaactacgttatcggcaggagatgaatagtttatctaggttgtgtcagcaaaagtcgtcttatctaaatcgttatgatcagctgtttcgatatatcacgttatggctgttacagcatggatatgacctgacggattatcaaccacatcaaacattgaaagcggtatgtttgtcgcatttgcctaactgggatattgaggaagttattcgacaaaggcatttgttgaaaaaaggtttaaagctgaatcccgaatcagatgtagatcaggagctgcaacattgtgtgaatacttttcaagcattactgcaagcttatgaattctga

SEQ ID NO: 67675 - DNA, 729 bp, Acinetobacter baumannii
atgatgaagactaaggcacaagatttattacacagctacgcaacacagctagatcagttttttgctgttcatcaggatgccaatacagctttatctgattggcttgcttcacacttttctaatacacaaatgatcgaattgctagaagcaattttaaaagatacgtctagcttgaagcagatttgtcagcgttcatatcagcatggaaatggctttcttaaagtggtgttgttggaccgtggctataaattacgtctacacatttggtttgcgggtcaatcatgtgaagaaaatattcatgatcaccgctggagtttttcgtctctcatcttggcaggttcattaaaaagtgagatttggaaagatcatgcagaaggtcaggtgtttcaagaatatgaatatcatgctgcgactgctgaacggtctgcttttaaaaccgaaatgggatgtcagccattacagttagatcatgttcaattgaacacagtcggtgatcattatgttatgccaaaaggcaagcttcatcgaattatcaatcctggacatcaattggttgcaaccatgatgtgcagtgccccaaccgaacaaggcacaacacgcttaattccgatgcatgcaggaattgatccaaatattcagccgcccaaagccaacaaagatcagttggcaggtgcacttttacaatttcttcagcatttaaaggcacaggagtttgattatgctgcctaa

SEQ ID NO: 67676 - DNA, 951 bp, Acinetobacter baumannii
atgcaaactttatatatagatcgccgtgatacaaaacttgatatagatcgtgaaagaatattagtacacagcccttcgttacctaaacctttatctattgcatttgcatatctttcttctattgtaataagcgctaaaactcaattacatagtcatgttctactcgcatgtgcgagtcgaggaattccagtgattattcttgatcctagaacttgtgaatcacatgcacagtatattcccccctcaagtaaagttgtgcatcgtaaaattaaacagtttgaggtgttggatcaagatgagcgtaggctagggtatgccaagcaattggtctatgctcaaagcatacagcagtttaaactaataaagtactggttcaaaacacatcagattgaagcaaaattacaagaacagatcattgaacgaattaaaacgattatcacaatgatcaatgcttgccaaagtcttgaacagttgcgtggactggaaggggcaagcgctaaaattgttttttatgtaatgtcactcattgctcctgcatgggctaaattccaaggccgtaatcgtagaccacccaaagatccgattaatgtactgctgtctttatcttatagcttaatttatgccgaatgtactcgcgctttaactgcgcatgccctcgacccgatgctgggcttttaccatgagccagtacatgggcgttattctttggcatgtgatcttactgagcgtatacgatgcgatattgaaaaatgggtcatgcaattaatgttcaatgagcaattgaggcccgtgcattttgcctcatctgaacaatacccttgtgttttaaacaaagaaggacgcgcaattttttatcctttatgggagcgacgttttcaggtatggaagaaatatattcgaatgaatgcatcccaatgggcaaaaacgattgatcagtgtgttccgtgttga

SEQ ID NO: 67677 - DNA, 279 bp, Acinetobacter baumannii
atgcgtagttatcttggtatgtatgatgtgagttgtccgcgccgtagaagcactttatttcgaatactgagtgcgtatggaattcatcagcagaagtcagtatttgaatgcagattgaactcagattttaggctacaacttattcagcaactagctgttttgccaaatgatacctttcaacgaattgtgttaatacaagtttatccaaatcatccagatagcatcatgttaggtgcagctaaacagcaccctgcaagtcattgcttatatattgcttaa

SEQ ID NO: 67678 - DNA, 852 bp, Acinetobacter baumannii
atgaacgctctcctcaaattccaaacacaacaagaagatcaatttttacaatctattctggcacacgactttgaacaactctgtgtagagcatgttgatttctttcaaaataatctacaaccacaatttgactaccatcagttcagtaaaaggacagctcgcgcaaagaaccctctacatcattctgatgacttaatcagctatatggcactttatggttggggacattatctgcgcatgcaagctgtatttgatcatagttttcaatacagtacatttgaaaagcatattcctattcaagcctgcatcgtcgattatggatgtgggcaaggtattgccacattggcttggattgaatacgtgttggatcaaggctatagcatcgatcgtttggatgtcattcttgtggaaccttctgctgctgcattagcacgtgcatcacactggattacgcagaaagcccaacatcacgatattaagctgaatatcatccatcatgcctgcactctagatgaactggaaccagattttatggccgccaatataaatcaattgccaagtattcatttactgagcaatgtattagacatgtatttaagtgtgcaattcagcatgagtcacttatgccatgaaatgaaacaatatgcacgccatagcaaacactatgtttatgctgtaagcccagactttattacaggaaataagggcttcgatacatttcatcaactactttctcctcaacaactttacctcaatcatcatggtacagtccgtattacggaatataacttaaatagccgatgcatacaggaacgcccagcaccgattcgtgcctatgctgcatgtatttaa

SEQ ID NO: 67679 - DNA, 726 bp, Acinetobacter baumannii
atgaataatctgtttaatgaaccagaagttttgtttagtcagcagacatatccaatgcaacccagtccttgtggacgtgggtatgatatcgaagtgccacatggaactttacgctacattcctcaatttattgaaaaaaaaatagctgatcgaacattggctgtattttttgaaaatagccaatatgattggaatcataccaattggcatcaggtacaagatattaatcaaattgattggaaaaatatccaatggcatcaagacaccatcaaaatgtatggtaaatctcataccttacctcgcatatctgcatggtatggagatacaggaaaagcctataaatattcaggcatattattacaccctaatccttggaactcagctttactgtggatgaaacaacagttagcaaccgtatgcgacactccatttaatagtgtgttattaaattggtatcgaagtggtcaagactatatttcttggcatactgatgccgaaaaagaattgggactaaacccaactattgcatcactgaactttggtgaatctcgtcgtttcttattgcgtcgtaatgatgatcatgaagataaaattgaaattcgtttagctcatggtgatttattgattatgcatggagagctacaacacttctggcagcatagtgtccctaaacaagccaaaattaaagatggtcgattaaacatgacgtttcgacatatcttataa

SEQ ID NO: 67680 - DNA, 1257 bp, Acinetobacter baumannii
atgaataagtcgttcaaacatatctgtgttataggtttaggttatattggtttaccaacagcagcgacttttgcagcgcatggcataaaagttacaggcgttgatgtaaatcaacacgcagtagatatgattaatcagggtaaggttcatattgttgagcctgatcttgatgctttggttcgtgatgtagttgctcaaggcaaattatcggctcagactgttccagcagaggctgatgcttatattgttgcagtcccgacaccttttaaagatgattaccaacccgatttaaaatatattgaagccgctgctaaagctctggctccatttttaaaacagggtaatctggttattcttgaatctacatcacccgtagaagcaaccgagcaaatggcagcatggttgagcgatgctcgtccagatttaactttccctcaacaaaagggggaggaagcagacattcttgttgctcactgtccagaacgtgtattaccaggaaaagtattacaagagcttattagtaatgaccgtattattggcggcatgacatcacgttgttcaaaagcagcatgtgaactttataaaacttttgtaaaaggtgagtgtatacagaccaatgcccgaacggcagaaatgtgtaaattgaccgaaaattcattccgtgacgttaacattgcatttgcaaatgaactttccgtgatttgcgataaattaaatattaatgtctgggagctaatctctttggcaaaccgtcatccgcgtgtaaatattttacaaccgggtcctggcgtgggggggcactgtatcgctgttgacccttggtttattgttgccaagactcctgaagaggcgcgtttgattcgtacagctcgtgaagtcaatgatgcaaaaccagaatgggtaattgatcaggtaaaaatcaaaattactgaatttttacaagataatccaaataaaactattaaagatgtaaaaattgcatgttatggattagcctttaagccggatattgatgacttacgtgaaagcccagcattgcaaattacaaaaaaattagctgaacaaggtctaaatattttagctatcgaaccaaatattgaagagcttccgatagatctaccagaaaatattaagctaatttcagttgaggaacgtagtcaggctgatatccatttaatattggttgatcataaggaatttaaagctctggaaaattttaaagaggatcgagttatcgatactaaagggctgttctag

SEQ ID NO: 67681 - DNA, 246 bp, Acinetobacter baumannii
gtggcattagttaatagttttaacaccgttgctggtcagttttttatttctattaatcgacaaatttttggcttttattttaatttagtatgggctgttttaataatggctatgactaaacttgcattaaattatggctatggtttaaaaggtgtggtgctaagttttttgttggcctatttattacatgcatttaaccaaaatatttatatatatcgttttttaaagagtagcaaaaatggctga

SEQ ID NO: 67682 - DNA, 1128 bp, Acinetobacter baumannii
atggctgagattatcatattaagtggacatagtaattttaatacgggtggtgtcggtactcacttaagagtattaaatgatgagctgattaatcagaaaattgatcataaagtttcattagggaaacacaaagtattttcgctatattcacttatagctaaaaaaatgctcccgagaagtgcatattttcattttaatgttcaagtgagtggcttaaaaaacagtttaaagaactatgtaaaagataatacaaaagtagtcgattgccatgatttttcagctgtagttgctgcggtcaagttgaaagaggaaaataactataaatataaaattatatatacagtacatgctcctttttatgaacaatatggtttaatgaaaaatgaatatccacaacaagagctaatcaaactcaagaaggctgaacttgattatttaaaaaaatgtgatggtttcgtgtgtgtggatgataaacaaaaagaaattatagaaaagaaactaggttgcacgattaataatattgtattgccaaacgctgttgatgttggttttctagaaactattaagaaaaatagtaatgccgaaaaatatattattatttctaggcacttatataagaaatgtggtgttcatgtaggtattgaagcattttctaaggctaaaattaataaggatattaaacttgttattgtcggtatgggtgatgagtatgagaacttattaaatttaacgaaaaagctaggcgttgaaaatagagtagtatttaaaggtcgattggtttatgaagaatcaattaactatactgctaatgcactcatttcattaataccttctatacctttaggtgattatgtagaagctacatcattgtcaatgcttgagggcatggcattgggtgttcctgtcattgccagtaacattggcgggttaaaacaggttttggaaaattctgacgctggtattttagttgagcctaatgattctgaagggttagcaaaacaaattgaaattttagtggaaaatagtgatttaagaaatcatttatctcatcaatctaagatattaataaataataattattcttcgggtgtttggttgaagaagcgattagaattttataaaaggtaa

SEQ ID NO: 67683 - DNA, 1161 bp, Acinetobacter baumannii
atgataatactttttactattttaggcctactatttttgcttgtatcaccaaaattatttttatttatatatattattattcggtatgctagtaatgtaaaatctattaaggtattgagtatttttgattttttggtctttttttattttagcttaaccatggctattatggttgccaatagaccctattatattggaaaagaaatcggttttggggaggatatgctgcattattataatgcatttgattgggtctctaatacttcttttatcgatttctttaaagacttctcaatggtaactactctaacaggctcatctgagccattgttttggttgatagtaaaagtaataacaattttttttcaagatggttactatatccatgtattaattactttaattggttgctttttaatatatttggcaggtcagtactggcataaatgtggtttattgtttttatttctttatagtaacacaattactttctttgcatttcaagggtcggctattcgttctggtctagctttggggtttgcaatatttggttatgttttattctttagaaaaaagaataaatttgctcatctactatctccgttggtacattacagtatgatacccgtacctgttataccatatttagcagattttaattttaaagatataaagaagttattaaagttattagttactatagttctctttacttttttgtttatatttttttctatgcgaagtattgatagtgggttaggagcaaaagtaacagcgcgtctttctgaaaatgagttggattttagttctattatacaattcttcgttgaatctttagtttttattagtttaattttaacagtttttaaaaataaagtagaaaagtttttgaaagtaagtctaatcttattttttttaatgtcggtagttttacttctgttgtcacctacagctttttctagattttatcgctacgaatatatattttttattttgatatattcttctatttttttcagatcttctaatgagttcagagtcttattaatatcaatttctcttttatggtttgtttttattgggtttgataggtttgttggggtttttgctgaaaatattcttgatttcattggatataatttgatttataggtttaattaa

SEQ ID NO: 67684 - DNA, 1083 bp, Acinetobacter baumannii
atgaatttaattgtctggatgaatattccctcacatcatcaatcacaattttttgatgcattaaataaaatatgcagtaactttaccgttcattactatggaaaagttttatcgaaccgaagtgaaatggggtgggatagtaatgttcagttaaaaaattatgaaaaatatattgatgtagaaaattatcagataaatttacaagaactaaaacattatattcatattttgccaggctatgggcatcctctattgattaaactacgtcagagtttttctaaaaataatatcaaatgggttcattggagtgaaaaagcaactccaggatggaagtggtatgcttcatattataagaaatttatacatgcctattatgttaacaattatgcattaggtgctttggcgataggaaatcatgcaagaaatgattttattcgttggggaattaagccagaaaaaatcgggattttaccttattccttcaacacgatgaatatttttccacctgatgaggaaattttaaagttcaaaaaaggcagaaaagctttcctatttgtaggaagtttatatgctttaaaaggcattgatttattgcttaaagcattccatcaagaatttaaagataataaagactggtgcttaattttagttggaaatattaaagatggggcagattatcaaaaagtcattaatgactacgatttgaatgatcaggttttgatacggggtgtaattcctgcctgccaaattacttcggcatatagtgcttgcgatatttttgtattgccaagccgatatgatggctggggaatggtcgtaaatgaagcagtttgttgtaatttgcctgtgatcgtatcggatgctgtaggtgcatcagaacatttggtgcagtcagaaaaaaatggttttatttttaagtctggtagttctgattcattagcagagcaaatggtaaaatataaaaattttcagatcatttctgaacacggaaaatataattcagagattttttcaaaatattcaagtgatagtttgtcgaaacatctggttgatatcttaaagacttggatgagtaaaaaatga

SEQ ID NO: 67685 - DNA, 1143 bp, Acinetobacter baumannii
atgaagatttttctagactgtagtttgttgagtattggtggtggaatacaggtaggtttaagtattattcaaaatatagtccatgaccctgacattgagacaatcgtggtatgtacaccacagatcgatgcacagatcgatgaatcttcaaaacagaaattgaaagcttaccatgtcgttccgaatgttccattttataaaaaaagagatcagggaaattatattcgccagctagagcaaaaacataaacctgatttggtttttactgtttttggcccgtcttactggcgttctgaaactaaaaatattcaaggctttgcacttgggaaaatgctttatcccgagattagaaagttctatccatctaaaatctcccgttttaaagaagctttatttgattttattaaacagaagtttttctttaaaaatgttgataattttttagttgaaactgaggttgtgaaagcacgtcttgttgataaatttaatatttcacctgagaagatttatgtaattagtaacagttatagtccagcttttgaaaaaaggcttcaggaaagaaaagagcatgtttcccctgatgagtctgtaacgacgatatttgtaccagcaagcttttatgttcataaaaatctattaattcttccgaaagtattatcggaattgaaaaagttaaatgataaaaaagtgattttgaaatttacggtacctgtaaattctaccggatgggaagagatcagcaagagtgctgtccaatatggagtgcttgatcagataaaaacggtaggtcatgttcctaatcatttaatttgtgatgaatatctgtcatcttcatttgtactttgtcctagtcttgtagagtcttctactgctgtatttcctgagagttttattgctgaacggccattactggtttcagacagagactttgcaagaaatttatgtggtgatgcagcgttatattttgatccgctagatgcaggggatatcgcacgtaaaattgatgctcttcttaaagatgaacaacttcaacaaaaattattagatgctgcaattaatgtgttgcataaaaattatttgtctccagctgaaaaatgggaacagcaacgtttattgcttaagaaattagtgaattcacaatag

SEQ ID NO: 67686 - DNA, 2139 bp, Acinetobacter baumannii
atgaaacaaattcttcaagatatggcaaatggtggtacgacagtaaccgaagctcctgtaccccaatgttcaaaaggtcatttacttatttcaactactacttcgctaatctctgctggtacagaacgcatgttggttggttttggtaaggcttccctaattgacaaggctcgtcagcaaccggaaaaagtaaaaatggtacttgagaaagtacaaacagatggcctgttaactacgtatgatgcagttaaatcaaaattagctcagcccttggcccttggttattgtaatgttggtattgtgcatgaagtcggcgtaggcgttgatggttttcaggtaggtgaccgtgttgtttcaaatggccctcatgctgatatggtaaaagtacctaaaaatctttgtgcaaaaattcccgataatgttgatgatgagtctgcatcatttgcggtagtggccagtatcggtttgcaaggtattcgtcttgcccagccgaccataggcgaaagttttgttgtaacgggtgctggtcttatcggcttgctcaccattcagatgttaagagctaatggctgtcgtgttcttgcgattgactttgatcaaagtaaacttgagctagcaaaacaatttggtgcagaaacctgtaatcctggtaaaggtgaagatccggttgctgtggggctggcttttagccgtggagcaggggttgacggtgtaattattacagcttctacgaaagttagtgatcctgtcattcaggctgctcgtatgagccgtaagcgtggccgtattattctagttggtgtaacaggtttagagctaaaccgtgccgatttctatgaaaaagaactgagtttccaagtgtcttgttcttacggaccagggcgctatgatgcggaatatgaagagaaggggaacgactatccactcggctttgttcgctggacagaacagcgtaactttgttgcggttctcgacatgatggcagcaggtaccttaaatgtagagcctttaattacacaacgttttgaatttgaagatgcacccaaagcttatgatgcattgacggaagacaaatcaggtctgggtttattgcttaaatataactctccagttgaaactcgtttagaaaaacgagtggttttacgcccaatttctattgagccaaagaatgctgttgttggttttattggtgcaggtaattatgcttctcgtatcttgattcctgctttcaaaaaagcatcttctcaattacataccatcgtaacctctggtggcattaatggggttattcatggagaaaaaacaggatttgccgaagcttcgacagatctggatggtttattaaataataaagatattaataccgtcgcgattgcgacacgtcataatagccatgcttactttgttgaaaaagttttatcagcaggtaagaatgtttttgttgaaaagccattggctctgactgtcgaagaaattgaaaaaattgaagcggtctacaatcaaaatatccagaataatcaatatgcacgagtcatggtgggcttcaaccgtcgtttctcaccacaagtgcaaaaaatgaaaactttgctggatacagtgaaagagccgaaaagctttatcatgaccatgaatgcaggtgcgataccggcggatcattggacacaagacaatgctgtgggtggaggacgaattattggggaagcatgccattttatcgatttgatgcgcttcctagcagggtcaaaaattgtttctattcaggcccgacgtatgggcgaaactgatgcagtacaaattttagaagataaggcttcaattacgcttggttttgaagatggatcatttggcaccattttctacttggcaaatggcgcttcaagcttccctaaagagcgtgtagaagtctttacagcaggtcgagtattacaactagataatttcagaaagctaaaagcatttggctggcctggatttaacaagatgaatctgtggcgtcaagataaaggtcaagatgcttgtgctgcagtctttgtagacagtattcgagatggaaaagaagcgccaattcctgctgatgaaatttttgaagttgctagagtgaccattcaggttgccgaaattttaagagcacaaatatga

SEQ ID NO: 67687 - DNA, 1815 bp, Acinetobacter baumannii
atgagtttagtcatgaaaggtcaaacagctcttgctttagggctgtttaatttgttcagggtgtttaaatatcgtattggcgtaaagacaggtctaaatcctgtacaaaagttgtctgcacaattgccaacgggttgcttctttagtcagtgtgctgccactgaagcaaagactgtacccgtaaactcaactttaacggcctttggatacctcaagtatccaatggctggacagcttcccaattggttctatagtcctttaaccgagcatacttttcaaaatacagagaaggcgtggtatcaaattccagattttgatgcgaatgttggtgatattaaaggcgtatgggaggcttcccgttttgactggctaattgatcttgctctacacgagcttaaagtgagagatgggcaggcattggttcaacttgatttatggttgaatgattggtgtaagaagaaccctgcttattttggaccaaactggaaatgtgggcaggaagcttctattcgtgtcatgcatattattactgcgttgatcggtttaggacaagagcagcatccgcacgacaatgtctgtgcatttattgaggctcatttaaagcgtattgaacctacaattgattatgcgattgctcaggataataatcatggaacatctgaggcagctgcactttatataggtggagctttcttaaatgcaaataaacctttgccacaatataaaaaatggcaagctttaggcgaaaaatggttagctaatagggcaaacaagcttatcatgcaagatggcggctttagccaatattcaattaattatcatcgagtgatgttagattcttattgtttagctgaaatagttcgccgaaaattagtattaaagcctttttcagaacagttatatcgtcaattgcagaaagcgacagactggttatatgtattaactcaagctgatggagatgtgcccaatttaggtgcgaatgatggtgcgcgactccttccagtaagtcagaccgattatcgtgattttagaccaacggttcagttggcaagtaccttatttcatcaacatagttattatcaagatttaggaacttatgatcaaagtttaaatttttttcatatacataaattggaaaaagaaaactttaaattacctgcaagaaatcaaatttttaatcaaagtggtttaattacctctgaaaaagataatttctttattacttttaagttgccgaaatttaaattccgtccaagtcagtgtgatggactacatttagatgtttggtttaaaggtcagaatatactaagagatggtggtacctatagttataattcctcaccagaagacttagaatatttctctggcgttgctagccacaatacagttgagtttgataaacaccaacaaatgccacgcttaagccgcttcttgtttggtgcttggctgactccaaaaaatttaacttataaaccatatgagtttggctgtggctaccaagactattggcagtgtgaacaccaccgtaaagttttattaacagataatcaaatagaagtagtagataatatttctggttttcagcaacaagctattttacgttggcgtttacaaccggatcactgggtattaaacaataatattttaaccaatggaaaagttgagataattttagaagctgagcattctatttctattcatctcacagagggtgaagagtctagatattattatcaaaagactaaattgcctgttctggaaattacagcaacacaaccgactacgatttttaccgtaattaaagatataacatga

SEQ ID NO: 67688 - DNA, 177 bp, Acinetobacter baumannii
atgattattcagcttcaacatattcaccacaccaccatatttacgataacagtcaccatagttctcattcatcaaatgattgctcatcattttccgactcaggcggatgtgatgggggcggtagcagtgactaaaaagccctttcatataaaagggcttttaagcagtttaaggtaa

SEQ ID NO: 67689 - DNA, 1572 bp, Acinetobacter baumannii
atgagaaatttattattttttaaaaaattaccgctaattattgcattaagtatgggcttaatggcttgtaatgatagcgataatgatccaaatgaaacttcgcctgttacgactccttctgcaagtgttgccctacaagtttttgataatactacaggtagtcaaattagtaatgctcaagttagcatagtaaataaaacagtatcattaactactgatatagaaggtaaagcacaactacaaaaaattgccgttggtcgatctgtcattaaaattagtaaaactggttatgcagatcaatttgttactgtcgatttattggataagcaagaactctcaggtattatcgttcaactcatacctttaaatttaggagggtctgtttctgccatcactggtggaacggtaaacttagcaaacagtacagctcaagttgttattgccccaaatagtctaaaacgtgtagatggacagcctattcaaggtaatgtaaatgtgagttttgcactcattaacactgcacaagaagtgcgcaatatgccaggcgatttagcaactcaagtgaacaatacaagagcaccgttggaaagttttggagccatggttgttgatttgagagatagcactggtgcaaaagttgaactgatagctaaccaattggctaatattcgtattcctttaatggcgagaggaattgcccctgctaccattccactttattattttgaccctactcgtggttattggcttcaggatggtaaccaaacactcaccttacagacggataataacggaaatagtttctacgcaggcagctcaagtacattaaatgttgtaaatgcagatattccttatcagaccacaaatgttgctggctgcttagcagattcaagtggaaaacgaattgctaatgctcaaattttgcttgagggtaaagactactctggctacaccattactaataccaataataatggtgaattctcagccgcagcaaaacaaaactctattgtattaattaatggtcaagcaaatagtttacgcagtaataccgttgaacatactgtattagcatcaaatagcactttaaatgattgcttagttttaacagagccaagccaaaatattacggttaggttgacttggggccaaaatcccaatgatattgactcgcatatgctagccccagatggcagtcatgtttcattcatcgatcagggagcacttttgcaacacccttttataaatttagatgttgatgatacgacgagttatggccctgaagtgatcacattaagtaaattaatggtaggtgattaccattattttgttcacaactattctggtacatccaatcccggtatttttggttcaccaataaaagttgaattaaacacaatgaaaggcactcaaatttttacaccaacttcaaatactggagaaagtttctattggagcgcatttaaaattaaagttgctgaaaattgtgatattacagtgaccccaacaaaacaatggctaaactcagaaccaacggtctctccatctgcaataaaatattgctctaaataa

SEQ ID NO: 67690 - DNA, 354 bp, Acinetobacter baumannii
atgaaaattaaacttatcgctattttctcagttttattgatgcttacaggttgtggtaagaaatacacgattactcctgatagtttgccaatagctcatgttaatcaaaattatcaacaaattattaatatttcaggtgggaaaacagtagataaatatgtagattttaaaaataatattcctgatgatttagggatatctgttagtccagatgaaagtagtggttataatcaaattacaatcaaaggtattccaaaatacacaggtgtatttactatttatatttcgacgggattttatgctggtggtgatgctgagataaataaaacctatactctcaaagttgaggaataa

SEQ ID NO: 67691 - DNA, 372 bp, Acinetobacter baumannii
atgatggggaaatctaatcactatatttactctattatttttttaatattattgatacttacaggttgtggtaagaaatataagataacacctgatattctatctatagctcatgttaatcaagaatataaacagactataaaaatatctggtggtaaggttagtgatacaagttcgcctttaaaaacagatatacctgaaaatttaggaataacaattcaacctgataatgatctagatggctataatattattgaggtcaagggtattccaaagtacgaaggtatatttataattcatatttgggctgatttttatgcaggtggcggtaaggaaattaagaaaatttatactcttaaagttgagaaataa

SEQ ID NO: 67692 - DNA, 354 bp, Acinetobacter baumannii
atgaaaattaaacttattgctattttctcaatattattgatacttacaggttgtggtaagaaatatacgattacacctgatgaattaccagttgctcaggttaatcaaaaatattatcaagtgattcatattgaaggtggtaaagtcgttgataaagatcaaccattgaatacaaatatacctgaagatttaggagtaacagttcaacctgctaataatctcgatggttataatattattgaagtcaagggaaccccaaagtataaaggtacatttacaattcatatttgggcgggtttttatggaggcggtagtaatgagatcaataaaacttataattttacagttaagtaa

SEQ ID NO: 67693 - DNA, 1248 bp, Acinetobacter baumannii
atgacaaaattctatccatatgttgtattaaaaacaaatgttaatattaagttattgaaatataacatttatatatataatgcagtgcgtaaccaagctgagacagctattctttttaaagatactgcttttaagaaaataggtaatgagctttatcaaactaaatcgatcgaaatcgatagctcaaaaataggactagaaagactgagagattgtgtcattatttttaatttatatcgactaactacttcagggcaagaaagtttagtgattagtcattatattgttccagataaaattgaatcttatccttaccaaaatcatgaaaagaataaaaatattccagtaacaaaatacgttgagtcaactgctgtcactaaagttgttaaaggtgacgtttctaaaaatgattttgaacttgctttaaaccgaaatcgaatttttcagtgtattgactctgggtgtaaaccaggagaggcaaaagatcctttttctaaagcccaaattgaggctggattacagtcgagattgaatgaacctcttccggatcaagatagaacatcattatgtgggccagcagcttactttttttgtttaattaatttaagtccgtctaactataaattagcagtaaaacaactatgggaaacgggtcaaactaaaattggacagcttgaaattaagccttcaataaatggatgcagaagagtccgaaatttttataaaaaaacaaatggcgaacccaatattcctccaattgattggatcacatttgcaagcttacgtgaatctgagaatttagctcttaaacttaatgatcctgaacaagaggttgcaggaattacaccctggccagaactgagtaactggtttaagaaaacaggctttaagggcttaaaaacgtaccccttttattttaatggttatagtcctagtttaataagtgaaattaaccgatacgctggtgaaggttattatgtaattaccttaatatcagcaagtcttcttagtagtggcactagttcaggtactcaaagttttccagatcattggattgtttggactgataaattaagggatataaaaggacagccgattacaaactcttcagatccttataaaactgaagttcgactgaaaatgtttacgtggggggaaaacacccaaagactcggtagaggtatatctctatataatttcgaaaagaaagttttttttgctttaattgttaaaaaggaaaaattctaa

SEQ ID NO: 67694 - DNA, 606 bp, Acinetobacter baumannii
atgtccgctgatgcacaaatcaatcagattgctggagacagcattaatataagtactcaaaagaatgtgattgcccatgcccaaaataggctcagcctttttgctgctcagagcgggctaaaagctgttgctgcacaaggcaaggtagaaatacaagctcaggcagatgcactggatgtactgagtaaacttggaattactatttcatcaaccgatgacaaggtcatcattagtagcccgaaagaagtcaaaatcacgggcggctcatcgcaaattactctaaatggttcaggaatctttccgaaaactggtgggaaattccaagtcaatgctggacagcatttgtttatgggaggagagcaagttactaatgcagttcctcaattacctgtattaggtgagcgaaatcagcataatttgcggtatcttttgaaagataaagaaggtattccgtttgcccatcataaatatattgcttttttgcaagatggaaaaaagctggaaggtatcactgataagaatggatatactcaattaattaatactgtacgtccagaagaaatatctatccatttgtataaccatgaagaaattaatatagattag

SEQ ID NO: 67695 - DNA, 240 bp, Acinetobacter baumannii
gtgccgagcggaagtttatatgctgaccgctatgctttagtcacttctgtaatggctagacgtgggatccattttgatcagcagattgtagactatttacttttacatgggcctcatcaagcttctgttctattgcaaaccgtagcacaattagaaaaactccttaaaggtgagaagactaaactttcaaatgcaacattaagacaaatctatgctttaattgatgaatatcaacaataa

SEQ ID NO: 67696 - DNA, 339 bp, Acinetobacter baumannii
atgacttatcaaattcaaccaattgaactgccagatgatttaaatagctgctggttccaccctgatattgaacagcatgacactattggggagcatgctgagttttatacgaaagaacaatgggaacaattgcaaaagaaccttggtgtttttattaaaatcgaaaactttgattattgggatattgaagagatcccggaagacgacactagtaattggtccaattggaagccgcaaccaccagaacaagaactatttttaattgcagcatttgattcagaaaatggccctgttctttggtgggcaaatccaaacgcagaatggaaggagacgaattaa

SEQ ID NO: 67697 - DNA, 285 bp, Acinetobacter baumannii
atgagcaaaattattggtgaagttaatctaacacctaatcgtattgaaggtacacctgctgaagtagcagcacatatctttcaaaatattatttgcccaagtactgaagagttgcttaagaacaatcctgaagcggccaaagtatttgcataccatatttttggattagctctctctcagtttgctgagtttcaatccactaagaattttgagaaaacagtgagcgttaccctgaacaacttagtaactcgcttaaagcaagaacgtaacgaattaaggagctaa

SEQ ID NO: 67698 - DNA, 1326 bp, Acinetobacter baumannii
atgaatattttaaataatcaagaagcttttgcagctttgcaaaaaggcaaaaatcttttatgtcgttacatggaaggtgattttttagaactagatcaattccctgcaaccgtgtttggaaatcccgattatcagttttgcattgatattgaaaaaatcgagcttgctggattcacattcacaaaaccatgcacattagatgaattaattgatgatcaagaaatttatgtaatcgacttttcttgttcaaatatttataaaagttcattcaaatctaataatgactatgtatgcaaacttgttgcaaacggagtcgttcagagagatttaaataatgcttcagaccaactaagagcttttcaaaaggttctaggagtggaaatgggtattattattaagactgtagattttattgaaaatggtgtcgaagagaaaaaatcggaagttaaacaaagtaaaaaacgtacaagcaaaaaagatattcctatagatccgcaactactagaagccgaaaaagacattgtgcttgatggtattaaccagagcaaaaccgaaccagaaattaattcgctttgctatgacctagataaacacagcttcacaccagaacaattaaaagctattgaggatgctaaagatgcaaaattagcagagcttgcattaattagaacggaagctgaaagtgaaaaacatgaactttttgattctaatgtagagcacgatcatgcccctgaattatctgttttgtgcgaagcctttataagtgagatttctaacgcaaaaaatagagaggatttagactttattcgtcgacgtataaattcaaacggcgccttaactgagcaagaaaatactgaactaagcaatcgtttaactataaaagctggatcttttgataatgttttttccgcgaagttagcagacccaactcaaaacgatggcataaagttaattgaagaggaagaaaacaaatataaggaaaagcttgctgaattaaaaaagcgtgtagatgaatcaaagacagtaacggaagttaatgctgtaactaaatacacaaattcatggtcagctgagcagcgcgcgcccctattgcaatatatacataagcgactcgaggtacttaaaaaagataagcaagcaaatgagccttcaatgcttgtaaaaatccaaaatgctccagacctagccacattagatgcatacgaaattgacattcatagtctagatccacttgcacaaccaaaaatgatgcaagccataacaactcgaaagaaagaacttgatcaagctaaaaacgagtatttgatcgatgaggatctgccatga

SEQ ID NO: 67699 - DNA, 456 bp, Acinetobacter baumannii
atgattgctctaaaaactaccggtattcaaaaattaaaagagatcattcaggaatttgattcttgtatgtacatcgaacgggaaaatttttttgacaagcattatgacctggttaaaagcgaatttgatattgagcaaattcgtattgcagtcaaagcagctgaattaaagaagggtacacgagtcaaagtggatttcacacatgtaccagacaaggggcaaaacaacattcgtttcgttggcaatggtaccgtcgatctgtttgatgataaccgggtatttggtcgtttagatgatggccaacctttttgctgtttagtctcagatatagaaattttggattctgaaaaattagaaagcgcagttaatcccgaagaatcaaaggcaattaataaagtctttttctttatttgtttggttttgggctgtgcagtagttaagggttgtggcttatga

SEQ ID NO: 67700 - DNA, 207 bp, Acinetobacter baumannii
atgagtaaatgccaacactgtgtagctgaagaattaataaattcttatggcggtcttgcagaagcaaaggcttacatgaagcgctatttcaagctgaatagtggcttaagaaataagtatccaaaagttggtagtctaataactagcaagatgaatgaattacaaagcgcaatttcaactgtagagggtggaaataatggacagtaa

SEQ ID NO: 67701 - DNA, 375 bp, Acinetobacter baumannii
atgaacattcaagacattcgactagagctggttaagcaagcaatggatataggtgttccccctggagcaattccaggattggtggatctattagctgattttgtggtgagtggcttgaaaagccaggaaacgcatgatcttgaagattttgagcagaaatatatgaatgaattgctaaaaaaacttcagcaagtgttcggagagcaaaagataagtgcggtagaaattgggcggaatggagctttaaggatttgggtttcatgccaaaaaatcactataggtattaaagagttttttgcagactcaaaaaattacccagatttctttcgagggcgtgagttagttttctttcttgttccaccaaaaaaaccatag

SEQ ID NO: 67702 - DNA, 1350 bp, Acinetobacter baumannii
atgtttaaaaagaaatctaaatcaaaggccacagtagatagatctaatttctacactactggccaacttggtagaacacgggagacaacgcctgaaggttatttactttgccgagatgttccattagcccggattggtaaattgctttatgccgatggtgaagtgccagttactgctgataattccggtttaatcatcattgaacgtggtgaagatgttttattcgatccacgtacgatcgccagttttgaaggtaaatcagttactgatgatcatcctaaggattgggtaaccccagagaattggaaagaatatacaaacggcactgctcacgatgttcgacgtggtgtggatgaagattctgattgtttagtggcggatctgctcattacagacaaagacatgatcgatgctgtgatgaagggaaaggttgaaatctctctgggttatgacgctgattacacggaaattagcgtaggtaaagggattcaaacaaatatttttggaaatcacattgccctggttaaaaaggggcgttgtgggtcgcgttgtaaaatcggagatagttttatgcctaaacaaagtaaaggctggttggaaagcttgcgcaaagctaaacgtaccattgatgaggctttagaaaaagccaagagcactgatgaggaggaatccgaaacagaagatgaagataatgatgatggcgaaggtaaaacaactgatgcagctatcaatcgtgaactcttgaaagttctcaaaactgtccaaacaattgataagcgactatcaaacttggaaaagaaaaaaaccaaagactctgaatcagacaccgaaacggaagatgatgaagatgatgagggtaaaggcaaagaaaccgaagatgatgaagatgatgagggtaaaggcaaagaaaccgaagatgatgttttggaagctgaacaggctcaaaaattatcagaacaaggtattcaaaatcacacaggcgattcacttcaagaggttttatcacgagctgaagttttagtgcctggctttaaaatgcctactttcgatagcgctaataatggcccagccgttttaaacaccaagcggaacgtcttaaaacaagctcacgctacggcagatggccagaaagttttagcgccatttgttggagccaaccctaattttgacactatggcagcttatacgatcgatgctgcatttattggggcatctgaactcctcaaacaacaaaacaacgccgctggtgtacgttctggcatttctactcgtgattttggccgagcgccaatgacaccggctgaaatgaataaacgtaaccgtgaatattgggcaaacaaaggaaattaa

SEQ ID NO: 67703 - DNA, 498 bp, Acinetobacter baumannii
atgtctaagttagtacaaattcttttaagtaagccgctaaccgttaaccttggtcgagatgagcaaggggaagcgaaaacaatcgttttgcaagctggaattcaagaagttgaagaagacgtggccaatcattggttcgtgaaagctcattcacaggaaattccagcacattcagcatataccaatgagcttgaacaagtccttgagcagaaagaccaggaaattgcagcaatgcaaattcagattgatgaagcagcaaaacaaattcttaaacatgacgaagaaatgaaggctaaggataaagaacttagtgatcttaaaattcagtctgctaaggatcttcagacacaagctagtgaagcaaaagatgctctagatcaagctcaaaaggtgattaaagagcgtgatgctgaaattgctaagttaaaagctgacttggccaaagcaacaccggcaaaagagtctgtaaaagaaaaagacgtaccaaaggaaacctaa

SEQ ID NO: 67704 - DNA, 1122 bp, Acinetobacter baumannii
atgacattgccagtttctaacgtcgtaaatgtcagcattagccttgctgcattggcggcaggaccgcgctcatttggctctctgttgattctcggcaccacaagtggtgtgatcgatgccattgagcgtatgcgtccgtattctaatatcaccgaagtgggtgaggattacggcgttgacgatccggaatataaagcagccttggcatatttcagtcaatcacctaagccacgtacactatatattggctattggcataaagagggtacaggtgcagaaaccgcacaggcagtagttcaggcctgtcttaaatcactcaagtggtatggtctggtcattgcagcagatcttactgaacaagaagtcctggatgtttctgctttaatagaagctgcagatccttcacgtttatttggctatacatcccagaatgaaaattgcttaagtgcaactgatacaaccagtatcccttataagcttaagcagaagaaatatcgccgtaccttcactttgttttcaagtgacaacccttatgcagctgcttcaatgtttggccgtgcatttacagtcaacttcttaggaactaatacaacgattactttgaagtttaagcaacttcctggtattgcccctgaaaatctagacacggacgaagctaaggcattagctgctattaattgtaatgtttacgccgggtataacaacgatactgcaattttgcaggaaggtgtcatgacagatggcacattctttgacgagatccacgggctagattggttacagaaccatttagagacagctttatttaatctctactacaccagcacaactaaaatctcacaattagggagtggtgttaatcgtcagtgcgcagtgttagaagcagcatgtgagcaaggtgttactaatacgttgttaggtcctggtcgatggaatggggacagtttcggtgtgctggaaactggtgattaccttacaaaagcctattatgtctttgctaatagtcttgatgatcaaccacagtctgaacgtgaagcccgtaaagctccagtatttcaaatcgcagtcaagctagcaggcgcaactcactttgccgatgttcttgtcgccgtaaaccgctaa

SEQ ID NO: 67705 - DNA, 444 bp, Acinetobacter baumannii
atgagtacatattcttttatggatacccattgcactttaacgagtgcagatgcggtgattgaccttggttatggtgcagctattgcggatgaaggtattacctttgctatggccggtgacaaaaataccatgactatcggctcagatggtgagggcatgcactcattacatgctgacaattctggtcaagtcactattcgttttcttaaaacttcaccgactaatgccaagttaatgaatctatacaacttgcagaaaaataattctgcaaagtgggggaaaaatacaatcacgttaaatcatgaaggttcaggggataaccacacagctaccaaatgtgcatttaaaaaagttccagactatgtgaatgcaaaagacggtggcatcgtggaatgggtattcgactcgatcaaagtcgatatgaaattaggcacatacgaataa

SEQ ID NO: 67706 - DNA, 513 bp, Acinetobacter baumannii
atgcaaattaatggaattgaatacacaatcggccgcttaaatgcggtcgatcagtttcacgtatcccgaaaaattgcacccatcgtacctaagttgatgcccatcattgctgaggttgcgaaaggtgatttaacaaaagttattgctgctatagaggcaaatgaagaaaaggtcaaaaaggctaaagaatcaggtgaggttgaggagaattttcaggatccagaagccaatcctgatttagatgatcttacgcctcttgcggatgctttttctcctttaatggaggtgtttgcttcaatgcctgaagaagatgtcaattttataatttataaatgtttaagcgttgtaaagcgtggcggtgccgtagtgtgccgtaataacacaattatgtttgatgatcttgatatgactcagctattgcctttggtaattgcaacaattcggatcaatcttggaaattttattctagggttgcttactcaggcatcgagcatgcagaagcaacctcaataa

SEQ ID NO: 67707 - DNA, 2202 bp, Acinetobacter baumannii
atggctaaaaatggtgttattcgagactttttggtttcacttggatttgatacagataattcaggtctagctagaatgaaaagtgccatggatggcattgagtggaaagctaaagcgttaaatggtgctttgatggctttggctactggtgcggttgttgcagtacgtcagaccgctagtgagcttgataagctatatttctcgtctcagcgcattggtgccagtgtcacaaacattaatgcttatgggaacgccattgctcagcttggtggtagtgcagatggagcgatcggatctttagagtctttagccgaaaagatccgaaactctccaggctatgaaggtcaaatcaaaagccttggcgtaagtactcgtgatgctaatggccagatgcgtgaccgtgtggaggtgatgaaagatctaagcggtgttttagcaaagatgccagcttaccaagctaatgcttatgccaattcgttgggtatcgatcaaaaaacaatgttggccatgcgtgatggtaaattcattgccaatatggagaaataccagaagatccagaaagaactaggaatgaatgatgacctggctaagtcaggtaatgagttcatgacagaataccgtgatcttacaatgatgacgaaaacaggttttcaagtcatcgttatgcaagctggtaaagcgcttattccgatcttgcgtttgcttaatcagttaattcaagcgggcattcatgctttttcgcagttgaacccgcaaattaaagaaggtttggccattggcctacgctttgcaatgttggctttaatgtttagcgctatggccaagtccttaggattagtgcttaagtttatcccggcactgaaaaccttcattggattactgaagttatttcggcttgcatttctcgcttcaccgattggcatcatcctagcgttaggtgcagcactagccttactctatgatgattacaagacatggcgtgaaggcggcaaatcactgtttgattggtctaagtggactaatggtattgatacgattatcaataagatcaaagattttctagatattctcaacaaggttaaagataaaacggtcgagtttgttcagaaaattattaaggatccagccggagcgcttaaagatgtcgcaactgaagtacagcaaggtgtacaaaatgcgaagaaggctgtacaaaattatgtaaaccctaccgatccgactactgtcacaccgatgcaagacaaagtcgtaagtgctacacaatatgttaaaaatgccgttgaaaaaggtgtagtagcagctactggagccgcgaaagctacagtggatgctgtgaaaggtacagtggccgcctcattgggtagtacaatcagtggcatgaatgggtcaacattacatctttcaaaacaggatattgaggatcttgtaaaagttacatctactgaagtagtaggatcgttgaagggcgatgcttttaccaaacaaacgcagggagttgtagatacaattctaaatcgcgtggcttcaggtaagtggggtaactctgttagggaagttgcaaatgctcgtcgccaatttagtaagataacagggccaaaatcttataaaacaaaagatggtaagactattaatcttaatccttatggtagtgtgcaaaatatgccaaataaggatgtcaacccaagagtgagagacgaggttctggcatatcttgaggaaagatccaaagggaaaccatcaattgtaggtgagcacttaaactatgcaaatccatattcttcagacaaaaagaataggaaggcatgggttgatgctttttatgctaaggcacaaaaagaaggaatggtatttggatcgggtaaggcagtacatgggcatggtacaactagcgatttaattaaatttaaaccgaagccatttaagctctcaatccgagataataaattgccaattaatattggtgtttcaccatatgacaatatccaaactcttgctcctccttctggcaatccccataaagcacaaatcaataactctaatgctatgactgcaaataatgtagttattaatcagacttatcaaactgatatgacgattaatggagcttcaaatcctatggagtctgctaatgcagttaaacgtcaacaagaaaatgctttgtcgtttatggcaagaggagcgaaagggttgttggttggctag

SEQ ID NO: 67708 - DNA, 348 bp, Acinetobacter baumannii
atgaagaaaatactcctttttgctgcagcaactttttttagtgttggagttttggctgattgtaacgaccctaagacctctcacgaaatccagcaatgtctatctggcgaaatcacattactcaaaaaagatttgaatacgacatatgcaaaactctacaaacaaaccgacgccaagcaggagctagataatgctcagaaagcttggttaaagtataaggatttacaatgtggtgatttcacggtagccgatgctggatatagttctggacaaattgcttatgacttagcatgccaagccgaattaatagaacagagaattagctttttaaaaaatcagcttaactag

SEQ ID NO: 67709 - DNA, 594 bp, Acinetobacter baumannii
atgttattacctctacatatatcgcctaatcagacagttcaaccttttgatgagagctataaaaacattcttatatttgttttccctaaatcaaaatcagaatttttcccttttgctttaaagattgctcaatcagctaaattctattgtgaaagtaaattattcaataaggatcacttctttgctggatttgaatttgtgccagaacaaatcaaaacagctttagcactttcaaaatatataagtagttggaagggtgtttatgccttaataaacggtgtggaaaaaaacctatttgatttaaacaacaccttaacttgtattttagaaagccaacttgcaaaggaacctcaaaaatattgctgcagtatttccaataatttcattaaaaatgatacttcttactggatacatccatgtaggattgtgttaacacagcaaacttactataaaatcattcctaatcaatctattacaatgaaagaacaaatttttgctcaagccatcaagaatggatgtgaatggtgtccaaatctaaaccttgataacctaatgcaaatagaaatcaacttaccccttaaggatgtcaaatga

SEQ ID NO: 67710 - DNA, 666 bp, Acinetobacter baumannii
atggcaataggaacattattaaatggtgccctaggatctgccacggcgctacctggcacagaggtcttaggttcattgttattgtctggccgtggtcgtacgatcatggggcttttcgcggacgttacgattgaagaaaagcataaagatgaacttaagatcactgaacaccccacggaggttggtgcaccaatttcagatcatgcttataaggagcctccagaagtcaccatgaaagtgggatggtcagaaagcgctggcgctttaaatggtttcttaggtgatactgttcttggtggtaatacaagtttaacgattgtttatcaaacattgttgcagctacaagatcaggctataccgttaatcatttccacaggtaaacgactgtataccaacatgctaattaagtcgcttgggtgcactacggatcttcaaacagaaaatgttttgatgattgatataacattcaagaaaattttaattgtcagtactgagatggcacttgtagcaattgaaaatcaagcaagccctgaagctactgcaggcgtttctaatggcggtacagttcagccaaaagaaacgaatacttcaatgataggccagttatttggtggcgctcaagttggcggagggtgggaatttaaaaacccatttggtggatcatga

SEQ ID NO: 67711 - DNA, 294 bp, Acinetobacter baumannii
atgatttacgaaatcccgcttaataatggcaatcaaaaatttaatatccgcttaggtggagttcagtacaagttccagctgatctatcgtgttaaaagctggtacttagatatttttgatactgcaggaatccccctaattgccggtttacctttggtgatgggtgataatttattgatccagcatcaacacataattaaaggttctttgtatgtgctcaatacaaatgaagatgagaaccaggcatttagtgatttaggcaccttgataaaactgtattggagtgatacatga

SEQ ID NO: 67712 - DNA, 990 bp, Acinetobacter baumannii
atgacaatacaaagaatgcggaattttaggctaaccattcaagtcgataaaaatataccagatgcgttagatttctcggattttaaagttacctttgttgtgagtcagccaacaaatgaacagcctaaagctgctgagatttatatttataacctctctcatcaaactatgaatcttttagctggtgttggggattctaaaaaggatactcaagttatccttgcatgtagttatgacaatgatgagcctgaggttatttttaaaggtagcgttttccagtttagacgtggccgcagcagtccagtagatacatatctttgtgttctggctatatctggtgaccaagtgaagagcgctgtaataaatcaatctgtaccggctggcacctctattcaaggtttaagtgaactaattgaggaagaggttaaaaagcatggaattgacgtgggtgaaattgctgcactgagtgatcaaaaatatcctcgtggccgtattctttttggaagtttgcacggttatatcgagaaaattggcaaggagaataatgttacttatgactactcagacggcgttttaacttctactgagttggataaatactcaattcaaccaatgtttatattaacagcaaacaccggcatggtgggaatgcctcagctcaccagtgagggcttagtcgtaaagtgtttaattaatccaaagctcaaacgtaaggaccgtattcaaatagatctaactaatttgcagtcagagaattttgatatttcatacggtggacaacaggtagaccagccgcaaaagactcctaagcttgccaccaatgcccaaggtatttttgttatccaagcaatcgagcacagcggagatacacgcggggaagagtggtatacaactatggtttgtacagcgcttggctcagtagttccaaagagcggtatcacaataaatgctgtagatgatagctggactccagaacaggagggcaactaa

SEQ ID NO: 67713 - DNA, 678 bp, Acinetobacter baumannii
atggcactatcaaataatgagcgtgctccggatctgctaaatattattaaggatgcgattagtgaagagatattagcaatttggactaacctgccttgtgaagtggtcagttatgatccggatgctgtaacagtagaggtaaaacctttaattcgtgtaccggtgcgaacccctgaaggcagtattaagatgattgaaatcccgatactgcaagatgttcctgttatgtttccgtgcgctggtggcttcacaattacgcatccaatcaatgtaaaggatgaatgtgtagttagcttctcatcgcgcaatatcgatctatggtggcaatctggaggggttcaaaatccttttgacactcgacaccatgatttatccgacggctttgcttacttcaagccacaatcacaagccaaaaaaattaaaaatatttctaccgaaaatctggaaattagatctgatgacaatgcgactaagatccaaattacaccaggtggaattattaactttattggccagaaagctgtatttcattgtgatgtggaaatgaaaaaaacacttactgtgacagggttaattaaatcttttgaggatatattggccaagactgtgagtttaattaagcacattacaaccggtgttaaatctgggactgataactcaggtccaccacagcaataa

SEQ ID NO: 67714 - DNA, 360 bp, Acinetobacter baumannii
atgcgctatagaaaactttcaagtgacggcgactatgtcttcggatctggcaagaatgattttcttgttaattctccggaggcagtagcgcaagcaattttatctcgtttaaagctttggcttggtgaatggtttgccgatacctcagatgggacgggctggaatcagtcaatcgtggggaagcattctaaaaacctttatgagctcacattgagacaacgtgtcttagagacacctggtgttttaagtattgtggattttcagagttcacttgattcggaaacacgtcatttaactgtatcaatgacagtcaacacaattttcggtgaagcagatattaacggggacttaacgatatga

SEQ ID NO: 67715 - DNA, 1185 bp, Acinetobacter baumannii
atgactttaacaacagttgctccagttattactgatgctggtcccattgcacctacttattatgaaattgttgattatctaaagactgaatacaaacgtatttatggagctgatgcctacctagaaaatgacagtcaggacggtcaatggattggtgttttttcgcgagcaattgctgatgtaaatgcagtgattgtcgatacatattccaccttttcccctaaaacggccgttaaagatgcactgtctcgaaatgtagccattaatggtattagtcgacagacacccacattttcgactgtagatttagagattattggctcacctggcactgagattactaaagcctatgcactcgataccaatggtaatcagtggatgtttcctgatttagtcactattccagaatctggcatggtggtcattacggctaaggccaaaaagcctggcgcaattttagcaatgagcaataccgttaccactattggtaagcctacacgcggctggaaaggggtaaataatccggctacttcgtcgttaggcatgccagtggaatcagacgagaagttgagacaacgtcaggcactttctgtggccattccctctcagtctaaaacggacagtatcaagggtggaatttttagtttagccggtgtttcacgttgtaagacgtatgaaaatgaccatgactctacaaatgatcttggtattccagctcatcacttgtgtgtggttgttgctgggggagatgctcacgaaattgctagcattatgcgggccaaaaagagtctagggtgtggatggtacggcaatgttaatgtgacggtcattaatgcttttggtgatgaggagacagtctcaatttatcgcccagatatagtaaatatcggctttaaattaaatattgttggatccgccgagtacaccaaggagattgaagagaatattaaacaaaacttagccgattatgtgaaccagcttgatatcggtgatcgaatcatgaagaacaaactttatattcctgccggactatttggcaatcttgactcggaaacttatcaaatcgattcaattgaaatcattgccaatggagtgcctattgttgggaactatagcctggcgtttaaagctgtagcttattgcgacacagacaatattgaaattaatacgtctggagggttttaa

SEQ ID NO: 67716 - DNA, 594 bp, Acinetobacter baumannii
gtggatgcaagtaaatatgtggcactcctaacaagtcagcatcgagataagcctaagtttagagagacggttgagatatctattaatcctttaatagattgtcttgaatgtctcaatagcttgggtagtaagtttgatcttgagactgctaaaggagatcaactgcagataattgctgattgggttggtgcaccaaactccataccaaactctgtgccggttccttactttggttttcagggtcagcccgcttctttgccttggcgtgaaactgatgatccaagttttaaggctgggttctggcgtgagtcgggtatgagcggatataccgctttaaagatgtcaccgcatttatttaagcaggttgtgaaggctaagattttattgaacaaaagtgattgttcagaactatctgcaaaagaaattatttctctaattatcgataagcctttcaagtttaaagataaccaagacatgaccgtaacttttacatttctatctagttatgaagtctttgaaagagaattagttaaattaatgttccctttaccttctggggtgaggttgattttcgagggcgaagatgactattga

SEQ ID NO: 67717 - DNA, 744 bp, Acinetobacter baumannii
atgactattgaaaaattatctgagtttgcaaagctggcagatgaaaacagtagtaatactgaagggttagagctagaaaaaggtttcccttcacgcttgcaaccagctcggcagtggtttaactggttgcttaattccttaactaaaaaaatcaatgaaatcattgatggaaaattagataaagaggctacttcagcttcagctacgaagttggccaccgcaagaaaaataggtggtgtttcttttgatggcactgccgatatagatctagctggagtcaacaagaagggcgatcaagatacttcaggaaatgcagatacagctacaaagcttaagaatgctagggatattaaaataactggcgttgtgcaaggtaacgcatcttttgatggcactggtgatattgaaattaatacaataggtggggcgacattaggtgaaaaagctatcgctattattcgcctcaacggctcaacgttcgatttagtcaaaagccgtggctttgcttcagttgcaaatatggggggtggccaaatcgaatttactttaagtgatgaagcacctgatacagattatggtgttgtttgcactggtactgctaatgacacagcagcagtgagctttcaggaacgtgaagattttgcacgtaccaaatccaaatttcgtttaatgggtgcatatggtggtgataatactcaagggtcatacactccaaaaatctgcactgtagtcgtctattactaa

SEQ ID NO: 67718 - DNA, 459 bp, Acinetobacter baumannii
atgagttttgatcaaacgataaaaaaaactctcgtatttttttatcaatttgttctacccttctcaaccaaaacagaagacttggaatacatcaaagctaagctgaaacaactagaaaaaatcaggccgggcaacaacaagagtaagcagaataattttaaaaaaatttatgtaaaactctggcatcgtattttagaacttttgaaaacagatagggcagtacgtgcaaatgtccaatatattccgcagattcagcttatttgcgatatggaaaaatatatcgattcaaaaatggcattagaaatttttaatacacgtaaggaactcactacaccattactacttcaattttttgacatacgtaacgatgaaacgagacaaaaagtcatggaaaaatgttctaagaagcagcttggtatgatcgagacttcaactttaatcaatgcagagcaagagtga

SEQ ID NO: 67719 - DNA, 2346 bp, Acinetobacter baumannii
atggaagttcagaaaaagaaagaacggagacaagatctctttttaacacaataccaagagtacagaacaaagtttatttcgcatgctgtatttgatgatttagatgaaagtgataagcagacttttagtgattttggaaaaactgcgcataaggtttttcacgagataattaaagcgcgtaaactgggtgaagaatatcgagttgcggccttaagcttttttgcttcgggtgatgtattagaccatgctggatggtcatacctcattttgagaacgagttattttgttgaagcgctttatataaaattagccgttatcccagattcccaagctaaacaaaaagaaatttttgatttatttcgatatattgcaaaatcaattctacaacaaagtgaagaaagttctttaaaagacgagagtaaaaggctcttagaatactttatagaatatatgttagaactcgaacaggacaaggtgacgagtgactgggagagtttccttaagaataaaataaaacaaaatttgcacaagtttactcaaactaaggtgctaaattatataaatgacttaaaaattatctttaaacgattaaaacaagggaggattgtaaaacgctcgcgtcgtaaaagaataaaaatttcagattggccgacaaagaaaaaattaagaagtttccaaaagaagagagaacaaagacagcttattaaaggatatccagcatatattcaagctcgacaggagatcttttatgctgatgatggagatgttgaatttatagatgaggggattgctgtacatacaacatctaaatctacagctcgttttaatacagtattgaacaatcatagtgaacatttgatgaggcatcgtcaaagacgtctacaaccgtttgtaaccaacacaaattacatgagcaaagatgtgattcaacatcttatctatattttgaagggtgagttatataatgctcctactcaagattcagcgattgcagcagcatgcttattgagtttggcgacgggtttatcaccaatgcatttgcttcaatataaacaactgattgatgagggggtgcttattaaaggtggtagttctaagaaggcggagtatcgactcagattacatttagatattacaaaacaaaaagttgaaactttaaagattcaccaactgaataaaacagtgacgcatgatctccatgtatcaagcagttggtttgaatatcttattttgaatgaatcacaacagctacttacagtacaagagatcaatcaaagactcaaaaaatggactcagaatcaggggctaggttcaattactgttgagaaactccaagcccagctgtatttctatatttttcaccgtacttttaatgaatatattgcccatgtgctatcgggaaaagatagcacccatgagctaccgagtagtttctacaatggtgtgagcgcatcggaattgaatcagcattatttgatctacttagagacactcagtgttgaagaaacgaaaacagaaattgaaatgcttaaagagcagtttgttaaacatgaacctgcgtctatatcacgttttggtagccaattagcactcaatcaaaattatgttggtcaattttttacacgattacatgccatttgcgttgataaaatacagatacatcaacatataattgagcgaattaatgcctatagtgcttggatgtggcatatcagcttattgtgcctaacacgccgtcctcgcgaaaacttattaggaaagtatagtgactacgatttaaaactaaagttgttgtatgtagatgataagcaaaacagtcgatcacgaaaagatggtcgctatataccgctcccagcattttttatccaagcttttaaacgttatacgcaatttttaaatacggtcactcagcagtatgaagagctcctccgatttgtatttgggaaaaagattacattgcaagatttgtttggccaagtgatccattacccgaaatcgttaccgaccactgctgaggaatgggcaagtaagaaaattaagattgctgcgctcaaccgaagttggattaatgactatattgaaggtcatcaactcagcagtttatataataactggctacgacactttgatatgaatatgttgatggagcaaggtttggcttttaatgtcatacaagcagtttatgggcatgatcagcgtaatcaggagctcttttatcgctattcatctgcatctttaccacaatatatcaatcaatttacccaaaatattgatcgcatgattaagcaattgcagattgagcatctgtcatacatttcagtacttcaatctgagggcttatcatga

SEQ ID NO: 67720 - DNA, 3168 bp, Acinetobacter baumannii
atgagtatagatgagtcattgattcaaaaaattcaggttcaggttgattctgtatttgccgaaatgaaaagtcagattaagagtttaagagaccgacctgaattattagataacacactaaataccttgtggtacgagttttatgatgaatttatttgttttttagagcagaagaaatttactcggaaagatactcaaaaaccgtatattcaagctattgaaaaatattttttatctttgcgtcagacctatttatctcaagcaaagaatgcgtatccaatcaaagtatggcctaaaactacttttctagaacctatacccagacaacttcgtagtactgaatcacatcttcggcaaggacaaaaacattatcatattgctatagccttaaaatcctattggaattgtccatacaaggatgaagttactccggcatggttatgggggaatttttatttaagtctgatgtactgctctggctgtactgatctaagtcaattaacagcaattagtaataccctggtcaacgctattgtcaaagatgaactccaaatctgtactaaactttatcatgctggatataaaacaatcatccaaccactcgcactgcattatcgagtaccacagcgtgcttatggtaatcaaatcgaaaatagacaggtgtatcagtggcgttatatttggcttaatccctatgcacagttgtttatacaagggataaaacagcatggctctcaagccttgaatcagcagatgccacgatatgttttggagtctatctctactgtattagggaaattacctaaagaaattgatttgagtcatcagatcgtaggtctgaaaaaactactacaccgtaatgataaacagttagcagagcttcgttcacttacaccttttgatcattcaaacttagccattgagcttgactcttattcgggcttagatatgtgcttaagcgaggttatgcgaggtcgtctcaaaacggtgtcgttaacacctattgatcaggcgagagcatggttagatcacaacatcttgcagacgcagttaacacatattgagcgggatataccactacagacagaaaaggcggtaccagacttaattacagctcaccagcaactcaaagaaattccatttgaattgatgctatttgaaaaagatcagactgaagttgataagcgtcagaaacggcagcgtaaaagtgaacgtgtgaaatggatcagatggacaagcattcagaagcgactagaagaaaagaagcctcacgttggcctgtatgaaaaaaatctaatagaagcacagctcaggctactgggttggatttttcatcttaagtctcaaaagatgaaactcaatagcatcgagcggtatttaagtagtatcgctaaagattacttattccatgtctatatgttcccaggtgatatagataacatggatcaagaagattgtgaggaactgtacgacgctatcttagatagtattgatgatcgagatcaagccaaacgtgagactgatcctaaggccaatcacggacgtgcacagtatgcatttggcagacttaaagcatttcatcagttttgtatgaaacaataccgtatccctaaggtcggtacctttcaatacaatgattatcatcgtgtacaattttgtcatgccaaattaattagcccaaaattgttcaatcagcttaaacaggtactaagtttaaagattgaaaaatgtcaaacaactaaagagcaagcgtatctttttcagctacagctcatgtatttactcgcatttcgtttggggatgcgattgaatgaaatcaggggacttacattggcagaggtcatttgtcctgaactgatttggcgtaatgatacgctgaccaaacctgtgcagatccgttttaatttacgtaacaatgtttatcggaaactcaaaagccaaaacgcaaagcgtcagcttgatctgaacgccgtcatgctcgatgaagagttggcattggtacagcaatatctaaaacaatgtattacacataatctagcgaaaactaatcatgcggacaaattgatttttgcccaagatggcgaaattttaagtgaagcttatattagtgaaatgacccaagtgatttttgatgagatattgggtgaagggcatggttatactttccataactttagacatagtgccgcgaatcatttagcaatcgcttggttaggctcaaaagagatgatcatgacctatacggattacacttggagccggtgtaaagtcatgcgtcagcatttatttggagaaactgcaattcagcatgaagctgtcatacaacataagtggcggttactagctgactggatggggcatgcaaacatagagcaaacagcatctcactatctacatgtgctggatttgttggtgatagatcgaatttatcatttgccttgtacaattcatcgggacacgatcaaactgatacttcaaaatgacttaacaagtgctaacacagaaattgtagatcttaatcatataatacgaaaaggccagtatttcgatttttatcatgccacatatgcactaaaaaaagtggattcagttaaacctgttcagcctaaaataagtaaaaatgtatctgtatctaccatcattcatgattacattaaatatagagcctatgaggaccatgattgggtattacgcagtaaaaagctcgctactaagtgggtggcggtaaaaaagcctcaaaataatgaggattttagtgaagatgaactcatctccttatatgaaaaagccttaaagaaaggttttgaagcaaagcaatgcgtagagatttcagcactgccaaagcgggttcaacatcaggttttagaagccttgagtattttaattgaacatggaaagctgagaaaaaactttattcattttcaatatcgttttgataagcaaaataggccacgtgtcgattggtccattcaacatctgattacgggactgaagtatttactccctgaggatacgcagctaaaagttgataatgatccaccggataagtcacaaaaaagtcgtgaagtgaaattaagctttatcaatgaaaacaataaaaatacgacactttgtattgcgtttattatgttgatacatgcgattcagcaagaaaaattgagcatttaa

SEQ ID NO: 67721 - DNA, 726 bp, Acinetobacter baumannii
atggcgaaagaagcaaaatttattgaagaccctgatttagcatttctacaatatttagactataaagatctaaaattgttagcagatacattaattaaagatgtggaaggtacagagcaatggactggaagcttaaaaaaaacgttattggcaaatatgaaaatgtatgagacagaagaactgctctacaaaaatagctggaaagcaattgttgcagaaattcaattatttggcggtgatactttcgtaaacctggttaggcgaaaaggggtaatatacaaagaaatcctgggagatgttgctaataaaattgatgtagattttcataaaaaaactacctccattgagcagctagaagaaagaattcatcgcaagttatttggtaaagtgatgtcacttaatgatattgagaaaatgaacaatatattgaaagaaaaaggctatttaggtctaacatctttgaaagctaagccgttaaatacattaaaaaagaataaaaaggttgggtgggctacgagtggtataggtggaacattgctcacaggcttaaatacggccgcagttcttgcaacgagggtaaatccattgcttgcagtagctaatgtaccagcagttgcaaaagagctatcagcaccagcatatagggtaactattcctgtggtatgtattgttgcgatgttacgtatcaagtatcagcaaaataaacaacaatacgatgagttttaa

SEQ ID NO: 67722 - DNA, 909 bp, Acinetobacter baumannii
atggcggatatgctagggaaaacgtttacttatgactttgataagttttcgcctgaactttttgaagcttggcgtaataatcaagtcgtatttagagacggtgttgcttattggaagaaaggcttggagaaagttgggatcatccagcatattccattaaaggaagtcagttctgtgagtatggagagctttgttcaagggctaggctcactccagtcaaccttacaaagtacaattgctatagcacagactatttctacagcgtcattgatggttgcaatggtaatacaaacccaaattttagctaaaaaaattgatgctgttcagcaaagcgtattagcggtgtcgaatcaaatcaaagagcaaaatatccttttttacactgaaaagactactgaatatcttggtctgttaagaacttttaagttgttgttaaacaataatatcgaacttaaagatgtaaatgagctagcaaataataccttggcaagttctattctgctgagaaatcacttggtttgttttatggaaaatctatttttccaagtacaacacaaaaaaattagttcgcctgagcatgtcggtcagatattgcaatttattcaacaaatgatggagttattgccagtaggtatgcacttagagttcattctttcacatagattagatcagaaagaattttctcaagtgttaatagaggaatgtcatactcaatattcaaatttacaacttaattaccgtggttatctgaatgaaataaacaatggtttaagagagtaccgaattaaaaatacggaagttcctttttttgaacaaatcaaaatacctgctaaacaattgctagaaagtagtctttacagtgaattgttggaaaagcctgctatggaaaagttatcctatagccgctag

SEQ ID NO: 67723 - DNA, 927 bp, Acinetobacter baumannii
atgctgaataatccaattttagcaacgttgattggcatgtctgccattgtgatgtggtccacattggtcgggctgattcgtctcattagtgatgaattagatgcgctcacctgtctgatgttgctttataccatcagcaccatcattttatgctttatttttaaattaccgaaatttaatcaaatccctaaaatttattatgccgtcattacttttttattcgtagcttatgaattatgtttttctttttctgttgcactggcacaaactccaatacaaaccattgaagtcggtgtgattaatcatctttggcctacattcaccattatcatgatgctattcacacgttaccttacatttaacgctaaattacttgtgggaatttttctatcagcactcggcgtcatgatgattcaaacccaaggctttcaactctcaataacaggagtaatgcaaaacttactgctaaatccattgagttatctgttggccatttcggctgcactgctttgggcattctattgcgttgtattgatgaaatataagccagaaaataatgtcattgtcgctttatttttttgtaccagtatttttttagtaatcaaatggagtttcagcacatctctacctttagagcccatcaatatgcataacagtcttttgattttatgcgcagctgtatgtttaagtttaggttatgccgcatggaatattggcatgattcatgggaatgccaatattttggtgagcagttcgtattttgtacccattttatctgcttatttttcaagcctgctcttcggtgtgagtttagatcagttcttttggttggggacaagcctcgttgttttaggttctatcatctgttgggccgttacggctttacccttatcttggaagtataaaattaaaagtattctagggtaa

SEQ ID NO: 67724 - DNA, 1308 bp, Acinetobacter baumannii
gtggagcgccaaggtattacgcaggcattgggcctgattcatccaatcacattaacacatggcaaaaatgctgaagtatgggacacagaacaaaaacgatatattgattttgtaggcggtattggcgtactcaattttggtcattgtcatcctcagattgtcgaggcaattcaaaaacaagcagcgcgcatgacgcattatgcctttaatgctgcacaacatcagccttatatcgactatatggcgcgtctaagtcaattccttccaattcaagaggatgttgttggaatgttgaccaatagcggtgctgaagcgacagaaaatgcgttaaaggttgcacgaatttgtacaggacgtagcggtgtcattgccttcgatggtggctttcatggccgaacattggcagcagtgaacttaaatggcaaagtcacaccctacaaaaatggcttaggtcccttacctggtcctgtctaccatctgccatttccaagtgcagacaatggtatttcggcacaaacagcacaagcagcattggaacgattataccaagttgaagttagcatcaatgaagtcgctgctgtaatcgttgaaccggttcaaggtgaggggggcttccagtttttagatcctgaatttgcacagtacttacgtgaattctgtaataagcacggtattttattaattattgatgaaattcagtctgggtttggccgttcaggtgtgccatttgcctttactcatttaggtattgagccagatttgctgttattaggtaagagtattgcaggcggtgtaccactcggtgcagtgatgggtaaaaaacaatacatggatcaacctatggtaggtgcccttgggggaacttattctggtaatccaatcgcatgtgcggcagcactggctacccttgaaatcatgcaatcaccagcactcaaaagtgcgacagagcactatatacagacgcttgaagaacgttatgcgaactggaaggaaaatggtctgtctccatggcttggcaagctcacaggtgtaggtgctatgcgtggcattgaactcgttcatcctgaacagggtgcagggactgagcaaatggcatttgtgctgaaaaaagccagagaaatggggttgttgctcatgccgagtggcaaacataaacatattattcgtttattgccacctcttacgattgaagctgatcgacttcaggaaggcttggatattctcgagaacgtacttgcgcaaacagcaataaattctcagtcacaagtagtgccaatcttaaaaactaaattgacacaaatagcataa

SEQ ID NO: 67725 - DNA, 1383 bp, Acinetobacter baumannii
atgaattttgttgcatctcatcaaattcgttcggaattttctgcactgatgtcacagatgtatcgtgaagaagttccgttatatggcgatttattagatttggtcgctgatgtaaataatatcaccttgattaaaaatcaaagattacatgatcaactgaaaaaaactggcgaatacgaccgccttgatctagagcgtcatggtgcgatccgcttaggtacagccgaagaactcaatactatgcgtcgtgtgtttgccgtaatgggcatggaacctgttggttattatgatttagtaccagcaggggtacctgtgcattcaacagcatttcgtgtgattaccagtagcgaactgaatgaaagtccatttcgtgtatttacctcattgctacgtttagaactgattcaagatgaagcattacgtgcactagcagaagatgtactgcgtcagcgtcaaatttttactcaaggtgctttagagctgaccactaaatttgaacaacaaggtggtttggacgaatccgatgccaaacgttttgtacaagaagtcttagagaccttccgctggcataaagaagcgcctgtcacccaagagctatatcaaaagctacatgatcaacaccgtctcattgccgatgtcgtcgcatttaagggacctcatatcaaccatttgacaccacgtacactcgatatcgatatgattcaagaagggatggcaagtcgtggcatcacacctaaagccgttgttgaaggtccaccacgtcgtcgttgtccaattttattgcgtcaaaccagttttaaagctttggatgaagaagtgtatttccaaaatgatgtgaagggttcgcataccgcacgttttggtgaaattgaacaacgtggtgtggctttaactcctaaaggccgacgtttatacgaccaattgctgaaagctgcacgtgaagaacttggcgcagcaccgaatgagcaaaatgcaaaacgctatatgcgtattttagaaaagcactttgttcatttcccagacagctatgaggaactacgtcaacaaggattggcatattttcactattacgctgcagtagataaatgtattgatgtcgaagtcagcgaaagcaatgtagatcaactgattgcgctaggtgcaatttatattgaacctattgtctatgaagactttttgcctgtatctgctgcgggaatttttcaatccaatttaggtgatggtaatcaagcgaactacgctgtttattcgaatcaagatctgtttgagaaatgtttaggtcagcgcgtatggaatgagcttgagctctacgcgcagactcaacaaaactctttacgtaaagcattaacacagctgcaaagcacgagcagcgtacaaaattaa

SEQ ID NO: 67726 - DNA, 1545 bp, Acinetobacter baumannii
atgacacaagcaattgcaaattcaacaggcgtgcaactcgacaccccaatgattgttcaaacattactgcataaaatgggtgtagattcgactcaacatgtcgatggcacacttgaagtgagaacaccgattgatggcaatttaattggccatgtggtgatgcatacagctgaacaaactgaacaacaaattcaaaatgcacaacaagcatttaaagcatggcgtaaaatcccagcaccacgccgcggtgaattagtccgtatttttggtcaagtcctgcgtgaatataaagaagatctaggcgctttagtgtcttgggaagctggaaaaattactcaggaaggtttaggcgaagtccaagagatgattgacatctgtgatttcgcactcggtctttcgcgtcagctttacggtttaaccatcgcatcagaacgtcctggtcatcatatgcgtgaaacgtggcatccactcggtattgtcggtgttatttcagcatttaacttcccagttgcggtttgggcatggaatacagcattggcgctcgtatgtggtaatgcggtgatttggaaaccatctgaaaaaacaccattgacagcattggcatgtcaagcattatttgaaaaagcattggcgatctttggtgaagaagcaccaaaagacattgcacaattgctgattggtcaagctgatattggcgacttattggtaagtgatgaacgtgtagcactcatcagtgccacgggtagtacacgtatgggtaaaattgttggcccgaaagtcgctgctcgttttggtaagagtattttagaacttggtggtaataatgccatgatcttggcaccaagcgcagatttagaattggcgatccgcggtattttattctctgcagttggtacagcaggtcagcgttgcaccacactacgccgtttaatcgtgcataaatctattcaagctgaagtggtcgagaaactgaaaaaagcctatgactctgtcacgattggtcatccattagaaggcaatttaattggtcctttaattgattcggctattttcaatcaaatgcaagatgcattagagcgcgcgcgtcaagcaggcggtcgcgtttatggtggtgagcgtgtgttgaataagaccttcccgaatgcgtactacgtcaaaccagctttggttgaaatggacgtgcaaaatgaggtagtgaaaacagaaaccttcgcaccgatcttatatgtcttgggttatgaagacttcgaagaagcactatttttacaaaatgatgtgccacaaggtctgtcatcatgtattttctcgaacgatattcgtgaagcagaaaaattcttaagtgatgaaggcagtgactgtggtattgccaacgtcaatattggtacaagtggtgcggaaattggtggtgcttttggtggcgaaaaagagacaggtggtggtcgtgaatcaggttctgactcatggaaaaactacatgcgtcgtcaaaccaatacagtgaactattcacgtgagcttccattagcacaagggattaacttcggttaa

SEQ ID NO: 67727 - DNA, 1284 bp, Acinetobacter baumannii
atggtaaaagatcaggttctatggtcaacgttggtggatgatgtaccgcattatgcgccgatccaaaatgataagaaggtagatgtttgtgtcatcggggcaggatttacggggttatcaacagctatacatctagctgaaaaagggtatcgtgttgcagtgttagaagccaaccatatcggtgcaggtggatctggtcgaaatgtaggattagtaaatgctggaacatgggctcaaccggatgagttgaacaagttcatgggcgaacaagcaggtgaaaagctgactaaagctttaggtgctgctccaaaactggtttttgataccattgatcgctttaatattgatgctcaagatacccgtacgggtaatttacatatggcacataatcgtgatggtgaagatgacgtggatatgcgttatcaacagctcagtcgtcgtggtgcaaatgttgaagtgttgacgggcagtaaatgtcatgaatattgtgggacaaccagtattaataaggctttactcgataaacgcgccggaacagtcaatccttatgcttatgtcactggtttagcgaaagcagcgacacgtttaggtgtggaaattttcgaaaattcttcagtcagtggtatcgtcaagcaagatcaaaaatggtgtgtacaaagtcacagtgcaaccattacggcagagaaagtggtgattgccaccaatgcctacactgaaggtgaatggaatgatattttaaaaactatctattttgttcagtattatcaaattgcatcagagcctttaacttccgcacaggccgataaaattttgcccaatcgtaatggatcatgggatacacgtttagcgttatccagcattcgtcgtgacaaagatgggcgcttgttactgggtactgtcggtgcctaccaaggtaaagcaggtatttatcaatcttgggcgaacctcatgaaagaaaaatactttccccaattaggtaaagtaaattggcaatatcaatggacaggtaaatttggatttaccacagatcatattatgcgaatttttgaacctgcgccgggtattgtcgctgcgacagcgtataacggacgtggcattactacaggaaccatgatgggtaaggcatttgcgcaatatttacaggatgatgatcgtgaaaaactacccttaccttttgctcacttagaacagaatgaactgtctttccgtaatgcgcgagcattaatgtatgacaccggtattgccctatatcatgccggacaatgtttacgcattatccaataa

SEQ ID NO: 67728 - DNA, 2925 bp, Acinetobacter baumannii
atgagcagtcaacatcagactttgagtgtgcaaaattttcttaccgagttaaggtcagatttcaaaggtgaaattgatatctctgatgcagctcgtcacgtctatgcaacagacaattcgatttaccagcgtaaacccacagctgtggtgtatccaaaagatatagatgatttacaaacactgatgcagttgatggatcaagtggaatatcgtggtgtcgtcttaactgctcgtggtggcggtacaggcacgaatggacaatctcttaccgatgggattgtggtcgacatttcacgtcatatgaatcagattttaacgattgatcccatcaaaaaaacggcacgtgtgcaagcaggggtggtcaaggatcagctcaatgcagcattgaaaccttatggcttgtttttcgcaccagaattatcgacttcgaaccgagctacgattggcggtatgattaatacagatgccagtggccagggcagttgtcgatacgggaaaacacatcaccatgtaattgcactgactagtgtattgcggggtggagagattttacagacgcaagcactcgatcggcaaaattggcaaacacagattcaatcgagctcaaataaaacccaaacgctgtaccaaaaaatatttgatctggttgcgaatcatcaagacacgattcaacagaatttcccaacgctcaatcgttctttgacgggctatgatttaccccatgttttgacagagcaagcatttaatctgaatcatttaatttgtggcagtgaaggcacattagggttgattgctgaggcagagttaaacttactgccgattcctgtcgaacgtatgctcattaatattggctatgcaaattttcacgatgcactctgtgatgccaaagccttgatggctttacagccactttcaattgaaactgtggattcaaaagtcctcaatctcgccaaacaagatttagtttggcatgacgttgctcgctattttccggaaggtgaagatcatacacaaattgaagggattaatttaattgagattgatgcggcagatctcgatactttgcatcaaattaaaacagattttttgcaccatttaacatcagaccaaacggttaaacgtttaaccatgaccactgcagaaggtacacaacaagttgaagcggtctataaaatgcgtaagcgagcagtcggactactcgggaacgtacaaggtgaaaagcggcctcaaccttttgtagaagatacagctgtgccacctgaacatttagcggattatattgccgaatttagagcattattagatgctgaaaaactcgaatatggcatgtttggacatgtcgatgcgggggtgctacatgttcgtccgttgatggatatgaaagacccagaatcattgcaggtcatgaagcgtgtcacagatcgggtcgtggagctcactcataaatatcacggtgtattatggggagaacatggcaaaggtctgcgctcagaatatgcgcctatattctttggggaagcttatccgattttacaagaaatcaaagctctttttgatccttataatcaactcaatccaggcaaaattgccaccccgagttcacagctgaaagccaaattaattccagtaacagaagtgaaactacgtggtgattttgatcgtcaaattgacgcacaggaatggcgcaattttgggacaaccatgcactgtaatggtaatggtgcatgttttaattacgagcttgatgatccgatgtgtccatcttataaagtgacacgtgatcgtatccattcaccgaaaggacgagcaacattggttaaggaatggttgcgtcgtgaacagacaggtgagcaaaccgactcatttgaacatgaggtttatgaggcattacatggctgtttgtcatgtaaatcttgtaccggccaatgcccggttaaagtggatattcccgctgctaaagcacaattcttggcgaaatatcatcagcggtatggtcgtcagattcgcgattatttactagcaaggttagaaggctggttaccaaaaatgagtcttgtagctgggctctataatgtaatgcaacgcttcagttggatgaaacagttacagcagaagtattttaaattggtggatttacctttatttcacccacaagccaaagttaatttagcgcaacatggtgcaattgtccttgatgatgttgaacagcttatgaaaagagcaggagaaaaagtcatcattgtccaagatgcttttacccgctattttgatacgcctgtgttattagaaaccgtggcattgtgccgaaaattaggcattacaccgtatatcttgccgtatcttgaaaatggtaaacccctacatgtacatggttttctagacgaatttgaaaaaattaagcaacacaatgttcagctttttcagcgggttgctaaaagcaatgtcccaatgatcgggattgaccctgcgatgacgttggtctttagacaagaatatcaagagggtacgaaggcattggattaccaagtcttgttattacaggaatggttaaatcgtgtgatcgaaaaaaaacagttgaagcttaaacctcaacaatcgacagtattccaattggcatcacattgtactgaacgaacccaaatggctgatagtgtgaatgtttggcagcaaatttttgacaaatttggcttagagctcaaggcattgaaattaggttgttgtggaatggcaggcacgtatggacatgaagcagaacatcgtgaattgtccaagcaaatttatgcacagtcgtggcaaaagcaaatagatgtgcatggtgagagggttttagccacaggttactcttgtcgtacgcaagtcaaacgcttctctgagcagggcgttgtacaccctattcaaattttgaatcgctgccttcacgactaa

SEQ ID NO: 67729 - DNA, 939 bp, Acinetobacter baumannii
atgcagaaaatgacagcgaggacctatccatcaacaacagcattacgttgttttgaagcgtcagcacgtttttcaagttttaccaaagcagctcatgtgcttcatatgacacaaagtgcagtaagtaaacaagttgcacatttagaatgtagtttaaaattacaactgtttgaaaggtcattacaaggtttaaaactcacgcccagtggcgaactcttttttaaagaaacacagcaaattctaggacaaattgaacagtccgtcttaaatttactttcacatggtgctgaagctgaaacattgaatatttcagtacatccaacactgtgtgcacgttggttaattccagccttaaaaggttttggcaaacaacatcccaatatccatctcgatgtccgtgaacagctttattctactgatttagatggtagtaaagctgatattgcgttcttatatggaacgggtgtatggcgagatatgaccagtgttgagctttttccagaaaactgcgttgccgtatgtagccctgaacttaccaactaccaagcactcaagtcattagatgattttcaaaattatgtcctcattcaatctcaatctcgcccacgtgcatgggaagagtatttccaattacaagacaacttgaataataacccgctatttggtccacgttttgataccttctatgcctgtattcacgctgcaatgtcgggttgtggcatggcattagtccctaaatttttagttgaaaaagagttagaggacggtgacttaattattgcttggccctatgaaatgcaaacacagcattcctactatatgacctatccaacctccatgacgacaacacataaagtacataccatggtgcaatggatccaacactatattaaatccagtgaagacgaaaaaaattcgtactatcgtcgcagtgcataa

SEQ ID NO: 67730 - DNA, 1146 bp, Acinetobacter baumannii
atgaatactctctctaaaagacgctttacaacgctcattttagcagcaacgctttcaacatccatctatgcacaaaaaatcaatgatcatcttgaaattggtggctggctccgtgccaatattcaagataaaagttatagcccaaatgatcaacatctaaaatttgatgcggcaaaactgataattcaatacaacagtgagctcatgagtggacaatttgaatatcgctgttatcaatttgatcaaatttgcgatttctctgctttagtcgatgccaatttaagctaccacattgccgataaccctcagcacaaagtaactttcggtattcaatccttaccttttggacctgctcgcaattggtcaagcaattggtatggtggattattggtcaacacaggtttagaagatgtccataatttaggtatcaaataccaatatccatggtcagatcaaacacaaattgaattggcttattttgtctctgatgccggcaactattttggtcaaagccaagatgctgcacgttacagtgctaatctcgtcagtactggacaagatagtccactcagtgatctaacagagcgagacttatggttactacggctgaaacatggatttgagttcagtgaatatacagatctgaatataggtgcgtcctattggtactcaaccattgaaaacaagagtgaatctcaaaacggtaaaagtgaacgttgggctacattcgcaacacttcaacatctcaattgggtcctcacactcactgcaggtcaaacgcgcttagagaacaaagatcccctctctccacacagttcaatagtgggttcattcgacaccgcctatgctgttgctaatgatgctgatttttatacggcagatctttattatccaattaaactcaatgaaaaatcgactataagtccatatgtaacttatagttacctagataagatgcagactggctttcaagactctagtcgttttattttaggcgctcaatgggattatcacccgatttcaatagcagctgagtatattgtcgggaaaaatgattattttattgggggtacagaacaagctttcgctcaaggagaaagtgatagcgaacgtttatttaatctattatttctctatcatttttaa

SEQ ID NO: 67731 - DNA, 1272 bp, Acinetobacter baumannii
atgaatcaactttcctatataccagcaacgaataatccctggacaaattatttaaagcaattggaaaaagtggcaccttatttaagtcacagtattgatcaattagaaacattaaaacgccctaaacgcgctttaattgtcaatattccagttgaaatggatgacgggcgtattgagcactttgaaggttatcgtgttcaacacagcctcacccgtggaccaggcaaaggtggtgtccgtttccatccagaagttgatttaagtgaagttatggctctatctgcatggatgacgattaagtgtgcggccttagatcttcctttcggaggtgcaaaaggcggtgtgcgcgtgaatccaagtcaattgtccaaacgtgaacttgaacgattaactcgacgctataccgcagaaattaacaatattattggaccacaaaaagatattccagcccctgatgttgggaccaatcctcagatcatggcatggatgatggacacctattcaatgaatgcgggtacaacagtcacaggtgtggtcactggaaaaccagtacatttgggtggatcacttggtcgtgccaaagcaactggtcgtggtgtttatattaccggtcttgaagcagcaaaacgtttaaatatttcaattgaaaatgcacaaatcgctgtacaaggttttggtaacgtcgggagtgaagcggctttattgtttatgcatgcaggtgccaaaatcatttgtgtacaagatcactcagcaacattttatcaagcacaagggattgatgttcaatccttgatgaactatcaacagcaacatggctctattttaggctattcatccgcagatgaaatttctgctccagaattttggtctcttcgtacagatattttgattcctgctgcccttgaaggggtgattactgttcctatcgcaacgaccttaaatacacgtttgattctagaaggatcgaatggtccaactttaccagaggctgacaccttattggctgaacgcggtattaccattgttcctgatgtgatctgtaatgctggcggtgtgaccgtgagctactttgagtgggtgcaaggtttagccagttttttttggaccgaagtcgaaattaatcaaaagcttgatcgcattatgcaacatgcgattaatacagtctgggaaatgtcagaacaaaaagactgttcactgcgtacagccgcatacatcttggcctgcgaacgtattttaaatgcccgcattgatcgtggaatttacccaggctaa

SEQ ID NO: 67732 - DNA, 1398 bp, Acinetobacter baumannii
atgagtcaagtatcacattcaccaacacaactctccgggaatctctccagtcggcaagtcaccatgatgacccttggtggaatgattggtgctggattatttattggatcatcctctgcgatcgtgacagcaggtccagccattttagtctcctatgcattgactgggcttttggtatttttggttatgcgcatgttgggtgagatggcagtcacatctccagattcaggttctttctcaacctatgcgacgaaagccataggaccttgggcaggatttagtattggttggctgtattggtggttttgggtcctgatcattccagtcgaagcaatcgcaggcgctgaaattttacatacatatatccctgatattccatcttgggcgtttgccgtatttattatgattgcgctgactgccgcgaatttacttaatgtgaaaagttttggtgagtttgagttttggtttgcgttaattaaagtcgttgcaattttagcgtttattgtgattggtgccatggctgtactgggtttttggccatgggcagaggtcagtggtgtcgataggttgtatagccaaggtggttttgcacccaatggtttaggcgccatattggccggtgtattggttacaattttctcattttttggtgctgaagtggtttcaattgccgcagccgagtcggaaaatccacaagaaaagattcgacgtgccactaacttggtgatttatcgtattgcgcttttctacatattgtcgattttcttggttgtggcattggtggattggaatgcacctggcctcaaagagatggggacgtttcaatatgtgctgcatgtgctcaatgtgccgggtactaagtttattattgattttgtagtctttgttgccgtctgtagttgtatgaatacgggaatttatattgcgtcaaggatgttgttttcattatccacacgtcgtgatgcaccagccagtatgatgaagctaagccaaagtggtgtgccgtgtcgtgcagtcatcatgtcgagcatcgcaggcttttttggctgtttagcgaattacgcttttccaggtgaagtgtttggtttcttattgtcgaccactggggccattgcattgttggtgtatttagtgattgctatatcacaacttagaatgcgacaacaacaaatacgtcaaggcattgaaccaagttttaaaatgtggtgctttccatggctgacttgggcagtgatcggtatgattttatctgtgctcatttacatgttcctatcatccgcataccgctatgagagttatttatctctcgcggtaacactgatcattttattattttcactgattattcaatataaaaggaaaagtgaaaaatctatatttggaaaagaatccaattaa

SEQ ID NO: 67733 - DNA, 1407 bp, Acinetobacter baumannii
atgaataatgataatggtgctttaaaacatgccttatcgaataggcaagtttccatgattacccttgggggaattgtgggggcaggtttatttgttgtttctgcaacagcactcaatactgttggaccagcaattttaatttcatatgcattgactggactcatggtgttgtttgttatgcgtatgctgggtgaaatggccatacgaaaaccagattcaggtgctttttcgacttatgcaagtgaatcactcggtcattgggcaggatttaccattggttggctctattggtggttttgggtccttgtagtggcatttgaagcaattttaggtgccaatatttttcaccactattttcctgagtttccatcttggttatttgccgtgctgtgtatttgtttactggcttgtaccaatttaatggatgtacgtaagtttggtgagtttgaattttggtttgccctcatcaaagtgctcgcaatcgttgcatttattttattttgtattgcggcattaatggggttctggccactggctcctgctgaaaatatttctggtgtcggcaaaattttagaacatggcggtctattcccaaatggctatggtgcgatttttaccggcatgctgatttcgatgttcactttttttggtgtagagatgctatcgatcttggctgcagagtctaaagatcccgctcgacaagtcaaacgtgcaacgaacattgtgattgcacgtattggcttattttatattatctcgattttccttgtactgtgtattgtgccttggaatgcaccaggtcttaaggaaatgggaactttccaatacgtcttacatgtattaaatgtacctggttcacgtttagtcatggatgtgattgtatttattgcggtcacaagtgtcttaaattcagggctttatacagcttcacgtatgctttattcattgagtcaacgtggcgatgcagcaaaatttttatctcaggtctctcaacataaagtaccacaggcatctgtattgacatgtactgcagttgctttagtggcagtcgtaattaattacacgtttccagaaaaagtattcatggtcttgttatcgacgatgaatgcaattggtttactggtttatttagtgatcgcaatgtcacagattgtttcacgctcgcgtttagaaaaacaaggcgtaaaacttgattttaaaatgtggttctttccgtggctcagctggtttgtcgtagttacgattttaaccgtacttggttacatgtttttctcagaacaacatcgttatgaaaccatggtgactttaacgcttgcgagtctgattctgattatgagcttcctcaaaaaaccaaataaaaaacttagccagtcccctatatcgacatcaatgaaatcagaaggataa

SEQ ID NO: 67734 - DNA, 1029 bp, Acinetobacter baumannii
atggaaatgtccattgatacagcatatgcattgagtttagaaatcttaaaccaggctggatatagcttagatcatgcgcaaacaatcactgatgttttgatgcaagctcagattgatgattgtcattctcatggattgtatcgcttgttgaattgcattcattcattagagcaaggtacagtttctgcagatgcacagcctgaaattgaaagcttaagttgttcgatgacgcgtgtgaatgcaaaaaaagggatggcaccactgtcttttgcaaaagcgatgcctcaactgattgagcaagcaaagcagcaagggattgcattattggcaatcaatgactgcgtacataccaccgccttatggtatgaaattgaattattgacccaggcgaatctggttggatttgcctgtacttcaaatcatgcatgggtagtgccagaaggtgggagaataccgatttttgggacgaatccaatggcctttggttggccacgtccacatcaagcacatccttttatctttgatttttcaaccactgcaatggcacgtggtgatattgaactctatcgcaaacgtggggagatgcttccggatggttgtggggtagatcagagcggtttaccaagtaatgatcctgcaaccattttagatgaaggtgcgatgaaaacttttggggcgcacaagggttctgcattggcagcaatggttgaacttttagcgggtccacttattggtgatgtcttaagcttggaagcccaacgtattgatgcaggggcaggtggatcaccattaggcggtgagtttattgtggcaatttcaccggaaaaaattttgggtaaatatgctgaacattattttgcaaaagctgaagaattatttgatggctatcatgatcagggactgagactgccttcagcccgtcgttatcaagccagagcacgaaatatgagtgtaggtactgtacatgttcaggaccatatctatcaaacactcctcagttatttgaataaactcaaacttggcgcttaa

SEQ ID NO: 67735 - DNA, 1257 bp, Acinetobacter baumannii
atgcatattatggttttaggcgcgggcgttattggtgtaacaacagcctactatttagcaaaactaggttaccaagttactgtgattgatcgtcaaaaagggccagcattagaaacaagttttggaaatgcggggcaaattaccccaggttattcttgcccatgggctgcaccaggtattccattgaaagcaatgaagtggatatttcaatcacatgcaccactcgccattcagatcacgcgagagcgttttcaatatcaatggatgttgcaaatgttgggtcagtgtaacgcacagagttatcaaattaataaagaacggatggtgcggatttcgcaattcagccgtgattgttttgatcaaattcgtcaagaaatcgattttcactacgatgcgagacaactcggtacactgcagatctttcgtactgaacaacagcttgaagccgttcaaaaagatattaaaatcttaaaagctgagaatgtgccacatcgattgctgaatgcacaagagctgcttactgtggagcctgcacttgcaaaagcagaggtcaaaattctcggtggcttacatctacaaagtgaccaaacaggtgattgttataaatttacaacgcagttggctgaacggtgtaaggctctgggtgtgaaatttatttttaatactgaaatagaacatctcttagaagcaaatcagaaaatacaaggtgttcgtttaaaagacaaacgtattctaactgctgatcaatatgtacttgctttaggtagctatagtcgaggcttaacacaacatttaaaattgaatttgccagtttatccattaaaaggatattcaattacgacaccgattgtgaactcgaattatgcacctgtatctactgtactcgatgagagttataaggtcgctttaacgcgatttgatgatcgaattcgcgtgggtggtatggcagaaatttgtggctttgataaacgattgaatccacaacgtgaaaataccttaaaaatggtattgagccagctatttccacaagcgagccaaattgaagatacacaattttggactggttttagaccaacaacaccggatggtacaccgattattgggcaaacacatgttaagaatttatggaccaataccggtcatggcacattaggttggacaatgtcatgtggatctgcacaattgttggcagagttaattgctcagcgacaaccctcgattcaagcggatgatctatcatttgcacgttatgcttag

SEQ ID NO: 67736 - DNA, 1062 bp, Acinetobacter baumannii
atgaaaacccttaaattacgtataaaagacaaacattgcaaggtgttagaccaactagcatcagaagtgaacttcgtctggaattatgtcaatgatttagggtttaggcatttgaagcggaaaggtgaatttctctctgcttttgatattgccaaatatacgaaaggcgcaaccaaagaatgtaatttacatagtcaaaccattcaggctgtaactgaagaattagtcacccgaagaaagcaatttaaaaaagcaaagctgaaatggcgtgtcagcaataaaaaatcagcaaggcgctctttgggatgggttccctttaaaaaggtggctatcaaatatgccaatggatatgtccagtatggaaaacaccaatttaagctttgggatagctacggtttaagcaaatacacggtaaaaacaggttcatttgtagaggatagccgtgggcgttggtatgtatgtcttgttgttgaatcgcctaagcaagataaatcgacagcaaccaaagcgattggtattgatctaggcttaaaagatatcgccacctgttctgatggcactgtaatttcaaatccaaaattctatcgaaaatatgagcagaaattaggtattgctcagagagccaggaataagaagcgtgttcgtgcattacacgccaagattgcaaatagtcgaaaagatcatttgcataaagcaagcaccaagcttgtgaatgaaaatgcattgattattgtaggtgacttgagtgctaaaaaattagtaaaaaccaaaatggcaaaatctgttttggatacaggattttcggcactaaaaacaatgctcaagtataaatgcgagaacgcaggcatattgtttgaagaagtccaagaagcctataccacccaaatctgttcgtgctgcggtgagatcacctcaagtagtccgaaaggtaggacagatcttggaataagagaatgggagtgcatgagctgtggtacagctcatgatcgagatataaactcagctctaaacattcttgcgcttgggcataagcgtctagctgtaggaatcaccctcttttaa

SEQ ID NO: 67737 - DNA, 840 bp, Acinetobacter baumannii
atgaatgatactctcagaaacttgaaagttggtattattggaacatctggtacgggttcaattgttactgaatgccttgcaaggctaggtattggcaatattgttttaattgatgatgataaaattgaacacaaaaatcttaatcgaatactgaactcaacacttgaggatgcgaatactcatcgattcaaagttgatatgttatcagatgctatctcaaaatatagaccagagattaatattctcccaattagaaaaaaagtaggcactaaagaggctatccttcaacttgcctgttgcgatattttaataagttgtgtggatactcttgcaacgagaatgtacgcagatttaatttctgaatatttccttattcctctatttgatattggtgtcacaattcctacaggcatacaaaatggtcatccctacataacagaagtatgtgctcggctagattatattcaaccacaaaaaagttctttaagagatagaaaggtctatgattcaatttctttaagtaatgaggaattaaaagttactgcaccagacatatatcaacagagattacgtgaaggatatataaaaggtatacatgatgaagcaccctctgttatttcattgaatatgtttgtatcctctctatgcataaatgaaatattggcaagagtatttccatttcgtcatgaaccaaattgtaattatgctcgaacacttatttgtctcggtgcaaatgaaacagattatacaaaggaagacgaattcttacggagtgaaaaattaaatcttggtaaaggacttacttttcctcttttagacttacttagtttgggggattaa

SEQ ID NO: 67738 - DNA, 765 bp, Acinetobacter baumannii
atggctcaattaaaagttgtgttttttgctttaagaaatgttttctttgatgatagaaaaaatcctaaaagatttgaactaagcttgactgaaagattggtgaaattgatacaattcctaggtgaaagagatataaaagttatttttcatacaaatgatctttggtatatgggagaggagaaaaaaccattaaatatttttttagaagaaatttcaggttataaaattggttattataattcagagcactacccattaatgcctcgtaaaccactaaaaggttctatcccctacattttggaacaagaagggttagagcttaatgaggcaatatatatttgtggcaatgatgatgactggcaagcttgtataaatgcaaaggttttgtgtattaaagcaaattggataaaagctagttctgaaataaagtatggtattgcgtttgatgatatgactactttagctcgttttattgatatattttgtattaaagcaaataaagaagatttatatttttatcaagatgctcgattaacttattatactttatccccattttcgacattgaaacctgctcttaagttatattcagaatctgcaaaaagtactgctaaacagttaggtagtaaaattgaaccaagtttttggttgatgcttttaatttctaaaatgtatttttcgggaatatataaaaacttagatgcaattgtggtatttccaggtcatcagataggatctgggaatgcagtgatgaatgatgattga

SEQ ID NO: 67739 - DNA, 1005 bp, Acinetobacter baumannii
atgagtaatgaatttcatacattagatcataaaatatttgctgcactcatccagattaaaggaattggctatcaaacactttataactttatgcaaagtggaaaaaagcttcaatcattacttaaaactaaaaatcatagtgaatttaacttaatccttggacgagtcatagaatatcctgatctctttattaatgattggcaggcatttcttaaaaacttggttgtgagtggagaaaaatatctagaaatacttgcacagaacgatattaaattattgctcaaaagtaataaaatgtttcctaaacttcctatagatatggatttacctcttttttggttatttgttcaagggaatctatctaacctgtcaaataattttgcattgacattagtaggttctcgagaaatgagtccgattggcaattttttggttgaatctttcttatttggtattgtaaatgttaaagaatcaatagttactattagtggcttagcaaacggtatagatcaattagtacatgatttatcaatttttttaggtattccaacaattgcagtcttaggtaatggacattttcataattatcctgaaaattcaaaaggtttaagacaacgtattttacagacaggaggaacaattatttcagaatattttcctgaaactaaaccttctaataaatcttttgtgcatcgtaatcgtattcaagcagctttagctgatgtagtaatacctatggaatggaaaagaaaaagcggcacagcacatactataaggtttgctaatgcaatgagaaaaaaaattgtgttagtggaaactccagcctgccaaaaatatagtacagaacagcatttagcgaatgcagaagctttaaaaaaatattctgcacaactttatataatgcctatagaaattcttaaattaattgaaacattaaaattgaatattaaagaaaatattggtaataaaaataatatagttagacaaatggatttaggattttaa

SEQ ID NO: 67740 - DNA, 1221 bp, Acinetobacter baumannii
atgaaaaatatcaaaacaataaactctataacacattcaatattactgatgggagcagtgatctcttctttgggaatgatcggtataagctcagtttatgcacaagagcaagtcgaccctgcatataagcccggtaaccctatttatgataaatgggatagattttataaaattgaacagtctcaaccgcaagaagcagaaaaaatattagttgagcttagtaaactgacaccaaccgatattaaagtctggaaaagtcttacttatttacagattcggcttgaaaaaaggaaagaagctttacaaagcttaaggcaagcaagaaatttagctcctcaagatgacaccttaaaattacaagaagcttatttgctgaatcagcagaaaaaagatcgtgaagcattggttttatttaaagagttaagttcctcttcagaccctgaaattgctgctaaagcaactcaggcagttaaaaatttaagtgggggagaagttaaaccatattttaaagatatttattttgcaccgtcttatgagtcacgttatgacgatgttatttttcctttaaaaatgaggtatggcaaaaacatcgataacgggcgagcccaagtatatgcctttcttaatttaaaccgcgatactcaatcacaaggtggggtccgacctgaaattattgatgaaaatgcagccactttagggttaggggcaaattatcaaccgtggacttccattcctgtgcgagcctatgtcgaagttggtggaagttatgacttgattgatagaaatagaaagcgatttcgtgagagtgttgtgggcggtgtaacgggttatcaagaatggtattcacaatcaaactgcgatcattcactttgtttagataattattttactgacttatacggcaatgtcgcgacttattcgagagaggactataacgttattggggacttacgcttacgcacaggtttaaatctctataagggtgagagtgggactgtgcaggcttatgtgaaattgcatggcttagcggatagcgaagatgaatattacaataatttatttgaatatggtccaggcatttcatggcagccttttaattatcaaccgataaaactacgggttgaacgtctatatggcaattattttaaagacgtaccggttaatacaaaagatcattacaacaatactcgtgtagaacttgttttttataaggatttctaa

SEQ ID NO: 67741 - DNA, 561 bp, Acinetobacter baumannii
atgattgattttgtttttgagttagcaagttgtcggcataaagatacttacctcccattttatcctgaacatatcaggggatacactgaagacgaggtggatcaaattgcagaaatttataatttagacatccatggacaatttagagagtttttattacagatgggaagatgttctggcgggttattgtggggatatacagtttccatgtatagccctacatggaaagttgaagaatataaatttcaacaagaaaagataatggaggatgagttaagtgctccaacaaagggtatgattgatgcaattcaaaataaattcttttccttaacgatggaaaatgaaggatgttattttgcttatttggtgactgctagacaggatgataacgtttgggcatttgatgatggaaaaacagatcgtgattttacggatgtcggttgtacactcttagagtacttaaaatggttggttgcatctgaaactaaacaagctcgtttttacgaaagaaattcaacgtttgagaaagataaaaaatatattacaggcaaattattgtag

SEQ ID NO: 67742 - DNA, 129 bp, Acinetobacter baumannii
atgacccaagtacaactgcaacaattacaaaaacaactttggaatattgccaatactttgcgcggcaccatgggcgccgatgaattccgtgattacatactgggctttattttctttagggtgtgttga

SEQ ID NO: 67743 - DNA, 507 bp, Acinetobacter baumannii
atgaatgtacaaaaaggttttacattaatcgaactcatgatcgtggttgccattattggtattttggcagcaattgcgattccacagtatcagaattatattgctcgttcacaggcatctgaagcactgaacttattaggtggattaaaaactcctttaattgatatttcaggttctgctggacttacaacagcttgtagtacagccgatgcaaaagatggcgatccaacagccactcctccagtagcaccaaccccagcaggtgctttaaacaagagtaatggttatactctaagcggtaaatatgttgcatctatcacagctactcctactggtaccacttcttgtaaattaacagctacatttaaacctgtcggatctggtgtgaatgataaacttggtggtcaaactgtatcatttacttatactgtagcaaatggtgattggtcttgtacatctagccttccagattctgttcgtccatctagctgtgcaagtggtacttaa

SEQ ID NO: 67744 - DNA, 933 bp, Acinetobacter baumannii
atgagcaatagagtctcgacgccattccccatatacaatgacacagatggaaccccgctagatgcggggtttatttttatcggtcaaaaaggaaagaacccaattgcatcgccaatagccatattttatgacgcagcattaacgatgcctgctgagaatccactcagaactagaaatggttatgtagtgaaaaatggggcaccacgcgaagtatttacagccgatccaatcgtttcaatccttgttcagaacaaacaaaaaattgatatctggaatgctgcttttatcaatcttaatcctggtattactcctgacgcagttgtagatctggttacaggtgattcccaagctgacatcaacgcaacgattctcaagaagggtgaaaaccttgatgacttgcctaacaaggacgaagcccgaacgaatctagaagtttattcaaaggacgaggtggacgagaagtttaccaacaaagtgaaagatgcttctgaaacagagaaggggattatccgagtcgccacttctgcagaagcaaaagctggcgaactagacaatgtggcaatcactcctaaaaagatgcctgaggcagttgctaaagctttaggtgcaactggtgatgcacctgtctttggtgctcgtgcttttggagtttttggtggggatggcaccaagattggtggcgggaactttgagagcgtaacgcgtgtaagtgttggcttgtatgaggtcacactcaccaaagcattacccgataacaaatatggcgttgtagccaactgtgcaatttctggcggaggagatgctagatctgccaatgaagatgcagactttgctgataaatcaacaaccaaattccgaatcgtttgccacttcggcggtgataacacccaaggccgttttgaccccgttcgcgtgaacttccacatattttaa

SEQ ID NO: 67745 - DNA, 2505 bp, Acinetobacter baumannii
atggcaacaagagaaaatttcgaaaagctactaaatgcaccaaatgtgcaaaaaatgcttaacttgattgctagtgcagaaggtgtaaagcatggttataacaccctctttggaaatgaacgtcttagtgatttatcttggcatccaggcattaaaaaaggatttacccaaactgatgggaagaaaaatgccaccactgctgcaggtcgataccaattccttgaagatacatggaatggagtagcaaaacagcttggattgaaagatttctcacccaaaaatcaggatatcgccgcagtagcattacttgcacaaaacggagcattgccatcggttttgaagggtgatttcaaaacagctattcaaaaatctggtggcacatgggcttctttgccatcttctccttatgcacaaccaaaaaagtcttggagtgatttaggaatagccaatcctgcacgagatcaatatcaatcacaagcttcaaaaatcgttgctgcatacaagcaaaaacaaaaagaacaagaagcaaaagcacagccaccagtagacacaggccgtgctcaacgaattgtagaagcataccaaaaggcacaaatgaacaatgctgctaatcaaccacaaggacttccagatttcgatgcaaatggtgtgattgcatatgatcaaccacaagcatcgcctcaagctcctgaaccatctttagctgacaaagctctaggtttaggcgaaactgctttatctgctgctacaggtgcaacaggtggtacgcttggaatgattggtggaacaattggtcaggcaggccgtgaaatcctatctggtaattttggtacaccagaagcagcacaacgtatttcacaaaatgccgcagagagtgcggcagatttaacctacgccccaagaacacaaacaggtcaagaatatactcaagctttaggtgaaatctctgaaccactggtggctttaactcccgctttaagtgaattggctttagttggtcaagctgcacgtggcgttgcgccaattgcacaaggtcaagccattcgcacagcgcaagcagttgcaccagtggtagagcgcgcagggcaagcagtacagagaccaattcaagcaacagcaaatgctgtgcgttcaggcgctcagcgtgttggcgaaatggttggtatgagaacaccagaggtagaaggcccagcgtctgcaaatatgggtgcggctcaagttgatcaagctaccattcgacaagctatgtcgcaagaattgccttatccagttcaactgacagaagggcaaatgacacgtgatcctgcacagctcaagtttgaagtagagacttctaaagatgctgaattgggtgctccacttcgacaacgccaagaagagcagcatcaggtaatgcaacagaatatcgatgcatttattgatatgactggtgctcaagctacaaatatgcgtgaaactggtatcgcagttgataaagctcttcaaaagcaattacaagcagataagaatcgtgtgcgtgttgcttatgcaaaggctgacaagtccgaagaggcgcagactcctgtagatttaacccaaccagtaagagttggtgaaaatgaagcaatgtctgtaattgactacttgaactcacagccagatttgccaactactccaattctaaccagtgctaaacgcacagcagaatctttaggtattgctatacgtggtgagaatgggcagttaattccaaacaatccaacgattaaacaaatggagaaatggcgccaagagattaatgccaacacaaatcaggaagcgccaaatatccggcaggctgcaattcttaaagatatgattgatcaacatgtcgagccagttgtaggcaatctgtataaagcggcacggaatgaacgtaagcgcatggctgaccattgggaaaatcgcactattattcgtgacctaactactaataaagctggaactgaggaccgtcgtgttgcacttgaggatatacaaaagcgaatcattcatgatggttcactagatgatcttcgtgttgctaaacgcgctctcctaacagcaggggaagaaggtaagcaagcatggcgtgatatccaagggcagacgcttcaggaaattaagaatgctgctactgctggagttgcgccagacggacagggcaatcaaatgattagtgctgctgccttaaataaggctattaagcgcttagatgatgctggcaaattagattacatctttggccctcaaggtgcagagaaacttcgtgcaattaatgaaatctctaaaactttgttcacaactcctacatcagctgcaattaaccatagcaatacggctgcaacactagctgctgcaatggacattgcaatgtctggcttgtctggattccctgcaccagtggctacagcattgcgacttgcgactaaacacattaaagacaataaggttagagcacgtgtaactcaggctcttaatccacggagtacgaagaatgagcaatag

SEQ ID NO: 67746 - DNA, 405 bp, Acinetobacter baumannii
atgaaaatatttatctttattgcatctgtattgttttcaagttgggcattccctgctgataactggcttcaaattactaataccaccaaatcaatattttcttttgatcctgacaacattgataatgttacatatcaaggaaagtcctatataaaaacatggattagagaggaagagcttaatcaagctaaagggcaggaaggcaaattaaatggcaataaaacaatgattttatattattttgattgtgccaataagcaactagctattaaatctgccacaaaatataggaatggggaaccagtaaagggaaactcaatcaatttaaattaccttaagtttaatgatgttattccaggcacagttgccaatgcttttttaactcatagttgtgcaggtaggtga

SEQ ID NO: 67747 - DNA, 396 bp, Acinetobacter baumannii
atgaataaaattcttactagttttttattatttggtgtggtcttttctactgctacaacatatgcagatcaatgcatcccaaagaagcatgcaaatgtcccaaatattactgaaaaatcttatcaacaagctcgaaagctgcttattcaaaataaatggcaacctttaagaacattaagcaacaattcgactcaagaagatcttggatatggaaatggctggagattctggaaaaaaggatttaaggaggttgaaagttgtgcaggaacaggtttagctccttgtattttcaattttactgatgtgtatggaaataaccttaaagtctatacagaaggtgaggaaagcgcccagtataaagctcatgtctcaaattatgaattccattgtaaataa

SEQ ID NO: 67748 - DNA, 1314 bp, Acinetobacter baumannii
atggctattggacctattgactatagattagatgttgttgaccctttcaatcaagcaatgcaagggtaccaactaggaatgcaagctacggcaactaatgcagcacttcaggcacagaaggctgaagaagagcgaagaaagcaagcttacttgcagcagcaagtccgtaatgaagacttatataagttttcattaattcccaacaaaacagcagatgattacgcgagcattatctctcgctatcctgacctagcagaaccttatcaaaaagcttggggtatcttggatgcagggcaacaacagcaaactttaaatacagcctctcaggtctatgcagctttacggtcacaacaacctcaagtagcaaaagatattctgaatgagcaaatccaagcttatgacaattctggtaagaagtctgaatccaaccaattaaaaatggttcttggattaattgataaatcacctgaagcagcagcttcatcagttggtatgctcatgtcttctgtgagccctgataagtttaaagatattctttcaactcttggtggtgaacaacgtgccaatgaaatgcagccttatcagataggtcaaatttctgctaacactgcaaaaacagtagctgaaacaaatgacattccattagcagcagaagaccgccgaactggtgtagagaatcaaggcaaaaagattgaatatgacaatcaaaacttttatgacaagttaagccaagatcaacagcagttctatgatagtcttgataaaacagaaagaattgaagtagcgaaattaagagctgctaaagcagagtctccaatccaaagggtagaacgccttgaaaaagttgaaaattatgctaatgctgcgaaacaggcagctgatgcatctaacttagctgcaaaactaacacttcaagccaaagagaacagtggtgcttattgggatcgtcttgtgcgtcaagtgcctggaacatcagaaaacacttttgcaaaagatattgaaactttaaagtctcaagtctttcttgctcaagtagaaaagatgcgtggattaggtgctttaactgataaagagggtgatgctattcgatcatctattgcttcccttgatatcaatcagggtcccaaagcagttcagaaaaacctttccaaaattgctcaacaaatgtcagcagcagctaagagtgcaaatcgaaaggctcagctctatgcaaccaaaggagatgggtactctccagctgttatgagtgctgcaaaaacccttggaatttctcccgcagaagctcagaagtttgttaacgagaatggattgtaa

SEQ ID NO: 67749 - DNA, 675 bp, Acinetobacter baumannii
atgccagtaggtgcagtaattgcaggtggtgcgggactgattggcagtattgcaagtagtcgagcacaagcaaaagccgctgacagagcatcacaagctcaagaaaacgcagctatggcggggattgatgaaacaagacgtcaatttgatgccctgcaagaattaatgaagccgtttgtgaatgctggcacaggtgctttatctggtcagcaagatttacttggtttgaatggggctgagaagcaacaagcagcaatcgatgcaattaacaatagccaagccatgcagacctatatgcagcaaggtgaaaacgctattttgcagaatgcctcagctacaggtggcttacgtggtggtaatacacaagccgctttatctgaatttcggccacagttgttaaatcaattaattaaccaacagtatgcaaacctagggggcttaacagctttgggtcaaaacgctgctgctggtgttggtaatgcaggtatgcaaacggctggaaatattagcaatcttttacagcaatcaggtgccgcccaagctgggaattatttagctcaagggcaagcaaatgcaaatatgtatggcggtatagctaaaggtattggtggtttgggttccgcctatgactcaatgggtgggttagctggatttaagaaatattatggattttaa

SEQ ID NO: 67750 - DNA, 456 bp, Acinetobacter baumannii
atgcacctagttaaacttgatgatttggaagaaattaaccggatcatcttaaatgaacatgttcaaaaagatatttgtgacgacccaacgcaaaatgagaaagttcagaatctaggcccacatgagtgggttggtgttgttgaaaacgataccactcaaggacttttcttactgatcaaacacaattccatcgctattgagattcatacatgtttattaccaggcctcagaggttctaaagctatcgaggctggcaagttaattttgaatcttatctttgaaaaccatcaaaaagtgatttcatggattcctgaaaacaacaggaaggctaagctctttgcccaaatgctaggttttcaggtggaaggtattaatagagcttcatttcttaaagatgggaaacttcttgatcaatttcttgttgggctaactaaaggagaatactcatgccagtag

SEQ ID NO: 67751 - DNA, 333 bp, Acinetobacter baumannii
atggctattaaggcaaaagaactaattcccgcaaaatatgcagagaatactcaaacgacacagtttatcgctcaggcgccaacagcaattgacaaattcacaattacaaacacttcagcaagcgtagttaagtttagtgcaaatctagttctagctagttctactgctggaacatcaaaccttgtaattaaagaaaaaacggttgcagcgggtgatacatatatctgcccagagcttgtaggccataacctagaggtaggatcatcaattagcacattagtcgatacggctgactcgcttgtaattcgcgcatctggacgtgaaataacatga

SEQ ID NO: 67752 - DNA, 372 bp, Acinetobacter baumannii
atggctttatcagatccgaaaacgccactacgctcggatttagagcgcatgtgtggtggtaatcagcgtttagtaaaagcatttgaaaagttattccgtgtatcgccttcaattgcagatggtgatgcagaagctattcaaggcgcacaaataacagcagacgcagctttaagtaatgcatttctagccatatcgcttattgaggctgtggctgatctggctgaaatggttgctacagaacccaaacatgaatgcttagccaatctaaataacaatgattatttaccaagacaagaattcatcgaatcagatgtactcaatcctgtttgccagtcgctcgagtacgtaaatttcaatttagaggttacttaa

SEQ ID NO: 67753 - DNA, 1389 bp, Acinetobacter baumannii
atgcaaatccctgtaatgaatggcatttacacagatcaaaacgcagatttccgaacttcttatccacttaatttaatacctgtacctaaggagaatggcatttctcagggttatttgcgccctgctgaggggattgatcagttcgctgacttgcctggtattgaccgtggtggcattgagtggaatggggtatgttatcgagtttgtggcaataagctcgtcaaagtaaatgcagatgcaataattacagaaataggtgatgttcgtggatctggatactgtaattttgactattcttttgattacttggctatcaattcaggtacatatctttacttgtataatggcactgaattaaagcgcgtcactgatgaagatttgcgtgacgtgttagatgttatttgggttgatggctacttcatgactactgatggcgaatttatcgtcatcactgaattaaatgacccatttgcagttagtacattgaaatatggttcatcagaagttgatccagacccaattgttgccttaattaaacttcgtaatgaggtctatgttcttaaccgctattcaattgaagtctttgacaacgttggtggggagaactttccatttagtcgtattgatggagctatggcaacgcgtggtgcattaggcactcacacttgctgtaagtttgtagatgctattgcttttcttggtagtgctaagaacgagcccgttgctttatggttatctgccaatggttctgctcagaagatttcaactcgtgagattgaacaaatcattcatcaatatgatgaaaagactttatcaaaatgcttgcttgagtctcgctcagtagagggccataactggctttatttacatttaccaaatcaaacccttgtttatgatgcatctgcttctgaggcagtaggtcagccgatctggtttaccttatcgtctggcaagcaatacaacgctcaaaaccatgtctggtgctatggcaaatggttagtaggtcatccaacacttccaaagcttggtgtattgaataatcaaaagggtgagcattggggcttggaagtagattgggagttcagcacaacgattctctacaacgagtctcgcggtgcaatcttccatcaaattgagcttgtggctttaactggtcgaattgaactagataaaagcccaactattcaaactcaatattccttagatggtgtgatctggtcaaatcccaagatgattaaagcaggtcgagtgggtgagcgaaacaaacgtctcgtttggttccagcagggctatatgaatgaatggcgcattcaaaagttcagaggaacttcaaatgcaagactttcaatttcacgcttagaggctcagttagagccattggtggtgtaa

SEQ ID NO: 67754 - DNA, 459 bp, Acinetobacter baumannii
atgagtagacgattaaatacaacagatagaatcgaagctggtgatcagtttgttttgtataaggctaattgttctgattttcgcgggctgcctcaagacattctgctggactggatcaaagaaaatcaaccagaaccgcctgaatctggaaccagtccaattgtccagcactataacccaaatagcgattttacattagatgttgagaatcatactgaaggtacatatctgctattaaatccgccggcaggaattgcaaatggcacaattaagttacctgtttcagcagaagttgtagataagcaaatggtgatcttcacctgttcacaacagatcaccaatttcacggttaatggcaatggagcggctgttattggtgcgccaaatgcaatctcggcaactgcattctttagccttcagtacgacaaattatcaggcacttggtaccgcagggggtag

SEQ ID NO: 67755 - DNA, 480 bp, Acinetobacter baumannii
atgtcatggacaaagcggcaaatcattgagcaagcttatgaagaactcggtctagctgctatgttctatgatttgcaaccagaacagatcgaaagcgctcgaagaaaaatggataccatggttgcaggttggtctactaaaaacattcaggtcggctacccattaccaagtgaagccaatagcagtgatgtggatcaagaaaccaatgttccagattatgcagttgaagccctttacctgaacttagcaattaagattgctccttcacatggtaaagcagttatgccagagaccaaaattgctgcaaaggctgcatttaacactgtgcttcagaaggctgtcgcaaatcctccgaagatgaaatttagctgtgagctaccaagtggtgcaggcaataagtcatgtgatccatttatccaacaaactcaagacaatgatgtcttaacacctgatcaaagtgtggggttctttaatgagtag

SEQ ID NO: 67756 - DNA, 879 bp, Acinetobacter baumannii
atgtctgaacaagatctagagcaacaagacgaacttcaagatgacaaaaatcttgatattaaaacaccagatgatgatgaagatcgaggtgatccagaatcaaatgatgaagatactcaagaagaaggtgaagagttcgacattgttgtaggtgatgaaaagccagaagaacaggaagaagatgactttcatggtaagccagcaccaaagtgggtaaaagacctccgcaaagagaagaaagaatctgatcgtcgtatcaaggagcttgaagccaagcttaatgagcagaacaaaccagaagctattgagttaggtgagaagcctactctagaaagcgttggttatgatgcagatgaattcgaaaagcaacttgttgagtggactgcaaagaaagcccagttcgaacaacaagaagcagctaagcgtgcagagcaggaaaaggctcagaaggtttggcaagacaagctcaatagctatgaaaccaaaaagactgcaattaaatcaaaagttcgtgactttgatgaggccgaagaatttgcacgagatgtgctaaatcagactcaacaaggcattttgattcacgcagcagaaaaacctgaacttcttatctatcacctaggtaaaaaccctcaaaaagcaaaagaattggcagcacttactgacccgattcagttcgcttttgcagcagcaaaaattgacgctcagatcaaggttacgactcgtaagccatctacaagccctgaaagaaaaccaagtgggtcggctccgttgagtggcacggtggatacaacgcttgcaaagttgcgcgctgaagcagaaagaacaggcgattacaccgaagtaaataaatacaagcgaaagcttaaacaaaatcaataa

SEQ ID NO: 67757 - DNA, 2055 bp, Acinetobacter baumannii
gtgactaaaaaagaacaacttgcgtccatacacgcccgtgcaaaaatccaattcgacaaaattcaaagtgctgtgcgtgatgaacgccaacagtgtttagaggaccgtcgtttttattcaatcgctggggcgcaatgggaaggcaagctaggcgagcaattcgcaaataagccgaagtttgaagtcaataaaatacacttggctgtcattcgaattattaatgaatatcgaaataaccgaatcacagtagattttgtttctaaagacggttcacagaatgatgagctagcagatacctgtgatggcttgtaccgagcagatgagcaggattctggtgcagaagaagcatacgataatgcttttgaagaggcagtaggtggtggtttcggtgctttccgcttacgtgcttgcgaagaggatgaagaagacgaagaaaatgaacgtcaacgcatcaagattgaacctatttttgatgctgactcatgcgtgttctttgacttggatgctaagcgccaagataaagcagatgctaacttctgttttgttctgacttcaatgacgcatgatgcctacaaagaagaatatgacgatgatcctgcaagttggaacaaggacatttctaattctgagtttgattggtgcacgccagatattgtttatgtagctgaatactacgttgttgagaaggtcaaagagaaacaacacatctttgtgctaatcgatggaactgaacagcgctacatggctgatgagcttgagaatgatccttctattcaagagcgattggatgctacaggtgcacaagagttaagaattaagactcttgagcgtcgtaaagtgcgaaagtacatgatgagcggctctcagattcttgaggattgcggatacattgcaggccgttatatcccaattgttcctgtctatggcaagcgttggtttgtagacaacgtagagcgttgtatgggccatgtacggctctgtaaagatgttcagcgtcttcaaaatatgcaatatagccgcttgggtgaaatcgcagctttgtcgccaattgaaaagccaattctatttggggaacaggttgctggctatgagcacatgtgggctgaagacaacataaagaacaacccatttttgcttatcaatccattaactgatgcaaacggaaatgtgattgcccaagggccaatgtcttatacgaagcctccacaagtaccaccttcattagcggccttacttcagctaactagttcggacattagagagcttctaggcaaccaagagcaaggtgaaaagatcaacgctaatgtgagtgcagaggcgattgatttagttcaaaaccaacttggcatgcagtcctacatctacattgataacttcgcgaaggctatcaagcgttgtggcgccatttggctctcaatggccaaagagctttatgttgaagaaggtcgtcgtatgaagacgattggaaagcaagatgaggtggatagtgcagaactttctagaccagtaattggtgaaagtggcattgaatatgaaaacgacttaacaaaagcatcattcgatgttggtgtagatgtcggcccgacttcatcaagcaagaagtctgcaattgttcgtcaattacaagccttacttccttatacatctgatcagcaagacatgaagattctgcttgcaatgatctacatgaacatggaaggcgaaggcatcaaagatttccgcaattactaccgcaaatggttagttcaaatcggtgttgtagagcctactgaagaagaagaacaggaattgattgctgcagcgcagaatcaacagcctgatcctcaagcgcagttagcagaagcattaacgcaagagtcgctttctaaagccgagaaggctagagcagacacgttcttgactgctgccaaaaccgaacaaaccaaagctgacacagcaaaaactatcgcatcaatggaaaacgagcagagagattctgttgttaatgctattgaaaagattaatcaaaacatggcgtccgctcagcctatgagtgagggagtagcaaatgtctga

SEQ ID NO: 67758 - DNA, 372 bp, Acinetobacter baumannii
atggataagaactcaaaagattggaaagaaccgaagccgcttaagtggcgtcataaagattgtggatgtgaattgtataagagctgggcctacaagcgaaattacatggcagtcgcttacgatattgatggagatagatataaatattccatttatgaagtcagcgataaagaaaatccaaaactagtatgtcatttcgaagacttcacattcttatacgaaattgaagatcgttgcgagcaattacttaaagctttcgcaaaagggaaaacacccggtttcaatgtgcatgaaaagaaattattagaagaagggacaggaaagtttcacccagagaacactaactttatcccatttctagaaaaggcttag

SEQ ID NO: 67759 - DNA, 162 bp, Acinetobacter baumannii
atgaaatacctaattccactactcatcgttttattggtcgtggccttcctttgggatcgccacttcacagaattacgccttgagaagtgcgctaaaaacaatgctcaagttgtcatggtttatggcaaggctaggtcttgtccagaaggagccaaccaatga

SEQ ID NO: 67760 - DNA, 333 bp, Acinetobacter baumannii
atgagtggatttgaagagtattacaaaaacagcgaatggttcggaacgtaccagtcagatttaatgatggaagaagcttttgaggctggtcagcagtcacagcaagcgaaagtggaggagctgcaaaagcgggtggacaaagcaattagattgctcgtggaagcagaattatatcaatcagagccaaacattgatttagcggttaaagcgctcaagggggaatgcaaacatgaatcagatggcactaatcgtttaagtctcccacctaaaactaaatgcaagaagcgtggtgaattctatagcgctcatgagttaaaggaaggtgaccaatga

SEQ ID NO: 67761 - DNA, 774 bp, Acinetobacter baumannii
atgaattgggcttggaaagcacaagtcaatacatcagcacaaagattggttcttttgtcgttggcagatcgcgctggtgaaaataatacatgcttcccgagcaatgcaagacttgctcaagataccgttttgaatattaaaactgttcaaaaagtaattggtcagcttatggagttaggtctagttaaagataccggtaaaagaacaggcgcaacaaatcaagttagagttttgcagcttgttggtgtcaatcaaagagaagaagcccaaaaacgggctagttcgaacaataccaaaattggtgcagttaaagatgaccaaaaacgggattcttctgatggggtaactaacccaattttggatgataacgaacccaattttgggataggtaacgatcccaaaattgggatagggaatctcccattgaatcttttaatgaacctctcttgcgaacacgactggattccagaagaaaaaactttggtagaaattttaaaaatgaagggtcagcaaagaaatctaaaattgatttttggattacctgattttgaatttcaactcggtgcattcaatgctcactacgagcacaaagaacaaaccgaatcttcaaaacactacgcattcgcaaactggattacagacaagtttgagcaacacatcaaacgcaaccctgattacactgaaatccaaaaccatcaagacaacatcccagttgaacaaccagcaacacagttcaaaggtgttgctaagaaatttaaggggatggaccaatga

SEQ ID NO: 67762 - DNA, 174 bp, Acinetobacter baumannii
atggctgtcaaaaaggcacaaatgatgccgacttttgcttatgaaggggttgaccgtaagggcgtaaaaatcaaaggagaacttccggctaaaaacatggctttagccaaagtaaccttacgcaaacaaggggtgacctctttacaagaagtcaaccgtgtcaccagtgaataa

SEQ ID NO: 67763 - DNA, 174 bp, Acinetobacter baumannii; identical to SEQ ID NO: 67762

SEQ ID NO: 67764 - DNA, 330 bp, Acinetobacter baumannii
ttgtgcaacaaagccgaagtgatttataaactagatccaaagccgggattaggcctagaaattgccaaatatgtacaacccaaacatttaggcattattgcctaccttgctctttcttgcgataacttaggtgaagccttaattcgttaccatgactttcaccgtctgatttatgacgggagcccattagtggttgagctacaagggagatatggttctattcgttgggaggcaccagagttacaccctacccagcttaccgatgaaatcgcgattgccttggtgattcaattcttacgtctttttatgtctcatgaagatgtgcagtaa

SEQ ID NO: 67765 - DNA, 1191 bp, Acinetobacter baumannii
atggctttagttatgctttcatcattacaagttaaaaactttcgatctttacgaaatgtagaaattcctagacttggcttaatcaatctgattgttggtaacaataattcaggtaaaagctccttaattgaatctttattgatcttcgcgaacaatgcagatgaagaaattttaaacacacttgcttttgcgcacggtgaaccaactctttcggaccgtgatgaagaagagctttctactccatttcagccgttcgaaagttttttctcaaataggatgttccctaaagaagatggagtaaaaattgttatcggagagttagatagttccaacttccttacaattgaacatacctttgaaaaagaagttcttattaaatatgaagatgatgaaggtaataatttaaggaaaattaaacgtgatattatttcaaaattcgaaattgataatatccttgaagattcagatctaaatttacaaattaatagtattttaaaaattgagaataaaagctttactactcgtatttcattagaacccgatagacgcagaaattcaattattagcagaagtttggatgctaaattaaatattcctcacagttatattcctacatcatttttagatcctgatgatttagccttagattgggataaattagtcttaactccatatcaagattatattattgaagcattacaaattatagaacctaatctagaaaatattagttttattaaatcagttaattatcgtagaaatagatatagaagttcacaaagaacacctattgttaaattaaaggaccacagtcaaccatttcctttaagtagtatgggtgatggaatattaagaatattacaattagtcctgaagcttcatagtgctagagggggcattttattaattgatgaatttgataatggtttacatcatagtgttcaagaaaaagtatggcaactcgtattcaccttagcgaaacaacttaaaattcaggtttttgcaacaacccatagttctgattgcgttaaggcattttcgaaagtatcaaaagatagaacggatatcgaaggtattttaatacaaattggaaaaagtgcgcgaaaaagtaattttggagaagttatagccaatattctagatgaaaatcaattagccacatttattaaatcagattttgaagtacgatga

SEQ ID NO: 67766 - DNA, 474 bp, Acinetobacter baumannii
atgaatattaactgggagcttactatagcggggggctcggctatttttgcaggtatttctatcctgttttcggtatatagcttttttgcctttaaaaagcttaataaaagagtccttgaacaacagattgaaattaatagcttagtaattattaaagaaaatgattattatcaagagcaaaataaagctgaaattagggcatataaaacagggtcaaaaagtaattatcaacttattgtgaccaacagtggtaaagctaccgctgaaaatgtatgtttggaaattattgacaaaggcttacgtggaaatttctgggatattgatgaaatttttcccatgaatattttatctgggcattctgggaaagtacattattcacgaggtatggacttcccaagtaagtttgcaattcgagttacttgggatgataagtttaaaaagggaaatgtaaaagatattgagatagttagttga

SEQ ID NO: 67767 - DNA, 234 bp, Acinetobacter baumannii
atgaaaattaatattccagatcagcagattgccctaacctgtcctaattgtgaaagtaatcttttatctattgatgaaaatgaaatagtgacatgcggtacttgtgatttaaaacttcataaacaggaactaattgatcaaaataatattgtagaaaaaatagatacaaagcaaatagcagaagatgtggctaaggaaatgaaaaaattttttaagagtaagggatggaaataa

SEQ ID NO: 67768 - DNA, 786 bp, Acinetobacter baumannii
atgaattctcaattaaatgaacactatctaaatcatcatgttagcttagataaacagcaatatagagactcctcttctgtactccttaatctagactgcttagcaggactagagttacttaaggatgaatcagttcatttatgcctaacagatccaccatataacttgggaaatttcatgaaaggtcgaaatactggagtatttcgattaagagaaaatcattttgtagctagtggttgggatgatttagcatatgaagattggtatgttcaaatgctagattttcttcaattaacatatgcaaaactagctccaaatggggctgttattatctttatgtctatcatgaaagttgagagcattatagaaattgcgcaaaaagctggtttctattacaaaactactgggatatggcataaaacgaatccaatgcctagaaatatgaacttaaccttcgttaactcaacagaagcttggatttacttcgttaagaaaggtccttcggggacttttaacaataatggcaaattattgcacgattttattgaaactggtcttacaccaaaatctgaaaagaaatttggaaagcatccaactcagaagcctgagaaacttatccaacactttgtagaaattctatcacacccaaatgatttgatcattgatccattcatgggaagtggaacaacagctgttgtatctaaaaaatgtggacgacgtttctttggtacagaattaaattctgaatattttgactcagcttgtaatcgagttaaggatgtatga

SEQ ID NO: 67769 - DNA, 1755 bp, Acinetobacter baumannii
gtgattgaaagtgtatccccaagattaggaataaaatcttctcttcctgagcatttagaagcatttgttacagtatatctaatatggaaaactaataataaacatacagttattgaatactctgaagagtttacagatttagatggcctgaaaaaaataaaatttaaagatactattctgacagcattagacagttttttgaatacatatgccaagtatgattccaaagtgtttgataatagccctctattagcggcacaaattgaacacttacaggtaggcttacttaactgctataaagtagcatatacaactcatttagatatcagcctctcgaattcatgtgaaagatctggtggtaataggtatgacaagaaattagaatatacctctttcatagatttatttgattgctttgtcgaacactccttagatgaatatttagatctatttattttaattttaaataaagataactttgtttctcataaattctttaaacaattttcagggtttattagttttcttgtcgaacaaacgaaatataaattagcagatgacacagaacaagatcggctatataaaaaatttgatggacaaatagactttttcaaaaatggtccttctagaattttaaaatcttttactaagcaaggtttatatgatttatatcctaattcaacgtctctaacgcctatagaattacagaacaaaaaaagccgtattgataatttatttaatatttttagtgtcaattatgatgatgaaagtcttattgaagatgaagaaacggatactggatctagcccaacctcaagtgaaattaaaggctataacaaaatcatttatggtgccccaggtgctggaaaaagtgccacagttagtaaagtagtgggtaaaaactatattcgtacagtttttcatccagaaactcaatattcagactttattggctgtttaaaaccacataaagactctagtggaaacattacttatagtttccgaaaaggtccctttattcagattcttgaaaaagcacttttgaatccacacactcattactttttagtcattgaagagcttaatagagcaaatactgcagctgtgttcggagagatttttcaattattagacagggataaagaagggaaaagtgaatatccaattctgatacaggatgaagatttatttgatgaattaaataatgtacctggtctaaaaaccaatgagtttattttaaatcgccaactgatcatacctaacaacctatcaatcattgcaacgatgaatagtagtgatcaggctgttttcccattggatacagccttcaaacgtcgttggatctttgaatacttaccgataaattttaccgaatgtgcaacaggattaatccctatctatcatgccgacctttcgaacatagaatggaaaactttagcacaggcgataaatacggttttagttcaactaaaagttgtagaagataagcttattgggccatggtttgttaatgatagtgatcttacagaagagactgccaaagatacttttattggtaaaatttgttcatacttatgggatgatgctctcaaatataaaaaccataatgatgaaatatttaagcgtgatattcatagctatggtcaactacatcaaatgtattcaaatggaaagtgtatcttttctgaaaaatttatagaaactcttataagtaaaaaagatgaagataaaacagataagactgaaacagaatga

SEQ ID NO: 67770 - DNA, 1275 bp, Acinetobacter baumannii
atgatggaatatcgatattttgaagacaaaaaaattgtcactctaaaggaaattcctgattttgtaattgataaattaaaggcacttgatggtattgatgttgttaatcagggaatgaaaattacattttgtggagtcattatttttgatggctgcacatactgttttactcctgcaaaatcatttggtaatcacgttaaatcaataggcaacctaataaaagccattcatttttataaaaattcagttgattccagtctattagcatatgatgaagatgaacaaggtagtgttatcgaagagatttctttaacagacatttttgaaatcgttgacctgtattttaatgtagggatactaagatctaaaacgcatagttatagtgaaaaaggtcgaacgaattggtctaaaactgttaatagagaatttcctgtttttactagtgatgatgttccagtatatttggatcttcaaaaatatccgatttctgtctatcaggatgatttaatctcaagtattcactgtgaaattattttagatatttttaaaaaattccattggctagatgacagatttaattttgtatccgaggatcaattagctgagaaaatcttattcaatgagttggatataaatcagaaaatttctttactgaagcaaagattacattcgacttttgtatcacttgaaattagaactttacaattacttattagatatttagaacggattcacgaacttggttcaaataatgttgtgatcggaattcgaaaatttcattatgtttgggagttcttgcttaaaaatatttttcacgatgttgatttaaaaattaattctttattacctatacctcaatatcaattttcaggtcctatagagttaactgaaatctcagctcaaaagggcatgcgtttagatatatttattaaagatgagaatcgttgctgggtcatagatagtaaatactatacggccacaggagcaactgatgctccaggatggtcagatttagttaagcaatttttctatattaaagcgattaaactcatttatcctgagcttaaagaaatcaaaaatatttttatatttcctggtgtcactaacttgatatctaaaattcaaatgacttatcgagatgaatctaaagaagtagaaaagctagtgaaattaacggaagactttgttcctattgaatgcttatatttagatcccaatgatgtaatagaaaaatatttaaaatctgaaaaggtttacatcacggattacatctaa

SEQ ID NO: 67771 - DNA, 663 bp, Acinetobacter baumannii
atggagaaaagtgtgacacaagaaaactctgtcccggtcattggccaacgttttcgtggcttcttacctgttgttgtcgatgttgaaacggcaggttttaatgcccagacagatgcattgctagaaatcgcatgcattccgattgtgtatgatgcgcagggacaatttgtccctggtcctgcatttcatgcacatattaacccttttgaaggggctaacctcgaccgccgttcgctagacttcattggtattgacccattcaacccaatgcgtattgcaatggctgaagatgaaagaactgctttacgtcgcatttttaaatcggtcaatgaagttcgtaaacagcaacattgtactcatgcagtactcgtaggccacaacgcgcattttgaccttggttttttacaagcggccattgctcgctcaggtacaaaaaaccaaaacccgttccatagtttttcagtgatggatacggtcactttaagtgcagtaatgtttggacaaactgtacttgcaaaagcatgtattcaagctggaattgagtttgatggtaaagaagcacactctgctttatacgatactcaaaagactgctgaactgttttgctatattttgaacaaactgtctccttacctccttgacagtttggtggcggcttcttaa

SEQ ID NO: 67772 - DNA, 885 bp, Acinetobacter baumannii
atgaaaattatatttatccatgggatgaatcagcagaattacacagcacatcgtttaaaagagcactggctaaaagtatttaaactgggcttaaaacaattgcactgtagagttaatttaagagatctacatatacatatgccattttatggcgatttaatgacgaagtatcaattatccaatcaacttgatcttaatactttacttccaaaaacttttaattttcatttacccatccatttacatcatcaaccatcaacccccaaggaacatactccttttataccccacctccctctttcacccgatcaaccagcacaaagcttatcagagcgtttatatttaacttcacagttggtgaaagatcgcgttcttaaggaaatggtggttcttttaaataattttccgaaattacatgaaagcttaattcagcaattcttgattgaaacttatatgtacttatctaatcctgattttatgtatgaggttcatcaaagaattttaaaacaaatgcatgatgatgaagattgtattgtagtcgcccactctttgggttctgtaattgcctatcatttattatcagatccttcctatcagttttcagtacagcgttttattaccttagcatcccctctttcttttcgcgtcatacaaagcaaactccccactcccattgaacgtcctaaatgtttaaagggcgactggtataacttttattctaaagatgactttttaaccgcttttcccttaagtgaggcaccttttaattttactcctcccattattaatcaagagatttttacttttgccaaccaacctcatgaaattgtcggctacttacaacatcatgctgtggtaaaaacaattattgagcctttccaataa

SEQ ID NO: 67773 - DNA, 954 bp, Acinetobacter baumannii
atgagccatcgtgatcggcgccacgcgcaggctgccggcgcgcggcatcgctggctcaatcgcctgcaaaccgcgctgttggtgctgaccctgctcgggattgccgccgtcgccggcagcctgctgttgggtgacagcgctctgtggctggcgctggcggccgcggggttcaccctgctgctcgaaccggcggcggcttccgggctgaccctgcggctgtatggcgcacgccctctgcacccgaatgaagcgcccgatctttgggctgtgttgcgcgaactggcggcgcgggccgggttgcctgccgtgccggtaccgcactacgtgcccagcggggtcgtcaacgccttcgccaccggtacgaagcatcacgcggccatcgcgctgaccgacggtctgctgcgtagcctcacgctccgcgagttgaccggcgtgctcggccacgaaatcgcgcatattgcgaacgaggatttgcgtgtcatggggctggccgattccatcagccggctcacccatcttctggccttgttggggcaaatcatgctcctcttcagcctgccggccttactgtggggcacagtcgctatccagtggccggcgctgctgttgctggccgtttcgccgcagctcgcgctgctggcgcaactgggtttgtcgcgggtgcgcgaattcgacgccgaccggctcaccgccgaattgaccggcgacccacagggattggctttggcgctcgccaagatcgagcgggagagtcgcgcctggctgctgcccggatggggcaacccggaaccctcctggttgcgcacgcatccggcgacgccagagcgcatccaacgcttgcgggaattggctgattcgatggcaccgcaaccgcttcattccagcccatttctgccggacatccccttggcgccacgcccaccgcgttggcgcgccagcggtgtctggcgctga

SEQ ID NO: 67774 - DNA, 393 bp, Acinetobacter baumannii
atgcatttaaaaattggtgaactctctaaaaaaacctcatgttcagtattaacaattaggttttatgaaaaggaaggtttaattccggaaccggaaagaacggaaggaaattaccgcctttacgatgtaggctatgttgagcgaattaaatttattttgaattgccgaactttaaatatgagtttgaatgaaattcgtcaattacttacctataaagacaaacctgagaaaaattgttcagatgtgaatgaattaattgacttacatgtcagtgctatcagagaaaatataatcaagcaacaaaagcttattgaacaactatctgatttaagaggtacttgtgatggtttatgtacaattgaccaatgtggagttttaaaaaatctagcttga

SEQ ID NO: 67775 - DNA, 1281 bp, Acinetobacter baumannii
atgagtggttgtggatgtagtaaagaaacaccatgcgaagataagaaatctcaacaagaaaatcatccatcaattgcagaagcaaacaattcaaagaattgtgataatacgcttagctgttgtggtgaagaggaagaaaaaaaatcttcatctccttgctgtaacacttcaaacagttgtgaagataccgctcaatcctgttatggttctgatcccaaagaaaatttaagcactgaagacgttttaaaagattcgcactacatgagtgaatacttagttcccaaaatggattgttctgcggaagaacagatggttcgtatggcgctatcttcaattgatggtgttcaaaaactcatctttgatttacctaaccgttctttaaaggttctacataatcaaaaagatgaaaatataaccaccaaacttgaagctttgggtcttggtgcaaagcttgtgaagactgaaacttatataagcaatcaacaggctaagcaaacaagtacctacaccattcctaaaatggattgctctgctgaagagcaaatggtccgtatggctcttgcagatattgaagcagttaaaggtcttacttttgatcttcccaatcgaaaactgaaagtcttccataatgaagggattcagcaaattacggctaaactcgaaggactgggttttggggcgaaacttgatgaaacacagctttcttcaggcgatatacctaatgaacctgatcctgtgagacaagctaaagtacttaaactgttattaggtattaatgctctacttttctttatagaattcatcagcggtattattgctgcgtctacaggattgattgctgattctctagatatgtttgccgatgcagccgtttatggtattgcgctatatgccgtcggaaaagctgcgaaatatcaaataaaagcagcccatttcgcaggttggattcagttattacttgctgttatcgtgattgttgatgtcattagacgattcatgtttggaagcgagccagaatcaacgctcatgattgttattggcctgctcgcacttatagctaacgtgacatgcttatatcttatttctggtcatcgagaagatggcgcacatatgaaagccagttggattttctcggcgaatgacgttgtcgtaaatatgggcgttatatttgccggtgtactcgtggcgtggacgggatcagcttatccagacttaatcattggcatactggtttctttattcgtacttaatggtgcccgaaaaattttggctttgaagtaa

SEQ ID NO: 67776 - DNA, 276 bp, Acinetobacter baumannii
atgagtgatagtggattaagtgataaatttaatcaaacttataaatcttttaataaattatttacatatatagataattatcgtgcctctgagaatagtagtcttgattcaataaattttaatattattaatttttatatcagtgatttagaaaatgtcgttgagggtattagagtaaatgaagatcctaggagagtcgaaaaattttatggagaacttgttgatatagtagaaaaaattcacaaagagttaagggcgaattattcaaatagataa

SEQ ID NO: 67777 - DNA, 435 bp, Acinetobacter baumannii
atgaactactcaaaagtaaaaacactgccaagccagcattttaaacgacttgtcgaaataaaaccctcaacttttgcagaaaggcttgaagtattgagagtcgctcaaagtgatagccgacgaggaagaccctcaatacttttgcttgaagatcagctgttgatgaccttaagctattggcgcgaacatcgcacacttttccatgttgcgatgacctatggtatccatgaatcaagggcttcacgcattattcaaaagattgaaaaccttttaattaaatccgataaatttcatttacctaaaaagttaccaaaaggtgaaggtgtagattgggaagttatcgtgattgatgccactgaaatgacgatagaacgtcccaaaaaacagaaaaattactatagcggcaagaaaaaacgtcatacgatcaaagcctag

SEQ ID NO: 67778 - DNA, 738 bp, Acinetobacter baumannii
atgcaaaaaatcaaagaactaataaaaccacaactagacggtctatttgttgatattcagaaattggtgaaaaagtcgcaagaaagacagccttctttacctgaagtattgacgcaagacatgcagcaaaaacttgatcagcagatcgccgaaaaatggcatgacattaaagatagtgttgattgtttgagtcaaaaattgagccgagatgaacaatctaaactgatgcaatttactgaagatgaatttaataaaagaagaaggcaattcaaccagaatgtagataaaaaatcatacagaattaggctaaatccacatactaaacggatcgtactgcctagaaaaattgagagtacggagtcacggttaaaacaagggcagttacatgcccaggtactcaatgctttgaaagcatattggaaagattcacttggatattgggatgaccctaaatatttgtggggggatttatgcttaagttttatatatatttcaggctgtgcagatgaacagcatctggttgctattcagcagcaattgcaggaggccgttgagcttggtacagatctgaattgttttcggttataccattcggactacaaaaaaatcactaatccattgttactacattatcgtgttgaaaactctcaatatggcaacgatgtagaacagagaaagttgtaccaatggaagcatgtttttttaactcatatgctcagttcatcttgcaatatttaa

SEQ ID NO: 67779 - DNA, 621 bp, Acinetobacter baumannii
atgattgggcaatcaatggttaatgttaaatcaggtggtcgcacacgcttatctactttatgcgcaggcatattcttgctgattttagtagtatttttaagtgattggttgaaagttattcctatggctgcgcttgttgctgtcatgattatggtatcaataagtacttttgagtggcgttcacttacccaatttaaaactaatcctaaaagtagcaataccgttatgactgcaacggttgttgtagttgtagctactcacaatctagcattaggcgtattgacgggtgtactactttccgcgcttttcttagccaataaacttgaaaatgatatacaggtaataagttcattagaaggcaacgctcgtttatatgatttaagaggacaaatcttttttagttcttcagatagattcatgcaaggctttaactttaaagaagacgtgaaagaagtcattattgatctgactcattcacatatttgggatgtcacttcggttgcaatgcttgattcagcagtagaaaagttccaaaagaatggcatacaagttactgtacgtggtttaaatgaagccagttcaatcatgattgacaagtatggtacacatgcaaaaatttaa

SEQ ID NO: 67780 - DNA, 327 bp, Acinetobacter baumannii
atgaaaaccataaaaatggttcagctactgacttgtggcttacttagtttattgatgtgctctgtagcaacggcgaaaactgaaaaaatcaccttgaaacaacccattgattttggtgaagaagcagtcgtattctataccactaaaggtgaagtcaccctcaatctgtatgcacttcccgtaaaggttgcagaacagcttaaaccctttaaaaaaggtcaatgtctggaaattcagtcaaaatatggtttctttcacgacacgggagatggtcaatacattcaaagtattcgaccatgcaaacgtactccctctaaagtaagttaa

SEQ ID NO: 67781 - DNA, 555 bp, Acinetobacter baumannii
atgaaccagaatgccgccattatgaacatttatgaattttgtgaaaaagatagtatgcctcatggaaatcagataggcagaaaagtcttttctaaaatgagagattatgttgagcaacataaggctaattatgtctttgaaatctcatttgcaaaaatagagtttgcagactcatctttcgcaagagaaagtcttattcttttggcaaatttatatagaggaaagaaaggtttttatatttccaacttaactgatctagatgtaatagataatctagactatgctgctcttgctttagaacagcctttgattttgaagctaaaagatgaaattcgaatgttaggacctcaactgaataaattaaatttggaaatttttaatattgttcaaacaaagaaaaaggtcaccacctctcatgtagcaacgatgttagatttatctgtaccaaatgccagtagtaaactgaaaaaattagtagatgaaggctatattttacgctttgaagaaactgctgaatctggcggcattgagtttgtttatcaaagtatttgctaa

SEQ ID NO: 67782 - DNA, 1095 bp, Acinetobacter baumannii
atgacagatttagatagtgttatacaatatttgattgataatggaccttcaaaagctaaaaaaattgctaaatttttaaacattgaccgttctgaactcaactcaaagttacattctgctttaaaaagtaaatcaatagaaggattaaaccagaatgaaaagtcagaatgggaagtcaattacgcaagttcaataaagattatttttgatcatcctgcaaaatggctcgaagctatacatattgagaaaaagctacaagaatgtccagatctatttaaaacgaagaatccaattgaatttgatttcttagacaaatctattttcttagattgtattctaaaagtattaagtataatcaatcagttagcttctattggccttaatattacaataaaatttaaccgaaactcacaaggatttagttatcttcaacgttgtggtttctttgaccgaatttcccccaaagtaacaatattaccctatcgccccagtggatcattggcaacagtttatcaggcgaactctgggaatctgttagaaatttttccaattactgaaacatatgacagctcaatactaccgcgaattagtgcattaattaagaacaaactttcagatgaagactctacgatatttctacctaaattacgtacacttattagtgaattaataagtaatatccgagatcatgggctttctgaaatagaaggatatgtttctcttcagacttataataattcaggaaagataattatcgccatatcagatagtggttcaggcttaatccatactatacgaaatgaagccctccaatatgaatataataatcccgatctgcaagatttcttggaacccaatcttacaaatgatattaaattattaggtcatgtgtttaataaaggtcgaatatcaagaactggtgaaaatcgcagaggtttaggattatctaagagcagtaaagcacttaaagaactatctaataataaagttaaaactattcgtttatctattcgacaacaagataatgaacttgttttccctttcaatgttgaaggtgttgatacagaaagttgtaagcccaaaaaaatttattaa

SEQ ID NO: 67783 - DNA, 204 bp, Acinetobacter baumannii
atgaatgaagcagaaaaagaacgattaaaagagatttttagaagttcaaagggaatcgtagatcatgaattttcccaagagattattgatgcttgccaaccttatgaagatgcaaggcatcagcgtattttgaacggtgaaacgactttggagcaggaagaagcagctttaatggctgaatggagacgattgaaccctaaataa

SEQ ID NO: 67784 - DNA, 333 bp, Acinetobacter baumannii
atgacctcgaaaaaaacagctaaagataaacgggccgttttacctcgatcatcggactataccaaagagttcttagcagattggcaaaggctttctcgtagtggtcgttatgatatggggaagcttaaacaggtcatgatgctgattatcgccaatgatgagcctttaggtgctgaatgggttgatcatgcgctcagtggtaaccaatggaaaaactgccgtgaactgcatgtcggtggcgattttctgctgatctatcgtatcgagccactttctaagtttgaaatggtggtttttgtgcgtactggaacgcatagcgagttatttaagtaa

SEQ ID NO: 67785 - DNA, 276 bp, Acinetobacter baumannii
atgacttctcaaacctcaatgctacacgttcgaattgatgatgaaacaaagttacaggcacagcaggctttgaaatcaatggggatgtctgtttctgatgctgtacggatctttttaactcgtgtcgtggctgaacaggctattccattcgatgtacgtgtacccaataccacaactgtagctgctatgaatgaagctgatgcacttattcaagccaagaaagcccgttttgaaactgtagaagacttgtttaatgacctcgaaaaaaacagctaa

SEQ ID NO: 67786 - DNA, 1464 bp, Acinetobacter baumannii
ttgcacttaacgaatctgccgaaaacggtacaagatagctttttagagcttgacggtgctaagtcagttacaacagtaaatagaacagcagttacccatattttttcagacaacaatgaaaatgtaatcgcttatttgaagtcagatggaaaccttgttttgattgggcttgatggttctgttcaatccgaatttgcaaagctgaatttgtctgatgatgaaattcgagaaaaaacaaagagccttgaggcttccagcaatctaagtgatatcacacatatattttcagacaattctgaaaatgttgttgcatatatcaaaaatgatggtgggctatatttagtcggtctaggtggctcgttgcaatcaaatatcactgcacttgttaatagagcaacagcacttgaacaaaatctgcaaaaactacgtgatgaagttgcagtagatgaaatcttgattcaaaaagatttggttccgcaaaattattcgattgatgctgtacaagctctttcaatcaaatgtgattatccatcaaatattcagggtttttttcctgattcaccgtatcgactgaatgattctcctacacatccatgtgtaattgagcttgcacgtccgttacgtggttacaagtatttgatggttcaaacgccatattatgagaaccgacctgaagaagaaaatccatgtatttatggttctaacgacttagctacgtggcaaatgcttgaagatatgccgcaaccgctggacgaaaccccgacgtgggatgaggcgttggatgggaaaaagggttatttatcagatccgtggtggacgtatgatcacattacaaaagagctttattgctgttatcgcaaagcgtatacggttggaccaaacacatacaatacgaccgatattatgcagttgctatatcgcaaaacatcaaacggcatccactggacgaagccacagaaattatttggcgatatagaaaacggtgttgatccgattatttcaccagccattatttatgactttaaaaaccatgtttggtgcatgttctacttcaagtctgtacgcagttttgcaatgcgtacaaatcctgattttagaaatccgaacacatggtctgctcctattgatttgggttatgaagcgtggatagcagcaaataacccgccacagctaggctggcatttagacgtgcggtatatcggtgatcgtttgtttgcaatgatcaatgactctacaaatgcaaagttatatctagcgtacgcagataaagatgatttaacccagtggacatttacaagcagctctgtgctaaacacgccaccacctcggaacagctgctacaaaggctcaatgattgctgtgccagttgatgaaactcaaatgaaattacacgtcgtctggacagacgcaggtggttacagacgtttgttcaacgcaaaaactttccctgtttcaattgtttaa

SEQ ID NO: 67787 - DNA, 579 bp, Acinetobacter baumannii
atgagcaatagtcgtggcggaagccgagatggttccggtagaaagtttaaatacaatgagcctacgaaaacggtaagagtacctgtatccaaaatcatagagatcaagaattatctcaatgaagtagagaagcaaaggttcaatgaagttgcatccatcacgctgattgatgcgactactcagatgagaatccctttggcttcagagaaagtcgctgctggtttcccttcgccagctcaggactacatcgacaaaacattagacatgaatgaacacctcatcaaaaatgaagctgcaacattcgttgtaaaggttgcttcactttcgatgagagatgcaggcattgagattgatgatgaactgattgtagaccggagcattgaagccaagcatgaagacatcgtaattgcgctgatcgacaatgagttcactgtaaaacgtctcatgattgaaggtgatgataatcgttggcttaaagcagagaaccctgagtattccgacattcatctgaaggatggtcaggaaatggtgatttggggtgtagtgacttttgtcatcaagcctttcagaaagcgttaa

SEQ ID NO: 67788 - DNA, 1305 bp, Acinetobacter baumannii
atgctcatgcaagcagctcaccataatatctacgctttagtagacatcaacaactgctatgtcagttgtgaacgcatctttaacccaagcttgaacaataagcctgtcattgtgctatcgaacaatgatggctgtgctgtagcacggtctcaggaagccaaggacttgggcatcaagatgggtgttcctctcttccagatcaaggacatcgtagagcagcatcaggtacaagtgctatcgagcaactatgcactgtatgcagagatgtcccgcagattgatgaaagtcctgtctgactttgtgtctcctaaagagcaggagatttactctattgatgaatgctttctggatctgacggctcatgcagagaattatgatctaaccgattatgctcaacagattcgtcaacgtatcttttcttggcttggtttacctgtatgtattggcattgggcgctcaaagactgaagcgaaactggcgaaccatattgccaagaagaacagctatttcaatggcgtatgtaacttggtttcaatggatcactgctctgctgaaacactgtaccaatccattgaggtaagtgagatttggggtgtaggacgtaaacattcgaagaagctcaacagtatgggcatccattctgtcatggatattgtcatggcttatcctctgatgatcagggaccaattctctatcgtaatgcatcgaactttattagagcttcatggaaccgcttgcattgaactggaacatacgccacctgcaaagaagcaaatcattgctagtcgctcttttgggcagaggatctaccacatagatgatctaaaagaagctatgaccctgtatgtacaagatgctgtaagtagactgagagacgatgagctattgtgtggctgtcttattagtttcgtgcaatcaaatccatttgatgtctctaagcctttctacaataagtctctatcgctacctttaccagaacctactgacaacctgttggtgctctctaaactcgctacagcgatgattgatggcctgtatgccaaggacattgccttcaagaaatgtggcgtgattctgacgtgtctcgaaccaaaggcaagccatgtgtatgacatgtttaccgacatgaagcacatcgaagttagcaatgccttgatggattctatggaaagtattcatagcaaatttggtaaaagtaaacttgccttaggtgctagcatgttgccggacagagcatggaatatgtcacgagatcggctaacacagaactactttaaatgggatcaactgctttgtgtaaagtaa

SEQ ID NO: 67789 - DNA, 177 bp, Acinetobacter baumannii
atgactgaaaaactattacttacaactgctgaagctgcaaagcttttaggtatgcaacctcaaactttacgcagatgggccatttatgaaaatggtcccatcatcccaaagaggcatggtcgtttacttcgctggaatcgtaatgaaattttaaaatttgctggcgaaactcgctga

SEQ ID NO: 67790 - DNA, 573 bp, Acinetobacter baumannii
atggggtcggcagaaatcttaactcatcagatatggagtgatttaaataatcaaccacaagatgaagaattaattttaatccagttacggaaactcccttgttacctaactgaggtactgttagataaaaatttttattcgatgagagagtttaacaaggaaaatctctttaatattgcccaattcagttcattagatagtctatctgcattgtatttacttcatcgttggggttataccataggcagccatagtctaattaatgattctaattccattattattgagagcttggagcaactgataaaaaaaaatcactatttacatcgttctcatgtacttttatttgatgagcttttagaacaaatatttgcaataaatactatgggatataatagacctttaaaggtaaaatttaattggagacaataccgggaaaagaattggggtgaagatattagaacgttatcaatggaaaaagaaaatctcttaattactcatcctcaaattacaaaattcattcacagtcctaatcaagattttgcttcatttcacaagtcattgtttgggtag

SEQ ID NO: 67791 - DNA, 222 bp, Acinetobacter baumannii
atgataagagatgagacttataaagcactccattataaatttaaggccagagatcgagcgattggagaaaaagataatgataagtcaattatccggaatgagtttatacatgatgatgtattacctatgatgaaaggactcattaagcttaaatggttagatcctaaatacaaaccaagagccttattagagtatttgaagagtaaaggtatagatttttaa

SEQ ID NO: 67792 - DNA, 360 bp, Acinetobacter baumannii
  misc_feature (179)..(188): n is a, c, g, or t
atgaatgaaagaaatgatattttgcatggaaatattaatgttaaaaaacaatcatttggtgaggtatatttcaataaaaatatggcaatatatgatacttaccaagatcattgggaaaaatctattggaatattaattaagtcagtcaagcttgatacaatttttagagatttagaagnnnnnnnnnntttagaagtagttgaaaattttattgaatatatttactcgaaactagacccacaggttagcagtgatttaaaagatttattagataaagcatatttaggattcaacacaaagacaggaagaatagggattttatttcgagatcactttgctgactttaaagtgaaaacttaa

SEQ ID NO: 67793 - DNA, 831 bp, Acinetobacter baumannii
atgattttatttggtaagaaagaccagccgagccgaaacgcatatgcggtcgtaactggggcaggcagtgggattggacgaagctttgcagttgaactggcaaaacgtggtggcagcgtagtctgcgcagatattaatttagaagctgctgaagaaaccgtaaagttaattgaacagttgggacaaaaagcatttgctgtacagtgcgatgttgggcaagcagaacaagtacagactttggctgatcaagcagagcagttacttgatcatccggtaacactcatcattaataatgccggcgtaggtctaggtggcaaatttgatgaaatgagtttagaagactggaaatggtgtatgcatgtaaacctgtggggtgttattcatggttgtcatgcatttgtgccaaagttcaaaaaactaggttacggtgcaattattaatgtagcttctgcggcgtcgtataccgcagcaccagaaatgagtgtctacaatgtaacgaaagcgggtgtattggcattatcagaaaccctttcagccgagcttcgcaaattcaatattaaagtcaatgtactttgcccgactttggtgccaaccaatatcattaaaaatggtcgtattccggggcgttattccaagcttgcagaccatgcactcatgaactatgccatgacgaccagcgatgcagttgcaactttaacattgaatcgattagatcgtgggcagctctacaccacgccacagatcgacgccaaattattctggcttatgaaaaggacatctccaacgctatatgcaaagttccttgggctttcgtatcagttatttaaataa

SEQ ID NO: 67794 - DNA, 327 bp, Acinetobacter baumannii
atggagaataaaaatcagtgtcgccaatgcgccgtatgtggaaagagctttcctttaaaagatttagtatcgggtgaagtcatccgtaacgtgattagtgatgaaattttaaaagaccatccagattggagttactcaagctttatttgtcgggccgatctggcagattatcgaattaaatatgtgcagtccctattacgctcggaaaagggtgagttatctaacctagaaaatgaagtaattggcagtatgcaacggcatgaattaattagccgaaataggctttgttgcacaaacctatctctaaaggcttattccacaatataa

SEQ ID NO: 67795 - DNA, 300 bp, Acinetobacter baumannii
atgaatattgatagtgaaattatggaaaaaatttttgaagaaaatattgaaaatattgcttctgttgttcacgatatttgggctcattggcaggcttatcttcatagtcaatgcgaaaaattaccagatggttctttaaaaattcccaaagagttagttgaacaatgggagcaacaaattaatttgaaatatgagcagcttacccgaagtgaaaaagatagtgatattgaacaagcttataaatatgaaagtatttttttaaaaattttaaataatatagttgaaaagaaagatacttga

SEQ ID NO: 67796 - DNA, 486 bp, Acinetobacter baumannii
gtggtatcgattgtatatgtttgtgtatcgttaacactgctgctgttacctgctgcatctgtaaacgttactttggcatcaatcgtcttatctgcatccgcagtcaactcactgcctggtacacttactgtccacgtgcctgctgtgctatctacagttgcagtatacgtctggccattgatcacaacagtgaccactgtatttgctgcatctgccggaacgtttttcaatataccagtaacagtaacgttgcctgatgcttctgatgcattaatcacattgtcagctgttactgagtcaatcgaaaaatttactgttcctggatttggtgcagctgtatcaaccgtcacaacacctgtatcagtacctttattgcctgctgcatctgttgcagtcacggtaacggtgtgtgaaccgtctgttaatactggcaaggtattgtctgcaagcgtccatgtaccgtcaccattgttcactgccggatag

SEQ ID NO: 67797 - DNA, 810 bp, Acinetobacter baumannii
atgaagtctgtttacggtgccacacgtcttcatctaggtgaggatctgaaatttatcttaggtgctaactatactgaaatcgaaactttggattataaaaagaataaagtttccccgtatgcgggtattacatataactttactcctgaatacacaggttatatgagttatacctctatttttaggccacaaacggttatcgatctttctactaaacaaaccgctgtaccagtagagggtgaaagttatgaagtaggtgtaaaaagctcttggttagatggtgctttaactggaaatatcgctatctttagaacagacgaagataactttgcactaaacccattatgggatccgctctataataaatactcgtcaccaataggaacgattagatcgcaaggggttgaagttggtttaactggaaaattaactgataacttagatttagtttttggtttctcaacatttagtctaaaaaatatggaatcaggtgaaagaggtagaccaaatatcccaactcaaacacttaacgttttagcttcttatactgttccccaaattccaaaattgaaagttggtgcaagcattaaatggcaagatgatatacatgacacctcttattcaactgtaaaacaagatgcttacgcattgcttaatgttatggccagctatgatttaaacgaacatgtaatgttccaagtgaatggcaataatctaacaaatgaaaagtatttgacaggtttatctggtggtcagggttactatggtgccccagccaactatacagttgctgtaaagtttaaatattaa

SEQ ID NO: 67798 - DNA, 963 bp, Acinetobacter baumannii; identical to SEQ ID NO: 42269

SEQ ID NO: 67799 - DNA, 267 bp, Acinetobacter baumannii
atgtttttcaatacacctgtaacagtaacgttgcctgatgcttctgatgcattaatcacattgtcagctgttactgagtcaatcgaaaaatttactgttcctggatttggtgcagctgtatcaaccgtcacaacacctgtatcagtacctttattgcctgcagcatctgttgcagtcacggtaacggtgtgtgaaccgtctgttaatactggcaaggtattgtctgcaagcgtccatgtaccgtcaccattatttactgctggatag

SEQ ID NO: 67800 - DNA, 633 bp, Acinetobacter baumannii
gtgatcaattcaattgacctcgagacaggtcggaaatatcagagtaataaaaaacaacgtgaattcgttaaaaaagcaaatgatgatatatgtgtttcacatcatctatccattccaaacagacaggcacaaattcgctacactcaggcagaaaaagggattgtctttgatagagaagaatactcttggaaagatgaattacgtgaattgattgaaaatacaaaaacacatacaagcaatttagagacgttttcagagcatttagaagcaaaaggagtaaaagttaaggttcgtggcgaaacaatctcatacaagcctgaaaatgcaaataaatgggtgcgtggacgaacgctaggttcagattatgaaaaaggggcgattgatgatgagcatgaaagacatcaagaacaacaaagagaacccgactatgcagacggattcaaggtcaactgggatgccatcgagcaacacacagagcaacttaaacaacgaagaattgaacgagctcaaaagacaaaacaagctaatcgtaaagtatttggcagagatagaagagagccagaaaacgagagagaaagaacaagaagcaatcacatcaaaattgaaagagacgacgaaggactttcgagataa

SEQ ID NO: 67801 - DNA, 747 bp, Acinetobacter baumannii
atgcctcgtaccatgctgacagatcaacactggcaaaagttgaaagttattctgcgtaatttatccattcatcacaactcaaatttacgcaattttattgaagctattctctatagaattagaacaggctgtccgtggcgagatattccttgctgttttggtcattcaaactctattttcaaacgttttaatcgttggtcaagcagcggtaagtttcttagattattcaaattactagcctcatgccccgatatggagtggatttttattgatggctctcatgtacgtgctcatcaacattctgccggcatagcgaatcaatctatttctaaaagtgtaggaggaaactcctcaaaaatacatttgattgttgatgcacatggcaatcctattgatttcatgattaccgatggaaccacacatgatgttaaagttgcacctgatttaatatcaacattagatttaaaagagacaaaagtggtatgtgcagataaaggctatgattcagaaccactgcgtgaacagatcaggaaaacagggactaaagcgaatataccaaagaaaacaaatagccaatcgaacaatgaccatatggactggtatttatataaaatcaggcatttagttgaaaatatgttttgtagattaaagcaatttagaggaatagctactcgatatgacaagctcaaaagaaattatcaaagttctgttgctttagcatgtatatttttatggctacctttatag

SEQ ID NO: 67802 - DNA, 735 bp, Acinetobacter baumannii
gtgagatgtcatctacaacctgagtttcaagcttattctgcttcagcaagaagtactgccaagaaattaacacaagatgctgaaccagatttttggcttatgcttcttatttcaaaaatatatttttcaggtctatataatgaaattcaagctattatcgctttcccaggccataagccaggatttggaaatgctgtcatggatgaagctctagatgtgtttgctaaatgttttagattatcttatttgcataatgctttaattagacacacagagtcaatcaagtctcagtatgcaagaatgaatggaaatgcaaatatcctaggtatttacaatcatttaaatactttgtatttgaatccctatcctactaaatatggagcaagtagtgccttaaggacaaacccttatcgtggcaaaacaattttattaatagatgatattgctacctcaggatattcatttgatgcggctaaattattattggaaagagcaggttgtagaagggtggtatgtttttcatggctcaaaacaattaataaatctttaaatatctctagagagcgattgcctcagcattataatatttatactcaacttaccaatgctgagcaaatttatacctctccattaactatcgagattccttatcattcaattattccttcatctcatgttggaaatgagatgactagactttttggtgattttattaattggcaagaagatatctaa

SEQ ID NO: 67803 - DNA, 558 bp, Acinetobacter baumannii
atgaaagataaaagtattcgagataaattcttagtgctttcacaagatagaaataataatgttattaaattaaatcagactttattaaatgataaatatagattagaaaaacgtacttttgatgcaatttatcttgaaaaatatattacccatgaagctaattttaatgaagcaaatcgaaaaataagcaatggtacttatatttcagaaaaagatcttgctgcacagctatttattgagcaagctaaatcaaaaggcaatgaagtacgacaatataaatctaatattaatgggttaattaacaaaatttacaaacaatcaattactgagttcaatggggcatcgaatcgatacaatgctgatccagcattcatagaatttgataaatcaggtaatcctattgcaattatgacacgttcatggcaaacaatttcggcaatcggtgtagatagccgcatttatactaatatttactttggggcagagagtatgcgttggttcgagaataatttttcaaatcgtcttttggagaactcattaatcagggtttataaataa

SEQ ID NO: 67804 - DNA, 225 bp, Acinetobacter baumannii
atgttattagtctttatgctgtttgctttaattatgaccataggcagtgactttatgagtttcttgcatgtagatatattacaaaaagccatagcaagcaaaattaaagcatctgaaggctttatgacattgatttggtatatcgcttatggtttgccttatatatttgcgatagggctatttattggtttatatgaatggattagagcaagacttcatgattaa

SEQ ID NO: 67805 - DNA, 159 bp, Acinetobacter baumannii
atgattataattccagataatagtgatctacctacgttatttgcacttttagcatttacaatatattctattccgggaattttgaaaaagaaagtaagtggttgggtacttggaattttaggtttgatatttattattttatttttaattgagttttaa

SEQ ID NO: 67806 - DNA, 195 bp, Acinetobacter baumannii
atgaccagcgaattaattaagatttacaaccatgcagactctcgtactgctgatctactggctgaaatagacaaaaagggggaggtcacaaacatctatgacctcaatggcaacgagctaaaagttaattttttaaataatgaagttttcttcaataagacttggtggcaattcactaagcaacaaaactattag

SEQ ID NO: 67807 - DNA, 663 bp, Acinetobacter baumannii
atgaagaccgaacttaaaactttattaatagatgtttgcttttggattatttcaatatgcattatttttttcttctttgtattattaatctattctcacaatttgattgataatccgttaaaagaggctttttctttaacattaggcttgatttccgcattaagtacaattggtgcagcaataatcgcggcatatcttttcaatgattggaaagtccaacacaataaatcaatggaagtacaactagcattgataatgatagaaaagtttgagctttttgatgagcaaatctcattgctatatgggcaaattgcaatcccctatgatcatagagatcaaagacacctcgaattagctgttaatgatttcaaagaatataaacaaaataagttgctggaaattcgaattagctttttaaaagcatcagcttcaattgaaaatttttattcattctctggagatgatgaagaagtaaaatatcaacttaaaatggctaaatcagcatttaaaaagttctcagatgcgtgtctgaatatagataatgattcaagttatactgaagttgcaaaccgttttgtgtttgcatttagcgaattaatccctgttataaattatattgaagaaaactacattcaagtggccataaagaatctaagagcatag

SEQ ID NO: 67808 - DNA, 300 bp, Acinetobacter baumannii
gtgaatcaaatttttgaaaatatccgactaaaacgaccagagctaagtaaaagtgacaaagcaaaagttgagcaattagcagatagagtactggggcaaatatctcctcatctgaatgacttaggattaagagaaatctcagattgctttctgctaaacgaaaagccggtattgaaattctgtgcgctgttagaagttgagcgaatagttaaacaatatgattttgatatggaattatgggttgatgagaagactcagattccaacgctcaattatctagtaagaaggaagaaattttaa

SEQ ID NO: 67809 - DNA, 129 bp, Acinetobacter baumannii
atgaacaaattcgagattttagcgtggggtttactcatttcatttttcacagccgctatttgcggggcggttgtgttgtggtggttggcgcgtaaaaagctatatgagaaaggagccagacatgagtga

SEQ ID NO: 67810 - DNA, 969 bp, Acinetobacter baumannii
atgagcttagatgccactgtgtgggcttggagagttgaactcccccaaatcaaaggcggcagtaagaagcctatgaagcgcttagtactgctttcattagcggatagagcaggagaagatcattgctgctatccaagtgtttctcgtctttctaaagatactggtatggatcgtaaaacgatttttaaagtgatagcagagttaatcgaagacggtttaattgaggattctggcaagcgtgaagggtctaccaaacaggtaattgtttatcgcttaaaaggtgtaacgggccgagaggaagttggcgaaattaaaaacaaacagtaccaaaaacgggacagttcaaaagatgaaaataacagtaccaaaaacggtacagttccaaaaacggaacagtaccacttttccggtcaaagagtaccgtttttccgcggaaacagtaccaaaaacggtacacagaatctatcaatgaatctttcattagaatctaaaaataaaaaatcttggctttgtttaaaaaaacttcgtgaagaaatttttctttctgacaagtctgtagattttgatcaactcgtaatggagtcatggtaccaccgagaacttagagcatttgaactcaacaatgcctcaaaaaatctttgtgatgatcttctgattttccattttgctgattggttactgaatgcaaaagctaaatacgaacgccgtcaaaaagcatcacaaccggctaagtcattttctggtgaacaaaacaattcaaccggtttaagtcaaaagcagattgctgtcttcgctgacaaactttctaaacatcctgagttttctagcaagtatgccgaaggcaacgaaagctatgaacaacttgcagcacgtatcgcagtaaaactcgcagatcctgcgcaacaacaaaaatggatgccttacctcattcaagttggatttcaacaaggcaagggggcagcagcatga

SEQ ID NO: 67811 - DNA, 732 bp, Acinetobacter baumannii
atgaaatctttaagtcccatatcaatcgtaagacgtaaaaacacattgaacttaatgaagagaaatggtttagagcgtaaggatttagcagataaacttaatatgggatattccctacttagttcatatattggcaaaaatccaagtaaagggattggtgacgaagtagcaggaagaattgctgaagttttcggcgttgaaccttcatatattgatacagatcatgagttaatagaaaaatacactttgcaaactaatgctgtgtcagataaaaatacacctgatgattcagatgtggtatctgtacctttttatccaaatgtttacgcatcatgtggaccaggcatgttcaatgatgcaaatgagtatgaagtgtcaacgattaagattgatagaagtaagttaagagaaagacaaattgatccatcttgtgtgcggtcttttctttcagaggggcactcaatgtctccgttaatccctcatagagctgaagttttttgtgatgtcagcagaactgagattaaagatgaaggcatttttgctgtgtgccacggtggtctattcaaaattaaaaaactttttaaagctccaaatggtggtgtcaggttggtgagcacaaatacaaataaagatgaatatccggatgaaatactaaccgcggaacaaattaagaatgatgctttccatgttgtcgggcaggtatttcatgtaaatcacaccataccattttaa

SEQ ID NO: 67812 - DNA, 171 bp, Acinetobacter baumannii
atgacttggagtgtacaagaggtctatggcagctttcaggtagtgccggacgatgatttaaaacctcattccttatttcactgcgaatgccatcctcatatttgggatggcatttttattcataactcatttgatggtagagaggcgactgaaacgcctttacctagttaa

SEQ ID NO: 67813 - DNA, 318 bp, Acinetobacter baumannii
atgaaaccagaacagtttattcgtgattttggcgaaaagaaggcgagagaggttgttgagggtgctcatagctgggcagatgtacttctagtcccaacaggagaatattgctcaatatgtatcccaccagatgatgcagatgaatttgtttctattgaagacctaaagcgtctcgtggagtctgttgatttagtaaatagcttaggtggaataaaagcagcacgttcagaagctcataaagattgttttgtatataaccagccattgctagctgctattgcagcatacgaatcaatatacggaggcggggatgagtaa

SEQ ID NO: 67814 - DNA, 177 bp, Acinetobacter baumannii
atgacttatgaaagaagtctattaaatgaactttctggtgaaaaaaaatttcatccattaaaaatgctcaaattaagaaaaagtttaaataaaatttcaaaaactatagtacagttgaagttattgataagttacagctttctatcacccaaaccaaccctaattacttatttctaa

SEQ ID NO: 67815 - DNA, 537 bp, Acinetobacter baumannii
atgaacatgatgacaacactgaatttacgagctttggttaccaatgataatggcgagccaaaaacaacaagttatgcagtagcagaggcctttaataagagccacagccatgtaatgcgagatattaagaaaatcattaagcaatgtggtgaagaatttgctaaatccaattttggattaacctttgaaaacaagaagataggaaacacagaacgcaaaactcctttctttagaatttcaaaagacgggttcatgttgcttgttatgggttttactggcgaaaaggccatgaaaactaaaattgaatttattaatgcctttaactggatggctaatcaacttagccaagtctttcaatctaaatgggctagatacaactctgtaagtcatgaatatcaatccaaaaaagaccacattagttgctcagcacgtgatatgcgagcttggcgtgatgaaaagccagttttagaaaaagagttatctcaacttgagatggaactccaaccatcacttcttcaatcaatgggtagcatttga

SEQ ID NO: 67816 - DNA, 399 bp, Acinetobacter baumannii
atggcaatgacattagagcaagctagacaagcaatagtcgaccgtatgatgagcttcacaggaatatctcaagacagaatccagtatccaaatgcaccaggttttacggtaccaacaaaaggtgtgtggtgtcgtttaaccattacgggaggaccaagttttattgctggactaggaaataagccgtgtacacgccgtactgggaatatcttaattcaatgttttgcccgtcctaatactggagacaggggagtaacagaacttagtgatgctttgctggcacattttgaatatttcacaactggccaactagagatactccaaggtcaagtacaaaacctcggcaataacggggacttcattcagtacaacatttcaataaattaccgcgtcaattaa

SEQ ID NO: 67817 - DNA, 477 bp, Acinetobacter baumannii; identical to SEQ ID NO: 63303

SEQ ID NO: 67818 - DNA, 330 bp, Acinetobacter baumannii
atgcgtaattataaaatagatattcttcgaggaatttctatccttttggttcttttacaccattttaatattccctataaacttaaagatacatgcttaggttttgatttcttaggtgaagcatttagcacagtcatcgcaagaaacggaaattatggcgtgaccatgttttttgtaatttcgggttttttaattacccatcacactttaaaacgagacaaacaattttctgcaattaacctcaagcatttttatatccgacgagcagcgcgtattttaccgtgtctggtattactcattttaggtgtaagcatggttcatttgacttaa

SEQ ID NO: 67819 - DNA, 237 bp, Acinetobacter baumannii; identical to SEQ ID NO: 54403

SEQ ID NO: 67820 - DNA, 189 bp, Acinetobacter baumannii
atgcctgatttattactcaccacgagtgcttcagatgcaccaagttttgaagtaattaagaatacttcaatcggtaaattacggcttgccgcggcagcaagtgggcttgaaccaatattaccaagtaccacatcacctgaagccagagcattgacaacatctgaacccgcatcaaattttttccattga

SEQ ID NO: 67821 - DNA, 369 bp, Acinetobacter baumannii
gtgcgcaaggctttaactgaagctctgaaatatttacctgcagaactgcgtaaaacgttgacctatgaccgtggacgcgagatggcagaacataaaatacttgaagaagatttaggcatagatgtatatttctgtgacccacattcaccctggcaaaaaggcacatgcgaaaatatgaatggtttaattaggcaatatttacctaaagggattgatttaaatcaggcagatcagcattatttaaatcaagttgccatgtcactgaatactcgtcctagaaaagcgttagattggcttacaccattagagaaatttgctcagcttgttgattatcataagacttttcaaactgtcgcacctcatgtttga

SEQ ID NO: 67822 - DNA, 612 bp, Acinetobacter baumannii; identical to SEQ ID NO: 63125

SEQ ID NO: 67823 - DNA, 978 bp, Acinetobacter baumannii
atgaaaattgcaacatgtttggttaatcctcgagcatgttatgaaacagaactaatctttaaagaagcacataatcagaaaaatattgccgtcattggggccgggccagcaggtttaagttttgctgtatatgcggcagatcgtggacaccaagttaaaatctttgaagcaagtcatcaaattggtggtcagtttaatatcgctaaaactgtgccaggcaaagaagagttctacgaaacattgcgttatttcaatcgtcaaattgaattacgcccgaacattgaacttgtattaaaccatccagccacttatgaagagttaagccaatcagactttgatgaaatcgtagttgcaactggtgtaacgcctcgtcaattgcaatttgaaggtattgatcatccaaaagtgttgagctacttacaggtgcttaaagagcgtgtagcagtaggtcagcgtgttgccattattggtgcgggtggtattggttttgatacggctgagtacctaacccatgaaggtgaaagtggcagtttaaatccagaaaaattttatgaagagtggggtattgatactcactatgaacatgtcggaggtttaaagcagccaaaagttgaagcttctgaacgagaaatctatttgttgcagcgtaaagcttcctcagtaggcgcagggctgggtaaaacgactggttggattcaccgtaccgggcttaagaacagaaacgtgaaaatgttagcaggtgtgcaatacgacaaagtagatgatcaagggcttcatattactgttgatggcaaaccaacggtacttgaggttgataatgttgtgatttgcgcgggccaagaatcatttactgcgatgtatgaccaattaaaagcagatggtaagaatgttcatttgattggtggtgctaaagaagcaggtgagttggatgctaaacgtgctattcgtcaaggtgctgaactagcagcggttatttaa

SEQ ID NO: 67824 - DNA, 210 bp, Acinetobacter baumannii
atgataatagataaaaaagcttttttaagtatctatatgctcttgatctttcttttttttacattggatttaaatagtccttttattttttatgggaatttattgatatttattcctattttagttctctttagatttatatattatcccaaagttagtgtaaaaaaaattgttctaagacagcttttagtaccttgtatgataatttaa

SEQ ID NO: 67825 - DNA, 204 bp, Acinetobacter baumannii; identical to SEQ ID NO: 63313

SEQ ID NO: 67826 - DNA, 234 bp, Acinetobacter baumannii
  misc_feature (210)..(219): n is a, c, g, or t
atgaaaaagtttttaggcaattctatcttcaaagcagttggttggacctatgatgcagatcctacaattcttgagaaaaaacaagttattatcggttttgaacatacttctaaccttgatgcgatcttatcgattgctttgtttcaaatattagatttaaaaattcatacactaataaaaaaagaacttttcaaaggtccaatgaagccnnnnnnnnnngaagcctatccttga

SEQ ID NO: 67827 - DNA, 387 bp, Acinetobacter baumannii; identical to SEQ ID NO: 55443

SEQ ID NO: 67828 - DNA, 390 bp, Acinetobacter baumannii
atgaacagtactcgaaccgttgccgtcagattagacaatcaggttgcacaagaatatgaacgtttggctcagttgaagggcgataaactagggacttatctgcgggatcttctgaccagtaatttacagatggccagcattgagcgacaagtcagtcggattgaaacactggtaaatgattttgaaaaagatattaatcgatcattggatcaatttactcaagctaattctttgaatgaaagtttattaggagatttgggggaaatatacatgtttcaaataggcattcttatgaagctacaaacagagaaatatgagattcgaggaatgcaggctaaaggaagaagtcatgccaaggctaactatctgaaaggaaaaaatcatgagtaa

SEQ ID NO: 67829 - DNA, 831 bp, Acinetobacter baumannii
atgcctaataattctaagcaatttattgagaaagaagcgttacagattagacaggattatgattttacaaatcctgaaatagatctattccaattagggcaagaaatagggattgagatacaaactcaatcccagcaaagccatggtatttcaggtgctcttattagaaatggaaatgatttcataatctattactcttcttcaatcaatcatattccatttcaacgatttagtattgcacatgaatttgggcattattttttaccagagcatcctgataatattttaaaaaatggagcgcactactcaactgctggaaaaaagagcaaccttaaagatccctttgaaaaagaagctgattatttttcaacctgcttattaatgcctaaacccatcttcgaaagtgaaatgtacaaatttaatgatggaatggaagctattaaagctttggctaatctttttaatacttccttgactgccacagccctaagatatatagaacttagtacatcaccagctatgttaattattagttcaaaaggtattgtagatgctgtttttagtactagagaattaagtaaatttggtagttgtctttacacaaaaaatggtgctttccctcaaaagaatataatttctaaagatctatcacaaaaggaagtttatttgagtgattggttggatactgatcaaaatattaaagctcttgaagaaagtattacattaggttcttatgaaaaaacccttacggttataacaacaagtaccttatatgatgaaattgatgaagaaacaaatgatgaaatatgggagcctccatcttttaagtaa

SEQ ID NO: 67830 - DNA, 330 bp, Acinetobacter baumannii
atgaatatgatatctaacgaaacctatgtgtttcctgaacgcttacgagaaataagagagttaagaaaacttactcaatctcaattagctgaaaaatctaaaattccttctacctcaatttcacacttggaagctgggtctagaaagccatcatttgataatttgagaaaattgggcattgccttagaagtatcaacagattatttacttggaagagttgaaaactttgaagattctaacgttgatacgctatttagagatctgcagaacttaacggatagtgatagagaaactatccgaagatttgcagaatctttgagaaataaatag

SEQ ID NO: 67831 - DNA, 168 bp, Acinetobacter baumannii
atggctaaatcgccaataggtacaaaaggtaaaacagctgaaaaatgtccagaatctggagtttggaagcctgaaggctattcgacaacagcaccaattgcgaaggggaatacctttcctccttacgctggaaaagcagttacatgggtcttaattcaatacgcttaa

SEQ ID NO: 67832 - DNA, 180 bp, Acinetobacter baumannii
atgtctttaaagccaggacaaaatacaggtcgtgatggtggaatctatagagaacaaggccctcgtggtgggttaagagataattactcgacaatccccgatcgaactattgctccaccaacctcaaaaccaaactcaagctgggttcgtgttgaacgtacaccagatagtaagcgatga

SEQ ID NO: 67833 - DNA, 210 bp, Acinetobacter baumannii
atgacggaccaaacaataaatatcttatgttcttgcggaagcgataaattcgagattcctagtaatcctaaagcttcagatacgattacttgtgctaagtgcggagcacaagaaaaatatggaatattgcagaaagaaatagcttctaaagttaaaaaacaagttgaggccgattttaaaaaaatgttgagaaaagctggttttaaataa

SEQ ID NO: 67834 - DNA, 597 bp, Acinetobacter baumannii
gtgtttccaccgaaaaaatatgtaaagaatgcatttaaacagggcgttgtcatcactatccttttgggagtaatccccctttcattagctctatgtcaagatatttggggactcatttttcataagagccatgatttatctaactttaatggaatgataagcagtcttataccttccaatcatacttatttaaatgttcttctttggctttcaggagtttactgtttacccttattaatgttagtaatagcagaaagagaattagaaaaaaaaattccaatacctaattggataaagaattttattcttaactttgaatatgcattatcaactatttttagtgtgatgtttgttgcttcttccatcttctttaccgctggttttttattttgttttagtagcttaggtgtttcttatggaatggggttcatttttattgggataattctctttactctcaccatctatgcgttggcagctatgtctgagcttaaagaatcatttctagaaaataaatctgattcagagtatacaaatgataaagaatcaaaagtagtagacaaagatattggaactgataataaagatgccgaatag

SEQ ID NO: 67835 - DNA, 945 bp, Acinetobacter baumannii
gtgaataatcaagatacaaagctgcagcaagcatacgatatccttgtccaattaggcatgccgcgccaacaacttaatgaacgtactgctctctgtctactctgtttacttgatataacacctgaaaaagcatggaatcaggcaagcaatccattagtaggtattacacctattatgaactgggcacgcgcgcattatcaaagagaatacgctccaaatacacgagagacattccgtcgacaatcgatgcaccagtttattgaagcaggaatttgtctttataaccctgataagcctgatagacctgttaatagccccaaagctgtataccaaattgaattcaatttgcttcaagttcttcaaacttatggaacagagcaatatgaaaccatgctacaaaattacctgcagcaaagacaaacgcttgctcaaatgtatgcgcgagagcgcgaaatgaatatgatcccattacaattaacagatggtcagactattctactttcagcaggagaccattctcaactcattaaggatattgtcaccgattttggtgctcgatatgttcctgggggagcattggtttatgctggtgatacaggcaacaaacatgggttctttgatgttgagctactagcatctttgggtgtgcaattagacaaccacggtaaactaccagatgttgttatctacaatcctgagaaaaattggttatttttaattgaagctgttaccagtcatggacctgtagaccataaaagatatggcgaattaaatacattatttcaaggatgtacagcgggtttagtgtttgtctctgcttttcctgatactaagacctatgtaaaatatagcggtgttattgcatgggaaactgaagtctggatggcggataatccgtctcacatgatccacttcaacggctcaagatttatgggaccttattaa

SEQ ID NO: 67836 - DNA, 1431 bp, Acinetobacter baumannii
atgaatcttatgactgtcgagcacataagaaagacaacgaatgctaagctgaaccccaagaaaaaatctgaacttgggcaattcatgacgcctagtgttattgctgaatatatggcaagccttttcgacgatcataaaaaggaaataaaactcctagactgtggagcaggtataggttcattaactatttccgctgcaaaaaaacttaagaatattaagctagtggatctatgggaaattgatcccatcatgcaagagcaactagaaattaacatgcattctataaagcttaatttctctatctatgctcaagacttcattttaggagctgttgagaatatctcttcggataagggcgagcgatacactcatgccattattaatcctccatataagaaaattaatagcaattcagagcatcggagagtgttgagaaaggttggaattgaaaccgttaatctttattcagcatttgttgctctaacaattcaactcatggaacaagatgggcaaattgtagcgattattccaagatcattttgtaacggtccttattacaagccattcagagaattggttttgaaagagtgtgctatagagcacattcatatctttgaaagtagagacatggcttttaaggatgatgatgtattacaagaaaatatcatcattaaactgactaagggcaaacagcagtcagacgttcagatttctcaatctaatgaccagaccttccgtgactaccaaagcaaaacagtcccttttgttgaggtcattaaacctaatgatccagaactatttatccgcattgcgactaacgggcaacctcaagaagaaaataatacgttttttgccgtttcattaagtgaattaggaatatctgtaagcacaggaccaattgtgtctcacagaatgaaagagttcttagagcaatctcctcaagatggagctgttccattattttacccacatcatttcgtagacaagcagcttcaatatccgaaagagcataagaaaccaaatgctattagggttacaccagattcacagaaatggctgctaccgaataatggcttttacgtgattgtcagacgattcagttctaaagaagaaaagcgacgaattgtcgctaatgtgatagatcccaatataatcgataaaaaatggatagggttcgataactgttggaatgtgttccatataaaaaaacagggttttgactatgaaacagcaatgggattagcttgttttctgaatagtagcttattagacagctatttccgtattttctcaggtcatacccaagtaaatgcaacagatctcagaaacatgaaatatccatcccttcaaaatttgcagcttttaggcaaaaaatacgacattaaaatgaatcaaaaacagattgataaccttctcggggagattaagtga

SEQ ID NO: 67837 - DNA, 315 bp, Acinetobacter baumannii; identical to SEQ ID NO: 54445

SEQ ID NO: 67838 - DNA, 513 bp, Acinetobacter baumannii
atgacagatcagctattagatgtgaatcaacataaatttgatctgaccatacgcttagatggatctgcgccaagtttggcaaatagtaaaattttaaatacctatcaacgttatttatatgcaacacctgaatatttcaatcaacatggattacctacttctttagaagaacttaaagaacataagtttctaatttactatcaagatagccgacataaaaaattgatttttcaaaaagatcagaaagaagtgtcttttaattgtttccctgtgatgacgtgtaataatggtgaactattattggatatgtgtttaaaagatcacggtattgtttttcttccagagtttattgcagagccttattacaaagaaggtaagttacagaaatgtttggaagattataccagtcaaccgcttcacttatatgtcacatggccaaatcgtaagattttatcgaagaaagtaaaactatttattgattttttaacacatcaaatcattcccataaaataa

SEQ ID NO: 67839 - DNA, 639 bp, Acinetobacter baumannii; identical to SEQ ID NO: 54446

SEQ ID NO: 67840 - DNA, 444 bp, Acinetobacter baumannii; identical to SEQ ID NO: 63308

SEQ ID NO: 67841 - DNA, 501 bp, Acinetobacter baumannii; identical to SEQ ID NO: 54480

SEQ ID NO: 67842 - DNA, 771 bp, Acinetobacter baumannii
gtggatgaacttgatcggtgtaagccggagttttcaattaaactgattgagcggattaaacacttctttgatattccaaatattgtttttattctctcaacaaataagtctcaattagaagaatctataaacagtttctatggctttagatcagcaaatagttacttagaaaaattcattgatttgaacattaaattcccaaaaagggaaagtggcacttatattgaagtaattagaacctatcttagtaaattcggattgagattaaatgataatgatattttaattttatccgcagtatttaatcttaattcgagagatctcactagaattctacagaaattagctttaataagtaaccatcttaatcattctgtatctacagtaatggctgtcatttacttagctatggaacaaaaatcaatgaatcctagccgaatgtctgaaaaagaatttttagatacttttatgaatttattgactatttatgtcaaaggtcagtggtcatacaattctagcagttttgatttccctaatttggcaaagtttgcagatcaatatggggatagtcaatcaattagagatggctcagggttttcatatttactcaaatattactatcttgaatatacggatgaccaacttgatggacgttcattagaaatgaaaaaggcattaaaagataatttgaaagctagtatttactatcatgaaacagattttgtgaaaagttgggataattgtataaactcaggtttcatagttaattaa

SEQ ID NO: 67843 - DNA, 1113 bp, Acinetobacter baumannii
gtggagttaatcgaaaatttaaatgtaaaaaaaactgaaagctctcttagagttggtgatttagaaaaagaaattgaatcttgtaatgaagtagtaaaagttgttcaaggacaactatctgagccattgcaaaaatataatgcatatgtggagagcttaagaaaatgggataataagcggttggaattaattggagacaatgggtctctagactctttacttggaatacaatatcaactagaaaaaatagaaaaattgcctgaacagctaattcaaaaaagggttgatagaaaagatatttcaatcaaaatatttgaaattttggaaagaaaaaaaattatacgtgaatctctctatgagccagtgcaacaggctatcgagaaaaatgagtttatcaataagaaaaataaatttgagtttgtatctcggctgaacttttcaactgaacattttcaggatgaattaacaaacttaatcatgcaacgcagattagagtttacacccgataatataaaaaaaactttagaggaattatccaatcaagaggatcttgagacgaaggaaggatgtattaattttattgagaaacttattggaaagttagaagaagtaaatggcgctactggtattgctgatatggtgaaaaaaaatacgacacctaagaatgtttatgattttgtttatagtttagattttataaaatccaaatattctttacgttttcagaatgccgaagtagataaattatctcccgggcaacgtggagcattattgctgatattctatttattagtagatcaagataagacaccaattatcctagatcaacctgaggaaaatttagataatgatactgttgtaaattctttggtgccaattttgaatgaggctaaaaaaacaagacaaataataatggttactcacaatccgaatcttgcaattgtttgtgatgctgaacaaattatttacacagatttttacagagaaaataatttttctataaattatacctctggttcgatagagagttatgatttaaatcaacatgctgtgaatatattggaaggaacgttgggtgcattcaataatagacgaagtaaatatttcgattaa

SEQ ID NO: 67844 - DNA, 186 bp, Acinetobacter baumannii
atgaatgtagcaactaaatttatcaaagatcgtgaggaagaaattacagtaccatttcaaggagatctatggggacgtaagcaactaagtgaaaagttaactcatttcatttctaacttgcaatgtggggcgacaattgcattagatgcggggtggtgtttcaaaaagtatgctgacattaaatga

SEQ ID NO: 67845 - DNA, 702 bp, Acinetobacter baumannii
atgatagtgcttcgtatgatactcgatagtgctgccgaacgatatgaatttgatagcccttataaaaatatcaagaacttaaagcaaggaaagattgaagtaacacctttttcattaaaggaagtacacgcaatccttgccacagttcgtgatgattttaagccttattatactgttcgatttttcacaggtatgcgcaccagtgagatcgatggcttgcaatggaaaaatgtggacttacaacgtcgggaaatccacattcgtgaagcattggtgaatggggagcttggtggaaccaaaacttatggttctgaccgcacgatccagatgagtgatcgggtttatcaggcctttctgcaacaaaaaagcttaaattctggaaaatcagaatttgtattttgtaatcgcgatggtgggccgcttgattatcgcctggtcaataagcgtgtctggcatcccctgctacgctatttagggctaaaacctcgtcgtgcttatcaaacacgtcatactgcagctacgctctggctgtcggcaggcgagaacccagaatggattgcacgccagctgggacattcaacgactgaaatgctattccgggtctatagccattacatccctaatgttacgcgccgcgatggtagtgcttttgaagccatgctggagagactgaatacagagaagcttgtccatgaacagtaa

SEQ ID NO: 67846 - DNA, 249 bp, Acinetobacter baumannii
atgaacagtaaagctttttttggcggcgtagtcgttagcccagaagcggatacggtcgctcgtgaattaatccatgagctacacattcccaaactgcacaatctggcctttttgctggaaatcaataaatgcttcgatgatcaccaagcattaagactctggctacagcgaatgctggatgaagggcaagctcattatgatgacttggctcaacaggcccgtttccggttaatgagcctagctcactaa

SEQ ID NO: 67847 - DNA, 561 bp, Acinetobacter baumannii
atgcataaagatatttcaatttggatgccactctatattggcgacctacaggcaaaatttgcacgaatgacggcagaacaaattggtgcggcactgctgttaatgatggatttctggaaaaatggtgccattcctcacgacctagcgactgtttgtagcatcacgaaattaccgcagcacaccaaggctaaaactttgttaaatacgctgatggccctagaattgtttgaagtcgagtctgagcagattcattcaaatttcttaagcagtttaaaaagccaagcattgcaaaatcagcaaatgaaatctgataaagctaaaaatgcagctcaagcacgttgggggaaatccgcaagtaatgctcaagcatcagccaagcaacgaaaagtaaatgctcaagcagctcctgagaagaacccgagtattactcaagtcatgcttgaaccatgcccttcatcttcatcttcatcttcatcttcatcttcatcttcatcttcatcttcatcttcaaattttgaagaaaaaaatgaggattttttagaaaattccaaatggatttag

SEQ ID NO: 67848 - DNA, 747 bp, Acinetobacter baumannii; identical to SEQ ID NO: 54599

SEQ ID NO: 67849 - DNA, 420 bp, Acinetobacter baumannii
atgcttgaaggtggcagctttttccaccatggcgactcatttgcgatgatgcgtggtggacaccttgatattgctgtacttggggcctttcaggtggcagccaatggtgacttggccaactggcacacgggcgcaccagatgcgattcctgccgtaggtggtgcgatggatttggcggttggtgccaagaaagtatttatcactacggaccacgtcaccaaacaaggtgagccgaagattgtcgctgagctgacctatccggtaacgggcaaacattgtgttgaccgtatttatactgacctgtgtgtgattgatgtgaccaaagatggtttaaaggtgattgagaaagttgaaggtcttagctttgatgagttacaggctttaaccggtgcaactttgattgatgcgactcaagggtaa

SEQ ID NO: 67850 - DNA, 420 bp, Acinetobacter baumannii; identical to SEQ ID NO: 67849

SEQ ID NO: 67851 - DNA, 201 bp, Acinetobacter baumannii
gtgaatggcttatacaaaacagaggtgattgaatatttaaaagcagattggcaaggtttagcagatgtacaacttgcgacactaaactgggtagattggttcaataaaaagcgtgtacacagtgcactgggttatgtatcgccttttgagtttgaagcaatgtactatgataagattaacccgttaggtcaggtggcttaa

SEQ ID NO: 67852 - DNA, 411 bp, Acinetobacter baumannii
atgcttgatttacaaactgcggtagctaaagttgcctatacaatcgatgagtattcttttgttatcaataaaggtagtaaagacaatatagatgttaagaaagaatattttattgttgaattaggtgaattgattgtagatcctgatacaggaaagcctcttgaaagattgcatttagtaaaaggaacagctcgtattgaatctatacaagagtctattgctattcttaaatctagtgaacgggtaattattaaacatgcggttaaaaaaaagagggaaagagataaaacctcttcatttccagctgcttttgaatctttattgggctatgaagtagtcgaacctgcaattacagaacctaaaaagattactaacttaaaggttggagacttaattatccctaaagagtaa

SEQ ID NO: 67853 - DNA, 525 bp, Acinetobacter baumannii
gtgttaaatataaattggaaaagttactttttttctcatgtcacaattgcttatgcgattggtgttgtcggttttgttagtagtattacaaccgtttttttggatacgagtactaccctgtccattaaatacttcttatttttgatatgtatttctttaatttttattattattttatttaaaattataaatgacttaattaataatgataatcatcagtctataaagggcgatgctccaatatcctttaacgaacaaagtaatatctttattgtaagaaatactcctttttatcgaaataaagttgtgtattttgtttatgttgaagaagcattagctgagcgtttggcctatatcgtcagtcacttttatgaacaagacaaagtaatacaactgaaggtgcttaaggactttaatgttttttctacaccacctaaagaatctgaaacattaagtagattaatcattaaagataaactatctgttaatcttttagatgatatctcttttgatactaatgaatga

SEQ ID NO: 67854 - DNA, 909 bp, Acinetobacter baumannii
atggataattatcgccaactgatggctttcatctgggcatacgagcatggaagtttttcagcagcagcaagagcacatgatttaacgccatctgcaattagcaaattaattaaccggttagaaaatcgtttgggtgtacgtcttattcaaagaggagcaagacaacttacattgactgaagaaggcgttgcatatttaaagagtgcacgaaatgttgtagctgcaatgaatgaggctgactctttagctgaagcatttccaacccgtgtgagtggtgttttaaaaattagaacgatgccaacttttgcacaacaccaaattttaccttggttgcctgagtttcttgataactatccatctttaagtgtagattttgagttgaatgcggtatatcaggatgattttgatcgtggcgttgatatcgcaatttatggaggaatacttccatcttcatctagaatagcaactcgaattggagatagtgaatggataacttgtgcttctcctcaatatcttgaaaaatatggaatacctgagcatccacaagaattattaaaacatcgatgttttcattttaatttttcgagtaattggaataattgggattttttggaaaataatgaaagttttattgttccaattaagccaattgcctcattttctcaaggaacttttctcagagatcttgcgctaagaggacaaggagttgtaagacttgctgattatcatataggtgaagatattagacttggtaggctcattcctatcctaaggaattttcgttctggaataactgagcctcagtatattatatatgcgaatcggaaacttcagagccctagaatcaaatgcttcatgcagtttttgcaagaaaaaatcaagattaagccatggagacttattgtttaa

SEQ ID NO: 67855 - DNA, 549 bp, Acinetobacter baumannii
atgctacagcaaagaaatccggattactcagccaatgaagaacttatgccttttcagttacctcaagttccatatatgtcgcctgatcttgtgattccaggcgttttagatgaagctttgaaagacgataatttatgggtacctacatctgattctgtaagttttaaacccctgcttttgaatactagctctggttactatgtaaatttattacgtgttcgcaaaagtggtgtgttatctagacatcgtcatactggagcagtacatgcatttgtactcaagggtcgttggtattatctagagcatgattggattgctgaagaaaaatcatttgcttatgagccacctggtgaaactcatactcttttcgtacctgaagatgttactgaaatgattacactatttatagtacatggtggctatacatatgtagacccatttggaaaagctgtaggttatgaagatgtatttactaaactagaggccacacgtgaacattacaaaaatattggtattcctgaaagtgaattagaaaagatcattagatag

SEQ ID NO: 67856 - DNA, 1083 bp, Acinetobacter baumannii
atgttaaagataatgggatttcctggtgagtatatccaaggagaacatgctttaagaaatattggtgatattgcgataagacatgagtttaaacaaattggaattatttatgatccagccattgaaggacctattctaaataaggttactgattcattaaatcaggtaaatatagattttattagctacaaatttcctggtgaatgtacttatgaaactattgaacgtttaagtcatatcatgcaactacataatatagattccatcatcgcactagggggtggtaaagcgatggataccactaaaggtatttcaaaaaaattaaatatacctattattatttgccccacagtcgcatctagtgatgcacctacaagtagactgataattgtctatgatgatcatcataaagttcaaggtgtggaaaaaacaaagcgaaatccagatattgtattagttgatctaaataccattgtacaggctcctgctcgcttttttgctgcgggcattggtgatgctataagtaaaatgtttgaagtaaaccaatgtaaaaatgctcgtgggctgaattcattttctacaccacctttagaaacggcattactactagcaaataatacttatagtaatcttatcacatggggaaaaatggcttatgacgatgtcaaacagcaccatattaccccttcagttgaacgagtcgttgagtcgacggtgcttctaagtggcctaggttttgaaagtggtggtttatctttggcacatgcccttatacgtggtttaacagccattccagagctagctgctaatttacatggagagttagtagcttatggcacggttgtccaagcagtattagaaaatagagagcatatttttattattgatcttattaattttctaaaatctattgatttaccgacgacaattgctgaattgggatatcatcaagaaatgagtgattccatgctagaaacgatcattatgcatactctgcaaaatgactatagtagaaactttgaacctgctcttaatacagaaaacctaaaacaggcaataattaagaccaatcattattgctaa

SEQ ID NO: 67857 - DNA, 174 bp, Acinetobacter baumannii
atggttttagaggtaggcgatcaagtgaaccaacatgtaattgatgatactcctctaggtcgattaggttcaccaatagaagtagcaaaagttgtagagtttctggcttctaacaacagcaattttgtcactggacaagtgattgatatagcaggtggttggctaatgcgataa

SEQ ID NO: 67858 - DNA, 360 bp, Acinetobacter baumannii
  misc_feature (341)..(350): n is a, c, g, or t
ttgatagattttaattgtgatttattacttgctaagcatcaggaattggcagataaaggctatcgcgtcagttcattttgtactgatatctctaattatgaagcttgccaagctgcgtatgaatatttttataacgaaataggctttattgatactttagttaacaatgcgggaatttctccaaaacatcaaggacatgcacataaaatttggcaattatctcctgaagaatggcaacgtgtagtaaatgttaacttaaatggatcttttaattttattcgaattttagttccagaaatgattaagaataaatttggaaaaattattaatacatcatcagnnnnnnnnnntacatcataa

SEQ ID NO: 67859 - DNA, 231 bp, Acinetobacter baumannii
ttgaaatttcatggtggaaaaatggtacaagtatcattaatggcaaataatgcttcaaaaaataatacagttgatattaatgtaggccaaacaaaaaatattgtaatagatccgaaggtaatcgcaaaaattgatattaatccagaaagaattgcttcaataacaagagatggtaatagtgcggttattcatctaaaagatgggactgaaattgttttattggactgctaa

SEQ ID NO: 67860 - DNA, 147 bp, Acinetobacter baumannii
atgatgaataaaattaaacaacccagaaaaattacttccggctcagtaaagtcacatcttaaaactttgttgaattcattatatttaattttgaaaatcattcgccttttgctagaactgattagcattctatttcttgagctttag

SEQ ID NO: 67861 - DNA, 1401 bp, Acinetobacter baumannii
atgattacaaattattcaatagaaaattttaaagttttttcagaaaaaacagatttagaatttgcaccaattacgttaatttatgggccaaactcatctggtaaatcatcgattattcagtccttactagtccttaaggaaagtctattaagttcaaactctttaaaaagtaataataagtattttgaattgggtagttatctttcagttgtaaataaacatgacggcgagaaaaatattaaatttaaaattgatgtggataattttgagtattcatttaagtactcatacaataaagattataatatttcttatttagatgaaacacatttaaaatcattgaatgatctttattataatatatcttttaaacctaaaaaaattacgaaagaaggagtaagtatatatggcattaattttgataaaaaaataataaaaaaaattataaagtcaagtaagtttttgcaagacattaatgaattgttggaaaataaaagacctacaacagatgaagatattgaaaagcatgtaaaaaaaataagtttttcaaggaaaaataatttactacctttacgaattagtagatcagaagctgatgcaagtaatttgttgcaagatgatgaaatcaagagatttgtacactattatcagaatggtgtggttgatggaattagtcgttatttgaatatgggtgatcgaaaactttttactttattaaataatatctcatatattggtccattaaggccacatccgaaaagggtttatcagttagatggtttagttaatagtagtgtggggcaaaatggggagaattttttatcctttttaacacttgatgataaatatgtaaaaggagtaaatgaggttcttcatagctttggtattaattatgaaataaatgtaccaaaattacaaaatgcaattattggtgacactgcatcaattgtattaaggaatactaataatgatgttactactacattagttgatgtcggttttggaattggacaagttttaccaattattattgaaggtttagtaaaagaaaaagcttctatttgtatcgaacaacccgaaattcaccttcatccgaaattacaagctaatttagctaatttttttgctaaagatattaagtcttcacaagctaatcagtggattattgagactcatagtgaggcattgttgcttagatttcaaaggcttgttcgccataaaattattaatcctcaagatatatctattatttatgttgatcctactgaatatggggtaagaacaattactattcctttagatgaagatggtgattttaaggttagttggccgaatggattctttgaagaaagacttgatgaaatgtttggtggaaatcctttagaggataatcatctgtga

SEQ ID NO: 67862 - DNA, 1011 bp, Acinetobacter baumannii
gtgattacaccatttatttttgataaggaaatttttaattgtccaaattttaagaataatcttttaataagtgatgctttaattgaagattgggagcgttttggtattttattgttttctgataaaactcaaatattagaattgacaaaaaagataaaacaagattttccagtaaagtatcaaaagcggtggacaacagcactcacatattttccaaaatatattattgataaagatattgtttctgacttttctttaagtaataatgatttggaaaagttgttagaggtttttaattatgctgaaacattattgttaagctcggaaaattatcaattaatcaatgagaatattgatatttccacattgaataatgatagtgaaatattggattatcagtatattaagcgctcaaaaaattttgaatggtcaagaatttactctattaaacaaattgattatagggaaaataatcagcaaatctttaataggttgaaaaatatttttaaatatacgaaagaattaacaattgttgatagatatctatttaaaaatgacttcagttctgcatatgatcctacaataggcacaactgccttaaaaaaggtatttaaatatttgtctgataatgacttgtatattaataattttctaattgtgtctagtaataaggacttaactcaagaaaatgttaaacaacttttaaaagatatcttatcggctaattcaaaatattatgagtgcttttcagagctgaaaattattatgagagatgatagacagttttctaatatttttcatgatcgaatagtcagaacaagttatcattatctggaatttggggctgggatggtagatgcattaggtccatctaatgtagagagatttatgactttcaactgcaaaagtagaactcaagtggattatcaaaaatatttccatgatatttctttaaatcagatacaaagaaatgaatgttcacttgttatttcaaaagaaaacccgctctaa

SEQ ID NO: 67863 - DNA, 4908 bp, Acinetobacter baumannii
atgccaacagcaccaaaaactatttctcaagcgaaagcaaagccaagtgtgagaacaaataccggacaggtcgcggtagtacctttaaataaattgtatgccgccgatgttaaagcaggtatgaataaaattgattcatggctaaaaacgaatactaaaggttatgtcgatttaaatacgattaaaagtactcttggcacactgccagtcattggaaatgcaattgctttagtcgatgcaatttatgatgttatagacattagtaaaaaacctagcccagcttttacagattggttgaatttgggactggatgttattggtattattccagcaccgccaactatggcaacaatgcgaatgagcctaagacctacgttgaatttggttagacaaaaggcgaaaggcacaatttctgatacgattttggtcattctgagcgatcatttaaatgaaagaattgctggggagttagaccaatttgcgaaaaatgcccaaccccttgtcaaccagatgttgcaaaattgtggtacaaaaattacagctatcagtaatgattttgctaacggaattcaaaaagtacttaatggaaaagtatatagctctgcgggtaatttaaaaaacgcacagaaacaattaaataaagttaacttaaataatttacaacgcaaccctaaagcaacgatatcaaatgctgttgatgggctcgtaaatatttggaaagcaggtgtaaaagagcaaataaataccgttgccaaaggtgtatctgctgttgtgcctgctagtgcaacacaaccgatccagaatgcaatcacttccattcgtgtttttggtagaaaagcaccttcatatttaatggctttggcagatccagcgaaagcaatgagtatcgcttggctactcaatgttttgcttaaagctgtacataagttcaaactaaagggtacaaaaactgcaaatattaaacctacacaagtcactgaaaaaagaagacaaaaaccaaacggagagcttgagaaagctaatgttcaagcaaagtcaaagggtaatccgagtgaaactgtatgtgcattaaatttaaggggtggtaaaagcaagcccaaatctacctctggtacaaaaagaaatattacctttgctttaggtacagagtgtttaactcatcaagatgcttatgtgtcatcaattttaagctttgtattaactcggaaatatgcatctaatctttatcaactagatcatggtgagtttggtgcaagatggataacaccgtttacaacccgtattgttccacagagtgaatatattgaagagacagaggaacgcgctggatatttaaaacacttaagtggttttgagtttattggagcagatgctcgtccagttaagttaccaaacctgaaagtaggtgagagtttccataataagactgaagatttttactatagtgtaatttctgaaaaagttcagatgatctcttatcaaaaagaagagaaacacttatttgaaaaatatcaggatggttatcgactttcagccatagaatacaagaatagacttactttagcagtacgttatgaccatcacttcgaaggtctaagttttatttcagatattgttattaaagaaaaacaaaaacagttaattcatgtggcatttcaggtaaatgcttctggaagaattgaagatgtgtggctggttgaaaatggtcaacttgctcgaccacttgcgagttataactacaatgaaaaaggcgatttggttgaagcgattaccgaaaatggagcgagctatcattaccaatatgaccatcatcttttaacccgttataccgatcttacaggtcgaggcatgaaccttgaatatgatggtgtggaaccaacgtctaaggcttaccatgaatgggcggatgatggcagttcagatacaactttacagtgggacgagaatattcgtctaacgtatgtgacagatgcttatggagctgagacttggtattactacgatattgaaggttatacctatcgtattatttatcctgatgggctggaagagtggttcttccgtgatgactttggccgtgtaactaagcatgtagacactgatgcagcggtgactatttatgattatgacgagcacggcaatattgtatctatgactcaaccagacggttcccttctacattatgcttatgatgaaaaccgtcagcttataggtatggtggatgctgaaggcggacgttggtttaaagaatatgatgcggctggaaacattaccaaagaaaccgacccactgaagcgtgaaacacaatatagctataacggtttaggtttacttacctcaattaaagatcctaaaggtggcactaaaaccttaagttatgacgaccaaggcaatttaattagttatatcgattgttctggtaaagaaaccaaatggacttacgacaaaaaaggccgagttgttgcaatagaaaatgctttaaagcaaaaagttgaatacttttatagtgatctaacaattgagcaacgtgaaccaattattaaaggtttagctctaaatgcttttggtcaacttgaaaagattaaacatgctgatggcacagaagaacacttcattcatgatgctgaagggcgtttactggcacatatagatcagaaacagaatatcaccagatatgaatatgatgcggcaggtttaattgcatcacgaacagatgcgctcaatcataaacttaaatatgagtgggataagcttaatcgtctcaagcgcctaattaatgaaaatggtgccagttaccaattcttctatgatgtcgcaagccgactcgttaaagaaattgattttgatggtaaagaaaccatttataactatgacgaaacagacggaaaccttgttagtagtgttgaagttgcttctatgcatggtcaagatttacgagatcgaattgcaccgaaagatcgtattcaaaagtttcttttcgatagcatggggcgcttagaacagcgtacagcaggctatggatatgttgagcatgatttagagcaacaattagttgaagaatttgcttacgatagtaatggcaatcttattcaagccaaaaatgctgaaagtaacctacagtggtattacgatgctgtaggcaatgtaattcgtgaacatcatcaagactataaaactaagaaaactggagtctggaaacacagttatgatgaaattaatgatcgaataaagactgtgcgtccagatggacaaaagattgactggttaacttatggttcaggtcatgttcatagtctgattgtgaatggccaagatgttgtaagtttcgagcgtgatgatttacaccgagaaatcgcccgtcactatgccaacggaattagtcaagaacaacattacgatacgatgggacgtttaacccagcaaaatattgttaatggtcatgagttcggttatccgtcaaatgaacaagttagccagacccagaacaatgcaattcaagaaacccagcagttgattcaacgtttatatcaatatgataaaactggtcaattaacaggaattaaggatacgcgtagggggaatatcaattataagtatgacccggttgggcgtttgcttgaggctagcagtaagttgggtaaagaaacatttagttttgaccctgcgagtaacattctagattcatatcatagtcagaaagttcaaagccattcacaaaagctagaggaaacaggctttggttataatcgtttggttaataacgtagttaaagaatatctagatcaacaataccaatatgatgtttatggacaacttgtttgccagaaatcaaccaagggtaatttatatcttgagtgggatgcatgtgggcgactgattaaaagtcgtaatgctgaatatacggcagagtaccgctatgatgcgttaggacgccgtattcaaaaacgaagtaaacatcatcataccggtgatgagcataacatcatttatggatgggatggcaatacacttgcttatgagtcgaatgagcaaattaccaagcattatatatatgagaaagattcatttgtaccactggcacaggcggtttatgcagaagaaatagagcttcatcaaacacctgactgggcagataagccttatagtttacaacgtgacccattatggaaagtaaccaaaactgcaaaagattttaaagatttttggttctatcattgtgaccatttgggtacacctcaagaaatgaccgatcatactggtgcggtcatatggcaagctgaatataaagcttggggtgagtgtaaagcagagagagccaagtcgaatttcttcgaaaatagtgaaattatttcaaataatatccgttttcaaggacagtattttgatgaagagacagggcttcattacaaccgttatcgttattattcaccgtatgtagggcgttttatttccaaagacccgattggattattgggtggagataacgtatatgcatatacaccgaatccagtaagttgggttgatcctttgggattagtaaagaaaaaaccatctaaatatgctttaaaagatggtcataatgctactgctcaagagatagcagatagtaaaattggtggaggatctcgaagtgggcaatctaaagttcgacaaaaattgttagatgaagataattctaataataatggggtttatacttgctggcgttgtgggcaaacttctactaatccagatgatatgcatttaggtcacacaaaagttccaacttctaaaggaggtaatttaagtacaggaaatacagcattagagggtgcagcgtgtaatttaagcgcaggaaatagtggttatgttaaagaaggcatgtcttgtaaagagaggggaagttgtggagcgccatatggaagataa

SEQ ID NO: 67864 - DNA, 486 bp, Acinetobacter baumannii
atggaagataattttaaaactttaagtatttatgcaggaaaaactagctctggtaaaactagattagaggaagtcctcgtagaatgtatagatgggaacatctataagctactatctgcgccaggattggctctaaatttagcaaaaggagatacttttgaattcattaatagtgatgagcccgtaaaaattatatgtcgaggagggaattttaatatccatatttatgaagcaaatttaacacttgaagattatgaagattttaaaagtgaacttttagactatttaggaggaactatagatggtttgagtggaaacaatatagctattactgtaccctctgcccaaggtattcaaaaaattaacagtttttttattaattttagccaattgtcaggtaataattggtcatttactaatatttataaaaactatgaagattttgaagatgaaacattattagattggtgggataagaagtgctaa

SEQ ID NO: 67865 - DNA, 255 bp, Acinetobacter baumannii
atggttgctgtagctttagattcattgggaaaaataccaattacaggaatacgtaatatacttgaagaaggagaaaatatctcatggtttttctattgtggagaattttctgaagatgatgatttctttaaaccaatgcatatatctcatttagaaaactatcttcccgaagttattccttatttagcattagaagaaggttttaaatttgtaatagataaacagggttacgaagatgtatggaaagaagaatag

SEQ ID NO: 67866 - DNA, 342 bp, Acinetobacter baumannii
ttgggtggattcaatggttatgtttatgcacctaatccaataggttgggttgatccttatggtttaaataataatcctcttgtaggaatagatttatcaaacaagagtagaagtgaaatagaaaatattttaagtaattctagtgaggtaagttataaaggtggttctcctgataagaagttcatgcaatggaaatggaatgataatggtcaaacagcagtaagactagatccaccagataaagttacattatatgatcatgctcatttatatgataaaaatggaaacatagttcctcgcgaatccccagatgcacatattcctattggagactgtaagtaa

SEQ ID NO: 67867 - DNA, 363 bp, Acinetobacter baumannii
atgaagttagaacaaattgaaacagcagatatggatgtgaaaagtataaagatttatggagataagttttatattttattttcagctgtttatgatacatccttaaaacaatatataaaaaatgtggaattagttttttctaattggagttcatttaagattgaaaagtatgatggtaatattgaagaatataaacaacttgatttacttgaaataaataagagtaaagatttatttactttaatccagattatacatgtctctgaagatgtagttgagttagagggttttaatgatgatggtgagtggaataaagtggtcttttttaacccgacgtatagcttgaatattattgatatttaa

SEQ ID NO: 67868 - DNA, 1365 bp, Acinetobacter baumannii
atggataatctgcaaacaaatattgctgctgtgaatcagcaacgagcgaagcataataaaacgcgctattacattttagcgatgattttcttagtcacttcattaaattacggtgatcgagcaaccctttcaatggctgccgctccaatgtctcaagaacttggattaagctcagtgaccatgggatatatattctctgcgtttggctgggcttatgtgattggtcaaattccaggtggatggttactcgataagtttggtgctcgaagagtctatttctggagcatcatgctctggtcatttttcactattctcttaggttttgtcgatattttaggttctatacctctcattatcgcctcattatttatcttacgtttcttggttggattatctgaaagtcctgcctttcctggaaacagccagattgtagcagcatggttcccaaccaaagaacgtggaaccgccgcagcgatatttaactcggctcaatattttgccactgtcatatttgcgccattcatgggatggttggttgcccatattcattggcaatctgtattctggattatgggtggactaggtattgtgattgcttttatctggttaaaagtcatctatagcccagaaaagcaccctactattaattcaaatgagtttaaatatttacaagcaggcggtgctattaccagcatgggtgaaaatcagcttaaaattgctgatgaaaacaataaaatgaattttaaaaatattaaaaagctgctctcttctcgtatgcttctaggtatttttatcgctcagtattgtattacctgcttaacctatttctttattacttggttccctgtttaccttgtaaaagaacgtcacatgtcaattttagaagctggttttgcagctgtattaccggcgctttgcggatttattggtggtgtattaggaggagtaatttccgataaactcatcaaaatgaataaatctctaaccttttcccgtaaatttcccattatttttggcatgttgttatcaaccagtattgtggtttgtaactatgtcgattcgcaaacagccatcttattctttatgtcactggccttttttggtaaaggttttggtgcattaggttgggcagtgatgtcggatgttgcaccaaaagaaatggtgggtttatcgggtggtctatttaataccttcggcaatacagcaggcatcgtgatcccgattgcgattggctatattatcaattcgactggttctttcaatggtgcacttgtttttgtaggtatacatgccgtcatcgcaattatttgctacctctttatggtcgggaaaattcatcgcttcgagttaaaacctacttcttaa

SEQ ID NO: 67869 - DNA, 1179 bp, Acinetobacter baumannii
atgtctacgttttatcgaatgagcttaattgtctttttggcaacttgtttgggaattggtgtttttagattttcctatagtgcgcttatgcccatcatgatcgagcaataccaatggactcacgattttgccagttacttaggcagcgcaaatttattgggatatctcattggtgctttattagcgctcttaagtattaaagaaaagtacatcacatccatgattgtattttcagctatggctggcagccttagcctactctgctgttcattcatggatatgcctttggtgtggttcattgtctggcgtacgatttcaggtattgctggcggcttacttatgattttggcgcctagctttgcaatgaaatacattcccaccacgcaaagattaaaagttaactttttaggatttagcgggattggtgtaggggttttatccgccactattattattcctctacttcaaaatatgcctgttcattatgtttggaatatttttgcgggtctttctctattaggaagtttaactctttatcgattattaagtcgtaatactacccagattattaaaccgcaatcgacctctctacaagccttacaaaaatcacgtttaggccttgtcattattattgcctatatgtgtagtgcctttgcatatattccacactctttgttttggatggattatttatctggaactctgcattttcccctacagcaaagaaatctattttgggttctctatggattaggaagctgtattggtgcacttgtcgcttattgcttaagcagactaattggacatctacaggccattaaatggttatataccatttactgcttagccgttgttttgccgttcctttcacatagcgcatctttactggctttatcttcgcttctgacaggcttactgactcccgcaaccgtatttattagttcttatagtctgctacagatttatgagcaacgttatcaaaaactttggagccttgccaccattggctttgccagtactcagtttttaggtgggattgtcattagtactttgcatcatttgcattggtcttatgcacatctctttcttttgggtggaaccgttcttctctttgcggtttgccttttaattcccctacgcccttctttcacctcaactctcggagaaaccaaatcgtga

SEQ ID NO: 67870 - DNA, 942 bp, Acinetobacter baumannii
atgagcgatcagaatcaaaaagcaactgctgctttaagagaagagtttgaaaaggatcgagaatttaatgataaaagagaaaaaataattgagaatttaaaaagtattagtagtcgaattcaagatgaaaatattaaaacattagttgatagaaatattgtacccaacttagataactttaaagatttatatactgataaaatcattataacttctatagaagatttactaacagataccttaaatgatgctgaaacatttattaaagatagagataatgtttacttaacaaaagtaatcggtgatttaaaagcggttgatagcttactcaatacgtgtaggatttcaactgcaggttttcagcatatagttaaagaatatttgggggctgctcaagcaagtgtatctagagagttgttaggctttcggaaaaatcgagcagaacgagataatgctgagacagaaagtatttatgagcaagcagttgaaagatataagaagcttgaaaataaatatagaaaatatttttatagatgtatttttcttgttctagtattagcttttacaactttattatttaaaggaaaactgattacttggttcgctttatctactacagaattttggattctaaaagcttctttattaatagttggtattactttaattagttatttcttgaagcaatccgctcactatcaaaaattagctgatcaaaattatcaaactcatgttgaattaagagcatatccaagttttatggaaagtattcctacagaagaagctgctagtgtacgtaaagagttggctcttaaatattttggtcgtgaaattgatggtgctgctcataaagatataagtaatttaatatctgaccaaatgaaaagtacaactgaaatagttaaagctactactgaagcaattaagaatttaaagaagtaa

SEQ ID NO: 67871 - DNA, 795 bp, Acinetobacter baumannii
ttgcaattaaatgatatttacttaaaagataaaactaatactttagttagtaattttaatttaatgattaatgaatataaaatacaatatgaaagtaatgaaaaaaagaatattgaagaattgtctaagtcagttcaggagtcacaaagagaattatctaatctttttggtgatatagaaaattataaaagtttaatttcggataaaactcaaagtgaaatatccaagttttattttgaaaaatctatttgggagagaaatacctatttggctatgacaacactgagtcttcttattattatttttgtaataggtttagcatggttcggacttagcggttattattcaagttatgtaaatccccaaggttttgctgaaactactaaaaatttaaatattgagaaaataaatttagttcaatcgaatgcattaaattatttaatattacggttagtaatttctattttattgtttttatctctaatatatacaagccgtatagcttatagatcatatattcattggcgacatagtgaaaatatgcacctaaaactcgcatctttgcgtccatttattaaccatcttaatgaagaggagagaagtaagattcataaagatctaatacctgattattttgggaaagatgctggtgtgattgataatagtacaagtgaaaaatttaatgaccttcctgccaatataagcgcaattgcaattaaaacaattgagcaaatatcacttggggggaataatttgaataagtctgagaatagttccaaaaaagatagtacttaa

SEQ ID NO: 67872 - DNA, 216 bp, Acinetobacter baumannii
atgaataaagtaagaaataaaattagtcaccgtgttgattttaaaatatcaatggatgatctagaacctttaaaatattacttatatggtgcatataaagaaaacaaagagatggttccttcaactgtattgaaattattagaaatttatacaatgatggtatgtgttgtcttcgctagtacaatcagtgcattagttcgtcataaatcaaaataa

SEQ ID NO: 67873 - DNA, 534 bp, Acinetobacter baumannii; identical to SEQ ID NO: 46224

SEQ ID NO: 67874 - DNA, 1299 bp, Acinetobacter baumannii
atgactagcttttcaaatattgagtctaagtcacagcaagttgtgcataaagacataaaaaaatccttaattgcaagtggcgtaggcaatttattggagtggtacgattggacaatttatgctgttgcttcagtatatatagcagcagctttattcaataaagctgatccaacctcagctttattgaatacattagccgtttttgcagttggtttcgtatcaagaccaattggtggatttgtatttggacctttagctaataagtatggtcgtaaaaacatcatgctagtcaccatgataatgatggcattagctagcttaatgatcgcgtttattccatcttatgaagaaatcggagcttgggcatcgggtttattattaattgctagattagtacaaggttttgctcatggtggtgaaacagctacctcatatgcatatattgcagaaattgctcccccaaaaaggcgtggtttatggtctagtatgtcatttttcgctgtgggggcaggttcattattagctacccttttcttagcactcttaaatcaattttatacagatcagcaaatgcatgattgggtttggcgaattccatttgcagtcggaggtggtctagcattttttgccatttatttacgtagaaatatgatagaaactcatgttcagaacaatgaaaatagtaattcagacgaagagaaatggcccttttctaaaattatgaaagttggtattaagcttttcttttatgaggcaggttcaacgttaacattctatacatgggtaacttgcgcagccatttatgcaatcggcatacaaaaaatgcctgctaaagatgcatttatgatgagctgtattgcccaagtgatttacttgatctgtttaccatttcaaggtcgattatcagattatattggtagaaacaataattccttaatcacttatataggttcatctttgttattatttccattgtggtcattaataagcaatgagccttggactttgttagtagctcaaagtattgggttatttacgatgggttttctgatgtcctgtaaaccagcagctatgtcagagcaaattcctacaaaatatagaacaaattttttaggttttttcatgtctttggcaattacagtttttggtggtacggcctcatatataaatacctggctttactcaatagataaaggttggatttttaatgtttatttgattgtagtatccgtaatcgcttcaattacagttttaacttggaagaataataaaggaattgatttagaccaggttaagtaa

SEQ ID NO: 67875 - DNA, 720 bp, Acinetobacter baumannii
atgactacgtatttttatttgtatgaatcaattatttctggtgctttagaatatctcaatattcagaatgagcatattctcgcaaatgagaattcttctaaggaaatactaaagcgcattaaaaaagaaaacggttcaattggcagaaagattaatgaagcagcatgcgcaagatttattaatagtgatggttataaaagtttgactaccattaattttgaaaatatagaatctactaaagtttttaaaattaattcagccaaccttaatgatagtttttgtattttatatttatatagtgttcttaaaaatatgtgtatggtttatttttataataataggtatgaaaaagcacatgctttttcgttaagagagtttgaccactatctatgggatagtgctatatgtccaaattatatggaagagcttaaaactgctgatgatattacttcaatgttagagaagtttaagccaaatcatattatgctttctaaactttttagcggtcatctccttcagcccgctaaagattttatgagtggatttggagtaattttattcaatgagtatggtgaacttttaagtaaagccaattttatattttatgatctaagtaatgcccctcagaatgccttaatattagataatgccaaaattcgagcatccttaacgcgtccttcaacagataacctgccgtttcttctctcccaagatatttaa

SEQ ID NO: 67876 - DNA, 1446 bp, Acinetobacter baumannii
atgagcctcggtctaaccgctttagaattagcacgaatacaatttgcttttacagtatccttccatattatttttccggccacctctattggacttgcctgttttttggcagttttagaatggaaatggttaagaacgcaaaaccctatctataaagatctatttaaatattggattaagatctttgccgttgcgtttggtatgggagttgtttccggtgtcgtgatgagctatcagtttggtaccaactggagtgagttttcacgagtagcaggaagcattactggtcctttacttacctatgaagtcttgagtgccttcttcttagaagcgggtttcttaggaatcatgctatttggttggggccgtgttggtcctagagcccatttctttgcaacgcttatggttgccatcggaacatgtatttcgatgttctggattttatcgtccaatagctggatgcaaacaccgcaaggttttgccatcgaaaatggcattattgtgccaaaagactggctagctattgtcttcaacccgtccttcccttaccgctttgcgcatatgggtgctgctgccttcttggtttcatctttattggtagtgggaacatctgcttggcacttggtaaaaggccgtcgtgatgaattggtgaaaaaatcattctcgatgggtttatggatggtgcttgtgacttcttgtttacaagtggtgattggcgataaccacggtttaaatactcgtgagcatcagcctgccaaacttgctgcaatggaaggtcactgggaaaccaattataacgagcctatgccactactgttatttgccattccggatatgaaagaagaacgaaatcactttgaagtgggcgttccatatttgggtagcttaattttgactcacagtttagatgggcaagtgactggcttaaaagaattcgcacctgaagaccgtccaaactcgaccattattttctggagtttccgtgtcatggtgggtcttggcgtccttatggtcaccttatcactcattgctctttggttacgtaaaagaggaaaactctatgaaacatcatggtttcataaattcgctgtagtgatggggcctgcaggttatgtggcaatgctggctgggtggattactaccgaagtaggccgtcaaccttgggtggtatatggcattatgcgaaccaaagatggtttatcgcatactgtttcggcagatcaggtgggtctaagtctctttatttttgtagtggtttacaccatcgtttttggtagtggaatttactacaccttaaaactcattaataaaggccctgtatttatcgacacgccaaatatggaagcaggcggcgtaggacactttaaaacaccgatgcgtccacttagtgcagttgatgaaaatattgacagcaaacaaaactctggggagaaccgtcatgattga

SEQ ID NO: 67877 - DNA, 1029 bp, Acinetobacter baumannii
atgcagccgatcgattttgtaatgatttgggtggactcaaccgatacgaaatggcagcagcaatatatatattataattccaaagaaacaaaaaccaaaattgatgagctcgttgatcaatgtcgttatcgtgactggaataatcttcattactggtttagatctgttgagaaattctgtccttgggtaaggaaaattcatcttgtaacctgtggtcattttcccgaatttttagtcaaaaatcatcccaaattaaatttagtaactcatgatcaaattatagaatctcattgtttgcctacgtttaattcacatgcgattgaaatcaatattcataaaatagaaggcttggcagaacactttgtttattttaatgatgacacttttattaatagtcctttagagccagagttcttttttaaaaatggtttaccttgtgatggtattcaattacaacctttgatggtggtgggggaagagaactttttaggcgcagttgctttgacggatgtcgcaattattaataaatattttgataagagaaaactcttccggagtaatccttctgcactttttaatcatcgatattcgataagtaataatttgggcaattttttaagtttatataaccgaaaattttcgagcttttatagtactcatttaccccaaccgtttctaaaatcggtgtttgaagaagtttggagaaacgaagagagctacttaaaagaagtatcaagtcatcgatttagacaacctttagacgttaaccaatacttatttcgattatggcagttatgttcggctcgtttttacccagtaaatatatttcagcgtggacagaactttaatttaagaatacaaaatcttcctgaaattaatcatgttattaagaatgagcaacttccacaaatttgtctaaatgacgatgaacacgtggttgattttgaaaaattaaaaacagaaattatccaaatttttgagcaaaaatttaatacggtttcgagttttgagaaaaagataacacattaa

SEQ ID NO: 67878 - DNA, 219 bp, Acinetobacter baumannii; identical to SEQ ID NO: 56387

SEQ ID NO: 67879 - DNA, 276 bp, Acinetobacter baumannii
gtgctgaaatgtaattttttaaatgttcatattaataatgtttatgacataaaattacatactactaataatcaagcaaatcaacgcaataatcagcagcaacaacaacagcaaaatgacaaccgtaatcaacagcaacacggtaaccaacagcaaaacgatcaacagcaacaaaataaccagcaacaacagcaaaatgataaccgcggccaacaacaaggatctaaccaaaaagattctggccaacaaaactcaaataacaaccaacaacgttaa

SEQ ID NO: 67880 - DNA, 255 bp, Acinetobacter baumannii
atggatttggcggttggtgccaagaaagtatttatcactacagaccacgtcaccaagcaaggtgagccaaagattgtggctgaactgacctatccggtaacgggtaaacactgtgttgaccgtatttacactgacctgtgtgtgattgatgtgactaaagacggtttaaaggtgatcgagaaagttgaaggtcttagctttgatgagttacaggctttaacaggtgcaactttgattgatgcgactcaagggtaa

SEQ ID NO: 67881 - DNA, 153 bp, Acinetobacter baumannii
atgacctctgccggaatcaacttaagagaatgctttacccgtgcttgtatgccagccgaggctaataatgtatttgttggtcctggagtcaacaaaatagtgactacaagtccaataaataaaaatgacaccataggcaaaaaactctattga

SEQ ID NO: 67882 - DNA, 411 bp, Acinetobacter baumannii
atgaaaaggctaaacgcaatagaaatagcagctgctgcctgcggcttagttagcaatgtaagttgtaccgaaatttcacaagaagctctcgaaaaagctatggtacaagtcgaagtctggaacattattcgagcagccaaagagatttggtatgacaacgggatgatcaaccgctttgaaccagaagaagaaatggtaactctacttgttcaatggttatctagcttagacaaagttttgatttgcgatatggaagcagagttatcgaaattaaacgatgatgatcttcatactctatgttgtggtgaagaatctgaacaagatcgaatcggttcaaaagaagtaaatgaatttctttgccgcatttttgatgaagagtatgaagttaaagcggaaagtaaggagggctaa

SEQ ID NO: 67883 - DNA, 270 bp, Acinetobacter baumannii
atgagcagattacaagtaggtggtttggctttgatattggactccgtagacgaagagatcatcggcgaagttgtggttattactggacatgatggttttgccgttagtccgcatgatgggaatttgtataactactggaactttgattttgatgatgaattgtgttcattgcctgacttttgcctcatgccactaggcgatgacaaaggggttgagctttacggcttgagagaagaacaaaaagcacttataggggctggccatgagtga

SEQ ID NO: 67884 - DNA, 369 bp, Acinetobacter baumannii
atgagtgaaattgataagtgcagatatgcttttgaaaagaaattcggtgtagtcggtacacgtttgcccaatggcaattattcatcatgggcacatcaagcaagatggaatgggtttaaagaagcttggcagatctgtttagacgaggtgagtcagttggaagtgcgggaagacattggtttgaaggtgccccaaagtattcagcttaaatacgatggcttaattgaggcctgtttgagacttggggcaaagtttaatgatgaagcgcgtgaattaagccttataggggattgggaaaagtctcaagtatttagacattttgccgaagagttaaaccttctacttaagagtacaaaaactaatgattga

SEQ ID NO: 67885 - DNA, 258 bp, Acinetobacter baumannii
atgattgaaaaagtaattattttaggcgtaatcgccttaatactcatcggttttattaagtctatggcttatttcttggtgcctactgtaatgcttaagcattccgttgaataccacaatgaaagcgccagagggaaaaagcgcaccttgcttaatatcaagaatggcaaattaaaagttgttttcttaagggtgatcgctttggttgtttttgtattttttgctttagctctaaaagttttaattaagtttctgtag

SEQ ID NO: 67886 - DNA, 417 bp, Acinetobacter baumannii
atgacatcgatgagccttgctgattaccgtgcaaaagttaaaaaaacccgagagggggataaacctaaacaaaagcgaaataagtttaatgcatcaaaaatcaaattggatgggatgacttttgacagtaataaggaatttaagcgctacatagagcttaaagccatgcagcaaaggggagagattcaagacttgcagcaccatacaaaatttgaactagcaccgagaaccaaaattgagggggaaaagagagttaagcccgcattacgttactttgctgattttacgtatttcaccgctttgggtgtttacgttgtggaagatgtgaaatcagttgctacaagaaaactgccgagttatcgcaataaaaaacacttgatgaaaactgtacacaatatcgatgtaaaagaggtctaa

SEQ ID NO: 67887 - DNA, 672 bp, Acinetobacter baumannii
atggaaaagcataatgaattaagagtagcacatgatttacatcgattacttttttcaccgagtaatccgagagtagatttcacattgctagacttggcacaaaaaactatggatggatttaaggatagcgtaggcggtgcaccgacttatggaagtaaagcaaattcggctgctttaatgatgcaggatatggcagcggaacaatatgcaatgttgtgggctttggtgcggtcaattacgccgtcagatcgacattttgttttattgcataatttacttaccagtgaaatacgcttgaagtttcaagaggacggttttaaaacaaagcaaattactaccaaagaagccgctaaaggtgtggccagatctgcattaattcaatttctgtttaaacgtgggttgtgcactaagtgcaatggtaagggttttgtatattcaaaacttgagctaaaacacattgattgcagtaaatgcgaaggcaaaaaagaaaatgcctacaatcaatctgagagataccgcctttcaaatttaactattgatcgtaaagcctatatccgtacttatgaacagtatgaaaaatttgctattgatgtgctggggaaatggcgtatagatcttgattcacatttacgtggtttttttcgtcatgcttcagaagaatatgatttatga

SEQ ID NO: 67888 - DNA, 1671 bp, Acinetobacter baumannii
atggcagttccagataaaaatgccttaatcgggcctacggtaacagaggcacaatttaaaacaaatctaggtgcgattatagatttcattaaaccaattgagtttcaaattcctgtatatgcaactaccaatgcgttgacagtaaccagacctgaaataaatcaaacttatgcaaaagctttagataccggcaaagtttggcactgggataagccagaaggtgcctcagatggtaattattgggtagagactgagctgagtgaacttgatcaggctcttgaggcactaaatacgaaaatcggtaaattggacgagaccaatgatattgttccaatacttgaagacactcttggtcaaattccattgtggctaaataggggtaaattaggttttgctgaactagagcaagaaacagctacgagggttaaagagtctataggaatcggatcttttaatcttggcacagctactatccccgttgttatggatattttaggtcagatggcactgtggttggaaaatggaaaactaggttttgcaggtcttaccgatgaaaccatcttattattgcaagaaatgcttagtattgacgtgtcaacaaaaaagaataatgtcactaatgcagcatatccaattgtcagtgacggtgcatcgttaacgcaatggctcgctaaagcggcaagacttaaaaaaggaactactcaacaactcaaagtgactcttgcgggtgatagttggactgaacatagcaccattgcaactcaactttcagatattcttaaggctgagtatggggtggccggttctggctggattaatattgcgcctgagcaaaacatgttagatggagtggtaattaataaatctggtagctggtctatatttgatttaaatacaacaacgaatcagcctgcttatgggtgtggtccagatggttttagtgcttcaagcagcacatcaagctctaaaattaatctttctaatcttgtcaatggtgatcaactaaccattttctatggcaatagtggcggtactttttcgtataagttaaatggtggctctgcaactaacgttgtatcttcaacatctgacaataatgtaaaaagcgtaactatatcagggctgactggaacaaacgcggttgagattgaagtaattagcggaacggttgcaattcatggttttcacttaagaaaaacaactggttctggaattgagctaaataagtgcggtaatggcggagcaactggggaagattacattcgtatctcaccgacttacccgcaaaaatatgcctcattcttagattctgatgtagtggtaattatcctaggcaccaatgattaccgactcggtaaaactgtcgaaacattcaaagatggtattaacaagctggtatcagcatatcgagcagtaaatgcgaattgcggggtgatcttgattgctccagctcgctcaaatgcaacccagttaacccctttgtctgaatttcagaaagctatctatgacctagctttagaaaataaagctgaatattacaacatgtatgacgattggaacgtgtggtcaatcgagaatgcaaatggtcaatgggctgatgcgttacatataagcgcttctggtgcttaccgcttatctaaaaaattatttaaatcatttttggagctttaa

SEQ ID NO: 67889 - DNA, 735 bp, Acinetobacter baumannii
atgagtaattatttaaaactagatgtcgtattaccaccgaacccaaactacatgactataggtaaactatctctaccaccatctgtttcaaatattggttccattgcccattcagcaaaattacagggttcactattaactatggttggtacatcaacagttattggaaatcttgcatttgatgaaactggagctacggttggagctaacggctacataaatactcatacagatgatgcactgcaacagacgcttattgttgttgcaaaaccgcttattagtgctggaaatcatttagcactatcaaacttcttatctgaaactattgcatcatcaggtaaagccggcggattgtcacttacacataattcggggttctatccaaataccaatcagagtggagtcgcgttcacaccattgggtggaacattaaatacgtggtcaattttagccgtttcacgcgatggtggaagttatcgatttgcaagcagaaaaaatggagctatttcaaaccaagtcacagtaactggttatgcccagttgcaagctgaattgcaagcattttgtattggtggttcactcacaatggggaattatccagcgaatgttaacaatcattctaaagttgccttgtctgcaattcataataaagcattaacgcaagctgaacttgttgcttatgttaatgcattagctgctgatatgaatgcgattaattcaagctacaatttataa

SEQ ID NO: 67890 - DNA, 240 bp, Acinetobacter baumannii
atgaattatttagtcattaaagatttaggtcacaacctttatttgggtaaaaaaggcccaagagacactggcaaagagtttgttgtttttaaaagcgacaagccaatgggtattaatatcgagcgttatacttatgatgaatcaaacaatcaattactatgggaaggtattcagaacctagggcaagtcgtggttggatttgcagatactgaagaggaagctttagatttggctttttga

SEQ ID NO: 67891 - DNA, 2103 bp, Acinetobacter baumannii
atgacagttcaagtatcagaccggttaagccaactatatgttggtaatggagtaaataaacgttttgatttttcctttcgcgcttttgaacaagaatatgaaacaggcattggtgtgcgggtgaagattggaaacgagtttgaatttattgatgaagataaatactcggttacgcttaatccagataattttggtggttttgttaccttcattgacgctcctgatgctactacttatttttatattgcgggaaaaacacctgtagatcagttacttgacattactaattacgataacttttacccagatgccattgaaagggctttagataaacttactgctatcttgcaagaatggaaacatctagttgattttgagactcaagcgagaatactagctgatatcgactacgacgctttggcgctccaacgagaagccgatttaaaagcatatattgatggtatcgctagtgccattactggtaagcctgtactaggtctaccaaccgattttgttgtcgatgggcctgatacgcaaaaacaaatcaatgacagaactgttcaatacgttgattcggtagcatcattacgcttgctaaagcctcgccataattatgctgttgctgaaacaacctcgttctatagtgatacgttttcagggcgtaaccgatttaaatgggatccagctaatacaactgatgacaacggctattcaatcataaaagttaataacattagtattggtcgttggaggatgattgatgatgattcgatcacatctagtcaagtcggagtaagggattcaagtaatagtaatcagttgttgcttaataaattagtttttcaattcaaagaatttaaattcatcaataaaacaattattgatgacactcttgtactgaactcaaatgatgtgaaatatacaggttcgtcaacgcaatcagagatattttacgcaggtggtgcaggggcaagtggtgctttaaaaagcattgtaaaaacttttaaagaaaatggaaatgccgtcagtaatatcaagttatctgacttgaaaattgcgatgaaccgcgcaaattatactgtaggttttgatgctcgttacttaacgaatgaatccctaattgatcgtttaaaaatcacaggtattgcagatacttcagtagggatttatttaactaaatgttggtactcaaaattcaggcaatgcatggtgtcaggctacagcgatttagatgcaccaaatcgacatggtatcggaatttatatagattctttaatcgctaacggtgctcaggtcaatgcagttgaatttgacgttaaatgccactcgcttaattacgggtatttaattaacccacaaaactacatttacggtctaaacctactcaatatggcaaccattgagaattgtaatttcggtattaaagttaaagggagtacagcggatttatccgttagacaatctgtaatctctcaatattttgaaaataacacggtcgatattgagtggggggatgagacaaatcaacgagcgttagcatcacaacacacttggttatcatgctcatttgataatgtacattcaacaattaaactttgggaaggtagccatgtatttattggatgtaaaggtgtagttaatttaacaattggagctaatgcctcagtccgatttgttaacacacccgcgccaactggtgtggttacaaacctaggaagtgataattattttgtcgaatcaaatgctaagacgttcattacgtctggcacttatagatcaggttctttaccaccaggagctatgtttaaacgtcgtttcagaacaacaaatacatcaactacctttgacataagtaaagcattttcatcagcttcctttactgaaggacaaacagctgaaataaggctgacaagtcgtcgagactatgatctagatgttaaagaatggcgcggcacactcttgagaaagtctaatggaaattcattcttagttaagcttagtgaaactactggactgaccgtttcaattgttggcgacattctgactgtaggtgacggacgtggtgattcaaaaacttatgaattaattatgcacattgattag

SEQ ID NO: 67892 - DNA, 129 bp, Acinetobacter baumannii
atgaaatttgtcgtgtacagagatattttttatagatgtaaacagtggtcaggttctgtagatgagaaagttttttggttaattttttcaaaaaaagtaacagaattagctgattgctttagaggttaa

SEQ ID NO: 67893 - DNA, 390 bp, Acinetobacter baumannii; identical to SEQ ID NO: 47328

SEQ ID NO: 67894 - DNA, 609 bp, Acinetobacter baumannii; identical to SEQ ID NO: 63307

SEQ ID NO: 67895 - DNA, 507 bp, Acinetobacter baumannii
ttggatcaggaatgggtattcattgatggaagctacatacgcgtgcatcaacatgcaagtggagctcggcatggtttcgaaagagcaattggacaatcacgcggtggacgaacaacaaaaatacatcttgcaaccgacgcgaatggattaccgattgattttaaaatcactgggggtgacgtccacgacagtcaagttgcaaaacaactgattgatactgtaggcgaggcaacttatctcattgctgataaggggtatgatgctgagcacattagaatatatgcccagaacaaggatatgattcccatcattccaatgagatcaaatagtaaaagatcgaataaggagtttgataaatatctatataaattaagacatttagttgaaaatgtgtttgcgagattgaagcatttccgagcgattgcaacccgatttgataagcttgcacgaaattaccagtctatgatttacattgcttgcatgtttatttggtgtaaagccaaatga

SEQ ID NO: 67896 - DNA, 489 bp, Acinetobacter baumannii
atgggattcagcggacgcttaccttatatcaaagtgaaggggcgatggacttacctgtatcgtgcagttgatcaacggggtcatacgattgacttttacctttccgctagacggaacagtaaatcagcctatagttttctaggaaagatcttcaatacggtgaaaaaatggcaaattccacgggtcatcaatacagataaagcagcgacctatggccatgctttatcacggttaaagcgagaaggaaaatgtccagtagatattgagcacaggcagattaagtataaaaataatgtgattgaatgtgatcatggcaagctaaagcggatcatcagggccacattaggattcaaatctatgaagacggcttatgccacaattaaaggtattgaagtcatgcgtgcactacgtaaaggacaagcatcgtcattttattatggtcagcctcagggtgaagtgtgtctaatcaacagggttttcggtctctaa

SEQ ID NO: 67897 - DNA, 705 bp, Acinetobacter baumannii
atgaatcccttccacggtcggcactttcaaggtgaaatcattctttgggctgttcgttggtattgtaaatatggcatcagctatcgtgaacttcaagaaatgctcgctgaacgaggcataaatgtggatcacagtacaatttatcgttgggttcagcgttatgctccagaaatggaaaaacggttacgctggtattggcgtaatcctacagatttacattcatggcatatggatgagacttatatcaaagtgaaggggcgatggacttacctgtatcgtgcagttgatcaacggggtcatacgattgacttttacctttccgctagacggaacagtaaatcagcctatagttttctaggaaagatcttcaatacggtgaaaaaatggcaaattccacgggtcatcaatacagataaagcagcgacctatggccatgctttatcacgattaaagcgagaaggaaaatgtccagtagatattgagcacaggcagattaagtataaaaataatgtcattgaatgtgatcatggtaagttaaagcgaatcatcagggccacattaggattcaaatctatgaagactgcttatgccacaattaaaggtattgaagtcatgcgtgcactacgtaaaggacaagcatcgtcattttattatggtcagcctcagggtgaagtgtgtctaatcaacagggttttcggtctctaa

SEQ ID NO: 67898 - DNA, 420 bp, Acinetobacter baumannii
atggatgaagctacaatcaaaagtatggcagctgaattagctaaaggtttaaaaactcctgaagatttaaaccaaatgacagccatatttaaaaagttcatgatcgaaaccgctctgaatactgagctttctgaacatttaggctatgaaaagcatcaacctaagaaaggatctaatgcacgtaatggttttagctccaaaacagttctaacacaagatgggcagcttgctttagatatccctcgtgatcgtgatggctcttttgaaccacagattattaagaagcatcaaacacgcattactagcatggatgatcaaattctttcgctatatgcgaaaggaatgacaaatagagaaattgttgcttttttaaagaaatgtacgatgccgatgtatctgcctcccttattagtaaggtga

SEQ ID NO: 67899 - DNA, 1317 bp, Acinetobacter baumannii
atgctatcaggtgttcaaattgagaattataaatctatcaagaaaaagattgaatttggtctaggtcaatttaatgttttgataggtgaaaatggcgcagggaaaagtaattttcttgaagttttagctacttgttcagcaattcttgcaaataaatttagtaatgaatttatgttatctagaggaattcgcgtagtcgaatctgaaaatattttttcttattttaataacactccttctgaaaagatacatattacaacagcttacgaaaatggatatggttgtgttttcaatttaagcttcaataaaaacgaaccttttgcacctattgattcagagattcttttgattcatcgaaacttagatatggatcaagatttagagttacttgatattaaagacttcaatgaaaattttatgaaagaaaaatttgataaattagctttagagacgtttggttcgcataaagaattttatcaaaaattgaaaacattagaagaattagtaaaatctggtaataaacctaataacaaaaaagaagaattatccaatgaagatttaaaaaagttaactaatataatcacatatatggataccgtcggctcaatccaacgccaagtagtgaatcaatattattctaaagaccattcttctaatgagtataattttattatttactctccagaactttcttcattacgtaattttaatagtgaatcacaaattgaacctttaggtgtcaatggagaaggtttacttaagctccttcaagtaatgcagactcatgaaccagaaaattttgaaaaagtttgtaaaacacttgaaatatttcaatgggttgaaaaaataacaattgagaaaaactctcatagttcagatcaaagaattaaaatcattgatcgatttatgggcaaagaaattgaccatcgtagtgctaatgaaggttttttatttgtactattttatgcaacattatttagttcaaaatatactccaaaaagttttgctgtagataatattgatgcttcattaaacccaaaattatgtcgtgtcttaattaaagaattaattaaattagcgaaagaaaatggtaaacaagcatttgttactacccataatcctgcaattttagatggtttagatttacatgataataaacaacgattatttgtcgttgaacgagatgatgagggatcaaccaaccttagacgtgttggtgtaaatgacttacctaaacctaagcgtaatggtgaaactattaaattatcagaggcatttatgcgtggtcatttgggcggtttacctactaatttctaa

SEQ ID NO: 67900 - DNA, 651 bp, Acinetobacter baumannii
atgaaatttggacttatttgtgaaggggtcacagactttcatgtcttaaaacatatcatccaagcttatttcgcggatgcagagttcagagcaattcaacccaatttagatgaaactcataagaaaacagaaaatggtacgtttggtggctgggagttagttgctgaatatttaaaatcagatcattttgaagatacaattgtaagtactgattatgatgttgttcaaattgatactgatgtttgtgaacatccaaattttggagtctcaccaattaaccttgccgattcagaccatcaagccttttatgagaatattagacttaaaatgattgaatggatggataattttgagccagatacctatgattattataaagataaaattatttttgctatctcagtacatagtttagaatgctggttactggcgtatcatggaacaaaaaattgtaaaattacaggatgcgcttcagaattatctgcagttatgcgaagacaaagtaaatctttgaatactgttactaaaaaagttcaggaatatattgaacatagtaaagattttaaaaaacaaaaaaatcatccaccagtaattgctaaatcagatagttttaagatatttgtagaccagttggcggcaatttcagcttaa

SEQ ID NO: 67901 - DNA, 906 bp, Acinetobacter baumannii
ttggcctttctagtagttttattgcacttgaattttttaagtgaacaatcccctgaagttggatatttactcgtaaacggtcttttccgtttagctgttcccttatttcttattattacggggtattattttgcgaatgtagatacttttgaaaagtttaaaaactggttctctagagtatttattctatatgcaatctggatgcttttttattcacctttctggtttaaaattagtaatttatctggaatttttataaatgcgtttatggggtattttgtactttggtacttgattggggtaatatttgcaggcaccttaatgtacttattgaggaacgttaaaacgaaagtgctactagcttttgcgctaagcttatatatcattggttacgctatacaacaagtaggaaatcttcatttgttttctggatttgttgataaagttctgaattggcatcctgtatcaagaaattttatttttgattgtttccctttcttaactctaggttttttaataaagaaacttaatatagaaattaaatataaaccttcaagtatgcttgtattattctcaattgttcttgtattaattgaaagtcgtttaaattatgtttttattagtaaagacgaatctttagatcatattttaacgatgttagtatctgcacccttaatttttctatatgttaaaaatatgaaaatcatggataataataaaaatttagctcttttttctaccgctgtttttttaatacacccgttttttatgttgttatatagctttatggcggcacatgggcttttattaattcaaataccaaaggagttttttgtaattatcctttcaatggtcgcggggattgtgcttttattgatcaataaaagatttaaatacatattataa

SEQ ID NO: 67902 - DNA, 639 bp, Acinetobacter baumannii; identical to SEQ ID NO: 54446

SEQ ID NO: 67903 - DNA, 969 bp, Acinetobacter baumannii
atgggaataatttctgaaaaaataaatgcaaaaatatcttcattaaaagctgattttgagattaatagaaatgttgtacatcaaggtgtaaagggcggattaaatgaacaagagttaattaatctgattaaagatgtgattcctagtaaatacaaaatttctagaggaattatcgaaaactcaaaaaatgagcaatcaaatgaaacggatttttttatttacgacgatgaaattctacctccttatataaaacaggatcttgcttttcttccaattgaggctacaaggtatatattcgaagtcaaaagcacgataaatgcaggggaattaaagtcaacgattaagaaatttgcaaaatatcgtaatatggggggggaagctccaactgtaatgttttcattctcaagtgatatagatggaaatgaattagaaagatataaaaaatacgatgatcagttccttcatgctccaaagattactgtgttttgtatatcaggaaaaggttattatttttggaatacttcaaaaaaatatttaaaggatgttattgataaaaagaagttttttgaagatttagaattttctaaagatttaaaaataaatattcgggatgtggaaaatttcaattttgagaagctcacaattaataatattaaattttctgacataagttttaaaattcatcaatggattggggtggtaggaccaacaaatcaggttgaattgtcactcctatctggcatatcaaatactttgtgcagagaaagttttggaagctatttactagaagaagaagaggtaagtccgaaaatatattctatatgttatgaggatatgtggggaaacttcagttgtagtaaatttagtaaagatggaattgattttaatataaatgatgtaagttatagtttttcaagtactcaagataaaacaacgttacttttcaaatttaagagttgtacagattaa

SEQ ID NO: 67904 - DNA, 435 bp, Acinetobacter baumannii; identical to SEQ ID NO: 47656

SEQ ID NO: 67905 - DNA, 318 bp, Acinetobacter baumannii; identical to SEQ ID NO: 54614

SEQ ID NO: 67906 - DNA, 570 bp, Acinetobacter baumannii; identical to SEQ ID NO: 47900

SEQ ID NO: 67907 - DNA, 579 bp, Acinetobacter baumannii
gtgaaatttgtcgtgtacagagatgtgaatgataaaaaaaatagtaaagcaagaaaagatggtcgttttatcccattatctgattttttcataaaaacactgcaaaattacacagtctttttagaacaaattattgaagcgtacggttcgttttttagacaagtctttgcaaagaaaattactgtaaatgatctttttggcaaggtcattgatagtaaagatatcttgccgataactgtcaaagagtggcagagcagaaaaattaagttaatccctttatcgagaaactgggtaaatttatatatggaaggaatctttccaaagaatatgtattcgaattggttacgtcattttgatatgaattttttgatgtatgcagaagaaaaagaagaaaaaaaagaagaaaaaactgctttagcattccatttaatacaggctctttatggtcatgaccaacgtgaccgagaggcttttcatccgcattcttcacttattccgaatgtctatgtacagcaagcccgccagcaattgcaagataatgtcaaatttttatcgattaaacacttagagcgaaaatag

SEQ ID NO: 67908 - DNA, 195 bp, Acinetobacter baumannii
atgaaaacattcgctttaaagaactcccttactcaaaattctgtaaaagaacatactccactcaaagacttggctgcattcaaacaacgccagcacaaactcaaacgtcaaaaactcatcaaaaacatattcgatgctgcaatcttcataagtattgctggttttaccttctcaactttgttttggggagcctaa

SEQ ID NO: 67909 - DNA, 822 bp, Acinetobacter baumannii
atgaacacagtcacttatgttgaagatgctgtatttattcaaaacgaccaagttaaaacttctagccttaaagtggccgagctttttggcaaacaacataaaaatgtcttacaaaagttagaatctctagattgttcttcagaatttaacgggctgaattttcagctcgttgaatatttagacagtaagggtgaatctcgcccaatgtatgaaatgaccaaagacggttttattttcttagtgatgggctttacaggtgctaaagcaggacaaatcaaagaagcctacatcaacacctttaaccacatggcagccatgctctacaacacacaaggcaaccatgaccaaattcacgtaggcgctgtggtccagctcaagtctggtggcccactctacacggtcagtaaaatcatttacgaccaaaacggttacatggaaagcgctgaagtcatttggcacaacaaatctaatctgtgccgtgaaactttacccattagctgcctaacactcgagtctaaaaacctcattcaaaataaaaccctagaagacttctgggcttcagttcataactacgggcttgataaactcaaccacagccgtaagcacaacttgctggcgtttaatctcgggcagatctacgagtgtattgaaggtttaccacccaaaaaccaactgtctagcatcctcatgcaaagccgtgctcccttccctgtttacatgcaacacaaccacgctgtgcatagtggggtgattaacaaaacggtgaagtgctgggtgtttgatcttaaaaagcaccccatgccagcacttgaaaaaagctaa

SEQ ID NO: 67910 - DNA, 303 bp, Acinetobacter baumannii
atgatgcaacctattcatacacactcaacgctacaatatattcatatttctgtacctgaaatcttactcagtaatattcaaataaaaaattcttggcaagattataaccaagaatggagctatagattagacccgcctcacgcaagccatccttttcagagagacttgtatattattaaatcaaaaaatattgaaacggaagatataaaaaaattactagataatacagttgttaaaaacagtaaaaataaagatgacttaaaaaatatagtcgaagcggaaacagggcagagtaaaacttga

SEQ ID NO: 67911 - DNA, 705 bp, Acinetobacter baumannii; identical to SEQ ID NO: 47902

SEQ ID NO: 67912 - DNA, 366 bp, Acinetobacter baumannii
atgataaataaaaatttagcagcggaaggtttgcgtggtatagcatgtataatagtagttctatcacacctttcattaactttcttccctcaacttcacaactatttttcacaagaaaactttccttcaagtgattttttagcatcaatgcataattcaccttttttattctttatttctggcactggtgctgtttatattttctttatattaagtggatatgttttaacagcagcaaacttaaatgcaaaaaatccaaaaatcaaactaaaaacatcaataataaagcgctatcctcggcttgctatacctgcattatgttcatgtattagacctcttgcgaaagtaaaaaccacctcaatctaa

SEQ ID NO: 67913 - DNA, 255 bp, Acinetobacter baumannii
atgtcaaaaagagacactattataaaaacagcaactgccctttttaatgaaaaaagctataactctattggagtggacagaattattgctgaatccaatgttgcaaagatgacattctacaagtattttccttcaaaggaaaagctaatagaatcatgcctttacaaaaggaattctgatatacagtctgctatattagaaagaatcaataccaatgacctacctttagttcaactcagaagcttggcagagtaa

SEQ ID NO: 67914 - DNA, 435 bp, Acinetobacter baumannii
gtgaaactatatataagtgcactacagttagaaaatggagagcttttactcgtcgtttctcctcagtttaatgccaatgctattcaggattatgcattacgctgggaaattgaaaccttattcagttgtctcaaaggacgcgggtttaatcttgaaaatacgcgcttgacagaccctagacgagtgaaaaaattgattgcggtgttagctataagcttctgttggtgttacttaacgggtgaatggcaacatgatcaaaaaaaagtgataaaaataaagaagcatggacgactctcaatgagtttatttcgctatggtttagactatgttcaaatggcgattcagcgtttaattggttttgggaaaaaagaagagtttaaggaaattttggcaattttaagaaggcagaaccctgataggataagggttctgtga

SEQ ID NO: 67915 - DNA, 207 bp, Acinetobacter baumannii; identical to SEQ ID NO: 47680

SEQ ID NO: 67916 - DNA, 171 bp, Acinetobacter baumannii; identical to SEQ ID NO: 47984

SEQ ID NO: 67917 - DNA, 186 bp, Acinetobacter baumannii
atgacaattggagaacaacttacatttctttggatttcagcattcactccaattctgttagacgaactcaaagatactcaagtttttgattatttttatcatgagaatttaagaagttttgtttttaaattccataagaaatctcactttagacacgcaggttttactgagggttggccgaattaa

SEQ ID NO: 67918 - DNA, 519 bp, Acinetobacter baumannii
atggtcagaggcagcggtatacgagatatcgctgaagttgagcgcattagtatcggtaaagtcttacggactttaactgaatcggcctatcaaattcagcctaaacaaagtcattatgaatctctcgaagtagatgaattctggacttttgttggaaataaaaataataaacaatggcttatttacgcttaccatcgagaaacaggtgagattgttgcttatgtttggggtaagagagatttagctacagtccaaaggttgaagacaaagcttaaacaattaggtattcactacacccgaattgcaagtgatcattgggacagtttcataactgcttttaaaaactgcaagcaaagtattggtaagttttttactgtaggaattgaaggtaataattgcaaaataaggcatcgaataaggcgtggttttagaagaagttgtaatttctccaaaaagcttgaaaaccattttaaagccttcgacttaaccttcttttacatcaataatggcttcatttaa

SEQ ID NO: 67919 - DNA, 2319 bp, Acinetobacter baumannii
atggccgcactttatcactctctttttactgaaaaaggattggagctccttcgcgaatctatccaaaacggtacaaaattagggattacccatatgtcatttggcgatggtggaggtatgttgcccactccagacgctaaatttacccagatggtaaatgaagtttaccgcgttgccttaaataggcttgcaccttctaaagagaatcctaactggttagaagcagatggtgttatcccgtctgctgtgggtggttttaatattcgtgaagttggcctgtgggctgggaatacaatggtcgcatatgcgaattacccacctacatataaaccgagtggggatcaaggcacagctcaaatcaagacgattcgtattgttttacaaattgataatacggctaattttgaactaaaaattgatgcctccattgtgatggcaactgttcaacagattttagatgtcaaaaattatgttgatttaacaaaagttgaacgcttaacaaatattacagaattaaccccagaaattggatgggatggacgaattgcatttgtgaagtcatatcacagtggcttaaataaaggtgggggattatttaaatttgatccactactagtcgataaaaatgatggtggaatcgtaataaatggatgggttcgccagaatgttgagcatccttctgtttatatgtttggagcttatggtgactggaatgcagctgaccaaactggacatgatgacactaccgcattccaaaaatgcattgactttatctattcaaatgaaaataacatgagggctggaggaaagcgcttcatgtccattcctagtggaaactttcgactatccagccttacaattaaagatccagataatggatttggttttgaggcttatggggaaggttcaggaacgaacctatggtttgatcccctcggcaacgggattgaggttagttctgaatatagtcggttcagggcaattcgcttcaatggcaaacttaaagcctcatatccaaccgctaatgatccagcaattgagtatatcttcagatttaaactttcttataaatatcttgatattgatgtcgtttttgatgattgtcatgtcagttggttcaaatgttttgcacgtgtagcaggacgaggttttacatttaaaaatggtggcgcgggtcaaggcgatgaacaaggacttgtagaaatagcatgtgataatgatcttattattgcaggggatattccagcaatgcattcagtcgaagggggaatgcgtcactttttaattcataacaaccgttttgacgtttgtagtcgacttgtacgaattaccggagaacatccgattaaagattttattaatggactaactatttccaataatgaaataactgtagctggtactttagtagaatcaacagattgtactttgatcagcccgcttttttgtagcaatatttcaattgccagccatgttagctcaaaatatgggggaatatttattgtgccccgagctaaagatgtaaaagatattggcaactcatggaacaactatattaatcctaataatgttgcagattctcgtaataagggcatctcatttgtccaccgatatactgatctagatgggtttataatgagtgggacaactgctaaagacttagtatttggactggtacaaatatcaggaacagggaaaaacattaaaatagtgaacaataatttacctggttttggcgactttcagaataattgttgttttgtggaatctctctctctaacccaagtagaaggactttggattcgggacaatactattaattctaaattatctttacctaagaaatgggtaaattatcaaattactaatgcttcaacttttattgatggaaatctggacattaaaaatcttttcccagatgagcgcgccacatatattcccaaagtattaattgatggagtagaaaatagtggaatcattatgaaggactcagctggcttttataaaccagttggaaaactcattgaggttgatgtttttattttactgcaaacaagtttaacttctggaaaaatttcgattagtttacctttccctgctgttcctgaacggactaatttaacaagttattattcaggaacgggccaagttaatcgccattcgggtttaaacaatggcagcaaaattgagattaatgtgctttcaaatactgaccaaagagctagtttagtggttaacaatgtagatttagacttatctagccgaactgcaactcaagttcttcttatcgcgcgttttaagtataagttcaaaagctaa

SEQ ID NO: 67920 - DNA, 249 bp, Acinetobacter baumannii
  misc_feature (235)..(244): n is a, c, g, or t
atgaaaaatttagacagccttgctccctttatcaaaacatatgctggtgaaactgtaggtagttttattattcttgttttgattatattaactgtttataaaacaatatttgattcaggattattccaacatttgtttattttaattcgctttcgaagatggaagatcgataaagagattaaggaagtgactgaattaattaaccatggaagtctaaatgaatatgtaaaaaacnnnnnnnnnngataa

SEQ ID NO: 67921 - DNA, 1185 bp, Acinetobacter baumannii
atggcagataaaaaagcagaagcattgaaaattattgaagatgggttacagcaattagaatctacaaaaggtagtgttgcaattgcagttcaaaaattatcaagagcagcaaatctgttagatgaaaaggatatatatatttgggctgagtatcatcttgctaatcctaaatatactaaaccagttcaaaatctcttagatgctctcaatgcagagtataaaaaagaaaatgaggatgaacgaaactatgatgaagtcattaaactgcgagatggtttatctgattttggtctagattatgagatgcatgtagctccctctattgatatgaaaggttctaaagcaagtggggggctatattctgtagactttattgaagaaaattataatcacttattaaaatgtaagaaaggtaatgatggggaactttatcaaaaaaacctaaagcgtttattagactatataaagaaaactgcacattattatttatctgaattgcataataagttgaagttttcaggaactattacatccagttttgatattttaaaaaatgctgttgatgaccgtttgctcgacctagatcctgaaattgccgaacaacttatgttggcttttaaagctgtttcttcagataaaaaagaagaatggtcccatgctttaaccacatgcagacgtcttctggaaagtcttgccgataaattatatcccgcaaatgacttagtaataggcaagcgtacctttaaacaaagtcagtttgtaaatcgtttatggcaatttatgaacgattcaatcgaatctgatagcaatcgtgatttagcacaagcacatgtgaattttttaggctcgtggctcgaaaaaactaataaattgacaaacaaaggggtacatgatgatgtatctcaacttgaagcaactaaggctcttttccatctttatttaatgcttgctgatttattagactacctagatccttcggctaccaaacaaactataaaacctcagattgctacagcatctttagatgaactcgaagcattgttaaatgtgaaaagagatgttgctaaagcgattgtaattgctcgtgttaagtataatggtttgactttagagcaatttaaggagatcaaaggagttggaccaaagacaatagccacagcaaaagaagtttttgaatttaattaa

SEQ ID NO: 67922 - DNA, 393 bp, Acinetobacter baumannii; identical to SEQ ID NO: 63378

SEQ ID NO: 67923 - DNA, 375 bp, Acinetobacter baumannii
  misc_feature (363)..(372): n is a, c, g, or t
atggaatttaaagttattcgtacaagagagcagtatcaagcttatcttgacgaagtgcattctttaattatgctaaatccggctataggaagtcctgagagtgatcggttggaattattatcggttttaatagaagattatgaaactaaacaatatccgatagaggcgcctgatcctattgatgcaattctatttaggatgcatgagaaagggttaaaacaagctgatttggccccatattttggtactactagtagagtttctgaagttcttaatcgaaaaagagctttaaccgtagatatgatccgagcattatctgtagggttgggactgtcggtagagacattaattggtttatcaaannnnnnnnnntaa

SEQ ID NO: 67924 - DNA, 159 bp, Acinetobacter baumannii
atgaccgctgaaattgcaattttaaatccacatggtgtggcattagctgcggatagtgcagtaactatcggatctcaaaaaattattaatagcgcgattaagctattttcactttccaaaacagagcctgtaggcgtaatggtttatggaaatccctaa

SEQ ID NO: 67925 - DNA, 594 bp, Acinetobacter baumannii
atggtaaaaactagaactgaaatcaaccaagaaagtaatgaacgccgtggaatagtaaataaggcatttaagttacatcaaagcactgttgatgcgattcgtagcttcgctgatgactcagaaaaatcacaggcgcaacttgtaactaatgcctttgatggattttataccccattgcctgcgggttatgaaaatcaagatggcgaagatatttcatctgatatctacatctaccatccctatggtctagagacatggctcgttattaccaatgtaagagatgactataatgaagaccgtgaaatcgatttagatgaaattaaatttgaggacatggttaatcatttcattaaccagcatttacctggtcttcacatcaataatattaaaattttctatacgccaatacttggctcaggtgaattttatagaccaaacttctctaagctaaagcaggagatgtacaaagattcggtatcattctttttcgatctttttcatgagatgccaacgttatttagatacaagaatcttcaaatggtaccaatgattgaaggttcgaaagaatatgaaaaactaaccaaactttattaa

SEQ ID NO: 67926 - DNA, 1890 bp, Acinetobacter baumannii
atgtctgggcaatatgaaaaacctttaacaataaaagaagctataaatgctattcaatcaaatgattttttattacctgcaattcaaagaaaattcgtttggacaagcaatcagatttgtcagctatttgattcgatcctgagaggatatcctataaattcatttatgatgtgggagattactgattctgaaattaaaaaaaattataaattttatcaattcttaacgaaatattgccagaggtttaatgaggaaaatcctcatattgaagttaatgcgagtagtaaaaattttaaggcaattattgatggtcaacaaagattaacgtcattatatattggcttatgtagtacctatgcttataagcagcctagagtgtggtggccaaccgcatatgatgaaagtattttaccgccacgtaagttgtatttagatttatctcaacctttagatgatgatgaatcgatgatgcactataactttaaatttttaacagacgctcagttggaacaattgaatagcacagatgttaaaaattggttatgtctgcatgatgtattaaatatgccaaatgtagacttggctgatgcgatattaaaagttgttttccctgagctggcgcgcagaaatttatctacgaatagctttgcttctgaaactcttttgaagttgtatatagctgttcataaagaacaattgattcattattttaatgaaaaaagccaagaagttgatcatgtcttggatgtattcatccgcaccaatagtggtggtacaaaactagccttttcggatttattaatgtctattgctgtcgcgaactgggatggggacttcagaaaagaaattgagaacctaacgaattggatttatcagtcgcaagatttaggtttttatattgaaagagattggattttaaaaacagctttgatgcttatagatgaagatgtgcgatttaaagtaaagaactttactactgagatagtactaaaaattcaaactcattgggaacaaattaaaaattgtataaaagagacatttaagttagtgagaaaatttggagtaaatgctcaatcacttacatctaaaaatgccgtaataccaatttgctattttttgtataaaaaaaatgatgagtctaataagcctttatacttaacaattaatgacttggctaagcataatgaagaacgagataagataagtcagtggttctacatggtgttgttgaaaggtatatttggtggtcaagcagattcgattatttcaagtatgagacgaattataaaaaataatttatcagagtctttgtttcctttggagcaaattattaaagcctatgaggctacgaataaggatttaagatttgatgatacatatattgaaaatatgttgaatattcaatacggagaagctcgttgtagaacagtgctacatcttttatttccagagttaaaagcaacagaaattttccatattgatcatttgcatcctcaaacaatgtttactaaaaaaaatattgcaaagttagaaaaccttactgataagcaaaaagcattttatattaatgctagtcattggaattctattgctaatttacacttactaaatgattctttaaatctttccaaaagagataagcttttagatgattggataaaaaacaatactagtggttttataagcaaagacttgcttatagatgattcagttccattaacttttgacttttttgaagatttttataatgcaagaagaaaagctttaaaaaaacggtttattgaacgagtttacattcaaagtgataatcaagagtttaattcaagaaatttagagattggtgaatttgatgatttagaagtagatggtgataacttattaatcgcttag

SEQ ID NO: 67927 - DNA, 870 bp, Acinetobacter baumannii
atgaacactaaagataacgtctatgaatatgacaaagcagagcttaaaactgagttaaatgtgcaaacagaaaatgcttcatttctatcgttattttttgagaagcatcgtactttggcggtcagcataatcagtgtgggaagtgtagttgcactctggttcctcattactgctttgcatgttgtacctgaactgtttttaccgagtccacaggcagtctggcaaaaatttatatcggtcagccaagaaggctttatgaaagcaactttgtggcaacatttggcagccagcatttctcgtgtatttttagctttgattgctgccgtggtgattggtgttccgctgggtttgtggatggggctgaacaaatgggttcgtgctgttctagatcctttggttgaattattacgtccaattccaccgttagcttatttgccgttacttgttatttggttcggtattggcgaaaccacaaaagtacttttaattttcttctcgattttggcgcctgtcattattagtagtgcgcatggtgtgttaagccatcagcttaatcgtgaacgtgcggcattgtcattaggggcaagccagtcacaagtcttttggcatgtcattttaccaacggctttgcctcatattattaccggtattcgtattggtcttggggtgggctggtcaacattagttgcagctgagttggttgcagcagaccgtggtattggttttatggtgcaatcggcagcacagttcttaattaccgatacggtgattttgggcattattgtgattgcgattgtcgcagttagttttgagctgtttttacgttggttacaaaaacagttttctccttggtatggtcagcagttgtag

SEQ ID NO: 67928 - DNA, 240 bp, Acinetobacter baumannii; identical to SEQ ID NO: 54344

SEQ ID NO: 67929 - DNA, 609 bp, Acinetobacter baumannii
atgaacagagaaattcaacaaagactcgtatgggttaaattatttgaagagaccaatgatgctggcctagtctgtcggagatgtggcatttctagaccaacattacgcaagtggtggaaacgatattctgagcaaggtattgatggattaagtagtcagagtagacgtcccttaaaatcgccaaatactaaaatcaatgctgagctagaagccttaatattggaaatgcgctcggctagaaatctgggtgctcgacgtttgcaaacagaattgatgaggctgcacggagtctcgttgtccttagcgactatccataaagtactatccacccatcaagtcaaaccgattaaaaaattccgtcgtaaagcagatttcattcgttatgaacgcccattaccaggcgatagaattcaaatggatacctgtaaactgggtccaggactatatcagtacacatctatcgatgactgcacacgatatcgcgttttaaggatatataaacgccgaacagcagcgaatactctcgactttttagactgcgtaattgaagaaatgccttttcccatacagcgaatacagaccgatcgtgggcgggaatttttttgctga

SEQ ID NO: 67930 - DNA, 150 bp, Acinetobacter baumannii
ttgaatggcaaggtagagcgttctcaaaagactgataaatctgagttctacgctactgtcgatattaattctgaagatatccaagacaagctagccgaatggcagcatgactataactggatgagaccacattcagctttgaaaggttaa

SEQ ID NO: 67931 - DNA, 204 bp, Acinetobacter baumannii; identical to SEQ ID NO: 63313

SEQ ID NO: 67932 - DNA, 150 bp, Acinetobacter baumannii
gtgattgctgtaacaggacgtgatgttgaaacagcgggtaagctacttcagtctattgaattacctatagcgggcttacatggtttagatatttattttgattctgatacttatattcgcccagatttaagcgatattaattttcaataa

SEQ ID NO: 67933 - DNA, 276 bp, Acinetobacter baumannii
ttgcttgccgtggagaaaacgcttgaagatataaagttaaaaatatctagtcttaaacgagagtctcgaaaatcacttgatattgaaactgaaaaacgactacaggaagaaatacaaaaagctgaaaaagaaaaacgaaggatgagacaacaagtttttgatgttgaagatgaaatagcggataagcgtgatgcaatgattgatgcactagaacaaaggttgcatcgttctagcaaagctgaaaatttatttatagttcaatggaaagttgtttaa

SEQ ID NO: 67934 - DNA, 249 bp, Acinetobacter baumannii
gtgctagcagatgacaaatgtaattcacaaaaaagtaattacttggcttcaaaagacttcttgaatcaatggttagaacgtaatcatttacatgatcgattgatcactcaagagatttctcaacttggttttttaaccgatatacagcgttcgcatcgggtagcggattgggcctatcaacaagcgattgagaatgaatatttggtttggttgggtgggaatgcaaaaaaaatcttgagctgtttataa

SEQ ID NO: 67935 - DNA, 207 bp, Acinetobacter baumannii
atgactgtttgtccctcgtgtaacgatgaacttgataacgaataccttaactctgtcatggatgaactttatcggcataaagactcacctttttattctataattaggcaatgccctcattgtaaatatgatttactttttaaaaaaattgtactcagttattacctagttactaataacaaagaaattcttattggtggcgcataa

SEQ ID NO: 67936 - DNA, 231 bp, Acinetobacter baumannii
atgaatgcgttcacaggtcagacttttcagatgaatcaaattatcaatattaaagaagtgattcaattcacaagtatcagtcgggcaaagatctacgaaatgattaatgtggattctaagtaccatgatcctacttttccaaaacctgtacgtctcagcgaatcacgcattggctgggtagctttggaagttcatcaatggattgaagaaaaaatacaaagtcgtgaataa

SEQ ID NO: 67937 - DNA, 318 bp, Acinetobacter baumannii
atgacaaaattaaaatatacccctgaaatcagagaaagagcggttcaattattgattgaatctgaaaaagattatccatcgaattgggcagcaatcaccgctattgctcccaagataggttgtactcctgaaacactacgtgtttggtatttaaagcatctggatcaactaaatcctgccaaagtacaacagatatctgaccaagaaaaaatgaagcaaatcgaacgtgaaaataaagaactgcaacgcgccaatgagattctacgtaaagcagccgcttttttcgcccaggcggagctcggccgcccacacaaataa

SEQ ID NO: 67938 - DNA, 537 bp, Acinetobacter baumannii
atgaataaagatatttcaatttggatgccactctatattggcgacctacaggcgaaatttgcacgaatgacagcagaacaaattggtgcggcactgctgttaatgatggatttctggaaaaatggtgccattcctcatgatttagcaacggtatgcagcatcacgaaattaccgcagcacaccaaggctaaaactttgttaaatacgctgatagccctggaattgtttgaagtcgaatctgagcagattcattcaaattttttaaccagtttaaaaagccaagcattgcaaaatcagcaaatgaaatctgataaagctaaaaatgcagctcaagcacgttggggtaaatccgcaagtaatgctcaagcatcaaccaagcaacgaaaagtaaatgctcaagcagctcttgagaagagcccgagtattactcaagtcatgcttgaatcatgcccttcatcttcatcttcatcttcatcttcatcttcaaattttgaagaaaaaaatgagaattttttagaaaattcaaagtggatttag

SEQ ID NO: 67939 - DNA, 1122 bp, Acinetobacter baumannii
atggctctaccgattattactgctgaccaaactttattggttcaagcaattattgtgtacctatacgctgatccgggtttaggtaaatcatcgatgggctttactgcggaaaaagcaatttcttttgactttgaccgtggtgctcaccgtactggtgaattacgtcgtggtgcggttgtacaggttcaacaatggagtgatgttgcaaaccttactccgcaggacttagcaccatataaaaccgtagtcattgataccgtgggtgcaatgcttgaatgcattaaaacccatctattgctaactgctaataaccgtcaaaaagatggttctttaaagttaaaggctcaaggtttagcgaaccaaacgttcaagcaatacatcaatactttgatcagtttaggtaaagatgttgttttcattgcacacgcatcagaagatcaaaacggtgatcaaattatttaccgcccagatctaggtggtaaaaaccgtaacgagctttaccgtatcgcagatgtcatgggttatctaacaactgttactactggtgaaggtaaaaatgcccgcgttattaatttcaaaccttcgcctacacatcatgcgaaaaactcaggtgctttaggcggtgaaaccggtgaagtatgggtacctgatcttaaagcacaccctactttcttggctgacctgattactcaagctaaagatcacattaacaccttaacgcctgcacaacttgcagcagctaaagcccaagaagagctagaaaactggaaacaaagctgtgaagaagctgagcatgcaggtgaccttaatcaattaactgagtcgcttgataaagaacacatgtattaccagaacatgcgacaagcaatgttaatgagagctaaagcattgaattgcacgtttgataaacaacgtggcacttggattagtccccctgaatttaacggcatctcagatcaacaaagagacgaacttcaaaactttattgctgaacgtggcctagacgtaaaaacagtatgtgagcacttaggtatcgatgcccttattcaaattgaagcagcaaaactgccagcagttaaacaagacattgaaacattagctaaaacggggatgacagcatga

SEQ ID NO: 67940 - DNA, 366 bp, Acinetobacter baumannii
atgaattcaccagtttatttgaatgcacttcgtgcttttgaagccagtgcacgacacaaaagtttttctgctgcagcaaaagagttaaatgttactccggccgcagtggggcaattggtacgtacactcgaagattggttaggctttccgttgtttcatcggcaaactaacggtaaaaatcggctggtcgctactgaactggctgaatcggttttaccggatattcgtgcgggttttgataagctcactttggctttagaaaaattaaagcaagattctctatcaggtgtgcttaatattgcggtcagtccagcatttgctgaaaaatggctattaccaagaattgatcattttcaaaaacaatag

SEQ ID NO: 67941 - DNA, 897 bp, Acinetobacter baumannii
atgacaaataaaaaagctgaaactattgaacctacaactgaatataaaccaaaaaaatgttttattgtcacgccaattggaggggataatacacctactcgaagagctgctgatggattaatacgagctgttattgaacctgttttagaatcacttgaatttgaaacatatgtagctcatagaatttcagaaacaggatcaattactagacaagttatagagcatgttttatatgacgatttagtgattgcaaacttaagtgaattaaacccaaatgtgatgtatgagttagctgtacgtcattgtacaaaattaccagtggtagtattagctgagcaaggcacgattctaccatttgatattgctgcagaaagaacaattttttataccaatgatatgcacggagcagaagatttaaaacctcaattaataaatgcaattaaaaattcattgaatcaagataatagtgataatccagtatatagagttgcaacttcaaaagttcttagagaacaaatagaacaagattcaactcaaggttatttattacataagcttgataatttagaaacatcaataaattcaattgtaatggcaataaaaaatgatacgccaaataatttcatatataaaaataaagccaaatatgggatttcaaaatcgagcgaaatgattttttctagattattagatgaagatacgtatcttaaaattaaagattcgattaagtctgcttatcctaatgccaaaatagattttgaacctcgagtacgtacaagcccaacaagaacttcaatagttatgacatcaagtattcccttaaactcacaagtcatagaggattccatttctcatttacttataaatgacgtagaagtaactataataagctattag

SEQ ID NO: 67942 - DNA, 333 bp, Acinetobacter baumannii
atgggcgatgcaggatgggaagctgaatacgagttattaaaagattatcctaacttgaagatagatgtgttggtgctaggacatcatggaagtaagcacagttcggcttatgatttcttggcgaccttaaaacctaaactggccattgcatcggcagggtttgataaccgttatggccatcctagccaacaagttatagcacgtttaaaagctctgcatattccgctaaaaagtactttggaacaagggaccttaagttttgtgctggaaaaccacaaattagttttacatgaccgacgtttggataggctctggttgagtagaggtttttaa

SEQ ID NO: 67943 - DNA, 174 bp, Acinetobacter baumannii
atgaatgccattgaaaaggtagctaaacagttcccgaacaccatttttatgcatgcgaacggatataaaactgcaaaaaatgtgggagtctatgatatccgaacctatgaaggctcttacttgcaaggagtattggcaggctataagactaaaagtaatgtttgggtgttgtag

SEQ ID NO: 67944 - DNA, 273 bp, Acinetobacter baumannii; identical to SEQ ID NO: 47774

SEQ ID NO: 67945 - DNA, 228 bp, Acinetobacter baumannii; identical to SEQ ID NO: 54609

SEQ ID NO: 67946 - DNA, 150 bp, Acinetobacter baumannii; identical to SEQ ID NO: 55543

SEQ ID NO: 67947 - DNA, 411 bp, Acinetobacter baumannii; identical to SEQ ID NO: 54621

SEQ ID NO: 67948 - DNA, 375 bp, Acinetobacter baumannii
atgaaccgacgcacaacatctacaattacagaagtagcgagaattaactgtaaccagcctgaaagatgcgctgcttttaattgtttttttacacttttaccaacaacaaacagtgctataccaaacactgtggcatcagcaagcatatccaatgagtcagcaatcaagcctgtagaggcagctaccaaaccactgataaactctataaagaataataggagattaatcgctaaaagaatttttaaaacttttgcttgttcagacgtatctgctttttcaggcatttcacccacagaggcagcggtactttcaagtttggctccaaaaccaagtgcttcaagtttgctagtaatttcattaagaccatcattatga

SEQ ID NO: 67949 - DNA, 813 bp, Acinetobacter baumannii
  misc_feature (786)..(795): n is a, c, g, or t
ttgcaccacaatgggcagaacctcttttttgcaaaattacttgatgatgcttttgacaaaggtcaaaaagctggaacaacgctcgatcaagactttgtcaatattgtacagacacaaaagtcattaaaaagtcagattaatccagatgtacttaatccaaatcagcagattaattccagctctttaagcaaggtaaatataaaggccctagctttaatcgacgattggctagattgttatgaggaactacaactcaagcatactgaaattttgaatctttgcgaaaggctgaaaaagcaacaacgacatttagttgcattaaaacaagggatagcacaaagctttgcacctttacgcacagatgctaagcctattgcagtattagatactagctatttgatgcgtcatagtgatgatctgactaatttagaaagagattattttgtagtgattccgcaagttgtcttacatgaactagacggccttaaaaagggacaagacggggataactttagcgagcaagcacagaaagcgagacgtgcgattcgtgctattgagcatttaacatcagaacatattgaaccgactcacgatgagtttgtaactatcattgcaaaaagtaaaacagcacaagaaatgactccagatgaacaaatcctttcagtggctttattttatcgatttaacagtagtgaactttttagtttagataaaaatatggggaatttggcaaaagcagtcaatattcgcactatatccgaatatcagcctaagttaattaaagannnnnnnnnnattattaaaaatttttaa

SEQ ID NO: 67950 - DNA, 240 bp, Acinetobacter baumannii
atggtcgggttaagtgcatggcattttttaagacaatttaaaaaacatgtgggtttaccgcctcatgcatggttagtacaggcgcgtttgcaaaaagcgagacaattattaaaacaaggcgttcaaattgtaatggttgcacagcaatgtggtttttctgatcaaagccattttaatcgtcattttaaaaaggcgatgggtgttacaccaacccaatatgtggcgagtcttaatctttaa

SEQ ID NO: 67951 - DNA, 531 bp, Acinetobacter baumannii
atgcaaattccttcgtcattgcaatcatcgctgctaggtcaaaaccagaaaggtgatttagcagggcatttactgtcgtcattaacgacctataaatatcctgaacatggtccgtcggttttagaagtggtggatatacaaaaaaagttccaacactttcaggccataacgcatattaatttagacctgaaagctggcgagttcgtgagctttttagggccttcagggtgcggtaaaaccactttactacgcatcattgcgggtctagaaaaacctgattatggaaaggttataaaaaagggcgtagacattacgttgcttagtgctgaaaagcgtcactgtggcattgtgtttcagaactatgcgttatttccaaacttaaacgtcgaagaaaatattgctttcggcttagagaaaaaaaagtgggataaggcgcagcgtagccaacgagttcagcagttattagaactgattgaattaccagatattgcaaaaaaatatccaaaccaattgtcgggtgggcagcagtaa

SEQ ID NO: 67952 - DNA, 1368 bp, Acinetobacter baumannii
atgagtgcgccacttacacttgcaaaagaaataggcattcattcggtaaaacttataggttcgattcaactgctcattgataaaggaatactggaatgtgtttctaaagatacagtgaagatagtttttttgaatagtgataatgaaataagatctaaaaaaataattaaacgccagatagtagtgcagcagaaaaatagtcatctattcatatttatttataaacttttgaccattatttatgatgtaagaattagtcataagcaaagccaaatagatggactgttgaaaattgactataaggcatggcttgtattatttacattagttgccaatagtgatgaaaatggggtagttcttagagtgggtatgcatgagttaggtctttatacaggcatgagtaggcattccattttacgctctttagataaaattttctcgtttggaatattaaggtctaaaataaatggtacattagacaatgcacttctcaattttacttcagcgatttatttaattaatttatcacacccaatatggggtgaatattgccaatacaaaaaatattttttgataaagaatccagtaactcagaatttgttagtacaagcattagatgttttgaataacttggataagccagagctatttttatcatcacagattcagacgttacaatatattcaagatttaaatgctttccaatttgaaaatgctatttcagctttagtaaagtatttagaagagtttaattttgcttcagagcttagcaatagctttgctataaagatgaatatttctaaattcaggtcaagcatcaggctgaaaaaaactgacaaccaaatggataatttaaaacgcttagaatttatgtttaagtatgtcgctaaatgcttgcctgctggtcaattatattggtcgagtaaaatagagttatttgatgatttagcactgtatgagaagatttcagaattcaagaaatatctttactttaatgattttgagtcttttagcgactcgacatcccaagtttcaaagattccaaagagtgaacttgtacaaattttagaaaccagccaattacagatttacagcttcatcacgcaatatttacttaaaaacgaagtgcttcatttaatagatgttgctcagcaagaattttttgatattaggcctataccgttagctggtgaggtgcaaatgagcggttatatttcggcttctataaagcaagaccagctatttattgttagctttgaatctgatggaaaggtgtataggaaagtccaagaagaggttgagatgaccatagaaaatcaaaagttatttggtttgttagatcaatcttgtacagctttaactttttaa

SEQ ID NO: 67953 - DNA, 1002 bp, Acinetobacter baumannii
gtgtttcgattagatctagatcatcaggcaggggtgatgtataccattcatacctttgtggatgtatgtcttaattttgatatttcagacgaagcattcattttcaacttagaacgcttgtattgcgcatttgaagcgtttaaacaagaagggcttgagtatgcagcatcgattcgggcatttattgcagtcactgaatacgtcaatagccagcgtggcatgcttagctttgctgaatatctgacagggctttcaataggggaaattaaggcattaagacgaatcctgaatgcgtatcgagggctgatacgtgatgagatcaaaagctttgcgaggcggaaagaattgaatcgagtggcattacttgaggagttcgaaggtgcaattaaggggtattattcggttctagtgatcagagtggatttgagctatagcaaggacagcatgagtgaaattactgtaaatgacttctatcagcatatcggaaaactacgtgatttgatcactgataagaatggatattttgatgcacttttgacctatgcgatcgcactggagcagggtataaccaaaggctttcatgctcatttaacattggtgattaatagatcgaagcataagagtgattataaaattgctgagggagtgatcgataagtggaaggaaatcacattcgataagggttttgggcggaacatcaacacgacagcgaataaagagaactacgagaagcaaggtcgtttaggtattggagatattcgtcgaacgacacccgaacaaggcaacaatgctttgggtgcagttgcttatctcagtgaccctgataaatacgagcagtcgttattggttaaaccacgagggcgtaaaacgttttataagggggattatcagcatcatggtcgcccaatacctgatacagaagaaaatagaagaatcaaagaatgggatgcgcagaccgctttagcaaagctggaagaggagatttggtttaaaaaattatga

SEQ ID NO: 67954 - DNA, 963 bp, Acinetobacter baumannii
atgagccattcagagttagagtttgttacagcaccccgattagaacaagacgttttagagcattaccaaacgattcgctttgctccaattccagaaggtactgattacgatgctcatcaaaaaaatatagatcaggagttcaagcggaaactgtctggttatttttcagcatggcgcagaatgatggccgttggcattcatgagcatttgtctttttccttttgggcagacaagttctttcaggcttactgcagtgtattacaggaagagcagattcggttctttgaggtcacggcgcaaagaagcgctggtttttatatcgataagatcgtaaagcggctgagagtgctgtttgaaagcaccagcttaactgaagaaatgcataagctgaatgagtgctacgaaaagcggattgaaaagttgagagaatcctaccgtaatacaagccagatctatcctgatgcagcggatttaaaactggaactaagtctaaatgagggtggaaatgaaattatcgatttgcgacagttagagcgatttttatcaaatttccaaaaaagtctagcagctgagtattggtatagaacacaagccatttaccgcttttatcaaattgtacgggatgatgttcagcagcggtatgtgatccacttttatctgagctttaaccgatcactctatgctgatccattattttattgcagtgtcatagagcgttgctgggcccaggtcacgaattatatgggtacctgcagttgccttagtctgacagatcaaaatagtgtggttgatgctgaacagatgtttcggattgatcgaattattcaagaagacgtccaatgtccgctgagtgcattaaatagcatgccagagaatcaaacggggcagtttgggcttccgaatagaatctgcatttaccctaaaggatttaaatggtttgatggagcacctgtacggcgctga

SEQ ID NO: 67955 - DNA, 138 bp, Acinetobacter baumannii; identical to SEQ ID NO: 56569

SEQ ID NO: 67956 - DNA, 960 bp, Acinetobacter baumannii
  misc_feature (909)..(918): n is a, c, g, or t
gtggcaaaagctccaaaagcaaagactaaagcggttaaagttaattttcatgatcagttgattttgaataaatggttgtggtcgaagtttaatccgaatcgtttggaaggcatgaagcaacagctagactatcctcagtttgagggaatcgagcatgaaggtgataatgcagggcaaacgaagttctttagcgtaattaccaatacactttttaataagcagattattgatgttgatgttctacgtcgctatgacttaaacattgttaagcattggcaaaaaatcactgaaaaacgtaatgaaatagaagggcatgttttaaatctaaaatatttccaatacctttcattgctgtttacagaactttatttagatcaatattttcatcatcaagcggacatgctaaatgagctgaatgttgaacttgaacaatataatgatgaccagaaaattgatgcagaccaatttcagcagtatttgcctgaagacctaaataaaatcggctattggaatgcaacgggcagtggtaaaacattgcttatgcatgtcaatattttgcagtatttagactatttccaacatcaaaatggcgacagcacttacccagaccaaatcattttacttacaccgaatgaaggtttgagtgaacagcatttgcaagaactcacggactcaggttttcaagcgaacctgttcgataagcagaagagtcgaaatagcttgtatcgagatgaaattcaaatcatcgatatgaataagctgagtgatagcgatggtgataaaaccgttgcgaccatgagcttggaaggcaagaatttggttctgatcgacgaagggcaccgtggtacgagtagtagcgcaggtgcttggatggagcgtcgagatattctcactaaagatggctttagnnnnnnnnnngcattgttttttgtgtcagttatggtgcaaagatggctttag

SEQ ID NO: 67957 - DNA, 273 bp, Acinetobacter baumannii; identical to SEQ ID NO: 54601

SEQ ID NO: 67958 - DNA, 192 bp, Acinetobacter baumannii
atgcttgcaatattaagtccgattgttgtgttgtcagaccagaaacctttacagttgatcagttcacttgttaacccattcatgattttggttttatcaatcttagttgaaataatttcttcaaaccctttaaatctctcgacatttaaaaatgccttgatgtcttttaagaaagcacaaatttcatggtag

SEQ ID NO: 67959 - DNA, 597 bp, Acinetobacter baumannii
  misc_feature (529)..(538): n is a, c, g, or t
atgaataaacatttattagcaaaaatcactcttttaggtgctgcacaactatttacgtttcatacggcatttgcagatatacctctgacacctgctcagttcgcaaaagcgaaaacagaaaattttgataaaaaagtgattctgtccaatttaaataaaccacatgctttgttatgggggccagataatcaaatttggttaaccgaacgtgcaactggcaaaattttaagagtaaatcctgaatctggtagcgcgaaaacagtatttcaggttcctgaaattgtgagtgatgctgatgggcaaaatggtttgttaggctttgcttttcatcctgactttaaacataacccttatatctatatttcaggcacttttaaaaatccaaaatctacagataaagagttacctaatcagacgattattcgtagatatacctataataaaactacagatatatttgaaaagcctattgatttgattgcaggtttaccgtcatcaaaagatcatcagtctggtcgtctcgtcattnnnnnnnnnncattggtccagaccaaaaaatctactatacgattggtgaccaaggtcgtaatcagttag

SEQ ID NO: 67960 - DNA, 273 bp, Acinetobacter baumannii
gtggtggatacaagtctacatgggcaacctatttcgagtgaattcatcaaaaaagcggatcccgatattctttatatcgtggaccgaactgctgtgatggaacatcgctcaaacattaatgctgccagtgttgaaaatccattattacgtcaaaccaaagcatggaaaaacggtcgtgtcatttttgtcgatgccgatgcgtggtacaccacggctgcaagcccaacctcactcaaaatagtgatggaagatgtgaaaaaaggctatcaataa

SEQ ID NO: 67961 - DNA, 615 bp, Acinetobacter baumannii
atgagtagttttgatgaaatacaaaatagagaagctgggctgcataaaaagttatctgcaaaacagatggggatgattgccattggtggagcaattggaaccggattgtttatgggaagcaaatttccaattagctttgcaggtcccgcagtcatagtcagctatgcgattggtggtttaattgcttttgcgcttatggcttgtttggctgaaatgacagttcagcatcctacttcgggctcatttggtgcatatgcagaacattatataagtccacttgctggcttcttggttcgctactgttactgggcttgtattgtgctggctgtaggtacagagattaccgccgttgctgattatatgaagctctggttcccgaatgtaggctcttgggtctggattggatttttttcactgaccttacttgttgtaaatgcctatagtgttaaagcttttggactagtggaatactggttttccacaattaaagtttttgccattattgtgtttattcttttgtctattggtatcttgacgcaaagcaatgagggaataacgcaagttgtaactcatttatcaggacatgtgtcattatttcaatatttagttatttaa

SEQ ID NO: 67962 - DNA, 246 bp, Acinetobacter baumannii
atggaacaagaaattttaaaaaaacaaattgagtatctacataactgctattttctctggcttgaacgtcctaccaatccattagatttatcttcgcctaaacatcgagctgaagaattgtttattggttcatacataaaaaaggttaaaagtttgcgcagatggtttaaaaaaaatgagcttcctgagccattatttgacccatctaccgttcaagaaactattaaaaatttgcgtcttcagtga

SEQ ID NO: 67963 - DNA, 459 bp, Acinetobacter baumannii
atgaaagaaggtcaatcaagccgtactgccgaagccgctgctgctttacgtgcgaatcactttaaaaatacgataaatcctgtattttcagatccctatgcttttgaaatgaccagtaaaggttggaaaaagcttttatctacaccactcattgttaaattaatgaattcacccattttaaaccgtaccttaggtttattgagtggacaggttgtcggtcgatcacgttatgccgaggacttacttaatcaagctgttcaacacaatattgagcaatatgttttggttggagcgggtttagactcttttgtgctccgaaaatcacagcattatccaactttaaaaatttttgaagttgaccatcctgatactcaggctgccaaacaatctaaactcaaaaagttaggcgaacttccctctactgttgaatttgtggtggtgtttcaaaaagtatgctga

SEQ ID NO: 67964 - DNA, 1767 bp, Acinetobacter baumannii
atggaatgcagaatttcatccccattttttacaagtctcatagaaacagaacaagactattttcttattttagcgctccacccgattcttgatgaaagctatcaaaagtcagatttcattcaggctatacaaaatcggtatcaacaatattcacccaataatgtgccattggtgctgacagaaattgatatctcaaatcatcttgcaagttctacaaaagcgccagaacaatctaaccaaaactatgtgtcagaaattattttagaagagtttcgaaatacgctcgctgaaccagaaatgagtcaacatgatgacttttttgattttggtggccattcattattagcaacacgaattattggaaacctacttaataaacatggaattgagattcaatttaatgatttctttaaatctccatctgcggctgacttagcccaatatgctttcgttaaatctgcaaaaaacgaaaaaaccaccttacaaagtgtagataaagccccgcttactttagctcaagatttcctgtggcaagcttattctgcgttcgattttagcccaatttataacttaccatttgccgtagaattccttgaagaaattaatgaagatgttttcttgcaagcgtttacagatattgttgagcgccatacaggtttacgcacaatttttaatagcgccaatggtcaaacctatcagcaggttgttcctacgtctgaacttcaacaattcaaatggttttggaacagtgccgaaagtcacgatgcaacgcttgccagtgaagcttcatataaatttgatttaacccgtgagcttcccttaagaattcgtttaattcgaaatgctaaaggtcgccaaactttatcgtttttagttcaccacatggtgattgatgaatggtcattaaatacgattatggctgaccttgcgcatgcttatcttgctcgatcaaatgctcaagctccaaactggaaggcacctgcccaatctattcttgatttttctttactccagcaaaagcaaggtatcaatcaagaccatctaaattattggactaacctgttaagaggggcaaccaaaggtttacacctcccagtttcggaacatgaattaaatgctgaaaaggaaaaacctccagtccaatggctcgaacttaaatttgcaccggaaatgtatgaaaagctcctcgcattttcgagacaacatagctcttctatttttgcggttctctatactgctatcgcccatgcattacagcaacaaggtaatttaaaagatattgtgattggtacttctgcctctggacgaactgatcctgagttttttgatacggtgggttactttacgaccatggtggcgcatcgcatacagtttagcccttcagatgcattccaatcattgctccacaatatcagcacaatgattaatacctcgatggcctatgcagatattccaatcaaccatatacaaaatgcattagggatgcgtgccgatgaaggactgttatttgatgtgtttattcatatccattcaaataatgctttaaacggcgcgcttaaaacacctcaaggacaaaaccttccttatcgtcaaatcttgccggaacgtgatgaatcgatgctcgggttacattttgaaattatggaaaatgtgattgatggacaacatcagttaagcatgatcattacgtatcaagcccaccgcttcccgactgcaacagtgaaaagtatctgtgaaaaaattaaggcaaccttagctcaaatctag

SEQ ID NO: 67965 - DNA, 369 bp, Acinetobacter baumannii; identical to SEQ ID NO: 63887

SEQ ID NO: 67966 - DNA, 741 bp, Acinetobacter baumannii
gtgtcaaatcaacaacagatggctgctcaaacagcaactttttggcaaggtgccaaagatagtcaagccatcgttctcacctacttaccagtttcttttgcctttggcgtttctgcatctcaatttggttttagcccatgggaagcattttttctttcttgttccatgtatgcaggggcaagccaatttttagtggtcgcacttttagcaagtggttcttctatatggttaaccgccttaacagtcattgcacttgatatacgacatgtactttatgggcctgctctttataatttgattcccactaaattaaatttaaagaagacagccgtttgggcctggggtttaacggacgaagtttttgccagtggtatgatccaactttcacagcgcagacaacaatggtccgagtcttggatgttgggcttaagtctatttagctggatgtcttgggcaagtggttcattattaggcgggttatttgcagatcaagtcgcacaccttccaaagtttttacaagcagctttagatttcttattacctgctttatttttaagttttttattagcggcatttgaacgaaagcatagccttgtagttgctgtatcgttagtggtgtcagctttggcatgttattggattaacttatcagcggctatctttattggcattctttcaggcattttagcaggtctatttaaatattatgtgctgaaacaatttgatgaggttgaagcttaa

SEQ ID NO: 67967 - DNA, 195 bp, Acinetobacter baumannii
atgacatatatatcgactttagcagacaatccaaaaatttcattaccagaagacaaagaattgaataattacataacttttatttgtgataagagagaagctaatgaaattattactaaaattaatggcttttcgaaaattaataatattgaaatacatgatattagaaagaatatcataataattaataaatag

SEQ ID NO: 67968 - DNA, 132 bp, Acinetobacter baumannii
atgagaaacattaaaccaactgatctaagcttagatcatgtttgcttccgtcgattaaattctctagatttcgcgcaaaaattaactcttaaaacacgcattatccgttggatgaaaggcggtgcaaaatga

SEQ ID NO: 67969 - DNA, 801 bp, Acinetobacter baumannii
atgaatgcactcgacttaaaccaagctgtctttattcaagatcatcaaatcaaaacagatagtctaaaagttgcagaagcttttgggaaaaatcatcgtgatgtgttaaagcgaatttcatctttagattgtccaaatgattttagcgagcgcaattttgcgctggctaactacatagatgaacaaggtaaatctcgtcctatgtatgaaatgaccaaagacggttggatgtttttggtcatgggttttactggagagaaagcagctcaaatcaaaatcgcatttattaacgcctttaatgcaatggctgtgcttttacagaatcagcagttaatagagcagcagggtatttctgttggctcaaaggttcagctcaaatcgggcagtcctgaactcacggtgaatcgattcattccaaatgctgaaggtcacaatgacagagtcgaagtaatctggtttggcaatcgactctacaaagaaactctttctatccacgcagtcattccagtgcatgagcaacaaaaccaaatgctcaaacagttttgggaagcgatctatcagtatggtttagacaagctaaatcatgggtataaggctgagttaattgcgttaaatctaactcaggtatatgaagttatccacgggctaccagagcgtaaaatcttaatccaacaactgaaagttagctcgaaaccctatccccaatacatggacactaacttacctatacgcagcgtgttaacaggtaaaacagttaaatgtgttgtattcaaaagcccagttttactaggggagaactaa

SEQ ID NO: 67970 - DNA, 372 bp, Acinetobacter baumannii
  misc_feature (358)..(367): n is a, c, g, or t
gtgttatcaggtgtgccattagaggaccttattcaggaaggtaatatagggctattaacagcagttgatcgttatgattatcaatttggttataaattttcaacttatgcaacttggtggataaaacaatcaattactagagcgatagctaatactaatcgcttgattcgattacctgtacatatgtatgaattagttagttctattgaaatcgcaaggaagtctctggaagacgaaggtataccagttactatttcatcactggcacataaagccggatgctcagagctgaatgttagaaaggcaataagtgctaataattcagtagtattttttgatgatgtctcatatttagagnnnnnnnnnnattag

SEQ ID NO: 67971 - DNA, 288 bp, Acinetobacter baumannii; identical to SEQ ID NO: 54592

SEQ ID NO: 67972 - DNA, 1221 bp, Acinetobacter baumannii
  misc_feature (1184)..(1193): n is a, c, g, or t
atgcaaaggactacgaaacactttcaaattaatgcattagcacttgctatagcaatgagcacaatttcagcgcatgcagagactgatcagcagacttcagaatatggaactcttcctaccattaaagtaaaagctggaagtggcgaagaaaatgaaaaaagttatatagcagggaaaacagaaacagcggttccactgggtttatccgttcgtgaggttccacaatctgtttctgtcattactcaacagcgtttacaagaccagcaattgtcaactttggttgaggtcgccgaaaatgttacaggggtaagtgttaaccgttatgaaaccaaccgaggtggaatctattcacgtggttttgtagtagataactatattattgatggtattcccaccacatatagcttgccttggtcttcaggtgaaattttctcaagtatggccttatatgatcatattgatgtagttcgaggagcaacaggtcttacatttggtgctggaaatccatctgctgcgattaatatggttcgtaagcgtgctacgagtacagagccaactgctaacgtagaagtgagtgcagggagttgggataattaccgtgttatgggtgatattgccaactcccttaatcaatcagggacagtacgtggacgagcagtggcccaatatgaacaaggcgacagctataccgacttgttgtctaaagaaaagctaactttactgttaagtgctgaagcagatttatctgaaaatacccttttatcgggtggggtaacttatcaggaagatgatccgcgtggaccaatgtggggaggtttacctgtctggtttagtgatggcacaaaaacgaactggtctaaaaataccactacaagtgctgactggacacgctggaatgttaaatataccaacctatttgcagatttaactcataaatttaatgacaactggtcagctaaactgtcttattctcatggtaagcgtgatgctaattctaagcttttatatgtttcaggtagtgtagataaaaatactggtctagggctatctccttatgcatcagcgtatgaccttgaggtagagcaagataacgcttctttgcagctcaatggtagttttgatttgtggggcttagagcaaaaggttgttttgggttatcaatattccaatcaggactttacagnnnnnnnnnnactttacagcgtatgctcgttcaactga

SEQ ID NO: 67973 - DNA, 747 bp, Acinetobacter baumannii
atgcctgagccagtgtggaatgcacctacactcaatgagaaatataatattgaacaaaatgcactattcgctgcgacttatttaaatccgattgagcctctaaaatttattttaggtggacgttttacaaattatgaaaagaatatatatggtcgtagttcatccataaaatatgaccacgaatttgttccttatgcaggtattatctatgatttcaatgatgtctatactgcatatgcaagttataccagtatttttcagcctcaagacaataaagactttgatggaaactatttagacccggttgaaggaaacagtactgaagtaggcttaaaatctgcatggtttgatggacgtttgaatggtactttagcgctttatcatattaagcaagacaatttagctcaggaagcaggacaagttactcgtaacggggtaaaagaaacctattatcgggcagcaaaaggtgcgacgagtgaaggttttgaagttgaagtaagtggacaaatcacaccagactggaatattacagcaggttatagccagttctctgccaaagatgcaaatgatgccgatgttaatacccaacttcctcgcaagatgattcagacatttaccacctataaattaccgggcaaattagaaaacataaccgtgggtggcggggtgaattggcaaagcagtacctatattaatgccgaaaatcccaaagaagttattgagaaagttgagcaaggagattattga

SEQ ID NO: 67974 - DNA, 783 bp, Acinetobacter baumannii
atgctggaaaaatttaatcaatatcgccaaacctggactttacctttaaatcgccataaggctaacaatcaaacacaattccgctttgaatgggttgataatttaaaagaattacaagatgtacaacggtttcgtgcacaacaatttagtaaacaattcggcattcaatttgaagataatttagatcaagatatttacgattttggctgtgagcatgctgtattaagagaaaaatggacaggagagatagttgcttatacacgacttaagctctttcaaggccatgaaatagggcaaagttacagtgctaatgagtttgacattgttccacacttgtcgcatttgccaaatgtattagagatagggcgtacttgtgtacatccacgttttcgtaatggtaaggcgctttcaacattatggctgaatcttgcacctaaagtattgtggtcaatgcgtgctaaatatttgatgggatgtgtcagtattcatctgcaagataatttggctcgagcgtactatacgcaccgtcaaattcagcagttaccggacactaaaactatcgatattcgttctaagaaaatctatgaacctgaatatccggagtttagtttccctcaagacgagcggatgccgaaactattccaaatgtatttgagtatgcagtctaaattatctaaagatgccttctttgatgctgaatttaactgtcttgattactttgtatttttagaagtgaataaaattgccacttcgtttgtaatgaacaaaatggctcagcgataa

SEQ ID NO: 67975 - DNA, 507 bp, Acinetobacter baumannii
atgtttatatcaatatcaaaattctgttttgataaattaaaaccaaaatttcggacctttaagagcaaaagcaaagattcatttttaattaaaaaacaatataaactctctaaagaaacagtaaattcaattaaagaaattaaaaatgaatttaacctccctcgtgaagaaaatgttattgaaaacattataactggccacattaacaatataaatgtacaaaaaaaaattgaaaaactaaaacccaaagaaatagatttagcggctctaaattttataattaatgaaaataagcaaaaaatttatgatttagaacaggaaaataaaaagcttgaatataaaattcaaaaaataaccaatttattggcaaaatcatatttaaatattgaatatttagaaaatattctcttggaacatgatttagattcagaataccctgctccacctgaagataaatttgaaaaaaaagtctttgaagttaataagtctttaacagaaagtttataa

SEQ ID NO: 67976 - DNA, 792 bp, Acinetobacter baumannii
atgaaaaatattcaaacgacagcgttgaaccgtacaacgttgatgtttcctttagctttagtgctatttgaatttgcggtttatattggtaatgacctgattcagccagccatgttggcaattactgaagatttcggtgtaagtgcaacttgggcgccgtcttcaatgtcattttatttattaggtggtgcatctgttgcatggttactaggacctttatcagatcgattaggccgtaaaaaagtacttttgtctggtgttttattttttgccttgtgctgttttttaattttattaacgcgacaaattgaacactttctgacattacgttttttacaaggtattgggttaagcgtaatttcagcagtgggatatgccgcaattcaggaaaattttgccgagcgtgatgcgattaaagtcatggcacttatggcaaatatctcattgcttgcgcctttgctaggacctgtacttggagctttcttaattgattatgtttcatggcactggggtttcgtggcaattgctttacttgcactgctgagttgggttggcttaaagaaacaaatgcctagtcataaggtgagtgtaaccaaacagccttttagttatctttttgatgactttaaaaaggtatttagcaatcggcagttccttgggttaacgttggccttaccgcttgtgggtatgccgcttatgctttggattgcattatcgccaattattttggtcgatgaactgaagctaacgagtgtgcaatatggcttagcacagttcccggtatttttttaa

SEQ ID NO: 67977 - DNA, 168 bp, Acinetobacter baumannii
atgaaagagaaaccaactaagatgaaaactaaaagcttatatggcaacttagtaagctgcgcgaaatattcagcacatgcacaagttaaaccaattgcagtaaccatacatgctaagaaaatgagacctgttaagaagagtgaacccatattcccaaaagcatgttga

SEQ ID NO: 67978 - DNA, 1467 bp, Acinetobacter baumannii
ttgcatttctctattttatcaaaattcaacctgcttttttttagcatactttttgatacaccaccgtttaatctacgtgaacaccctgaaattgatcagcacgaaggggcagatcaagagttcctgattattgctaaaaacttctataaccaaaataacttacctaaagatttacatcagcaagttagccagttattaacccaaagtcgttgggatcaacacggctacgatgatatagagcgtcaaggtaatgaactgactctaatacgccgtcaaatcaaaactgcacctgaatataatccagagcagcatcgaccaattgcctacccacaaagagcgaaagtcgtgggacctcaaggagaaaccattcatgtcgatgaatgggggcgcattaaagtacgttttctatttacccgtagcgatgatcatggccatgatggtggcgcaggtagcaatgacaacgataccgactcggcttgggtggatgtactgactccttgggcaggagaaggttatggcgcacgtttcttaccgcgtattggtgaagtggttgttattgacttttttgatggcaatatcgaccgtccatttgtgactgggcgcatccatgaagcacagcgctcacccaccaagttcgatgtaaaaggtcagcttcctgcaactaaaaaactgagcgggattcgcagtcaggaaatcaatggaagcggcttcaatcaattacgttttgatgatacaaccgggcaaataagtactcaacttcaaagtagtcatgcggcaacacagttgaatttaggtaatttaagccatcctaaagaacaagcgacaagccaaggccgtggtgaaggctttgagcttagaacagacgcttggggagctgtgcgggcgggtaaaggcatgctcattagtacctatgcacaagagcaagcgattgcagatcatttagaggccgcacaagcacaatccttactttcacaaggctatgaaagcatgaaaatgctcagtaaagttgcagccaagcaacaaactgatgctttgaacgtgattaatcgcttacccaaattcatccagtcgcttgagttaaaaaccacaggtcaggcattaaatagtacggtaaacctattcaaagaaggaattaataacgatcctatccatgccctaaaagactgcggtggctttattcaagacattggtgcactagggggaaatgcaaaaggcgttgtagatgaatttaattctttctttagcgatgctaaagatgcagtagaaaatttaaaagcatttatcgaaaacgttgaagaacatggccctgatattgttaaaggaaaactcgcaagtattaaagaccgaattcataaaaatccatttgaaagtattcaagaggtcgggaaagtcttagcaaatgtcgagactaaagattttgggtggtgtttcaaaaagtatgctgaaacaaagcaggttgaattttga

SEQ ID NO: 67979 - DNA, 1248 bp, Acinetobacter baumannii
atgttccgacagcaaaatctttatcttttgctcttttccttatattgggcacaaggtttgcctgtaggttttatgacgcatgccttacctgtcatattaagagctcaaggtgtatctcttgcccatattggtggttttgggctgctcatgttgccttggtcaatcaaaatattttgggcgccgtgggtagatcgacatgccatctcgcatttaggtcactatcgtagctggattttacctgctcagtttttgacggtgggtgtactttgtattttatcttttttccctatacaagttttagatcagcctctttatctctttatattttttattacgctgttatttatgaacttaacaggcgcaactcaagatatcgcgaccgatgctttggcggtcaatttattgcaacacgatcagcaacattggggaaatacttttcaggttgtaggttcacgacttggttttattgtaggcgggggagccgtgttatggtgcctagactggttatcatggcaaccaacttttctattattagccgctttagtctttattaataccttacctattttactatttaaagagccatctcatacttctcattcacctcatcaatatagccaaccaagtctagttacaaagattaaagcttacttggggtacttctcgcaaaataaggaacttcgttcatggttaatcgtccttataacttttaaggttgcagatggtttagccgggccattacttaaacctttaatggtggatatgggtttaagttttactcagattggtatttacatcaccatgcttggggctgttgctgctttattgggggcacttattgctggctggatgttaaaacatatttctaggtccacagcattaatgactttttcgatattaaaaattatgagtttagggggctatgcgtatttagcttatgcttatgaacaaaaggtaaagataaatgtatggtttatctatgctgtaaatgccctggaagatgcctttgctgccatgctactggtcgtgatgttaactttggttatgcattacagtcgaaaaaactatgcgggtaccgattttactttacaggtttcagtcatggcgacagtcagtggtagtctttacagctttagtggagtcattgcagatgcgcttggttatttccattatttgatagctattgtcagtattgcagtactctttttaattcctatttacttatggaaagctgccaaaactgtataa

SEQ ID NO: 67980 - DNA, 408 bp, Acinetobacter baumannii
gtgaaccaaggtcgtgccctacttcttttacaacaagctaagttaattacgcttaaagattcaaataatcacttatctgcactcaaagatgttgtttcaaaccctaaaaatttgcaatttattgaggttgaaggaccacagactgctcgtgcaattgatgatgttgacttggcttttggctatccacattacttgcgcttagcaaaaacagcagaccctaatagtgcgcttttactggatgacaataccaataaacgttatgccattttgtttgtagtgcgtgatgactatcaagataagggcgacaaattaaagaaatttgttgagatctatcaaaactcgccaaaagttaaagctgtgttagatgctgaaattgggccaaaactttggttccctggctggaagtaa

SEQ ID NO: 67981 - DNA, 471 bp, Acinetobacter baumannii
  misc_feature (419)..(428): n is a, c, g, or t
atgagccaacatctttcactacctaaagataaaatccgtttccttttgttagaaggcgttcaccaaaacgcagtcgatactttaaacgctgcgggttataccaacattgactatcgcaaaactgctcttgaaggcgaagcgcttaaagaagcaattaaagatgctcactttattggtattcgttcgcgtacccaattgactgaagaagttttcgaagctgcaaataaattgatcgcagtaggttgtttctgtatcggaacaaaccaagtagatcttaaagcagcgatggcacgtggtattcctgtatttaacgcaccatattcaaatacgcgttcggttgcagagctcgtacttgctgaaactattcttcttcttcgccgtgttcctgaaaagtcagcggcttgtcatcgtggtggttnnnnnnnnnnaaatctgctgtgggttcttttgaaactcgtggcaaaactttag

SEQ ID NO: 67982 - DNA, 426 bp, Acinetobacter baumannii; identical to SEQ ID NO: 45691

SEQ ID NO: 67983 - DNA, 183 bp, Acinetobacter baumannii
atgaaacaggttgaattggttgttgctttaatcggcgaatttgctcagctagacgttgctctaggttccaatatcggtataatgccaacccctgctcgtcgtggacacaaggggcaacttgagactttgcttgttcagcagatatcaccagttggccaagtgtttctatttgctctgggctaa

SEQ ID NO: 67984 - DNA, 282 bp, Acinetobacter baumannii
  misc_feature (222)..(231): n is a, c, g, or t
atgtcaattgaaaaatttagcgtagaaaaagttttatctgttcatcgttggaccccaacacttttcagttttaccatgacgcgtccttcgcattttaaatttacggcagggcaatttgcgcgtattggtttaaaggtaggagatgagctggttgtccgtgcgtattcggtggtgtcttctccgtttgatgaaacgctagagtttttctcaattgtagtaccnnnnnnnnnnagtaccagacggtgccttcacctcgaatctacagcatttgaaagtcggtga

SEQ ID NO: 67985 - DNA, 516 bp, Acinetobacter baumannii
  misc_feature (503)..(512): n is a, c, g, or t
atgactacacttaattatacggtaaggtttcaaaaaaccgttttggcaactttaattgggctttgtataagccaatcgagtttcgctcttgaagaactctctgatgctggtttgagtgaaactactggtgaaggtattgctattttacctcaaaatacttacatggtattgcgcggagctggagcgaacgaaaccaccaatcaaattttaacggatcgtactaaagatacaggttatattaattatgtgcctgttgggcctttaagtatgactgctgcagatacgaataaaaacggtacgatcgactctggggaccgtgcagtaggtaaagctgatatttttctttatggcttagctctttctaaatcagataacgatacaaatacccgtcttgcttctaccgatacagcagctgcaatttcgagttggggtacagctattaatccgtggatttttaaagttgcgacagaaaactctgtgcctaatttcagtgcaacaaattnnnnnnnnnngtag

SEQ ID NO: 67986 - DNA, 1137 bp, Acinetobacter baumannii; identical to SEQ ID NO: 45809

SEQ ID NO: 67987 - DNA, 252 bp, Acinetobacter baumannii; identical to SEQ ID NO: 56364

SEQ ID NO: 67988 - DNA, 318 bp, Acinetobacter baumannii
atgggtaaggctcaatttgagcttatgcaaaagcatgccatatttattaatattgcgcgtggctcagttgtcgatgagcaagccctaattgaagcattgcaaaatgaagttatttttgcggctggtttagatgtctatgagaaagaacctctgcaagaatctgcacttttcaatttgccgaacgttgtcactttgcctcacgtaggttctgctacagctgaaacacgtaagaaaatggcaaatttagcttataaaaacttggtggaagcactagaggacaagacgcctagatatttagtgaatcctaattttgtgtaa

SEQ ID NO: 67989 - DNA, 636 bp, Acinetobacter baumannii
atgaaaaaggttgtggtttttagccaaattgatgaggaaattttgtcacggttacagcagcattaccatgttgtcgtattgaaccctaaactgggtgatattaatgaacagatacgacaagaagtagtagatgctgatggcatgattggggctggtcgtttgctcaatgaaagtaatctttctcctgcccaaaaattaaaaattatttcttctgtgactgtaggttatgacaattatgatgttggttatttaaatcagaaaaaaatctggttagcaaacacacctcatgttctaactgaaacgacagcagatcttgcttttactttgttattaagtgcagccagaaaagttccttttctagatcactggactaaacaaggtgagtggaaaagaacagttgggccacagcagtttggtctcgatgtttttggaaaaacattaggtattattgggcttggtaatattggtgctgcaatcgcacgtcgtggcttttatggatttaacatgaatattgtttaccataatcgccgcgagaaacctgagttggcggaacctttaaaagctcaatatctgggattggaagaattattacaacaatctgattttgtagtgacagctgttggctttaatgggtaa

SEQ ID NO: 67990 - DNA, 1542 bp, Acinetobacter baumannii
atgctgtctcgtgtggtacgacaaattttacaagcaacggtttatgatgttgcaattgaaacacctctcgaagcagctccacgaattagtcaaaaattaaacaacacaattcgttttaagcgtgaagatttacaaccagttttttcttttaaattacgcggtgcctataaccgtattagccaattaccgaaagaacaacttgaacgtggcgtgatttgcgcatctgccggcaaccatgcgcaaggtgtagcgttgtctggtcaacgtttaggtattcctgcaattattgttatgccaagtactacccctgacattaaagttcaggcagtgaagcgtttgggtggccaagttgtattacatggcgatagttttgatattgcaaacaaatacgctcagcaacgtgccgaagctgaaggattagtttttattccaccttatgacgacgagttggttattgcgggccaaggcacaattgcgaatgaaattttacgccaatggcgtgatgtagaatatgtttttgttgctgttggtggtggtggcttaattgctggtgtagcagcttacttaggtgatgttgcaccgcatgtcaaagtcatcggtgttgaatatgaagagtcagcttgtttaaaagcagcgctagaagccaatgaacgtgtagtcctaccccacgtaggcttatttgctgatggtacagcagttgctcaaattggtgccttaccttttgatatcgttcgtctacgcaaatcagataattctggaccaattgttgaaccagatattgttactgtaaatacagatgagatctgtgctgcaattaaagatacttttgatgaaaaccgcagcatcgttgaaccgtcaggtgcgatggccctagctggtatcaaaaaatatgttgccgagcataaaattagcggcaaaaacatggtatcgattgtttgcggcgccaacatgaactttgaccgcttacgttacattgcagagcgcaccgaattgggtgaacaacgtgaagccatttatgcagttactctttctgaagaaaaaggcgcattcttaggcttctgccgtgctctacagggccgtaacattaccgagtttaactaccgtgcaaataacacagaagaagcacaagtttttgtgggtattagcttaaaaggtggtgacactgaacgtcatgaaattttagaacaacttaaacagcaaaattatgttgtagatgatttatctgatgatgaagttgccaaattgcatattcgttacttgattggtggtcatgccaatctggatgacgaaagattgttccgtgttgagtttccggaacgtccaggtgccttactcaccttcttaactcgtttaggtccaacccacaatattacgctgttccattatcgtaaccacggcgctgctgaaggtcgtgtactagttggcttacaagcaacagatgctaaacaaaacccagatggtttaattgaaactctggagcaaattagctatccatatgcagaaattactgacaatgtgggctataaacgtttcttgaagtaa

SEQ ID NO: 67991 - DNA, 258 bp, Acinetobacter baumannii
atggaattaaaagcttatttacatcgactagaaaacattaaagcgattcatgatctagatgcagcaggactcaaccaccatgtaattgccgtgttcttgtctgccgaaggtatttcaatgactgctcaggaggtaaccactatcgttaatacgtatgacgccttaggtaaagtgaaattaccaaataaaaaagtgcaggcactgatcaatgccaaaaaacttggacaaaatgatgagaccttgccgtgccctgtttaa

SEQ ID NO: 67992 - DNA, 411 bp, Acinetobacter baumannii; identical to SEQ ID NO: 45960

SEQ ID NO: 67993 - DNA, 1662 bp, Acinetobacter baumannii
  misc_feature (27)..(36): n is a, c, g, or t
atgtcgctgcagggcaaagacaatatnnnnnnnnnncgttatgtcgctgcagggcatagacaatatagttacaaactggtacgccttgcccgtaatcaggatgtatttcgtcaagatgaaaacggtcattatcagattgctactttaaatttagttattgatgaaattcttagaaccataaccgatgcagcaaaagttgaagattttatttttgaattaaaacgaacatttattcatgatttacagtctcaagcatgttttgatcactatgctttgccggcaattcaatatccatatgatattttagaatcatatttaatggatggtcatccatatcatccgtgttacaagtcacgtgtaggttttagtttacaagacaatgtacgctatggtgtggagttcgcccaaccaatcgccttggtctggttggctgtgcatcaggacattgttgcaaaaaaacattcagaagatatagagccagatttattttttaaggagcaattgaattcacaagaccaagagctattcctgcaacatctctcagatcgtgatttgaaggctgatgatatttggattccggttcatccttggcaatgggaaaaccatttaatttctatttttgctgaagaaattctaaatggcaaaattgtttatttagggcaaagtcaggatcgctatttagcccaacaatctctacgcactatgactaacttgcagcatccggaaaagccttatatcaaactgtcgatgagtctaactaatacatcaagctcacgtgttctggctaaacatacagtaatgaatgggccaattattacagactggttgcaacgcttaattaaacagagcaaaaccgcccaagagcttgattttgctgtattacgtgaagtgtatggtttaagcgtggattttactaaattgccaaaatcacatgctcaacaggcctatggtacaattggatgtctatggcgtgagagtgtgcatcaatatttacgtgaaggtgaagatgcaataccgttaaatggcgtgagtcatatccaaaaagatgggcaagcattaattgcaccatggttacagcaatatggtgttgaatcatggacacgtcaacttttgaaagttgtgattactcctttgattcatttactttttgcggagggaattgcaactgaatcacatggccaaaatattattcttgtacataaacaaggttggccaacgcgagttcttttaaaggacttccatgatggtgtgcgctatagtccagcacatttagcacaccctgaattggctcctgaactcgatcagttgccgcctgagcatgcaaaaaccaacagtatgtcatttattttgacagatgatttaaatggtattcgtgattttagctgtgcctgtctgttttttgtcgctttaaccgatattgcaatatttttaaatcaaaactttgatcttccagaaaaaaatttctggcaatgggctgcggaagtcatccaaaattaccagcagcaacatccagagcatgcttcacgttaccaattatttgatgtttttgccgaaaaattgcgcattgagtcattaactaaacggcgtttatttggcgatcgtagcatacaaattaaatttgtcgataacccgttagctccttttaaattgcaggtgaagtga

SEQ ID NO: 67994 - DNA, 1524 bp, Acinetobacter baumannii
atgctagcactagagcctcaacatattcatatgaatcaacatgctgttgataaaacacatgcattaaagtgtctagtagatatattagaaaaagatgggttagttacgcctgaatatataacgggactcatcaatcgtgaacaacaaagcgcgacttatttaggccaaggcattgccattcctcacggtactcctcaatcacgtgaatatattttaaaaacaggtatccgcttagcccatttccccgaaggcgtgatctgggatggagaaaataaaatttatttagctgtagtgattgcagcaaaatctgatgaacatttgcaagttttgcaaattcttactcgtgcattaatgcatgacgtcagcgaacaagtaaaaaatgcttctaaacctgagcagattatcgaattactacaagctcagccattatctttagcgcttcatgaaaatcttattcaaaccgaaatcgatgcacaagatatcgaagatttattttgggcagcttctcaaacactcaaaaaacataattttgtaaaatgtggttttctaagttcacttgatccagaacaagccattcaactgcaagatcaaatctggtccatttctagcgatcactttgttcagcaaccagctattagcattactaaaccatcacaggcattagagctaaatggtaaaaagctgaacaccctcgtttgtatagcagccaatgaccaactcgataatgaaagatttaatcgtttaattgatattttatttaaccctgagcaagttgccgagctagataaaactcaaacaccaaacgaaattgcaaaaattattggagctgacgttgttcctgactggcctcaacgttcagtagtactggcaaatgcacacggcttacatgcccgaccagctacacaccttgtcaatcttacaaaaacctttcaaggcgacatccaagttgcagtagacgatggtagctttgtttctgccaaaagtttaactcgtcttttagcgttaggttgtaagcgtggccaaactctacgttttatcgctgagccagaaaccgatgccgtagaggctttagatcaagttattttggcagtgcagcaaggcttaggtgaagaagttgaagcgctacctgtaaccagtgaaacacctgaccagctccctgctcaaacggtaatatcaaatgctacgacattgggtaacaatacgggcattgcagcatcaagtggcttagcttttggacctgtccatgtgattaaaccaaaggtttatcaatatgaacgtatgggttcaggcgtaaaagtcgagaaagaaaatttagatattgccctacatgcagtaaaaaacaatattcaccaagtcatagccaaagctgatgcctctgaaattaaacaaatctttcgagctcacctagaaatgcttgatgatcctgatttaattaatggtgtatatcaaaaaatttatcaaaatttatcagcaccagctgcgtggcatcaacagacctacgtgacattggcgacagagttttaa

SEQ ID NO: 67995 - DNA, 2148 bp, Acinetobacter baumannii; identical to SEQ ID NO: 63559

SEQ ID NO: 67996 - DNA, 498 bp, Acinetobacter baumannii
atgacaactttaaatctaatttctactcaagatattgctaagaatccattagttgtaattgatcaaatgattagtttctttaaacctaaacagccctttactgggcttttgaagggtagaactaataatgtgaaaacagccaaaggacaaaagatttctactgtattcgctttagttgatattgatcaagtaattgcatctcatacagcaactggtgcggaaaaccctaattatccgcaagaattgcagccacgagatcgtagtcgtgaatcctcacaagcatgggtacagaaaactgctaatgatttagaccccgaaagcctaggccgctcaggtcgggcagacacgggagcaccgataactggtgatgatttagttgtagaatcaggaaatggtcgaacaatggctatcaagcttgcctatgagcgcggtaccgcagatgagtataaacaatggttgattgatgaagccgattactttggctttagtagtgagtag

SEQ ID NO: 67997 - DNA, 366 bp, Acinetobacter baumannii
ttgttacgcccaaaaggtttttataaagactttgatgaagattgctttcaagcatacattgactatgctttaaaagaagactcggtacgtggtggtgtaacgttaactatttcccgtgaagatgaagttgcgattttccgtaaaaacccttcttggtggtggttacctatgccaaaaccgaaaatgccagtacatttagttgtaggaaaagagagtgccttcttaaaaagaggttttcctcaaatggcaaaacgtaaaatggggattccatttagtgtagttgaaggagggcatatgttccctctagagcatccgattgatacagtgaattatattaaggaacttattcaccgtaattcacgctaa

SEQ ID NO: 67998 - DNA, 345 bp, Acinetobacter baumannii
  misc_feature (297)..(306): n is a, c, g, or t
atgaaatcatattatttagacagtttttatcaaatcaacgtatataatgacatcatttcgattgatttggattggaattttatgtccgattggccaccaaaaccacaaaatgaacctataacccctaaacagaacggaccggaatggcaaatccttgagaaagctgtactggcttctgtagaagaacaacgccgtagtcgtcgctggggtatattctttaaaacacttacttttatttatctattgttcattatcgtcttaatgggcaaaggctgttcgaccactaaagatggctcnnnnnnnnnngctctacagcaagtagtagcagtgctcaccttgcagtag

SEQ ID NO: 67999 - DNA, 810 bp, Acinetobacter baumannii
atgaagaaagcaggttttaatgataattgggctgctggtttaactgcttccgttggtcgagaaaatgattatcgagatgaatacttgtttggtaaacatcaagataaagctggtggaataaatatgggaatgatttcttggcaaggagctcgtaaagaccggcttacggcatatatgaaggaaaggggattacttgatgcaaacggtaatatggtacggagccaagcagctttagatgcacaaggtgcatttatgaagcatgaaatcgaaacgaatccagaatatgcttcagttaaagcttatatgcagaaaaacccaaatgcatcaaaagaagatattgcccgagttctcggcacaaaatatgtaagatgggcgtatgggcaaacaaagcttcgcaatgggaagtcatttgattatagaccgcatttagaaaaggaatataaatacagagctaacattgataaaaccgttcaggaacagaaaactaatctacctaaagaaaataccccagctgtatcagatttgaaatcaagtcatattgtggaaaatacaagagctaaagttgctagtgttttaagcacccaaaaagctatcgttccccaagctactacaaaagcaaaaccttcattaaataatcaaaatagattattaactaatgtcacgccgtttaagcaacctttaaatactcctaacccacaggaagtcgttgttgttaatggtaataatggtaatatcagtcagaatgtaaatgatagattcctagcacatgctttaactggtgggataggaatgggaaacttagaaggttag

SEQ ID NO: 68000 - DNA, 1479 bp, Acinetobacter baumannii
  misc_feature (1443)..(1452): n is a, c, g, or t
ttggttaagttggcagaggttttgccaaaaaaatctggggttttattattaattgatgaacttggaaaatttctagaatatgcagcatattctggagaagatataggattctatcaggaccttgctgaagcagcggcaagatgtaaaggaaatcttgttattatcgggattttgcatcaatcttttgagcaatatgcagctaagttaggaagtaacgttcaacaagagtgggcgaaagtacaaggccgttatattgatattcctttagttacaaatacggatgaaactctggagttaataggcaaggcgattcatgttgagactcaatatgaagaagcacgaaaagttgctgaaaatgtctccaaggttattcacaaaagaagaccaagcgctgtatcgaatctttcagttttattagaagcatgttggccacttcaccctgtaatggctgttatgttaggacctgcatcaaggaaaaaatttggtcagaatgaacgcagtatctttagctttttaacttcggtagagccgctaggattttctgaagtattacaaggaatggatggcgagatatttgactattattggcctcatcaattttgggactatctacggggtaatttcgaacaagcaatactagcttctgtagatggacatagatggtcaatcagtgtggatgctattgaaagagctgaggcgatcttttcaaatgttcatgtaaacttagttaaaacaattgctcttatcgaaatatttagaaatggatcaggactcgttgctgaggatcagttattgaattgctcagtgcctaacgcatctattactgaaattcatgatgccttaaatgatttagcaagagcatcaattttaatttttagaaaacatataggtgcttggggtgtttatgcaggaagtgattttgatattgaagctgcactaaatactgctacttcaaatgtgttggatgttgattataaagaattaaaaaatacccttgcatttacccctataacggctcgtagacattattggaatacaggggctatgaggtggttaaactgttctattatttctgaaagagaagtgaaaaagcatattgactctttccagactcaaggaagtgcttttggtgagttcctacttgtaattcctgatattattgttaaagataaagatgaaataggcaagaatgagcaattagtttcaaaagcttttgctaaaggagtcttaattggtttccctaaaaatggagataatatccaagggttagcgaaggaactcgcaagcttagagtttattagaaataatagcctcaaattgcattctgatagtattgctatgagagaagtgttagcaagaattcaactcgtcaagcaaactttgaatgatgagttaaaatatgcttttaataattgtttatggcagtggggtaagcagacgttnnnnnnnnnngtccaaaatagcatcagacttggctga

SEQ ID NO: 68001 - DNA, 579 bp, Acinetobacter baumannii
ttgcgggtatttgttaagtcactttattggtgtgaggagtttaagaatttacttaacgctattattagcggtgaagtaggtttgacaagtatagatgacgacaacatcctaaacgttttgggaccaattgaacccaaagcagataaagaaattaactcaactcaagcaaaaaaatctgcgaagaaggccaataacaaagaggaaaattggactcgttatcataatgacaaacctgttgagtctccgttagctggccttattgaaaagctaaagaaaactaaaactgcagatgcagctaatagtctcattgaggaaacgaaagactgggcttctgaagatcaaaaatcttttttaactgagttaaataaacacttagtcatcattgctggtcaatcgaaagaaaatatttcaatttctgaacgagtcaaacgagctacagacctgactacgttggatgcgattgaaattgatatttcagaagcagatgaacgtattcaagaacccctaatggagctggttataaaaagaagaaaagaactagaagttgaaaataacttcttattggagtcaccacaatga

SEQ ID NO: 68002 - DNA, 204 bp, Acinetobacter baumannii
atgattgctgcggcaggtttacgtcatccatcggatattaaagctcatcatttagctcaacggattaatgaccgtgaaattaaaaactatgctcaattacacttcttcttaaaagaaggtgagcttttacaatctgaactgaaaaatgatgatgataatttctattatcgtatgtggaatatggctgacgccaatcatttttaa

SEQ ID NO: 68003 - DNA, 207 bp, Acinetobacter baumannii
atgattaaaattttgagccaacatgaacccaacgagattgttttccagtttgcagatgatgatctggaaaatatttacagtattatgattcgccagcagaaaacagaagaagaccctgtattcttaaaaaaattaaaagaaattacgaccttgcgtcttgaggtggaatacaaaattgttcctcttccacccgaggagatgagctaa

SEQ ID NO: 68004 - DNA, 339 bp, Acinetobacter baumannii
  misc_feature (324)..(333): n is a, c, g, or t
atgagtaccgaatacactgcaccttctgaaagggcaggatcaaaagtttatcgctttttcgtaatacttctacatgtgttaatcgcattattcttaattatccaaggtggaaaacttgttagcttaggtggctcaagttattaccttatcgctggtattgcctatctactgattgctattttatatacattcagaaaagtagccagcttatggttatccattttaactttcatcgcaacagttatatgggctgtttccgaagttcaagtctttgacttctggcaatatattccccgtctagttgttccaacggttttatttgtnnnnnnnnnnagttaa

SEQ ID NO: 68005 - DNA, 333 bp, Acinetobacter baumannii
gtgaattattctaacgattactggggccactctgacgagttctggtattttaacgtgggttattcggcaccaattgcagacaccggatttactggacttgcttcagttggttataacaagcttaaaaataaagattctttacttgtagttgcaggtggacctggtgaagatgatagctatattgattataaagtcggcgtaaactataacatcttgggtattgttgctgagctagatgttgtcggtacagatattagtacttctggcatgactgatgctcagaaaaaaccttatgacacaggtttagtgtttagtttaactaaaacattctaa

SEQ ID NO: 68006 - DNA, 765 bp, Acinetobacter baumannii
atggctaatgtagcgttgttgcaaggcaaaaaagttttagtgactggtgctgcacgtggtttagggcgggatttcgctcaagctattgccgaggctggtgctgaagttgtgatggcagatattttgtctgacttggtgcaacaagaagcgcaagcgttacagcaacaagggctaaacgttcatgcagtaacagttgaccttgccaatgcagactctattgaaaatgctgtcgcaaaaagcgtggaagtattacaaggactagacggacttgtgaactgtgcagcgcttgcaaccaatgtcggtggaaaaaatatgattgattacgatcctgaactttgggatcgggtcatgaatattaatgtgaaaggtacatggttaattacaaaagcgtgtattccacatttaaaacaatcggctgccggcaagattattaatgttgcttccgatacagcactttggggcgcgccaaacctgatggcttatgtggcgagtaaaggtgcaattgttgccatgacacgttcaatggcaagagagttggggcagttcaatatctgtgtcaataccttgtctccggggctgactctggttgaagcaaccgagtatgtgccacaggaacgtcatgatttatatgtcaacggaagagcgattcaacgccagcaacttccacaagatttaaatggaacagcattgtatctactgtcggatttgtcctcttttgtgacaggtcaaaatattccggtcaatggcggttttgtctttaactaa

SEQ ID NO: 68007 - DNA, 843 bp, Acinetobacter baumannii
ttgggtgatcgagttgcttgctggtatcacggtgttgaagttcgtgctgatggtgtggttgctgatgtgccagccgttcatgaatgcccaatgactggaaccaagtgtttaaagagctatccggtcattgaacagcatggtgcaatcttcatctggtttggtatcgatgcaaatgaacaacctgcaccgcttgagttcccagaacaactggcaagcgaagagtggagttcattcctttgccaagcagactggaaagtaaaccatcaatatgccattgataacgtcatggacccaatgcacggtacatatttgcactgtacttcacattcaatggcagaaggtgaacgtaccgcagagatgaaacaccgcacaactgaaaatggttttgtttttgaaaaagaaggccaaacaggtgtgaactttgactgggttgaatatggttcgaccggtgcaagttggttacgtctttcaattccttaccgtaaacagtttggtccgggtggtgaattctggattgtgggttacgcaacgccaattgatgctaacaatacccgtgtatttttctggcgctgccgtaaggtgagtggttggcaacgtaatgtatggcgcttcttatatcgcaatcatttagaacagttgcattgggatgtattggaacaagaccgaattattttagaaaaccttgcgccaaatgcgcgtgcacgagaattcttatatcaacacgatgtagggcttgcacgtttacgccgtttaatgaaaaaagaagctgaaaagcaattaaagaaaattgctgcgctaaatgcatcaaaccgtatcgagatgcaggaagaagctcatggctaa

SEQ ID NO: 68008 - DNA, 444 bp, Acinetobacter baumannii
  misc_feature (426)..(435): n is a, c, g, or t
atgtttgcccgatttaccactgtagctggtgaacgtggagcagcagatgctgaacgtgatattcgcggctttgctttaaaattttatacagaagaaggtaactgggacatggtggggaacaatacaccagtgttcttcttacgtgatccacgtaaatttccagatttaaataaagcagtaaaacgcgatcctaaaactaacttgcgtagcgcaacgaataactgggatttctggactttattacctgaagctttacatcaggtcactattgtcatgtctgatcgaggtattcctgcttcctaccgtcatatgcacggttttagtagccatacctatagtttcatcaatagtgcgaatgaacgtttctgggtgaaatttcatttccggacccaacagggaattaaaaatttaacagatgccgaagcnnnnnnnnnnagctggtga

SEQ ID NO: 68009 - DNA, 837 bp, Acinetobacter baumannii
  misc_feature (11)..(20): n is a, c, g, or t
atgccgaagcnnnnnnnnnnagctggtgaattagtggggcatgatcgtgaaagtcatcaacgtgatttattcgatgcgattgaacgaaaagatttccctaagtggactttgtatgtacaggtaatgcctgagcaagatgctgaaaaggttccatatcatccatttgatttaacaaaagtctggcctcatggagattatccattaatcgaagtgggtgagttcgagctgaatcgaaaccctgaaaatttcttcttagatgttgaacaatccgcttttgcaccaagtaatctggttcctggcattagcgcttccccagaccgcatgctgcaagcccgtttatttaactatgcagatgctcagcgttatcgtttaggtgtgaattatcagcaaatacctgtaaatgcggcacgttgcccagttcatagtaatcaccgtgacggtcaaggacgcatcgatgccaattatggtggtcttccacattatgagccaaatagttttggacaatggcaagagcagcctcagtacaaagaaccaccgttaaaaattaatggggatgctgatttctggaattatcgtgaagatgacaacgattatttcagtcaacctcgtgctttgtttgaacttatgactcctgagcaacaacaggctttatttgataatactgcacgcgcaatgggtgatgctcttgatttcattaaatatcgccacattcgtaactgttacgcatgtcatccagcttatggcgaaggtgtggctaaggcgcttggtttgacagttgaaaatgctcaagcagctagagaaactgaccctgcacgtggtttaccaagttttatttaa

SEQ ID NO: 68010 - DNA, 330 bp, Acinetobacter baumannii
atgcaagagaagcctttaataccagcaatcccaacaccatttcctgatgaaaccgctggaagttttctcatccgtctcatcaagctgaatgggcatatccatagctcaactttttatcgatctagaatagatctcaaatacaaagagacactgagctcaataaccacacatgattatctcttccttaacatactcaagaaatttcagcttcctgattatttaaaagagttatcgctcaaaaggcattgttctaccttacgtgggaatgtaatctggaaaaataaactagtaatatcaaattattttttttcaaacgatgtcgaacgttaa

SEQ ID NO: 68011 - DNA, 534 bp, Acinetobacter baumannii; identical to SEQ ID NO: 51562

SEQ ID NO: 68012 - DNA, 525 bp, Acinetobacter baumannii
atgacaacccttgaacaatcattatctgaaatcactgcattttcgatcattcatgaacatttatttagttcagcgcaaccttctatcgaacaacttaagctcattaaagagtatggttgtagcactgttataaatttagctttatcgaattcaccagatagtattaaaaatgaagatcaggtctgtcttgaatatggtttaaattatattcatattccaattgactgggaaacaccctcttctgaccaatgcttattagttttagatttgattgatcatttagtgcagaatgaaattgtttggatacattgtgccaaaaataaacgcgtaagttgtcttatgtatgtctacagacaattttatatgaatatggatatgccaacctgtcaggatttgcttcatgagatttgggagccaaatgaaacatggacaggactcattcatagtattaccttacagcttcaaggccgtaaggctaccttagaacttcaacagtctttgcaacaaaccaatgatttagtttaa

SEQ ID NO: 68013 - DNA, 303 bp, Acinetobacter baumannii
  misc_feature (276)..(285): n is a, c, g, or t
gtgccggattatgatttaagccatttaaacagtttggttcgtgaacggcagattttcgaatattggtatcatgcggcctcttatcttcctatgaaagattatcgatatgcattaccggcaatgatgtctgtcagaaaaggggaaagtcgctattttaatagaggcgatcaacaccttatgaatgaaattctggtacgtgtacgtgccgaaggtaaaattcggttaagggatattgataagaaaaataaagagagtttagggaattggtggaatacnnnnnnnnnngttatatatgcaaggtga

SEQ ID NO: 68014 - DNA, 744 bp, Acinetobacter baumannii
atgaataaacatttattagcaaaaatcactcttttaggtgctgcacaactatttacgtttcatacggcatttgcagatatacctctgacacctgctcagttcgcaaaagcgaaaacagaaaattttgataaaaaagtgattctgtccaatttaaataaaccacatgctttgttatgggggccagataatcaaatttggttaaccgaacgtgcaactggcaaaattttaagagtaaatcctgaatctggtagcgcgaaaacagtatttcaggttcctgaaattgtgagtgatgctgatgggcaaaatggtttgttaggctttgcttttcatcctgactttaaacataacccttatatctatatttcaggcacttttaaaaatccaaaatctacagataaagagttacctaatcagacgattattcgtagatatacctataacaaaactacagatacatttgaaaagcctattgatttgattgcaggtttaccgtcatcaaaagaccatcagtctggtcgtcttgtcattggtccagaccaaaaaatctactatacgattggtgaccaaggccgtaatcagttagcttatctgttcttaccaaatcaggcacagcatactccgactcagcaagagctcaatagtaaagactaccatacatatatgggtaaagtattacgcttaaatctggacggaagtattcctaaagacaacccaagctttaaccgcttaggaactaaaccatga

SEQ ID NO: 68015 - DNA, 186 bp, Acinetobacter baumannii; identical to SEQ ID NO: 46739

SEQ ID NO: 68016 - DNA, 333 bp, Acinetobacter baumannii
gtgcgtgttaaagattcggcagatcctgaaagacctgatggagtgggttctgttcgtcgtatggggtttggcgtgattaaaccacttaaagaagaaatcacgcatctcgaagaaaacaaacgtattgaatataaactgattgataatcctctagtgaaacaccatttaggtcgaatcgagttctcagaaattactccttatattactttggttacgtatcgtatcgaattaaccgcaaaagctcctgttgtaagtaaattaattcttgcacagctaaaactagcgattacactaggcttttcgagattagctaaagcatttgcttcttcgtga

SEQ ID NO: 68017 - DNA, 462 bp, Acinetobacter baumannii
ttggcgctacaacgattccatgatgaattcggtttaagccatcaagaaattgctgatacagtcggtaaagcaagaacaacggtaagtaatttattacgtctgttgagcttggctgatgatattaaggagtttatgcagcaaggccagcttgatatggggcatgctcgtgccatcttaactttaaagggcaaagaacaacttgaagttgcaaaaattgtaattgaaaaaggattatctgttcgtcagactgagcagttagtacgcgattggagcgagcctaaacaggaaaaggaaaaagctcctgttgcaccagacattgagcaactaactcagaaattatcagaacgttttggtgccaatgttaaaattgatcataaccagaaaggtaaaggtaagcttgttattcactatcattcactcgatgagttagatggtattttgaatatttgtttaccagattaa

SEQ ID NO: 68018 - DNA, 333 bp, Acinetobacter baumannii
gtgcagatttataccaaactcttacttaaaacggaagtactgagtaaacatagcctagtcggctgtgaaagctgtggtcagtgccgtttaggtgacactttatatatttgccctgaaacatgtccaaaaggcttagccaatggtccttgtggtggaacaactttagaccgctgtgaatttggtgatcgtgaatgtattcattctgtcaaagcaagactagccaaagcggttaaacaaactgaaatattaaaagagaaactgattccaacggtgcctcttgaaacgagaggaaccagttcttggaaaaactggtatttagcgactgaggcttaa

SEQ ID NO: 68019 - DNA, 843 bp, Acinetobacter baumannii
atgtcagtcggctcactaaactggactatattctgtgcggagtctaatgaatatggtgtcgataaagccgcatgggcagaatcagtttgtaaggttattggtagttctagctacaatgcctatgctgaggcgcccacatggttacaaatgttaggttctggtgtctttactatggtttggactgccattgtagcctttcttatcgcatttttattaggttctctccttggggtaattcgtactttacccaataaaccacttgcttttatcggcaactgctatgtcgaaatattccgtaatattccattaattgtacagttattcttctgggcttttgtttttccggagttcttaccggacagtttaagtgcaggaagtggagatgttgtagcagggggatggtggaaaaacattttaaatcaacaacccgctgttatcggtgtttttgctttaggcctttatactgcggcgcgtgtttcggagcatgttagagccggaattaacacggtttctcgtggtcaaaagtttgcggcatcggctatgggatttaccaccgctcaaagttatcgttatgtgattttgccagttgcgtaccgtacggtatggccaacgattacgtcagaagcaatgaacgtctttaaaaactcggcagttttatatgccttaagtgttttaaatttctttgcttataccaaaaccatgcgtgaagagacttcacaggacattatcattcttattctgtctacacctgtctatttaatcattacatacaccattaaatttataatggcatggattgaaaaacgcatggctgtaccaggtttaggttcgggaggaaaataa

SEQ ID NO: 68020 - DNA, 837 bp, Acinetobacter baumannii
atgtcatatagaaactatacaacacgaatgtcttgttttgcactgattgccgccattgagtcagattttaggctaatcatatattttgaaacaagtgacaaaaaaattgaaagtgtattaccagaagatgtactctcaaatgctaagcatagatttaggtcagataaaccttcagaaaatcatgaggaggtaagcttatctgatttactagaatatgtagacttttacgatttaagtaaaattttaaataaagtaaaaaatgagcagaaattctttacgatagagcaactcactgttgtaacaagaaatttagaaaatttgacagctgctaggaatagagtttgccactcgcgaccattagaagctgatgattttacatctctttttgatttttcttgcgaattagaatcaataaataaaagtgataataattggcgcaatctaaaatatgctaaacaaaaccttaataatgcagattttattttaacaaatactattcctgatttttggaaaaatgagaaaaatcatattttacaaaatttacctttaactgaatttgatgatacatctttccttggaagaaaggatgatagaaaaaaaattacagatttaattctttctaatactagagtcattacaattataggtgagggagggatagggaaaacggctattgcacaacgttgtttatacgacatattggaaatctgtgaaaatcaaaaagaagaacaacgctcatttgatatgatcttgtgggtttcactaaaaacaaatcgtttaacgcaggctggggctattagtattaaggatgctattactaatagtagggcagagtaa

SEQ ID NO: 68021 - DNA, 1365 bp, Acinetobacter baumannii
atgacggctataagttcatcatttaaaaaagaacaattagattatgctcttaagcttggtaaggttttagtaattttagatggttttgatgaagtaaatagtgaagatagagaaaatatagagaaggaaatattgtatttgtcgaataactatcacggtgtaaaaatattattatccagtcgttttgatagtagattttcttcatgggaggagttttatcaatatggtattcttgaattagataaaaataaggccttaactctagtgcataaattagattatgatagacaggttaagaattcatttttaagggagttggataagaaattatatgaatcccactctagttttgcttcaaatccattgttattaacaatgatgcttctaacctatgagcaaattgcagaaataccaaataaaatacatttattttatgagcaggcttttttaactttatttaataagcatgattcattaaaaagtatgtataaaagaaaatcattttctcaacttcctttagatgactttaaacgttgtttagaagcattttgtatattaagttatagcggtcgctcatattcatttagtgaaaatgaaataaataaatatcttgataattctataaatatttctagggttactacaaattctaaattttttttaaatgatttgctagattctgtatgtatattgcaaagagatggtttaggttttaattttactcataggtcttttcaggagtatttttctgcacaatttttagtaaatataatcagtgctaataaatatgatttgtttgaaaaagtatttaatattagttcacaagataatgttattagtatggtttatgatataaatccatctttattggagaaagaatggattattaagaaaatcaataaaattaacatggatatttctagtctttatagttatgaaaattatgagttattgatttttcaaaaagtatactcatctatttctgtatattataattatgatattgataaggaaatgattatctttgatgctggtggggttgaaaaatataactacttttttagttttatacgtgatctctataatgaaagttatctagagtattctttgaataaaaaagttactactaataaagatgcagagtattttgaaaaagaacttattgattatattagatgtaatggtgatatagacttggagaatttaaatagaattgatccttatgcatatcaattaataaagaagtctcagttattcgaaggtgttgttgaacaaattgattttttaaaatatcagtctggtcttttgaaaaataatcattctaaacaagatgtagatattatgtctttaattctaggtaaataa

SEQ ID NO: 68022 - DNA, 504 bp, Acinetobacter baumannii
atgtgtataagagacagagcttggatagctgaagcaaaaaaacatattggtctgcaagaaataccaggtaaacagcacaatccaactattttgaaatggttaaaagagcttaaagcttggtgggcggatgatgaaactgcgtggtgtggaacttttgttgctcattgcttgaaagcagcaggaattgcttatcctaagcattggtaccgtgcattggattacgtgaattacggcgcaaaactaacaaaacctgcttatggttgtgttgctattaaaacccgtaaaggtggaggccatgtttgttttgtcgtaggacgtgataagaccactggaaaacttgtttgtcttggtggtaatcaatcaaataaagtgtgttacgcactctatagtgattcagatttccaagagttccgttggtatggacgtactcctcaaccagcaagtaagcgttatacattgccacaattaaaaggcgtaacagctactagggttttggaagcctaa

SEQ ID NO: 68023 - DNA, 414 bp, Acinetobacter baumannii
atggcaaaatacaatcttttttctggcgtagataaaaataagaatattcatgctgccgagttaaaacgttatgcttcagaactcatgactgaacgaactaaacaagagattgaagcattattgaataagtcttataacgagctcaattcagcacagcaaagtcatacgctattacaaaggaatatcagcgcagctcaagaaaacctacgtattcaggaactttctttccgagaaggcatgggtacagcgactcaagtgatcgatgcacaaaatgcattaagtgctttaaaaacagaaatggctttaaatgcttataaatatgtcatgtcgctcgcaactctgttgcaaagccatggttctatggaccagtttaaagcttatgtgactcaaccacacactgactatattcgctaa

SEQ ID NO: 68024 - DNA, 483 bp, Acinetobacter baumannii
atgagttatctatttttgtcgtgtacagagaacatggtgaatggttcaaatccttcttcaacaataggaaaacataacaaagaattctttctaaaaaattatgaaagtacggttcaaatatataataaatcacaggacgttttagtagaatatttgaacggttcacgaactttgacaccacagaatagggaggctattcaaaaagggtataccatacttttgcagttagcagatttaaaaaaggatgatattactttttctattaatcctgatattaagtattcgtatgagtatgctttaggaatcaccaaaaagaatgataattttagtggcttttggaacttttattataaagccgtagtttattggtttttatttattttaatcccttttggcatacttaacggtttatctgaattaaggcaatatgaactgagaaataaaattagaaaaatgattgagccatattataagcataattaa

SEQ ID NO: 68025 - DNA, 939 bp, Acinetobacter baumannii
atgagtaagaaattatcagaattagtatcagtacaccgtaatttcttacgctcaattcgtttagatactgatctaggtcgagcagatgcaataagtggttacattttacagtctcctgcaaaacagttacttgatattacaggtagttatttactggagtcacaacagaaagcatttacttggacaggaccatatggtggtggaaagtcatctcttgctttaactttagcttcttgtgttaatgaaaagaaagatattagagatttgtcacgctctatattgggtgatgaaataaatgttggtattaagcaatatttctacacagatgaaccttggattgtattgccgatagtagggaaaaagacttcgattgaatcgcaaattcaggcgacgttaaactccatagatgaacaatataaatcactaattaatcaagaagattctgtcataaatcaattggttaagttggcagaggttttgccaaaaaaatctggggttttattattaattgatgaacttggaaaatttctagaatatgcagcatattctggagaagatataggattctatcaggaccttgctgaagcagcggcaagatgtaaaggaaatcttgttattatcgggattttgcatcaatcttttgagcaatatgcagctaagttaggaagtaacgttcaacaagagtgggcgaaagtacaaggccgttatattgatattcctttagttacaaatacggatgaaactctggagttaataggcaaggcgattcatgttgagactcaatatgaagaagcacgaaaagttgctgaaaatgtctccaaggttattcacaaaagaagaccaagcgctgtatcgaatctttcagttttattagaagcatgttggccacttcaccctgtaatggctgttatgttaggcactgagcaattcaataactga

SEQ ID NO: 68026 - DNA, 306 bp, Acinetobacter baumannii
atgctcggtgatttggaccaaactttgaccgtttcaatttctggacttggtgacattttgccggatgagtttgaacgggtaatagaaggtcaatttccggatgtaaaaccaacagttaattatcggctttatagttcagataatttaaatacaccgatgcattatctgcttggcttacaactcgccggtgtttcaatgaaccataaagctgtgacgttcaaagctgaatctccacgattaaataccgctaaaactggagatatctttgcactagaccgctttactggtctcaagggggctatatga

SEQ ID NO: 68027 - DNA, 306 bp, Acinetobacter baumannii; identical to SEQ ID NO: 49467

SEQ ID NO: 68028 - DNA, 534 bp, Acinetobacter baumannii
ttgcttaatggaaaacaaactatctcaccagaacaagctggcattctttataacattgttcatacaagagcaaaaggtaataaaaatttgattgtgcaaatgtggagtcgcttaaagaatcactttaaatactcagcaagttaccgagaattgagagcgattcactttgaggatgctaagcattatttagaagttatggatttaaaggcaaaaccagaggaaaagaaacctcaagatcctttatttgataaagacgcctatgagatggttcgcaaacttactgaagcagtcatcatagaaaatgatgaaatcgttccagttctgcttgctgtaaaaatgcttgatatgaagaagttcgcgtattactcacacttagtagtgaaagcgaatgaagcagcacgagatattgctagattgttggatttcaggaacctacaaaatgagccgttgatcgatgcagactgttcggtgatagccatgtctaatggacaaagatttctagcacgaccgaactggtttaactgcccagcttag

SEQ ID NO: 68029 - DNA, 1779 bp, Acinetobacter baumannii; identical to SEQ ID NO: 56457

SEQ ID NO: 68030 - DNA, 765 bp, Acinetobacter baumannii; identical to SEQ ID NO: 66176

SEQ ID NO: 68031 - DNA, 2058 bp, Acinetobacter baumannii; identical to SEQ ID NO: 66177

SEQ ID NO: 68032 - DNA, 447 bp, Acinetobacter baumannii; identical to SEQ ID NO: 66178

SEQ ID NO: 68033 - DNA, 384 bp, Acinetobacter baumannii; identical to SEQ ID NO: 66179

SEQ ID NO: 68034 - DNA, 483 bp, Acinetobacter baumannii; identical to SEQ ID NO: 66180

SEQ ID NO: 68035 - DNA, 711 bp, Acinetobacter baumannii; identical to SEQ ID NO: 45684

SEQ ID NO: 68036 - DNA, 897 bp, Acinetobacter baumannii; identical to SEQ ID NO: 45683

SEQ ID NO: 68037 - DNA, 1782 bp, Acinetobacter baumannii; identical to SEQ ID NO: 66183

SEQ ID NO: 68038 - DNA, 1803 bp, Acinetobacter baumannii; identical to SEQ ID NO: 43464

SEQ ID NO: 68039 - DNA, 381 bp, Acinetobacter baumannii; identical to SEQ ID NO: 63187

SEQ ID NO: 68040 - DNA, 1557 bp, Acinetobacter baumannii
atgcaaaagaactttgccaaatatgtagccgatgttgaaatgcaaaagctagatcggctcattactaatctgggaaatgtatataccgtttatcatgattgggggaatgcgattcaggcgcaaatcttacaaattgaaggaacggcagcaccagatgattatgaccgtctttcccagtggtggttacggcgccaatatgatattgccattcagcagcattctttcgatgaacacactctcattaatatttctccagatgcgggaacggtaaataaaaactctatttttagtgatgaagaactacgtacacttgagcaaaacttaccttcggaatatcaaccatttgaaggtttaagattcccgctaagtgcaaaccagtttcgtccaagcgatgataaaaacaaatcaaaaaaaggaagcctcaaagacattgagacgcaaaatggtaagaagcgttttattgctttaccagaccggctgggcttaagttctcgtttatctttatatgatgccaaacaccagttcgtagtgggtgaaccgccgtcttcggatcagatgtcttatcgcccgattatggtcaatagtcaggtcgtaggttatttaggtctaaaaccagttttagataaagaagatgcattaagtattaatttcttcagtaatcaaaagcgctatttacttttaatttatgccttaacattactgtcgagtttagttgcagcacttttaatggcaacttattttaaaaagccaattcagcgtctattaaatgcaacaaatgagttaacaaaaggtaattatcaacaccaagttgtgattaaacgaaatgatgagttaggtgatttatctactcaattaaatcatttagctgaaattttacatcagcatgaagaatcacgacgtcaatgggttgcagatacctctcatgaattgaaaactccattggctgttttgcaagcgcagattgaagcgatgcaagacggtatccgaaaggcaacacctgaacatcttgatgccatgatgcgacaagtttcgagtttaaagaaattgacacaagatttggcagacttggctcaggctgatgctcaacaacttaaatgttatttgagttcggttaatccttgggaagttatactgcaagaagtcgaaaatttcagacctaaactcgaacaagcagggttagaaattgaggtggaaggtgaaggtgctactttattgttagaccgcgatcgatttaaacaaattattgttaatttgattggtaatagtattcgctataccgaaacaggtggaaagattcatattcatacaagtcaaacgcctcaggagtggactttatatgttgatgacagtccatttggtttaagtgatgagcaattatcacgtttaggtgaacgtttttatcgtgtcgatgattcgcgtacgcgtagtacaggtggaacaggactaggcttagctttatcttgtaaaattgcgcaggcgcttggtggtacactcagttttgaacactcaccattaggtggtttacgttgtgtactgacctttaaaaagcagagttaa

SEQ ID NO: 68041 - DNA, 687 bp, Acinetobacter baumannii; identical to SEQ ID NO: 66187

SEQ ID NO: 68042 - DNA, 1443 bp, Acinetobacter baumannii; identical to SEQ ID NO: 66188

SEQ ID NO: 68043 - DNA, 1173 bp, Acinetobacter baumannii; identical to SEQ ID NO: 66189

SEQ ID NO: 68044 - DNA, 531 bp, Acinetobacter baumannii; identical to SEQ ID NO: 66190

SEQ ID NO: 68045 - DNA, 714 bp, Acinetobacter baumannii; identical to SEQ ID NO: 66191

SEQ ID NO: 68046 - DNA, 579 bp, Acinetobacter baumannii; identical to SEQ ID NO: 66192

SEQ ID NO: 68047 - DNA, 1872 bp, Acinetobacter baumannii; identical to SEQ ID NO: 45682

SEQ ID NO: 68048 - DNA, 660 bp, Acinetobacter baumannii; identical to SEQ ID NO: 66194

SEQ ID NO: 68049 - DNA, 1230 bp, Acinetobacter baumannii; identical to SEQ ID NO: 66195

SEQ ID NO: 68050 - DNA, 513 bp, Acinetobacter baumannii; identical to SEQ ID NO: 66196

SEQ ID NO: 68051 - DNA, 996 bp, Acinetobacter baumannii; identical to SEQ ID NO: 66197

SEQ ID NO: 68052 - DNA, 876 bp, Acinetobacter baumannii; identical to SEQ ID NO: 66198

SEQ ID NO: 68053 - DNA, 1050 bp, Acinetobacter baumannii
atgcaagaatttactatctcaaatggttacttctacctttggaatacgtatttaaaagaaaagggaatagattggcagacacttaatttaagtgaaattcaaacacgtcaagtccaaaatattttatctgcttctatagatgctcaatcttctttagacctttttattgaacttttagagataactgaaacgcgattacatgtgactaatttggctttagagatggcagcctgtattacccctgccaactttggggtcttgggttatatggcgtccagaagtgataccttaggtcaagtggtggagtatattgcaaagtttcatcgtttggtcattgatggtgcacaggttgtccctatacaaattgaacaggatgcctccaaaattcgcctatattggcctttggtcgacgacagtaatattctactaagtgagctgaccttggccgcaatggtacagcttgctaaacagatcgcccctttacatgagtttcttttacagcatgtagagttcgtacaccgagcgcgtggagcagtggttcactatcaacgtttctttcagtgcaaattatcatttgagcggccttactatgcattaacttttgcaagtgaaagtttaaatgttcgccctcaacatgcagacccaactttggtgcaacttttggtgaaacaagctgaagaagctttagttcagcggaaaatacatgccgatttagttcagcaaatacattggatcgtacaggaatactttaagcataagcagcaagcgcccaaaatagaagatattgccatcgagctgaatgtttctgttagaagcttgcagcgccaattacaggcattaaacacttcatttaaattaattttagatgctgagcgtatgaaacgctgcgagatattgttaagacaaaatgaaagtctgactgcaattgccgaccagttaggttattcggatcagtctgcactagcaagagcatataaaaatttaacagggcaaacattattaactcgaaaaaagcaattacagctcatccagaaaaatgcaacgaaatag

SEQ ID NO: 68054 - DNA, 804 bp, Acinetobacter baumannii; identical to SEQ ID NO: 66199

SEQ ID NO: 68055 - DNA, 897 bp, Acinetobacter baumannii; identical to SEQ ID NO: 66200

SEQ ID NO: 68056 - DNA, 1287 bp, Acinetobacter baumannii; identical to SEQ ID NO: 66201

SEQ ID NO: 68057 - DNA, 1071 bp, Acinetobacter baumannii; identical to SEQ ID NO: 66202

SEQ ID NO: 68058 - DNA, 579 bp, Acinetobacter baumannii; identical to SEQ ID NO: 66203

SEQ ID NO: 68059 - DNA, 903 bp, Acinetobacter baumannii; identical to SEQ ID NO: 66204

SEQ ID NO: 68060 - DNA, 642 bp, Acinetobacter baumannii; identical to SEQ ID NO: 66205

SEQ ID NO: 68061 - DNA, 2724 bp, Acinetobacter baumannii; identical to SEQ ID NO: 66206

SEQ ID NO: 68062 - DNA, 444 bp, Acinetobacter baumannii; identical to SEQ ID NO: 66207

SEQ ID NO: 68063 - DNA, 1311 bp, Acinetobacter baumannii; identical to SEQ ID NO: 66208

SEQ ID NO: 68064 - DNA, 630 bp, Acinetobacter baumannii; identical to SEQ ID NO: 66209

SEQ ID NO: 68065 - DNA, 276 bp, Acinetobacter baumannii; identical to SEQ ID NO: 45681

SEQ ID NO: 68066 - DNA, 420 bp, Acinetobacter baumannii; identical to SEQ ID NO: 66212

SEQ ID NO: 68067 - DNA, 861 bp, Acinetobacter baumannii; identical to SEQ ID NO: 66213

SEQ ID NO: 68068 - DNA, 255 bp, Acinetobacter baumannii; identical to SEQ ID NO: 66214

SEQ ID NO: 68069 - DNA, 1206 bp, Acinetobacter baumannii; identical to SEQ ID NO: 66216

SEQ ID NO: 68070 - DNA, 1011 bp, Acinetobacter baumannii; identical to SEQ ID NO: 66217

SEQ ID NO: 68071 - DNA, 1119 bp, Acinetobacter baumannii; identical to SEQ ID NO: 62999

SEQ ID NO: 68072 - DNA, 1254 bp, Acinetobacter baumannii; identical to SEQ ID NO: 66219

SEQ ID NO: 68073 - DNA, 2406 bp, Acinetobacter baumannii
atgaatcaaccttcttcaagatcaggtttaacgacttttaccgtaattattattgggttattggcgttattcctgctaattggaggtatttggctcgctacactaggcggttcaatttactatattgtagctggagtcttacttctcattgttgcatggcaactctacaagcgcgcttctgctgctttgtgggtttatgccgcattaatgctaggtactattatctggagtgtctgggaagttggaacagacttttgggcgcttgcaccacgtttagatattttaggtattcttggtttatggttattggttccggctgtaactcgtggaatcaacaaccttggatcaagtaaagttgccttatcttcaactttagcaattgcaatcgtgttgatggtttattctatcttcaatgatccgcaagaaattaatggtgaaatcaagacacctcaaccagaaactgctcaagccgttccgggtgttgcagagagcgactggcctgcttatggtcgtactcaagctggtgaacgttattctccattgaaacagattaatgaccagaacgtaaaagatctgaaagttgcctggacattccgtactggtgatttcaaaacagataatgactctggcgaaacaaccaatcaggttacaccaattaaaattggtaataacatgtttatctgtacggctcaccagcagttaattgcgattgacccagctacaggtaaagaaaaatggcgttttgatccgaagcttaaaacggataaatcgttccagcatttaacttgtcgtggtgtaatgtattacgatgcaaacaacacaactgaatttgcgacaagcttacaaactaaaaagtcgacttcaactcaatgtccacgtaaagtctttgttccagtcaatgacggacgtttagttgctgtaaatgctgacacaggtaaagcatgtactgactttggtcaaaatggtgaagtgaatttacaagaattcatgccatatgcttatccaggtggttataacccaacatctccaggtgttgttactggttcaacagtggttattgccggttcggttaccgacaactattcaaataaagagccatcaggtgttatccgtggatatgacgtaaacactggtaagcttctttgggtatttgatactggtgcagcagatccaaatgcaatgccaggtgaaggtacaacctttgttcataactcaccaaatgcttgggcacctttagcatacgatgccaaacttgatatcgtttatgttccaacaggtgtaggtactccagatatctggggtggtgaccgtaccgagttgaaagaacgttatgcgaactctatgttagcgattaacgcttcaacaggtaaattgatttggaacttccagacaacccatcacgatttatgggatatggacgtaccgtcacaaccatctttggcagatattaaagacaaatctggtaaaactgttccagcaatttatgtcttgaccaaaacaggtaatgcctttgttcttgatcgtcgtaatggtcagccaattgttcctgtaactgagaaaccagttccacaaacagttaaacgcggaccacagactaaaggtgagcattattcaaaaactcagccattctctgatttgaatttggcaccacaagataaattaactgataaagatatgtggggtgccactatgcttgatcagcttatgtgtcgtgtgtcattcaaacgcctcaattacgatggcatttatacgccgccatctgaaaacggtactttagttttccctggtaacttaggtgtgtttgaatggggcggtatgtcagttaaccctgaccgtcaagttgctgtaatgaacccgattggtctgccattcgtgagtcgtttaattcctgctgatccaaaccgtgcgcaaactgcaaaaggtgcgggaactgagcagggtgtacagccaatgtatggcgtgccttatggtgttgaaatcagtgcattcttatctccacttggtttaccttgtaaacaacctgcttggggatatgttgctggcgtagatttgaaaactcatgaagtcgtttggaaaaaacgtattggtacaattcgtgacagtttaccgaacttgttccagttaccagctgtaaaaattggtgttcctggtttaggtggttctatttctaccgcaggtaatgtcatgtttgttggtgcaactcaagataactacatccgtgcgtttaacgtaacgaatggtgagaaactttgggaagcgcgtttaccagcaggtggacaagcaacaccaatgacttatgaaattaatggtaaacaatatgttgtaattatggccggtggtcatggttcatttggtacaaaaatgggcgactatttagtggcttatgcattaccagataacaaataa

SEQ ID NO: 68074 - DNA, 1644 bp, Acinetobacter baumannii; identical to SEQ ID NO: 66221

SEQ ID NO: 68075 - DNA, 486 bp, Acinetobacter baumannii; identical to SEQ ID NO: 66222

SEQ ID NO: 68076 - DNA, 354 bp, Acinetobacter baumannii; identical to SEQ ID NO: 66223

SEQ ID NO: 68077 - DNA, 444 bp, Acinetobacter baumannii; identical to SEQ ID NO: 66224

SEQ ID NO: 68078 - DNA, 1176 bp, Acinetobacter baumannii; identical to SEQ ID NO: 66225

SEQ ID NO: 68079 - DNA, 516 bp, Acinetobacter baumannii; identical to SEQ ID NO: 66226

SEQ ID NO: 68080 - DNA, 1071 bp, Acinetobacter baumannii; identical to SEQ ID NO: 66227

SEQ ID NO: 68081 - DNA, 159 bp, Acinetobacter baumannii; identical to SEQ ID NO: 42394

SEQ ID NO: 68082 - DNA, 1206 bp, Acinetobacter baumannii; identical to SEQ ID NO: 66229

SEQ ID NO: 68083 - DNA, 1461 bp, Acinetobacter baumannii; identical to SEQ ID NO: 66230

SEQ ID NO: 68084 - DNA, 1014 bp, Acinetobacter baumannii; identical to SEQ ID NO: 66231

SEQ ID NO: 68085 - DNA, 1359 bp, Acinetobacter baumannii; identical to SEQ ID NO: 66232

SEQ ID NO: 68086 - DNA, 1836 bp, Acinetobacter baumannii; identical to SEQ ID NO: 66233

SEQ ID NO: 68087 - DNA, 432 bp, Acinetobacter baumannii; identical to SEQ ID NO: 66234

SEQ ID NO: 68088 - DNA, 462 bp, Acinetobacter baumannii; identical to SEQ ID NO: 66235

SEQ ID NO: 68089 - DNA, 291 bp, Acinetobacter baumannii; identical to SEQ ID NO: 50900

SEQ ID NO: 68090 - DNA, 567 bp, Acinetobacter baumannii; identical to SEQ ID NO: 48645

SEQ ID NO: 68091 - DNA, 1110 bp, Acinetobacter baumannii; identical to SEQ ID NO: 45760

SEQ ID NO: 68092 - DNA, 1788 bp, Acinetobacter baumannii
  misc_feature (1729)..(1738): n is a, c, g, or t
atgcaaaggactacgaaacactttcaaattaatgcattagcacttgctatagcaatgagcacaatttcagcgcatgcagagactgatcagcagacttcggaatatggaactcttcctaccattaaagtaaaagctggaagtggccaagaaaatgaaaaaagttatatagcagggaaaacagatacagcggttccactgggtttatctgttcgtgaggttccacaatctgtttctgtcattactcaacagcgtttacaagaccagcaattgtcaactttagttgaggtcgccgaaaatgttacaggggtaagtgtcaaccgttatgaaaccaaccgaggtggaatctattcacgtggttttgtagtagataactatattattgatggtattcccaccacatatagcttgccttggtcttcaggtgaaattttctcaagtatggccttatatgatcatattgatgtagttcgaggggcaacaggtcttacatttggtgctggaaatccatctgctgcaattaatatggttcgtaagcgtgctacgagtacagagccaacagctaacgtagaagtgagtgcaggtagttgggataattaccgtgttatgggcgatattgccaactcccttaatcaatcaggaacagtacgtggacgagcagtggcccaatatgaacaaggcgacagctataccgacttgttgtctaaagaaaagctatctttattgttaagtgctgaagcagatttatctgaaaatacccttttatcgggtggggtaacttatcaggaagatgatccgcgtggaccaatgtggggaggtttacctgtctggtttagtgatggcacaaaaacgaactggtctaaaaatatcactacaagtgctgactggacacgctggaatgttaaatataccaacctatttgcagatttaactcataaatttaatgacaactggtcagctaaactgtcttattctcatggtaagcgtgatgctaattctaagcttttatatgtttcaggtagtgtagataaaaatactggtctagggctatctccttatgcatcagcgtatgaccttgaggtagagcaagataatgcttctttgcagctcaatggtagttttgatttgtggggcttagagcaaaaggttgttttgggttatcaatattccaatcaggactttacagcgtatgctcgttcaactgatacaaaaatggaaattggcaatttctttgaatggaacggcagcatgcctgagccagtgtggaatgcacctacactcaatgaaaaatataatattgaacaaaatgcactattcgctgcgacttatttaaatccgattgagcctctaaaatttattttaggtgggcgttttacaaattatgaaaagaatatatatggtcgtagttcatccataaaatatgaccacgaatttgttccttatgcaggtattatctatgatttcaatgatgtctatactgcatatgcaagttataccagtatttttcagccccaagataaaaaagactttgatggtaactatttagacccggttgaaggaaacagtactgaagtaggcctaaaatccgcatggtttgatggacgtttgaatggtactttagcactttatcatattaagcaagataatttagctcaggaagcaggggacgtcactcgtaacggggtaaaagaaatctattatcgggcagcaaaaggtgcgacgagtgaaggtnnnnnnnnnngaagtaagtggacaaatcacaccagactggaatattacagcaggttatag

SEQ ID NO: 68093 - DNA, 1845 bp, Acinetobacter baumannii; identical to SEQ ID NO: 51354

SEQ ID NO: 68094 - DNA, 1731 bp, Acinetobacter baumannii
  misc_feature (1621)..(1630): n is a, c, g, or t
atgaatatcccacctcgaccatttaagttgtctgtaatcgcctgcgcgatttgttatgccaacctcacctatgcccaagatacacaggtacaagctttgcaaacgattcaagtcaaagcatcaaatgcagagcagtcttctgaacagaccaaggcatataatgttaaaaactcgagtagtgcaaccaagcttaatattgaggctaaggaaacaccccaaaccattaatgtcgttactcgtcagcaaattgaagattttggccttaccagtactcgtgatgttttaagaaatacccctggtgtaacagtctctaatcaagaaactgagcgaactacttatatggctcgtggttttgagatttcaaatatcttaacggatggcgtaggcttccctctttcaggttataactataataatacgaatcctgatacttacttttatgatcgtgtagaagtagttaaaggagctgactcgttaactaatgcctttggcgatccgagtgcaaccatcaataatattcgaaaacgtccaacccaagaatttcaagcaagcggtggtgtaagttacggttcatgggatacgcagcgctatgaagctgacgtatctggctcaattctaccaagtggaaaagtacgtggccgtattatgggctatgaacaaactggtgattcttacctagaccgatattctgcggaaaaaaacggctttgctggtattgttgaagccgatttaacagatagcactttacttaccgcaggttatagccaagaacaaaataaacctaatgcaaataactggggtgcactacctttattagatgccaacggtaaacaaatttcatatgatcgctcatataaccctaaccctgactgggcgcactgggataatgagacacaaaatgcttttgttgaattaaaacaaaaaattaatgatcaatggaatgctaagctgacttacaactatcttgatacgaagcataatagccgtcttctctattactatggttacccaaaagctgatgggtccggtgtttctctaacgccttggggtggacaagaacatcaagaaaaacatgctgtagattttaatctcgaagggacctataagctatttaaccgagaacatgaagcaactctaggctacagctatgtacgtaatcatcaacaagataaacaatctacaggaacgattaacgatagtaatgttataaagtcaactactaccgattgggcaagttggacaccgcaatctataacttggtcagatttcacagaagcggctaactataaacaaaatattaactcaatttatgccgcgacacgtttacatcttaatgaagatttaaaacttttacttggtgcaaactatgttcaagctgagagtaaaggcgaaagttatagctcaccaatgtcatatagtgaaagtaaagtttctccatatgtcggattaacctataattttacacctgaatatacgggttacatgagttatacctctattttccgtccacaaactggtattgataaagataccaatcaagctttaaaacctattgagggtaaaagctatgaaatgggtgtaaaaagctcatggctagatgaccgtttaacaggcacacttnnnnnnnnnnagtatttaaaactgaacaaaacaattaccctttacgtaactcggatggaaacccacttaaccggaaagtaccaacgagtgatctggaatcgcaaggtgtag

SEQ ID NO: 68095 - DNA, 270 bp, Acinetobacter baumannii
atgaatgcacttcagcccgtttatcaagtaatggaccaaggaatcttacaggattttatcaatagccttctggttgaaacgattattcctgaacagtttatttttgattttgcgactgcccaaactgcgctaaatcaacatggcaaaaatcttcaagaagtatttaaaaacacgtctgaacaattttcttttgtgctattacacgaagagagtcggcttggtcatgtttgcggtacaaaaaggtattactcaagcctggaagtttgctaa

SEQ ID NO: 68096 - DNA, 333 bp, Acinetobacter baumannii
atgattgcgcgtattttagtgcaagcaccgaaagtcattttgctcgatgagccaaccaatcatctcgatgtttattaccagtcttatttaatgaaaaagttgcgtcagttgtcgaggcaaaattttacggtgattgcaattatgcatgatcccaacttggcttttttatttgcagatcatttgttttttatgcgccaacacgaagtagttaagcctgaatctaaaactcgtataaccgatcctaagtttttaaaaagtgtctatgatgtcgagtttcatgaagccatgattcaagacaaaaccattgtgattcctgatcattcgtggctgtaa

SEQ ID NO: 68097 - DNA, 603 bp, Acinetobacter baumannii
atgatgtcacaattttttattcgtcgtcccgtttttgcttgggttattgcgatcttcattattatatttggattgctgagcattcctaaactgccaattgcacgttttccaagtgtggccccgccacaggtgaatattagtgcgacttatcctggtgctacagctaaaaccattaacgatagcgttgtaaccttaattgagcgcgaattatcgggtgtaaaaaatctactctactatagtgcgacaacagatacctccggtacagcagagattacggctacgtttaaaccaggcacagatgtggaaatggctcaggttgacgttcaaaataaaatcaaggctgtagaagctcgcttaccgcaagttgtacgtcagcaaggtttacaggttgaggcttcatcgtccggatttttaatgctggtcgggattaactctccaaataatcaatattccgaagttgatttgagtgattatttggttcgaaatgttgtagaagagctaaaacgtgtcgaaggtgtagggaaggttcaatctttcggtgccgagaaagctatgcgtatttgggtcgacccgaataagcttgtttcttacggtcaacgttag

SEQ ID NO: 68098 - DNA, 606 bp, Acinetobacter baumannii
atgcctgagcaagatgctgaaaaggttccatatcatccatttgatttaacaaaagtctggcctcatggagattatccattaatcgaagtgggtgagttcgagctgaatcgaaaccctgaaaatttcttcttagatgttgaacaatccgcttttgcaccaagtaatctggttcctggcattagcgcttccccagaccgcatgctgcaagcccgtttatttaactatgcagatgctcagcgttatcgtttaggtgtgaattatcagcaaatacctgtaaatgcggcacgttgcccagttcatagtaatcaccgtgacggtcaaggacgcatcgatgccaattatggtggtcttccacattatgagccaaatagttttggacaatggcaagagcagcctcagtacaaagaaccaccgttaaaaattaatggggatgctgatttctggaattatcgtgaagatgacaacgattatttcagtcaacctcgtgctttgtttgaacttatgactcctgagcaacaacaggctttatttgataatactgcacgcgcaatgggtacgcatgtcatccagcttatggcgaaggtgtggctaaggcgcttggtttga

SEQ ID NO: 68099 - DNA, 1587 bp, Acinetobacter baumannii; identical to SEQ ID NO: 49332

SEQ ID NO: 68100 - DNA, 174 bp, Acinetobacter baumannii
atgtctggttttaatgtgagatatattgagcctttaagtctcgatgaaatctatcgattgggctatcagcaacatttaaaagaacaacagtctttttccaatagttttcgtttaaatattaaacagctcatctctacagcaaaagggtttaattttagctttgctgacaggtga

SEQ ID NO: 68101 - DNA, 402 bp, Acinetobacter baumannii
atggaaatgagtcaccgtagtgctgactatgttgctgttgcggaaaaagctgaagcagatttgcgtaagctcatgaatattcctgaaaactataaagtgctatttttacaaggtggcgcgtcattacaattttcagcaattcctttaaacctgcttggaaaaaataacaaagcagattatatccatactggaatttggtctgaaaaagctttaaaagaagcaaaacgttatggcgatattaatgttgtagaagctggtattaaagtagacggtaagttcgccatttctgagcaaagcgaatggaacttgtctgacgatgcagcttatgtccattatttgatgtttcgaaatttggtctcatctatgcaggtgcgcaaaaaaatattggtcctgctggtttaa

SEQ ID NO: 68102 - DNA, 270 bp, Acinetobacter baumannii
atggttgcatatttatatggagaaaatcttggtcaagaagatgaagcttggttccaaggtaatattgtcggtaaaacttcaatgtcatttatgggtgcagaatataccctttatgatgtcactttagttttagaagacaaccttcctgccatattagtgcgcattgctacaaaaaatgatttgtacaaaaactttaatattggcgaatatattcgtggcaatatctggattcaggcgaatatttatgctaaaaatagtgaaactaattga

SEQ ID NO: 68103 - DNA, 918 bp, Acinetobacter baumannii; identical to SEQ ID NO: 46092

SEQ ID NO: 68104 - DNA, 246 bp, Acinetobacter baumannii
atgactactttaaaaaaccaaattactgatgcattaaaaacttctatgcgtgccaaagatatggcaacagtgacggttttgcgtagtctacaagcagcaattaagcaaatcgaagtcgatgagcgcatagagcttgacgacgctcaggttcttgcggtcattgaaaagcaaattaaacaacgtaaagaatcgatcaaagccttcgaaggtgctggtcgtgatgatttagctagtaaaggcgagtag

SEQ ID NO: 68105 - DNA, 324 bp, Acinetobacter baumannii; identical to SEQ ID NO: 46670

SEQ ID NO: 68106 - DNA, 207 bp, Acinetobacter baumannii
  misc_feature (168)..(177): n is a, c, g, or t
atgaataaacatttattagcaaaaatcactcttttaggtgctgcacaactatttacgtttcatacggcatttgcagatatacctctgacacctgctcaattcgcaaaagcgaaaacagaaaattttgataaaaaagtgattctgtcgaacttaaataaaccacatgcnnnnnnnnnnaccacatgctttgttatgggggccagataa

SEQ ID NO: 68107 - DNA, 948 bp, Acinetobacter baumannii
atggctaaaattttaacaattactttaaaccctgcaattgatgtaaccattcaactgaatgagttattagtaggagaagtgaaccgacaagagtcggtagaaattcatgcggctggcaaaggccttaatgttgctcaagtattaaaagacttaggtcatgatgtaatcgtaaccggctttttaggtgagcataatcgacaaattttcgatacacattttgcacaagctcaatttcaacctgagtttatttatattgatggtgaaacccgtcaaaatataaaaattgctgagcattctgggcggatgaccgatttaaacggcaaaggtttctttgtttctaaaacaaacaaacaaagcctatttaataagattgaagctctgttaccacaagtcgaggtcgttgcaatagctggtagcctcccgcaaggttttagtattgatgagttacaacaacttattcaactgatcaaaaaaaataataagaaagttgccctagataccagtggtaaagcattggttgctgcaattgaatgtcaaccttggatgatcaaaccgaataccgatgagttggttgaaagttatcaacgtcctgcaacaagctatgctgaacaaagaaaactttttgatagcttaaccaatattgagcatgtggttatctcaatgggtgaagatggcgtaaattggctacacgccactcaccccttacatgctcaagcaccaaaagttattgtaaaaagtacagtaggcgctggtgattcactcttagccggcatgatccatggacttgttaaccaaatgcctcctgaagagaccttaaaaactgcgacagccattgcaagccatgctgtaacacaaattggttttcgaatccctacttctgaggttctaaaccaattaaaagcacaaactattatcaattcattgagtgaatctgatgcaaactgctaa

SEQ ID NO: 68108 - DNA, 594 bp, Acinetobacter baumannii
atgaaagagttagtacatcaaaaaacgcatcaaagtaacaatattactgtagtgcagaattggattgactcatctgatattggtacagagcccaaaactaataaccgaattttacaagaattgaactggttggatagtgaaactacgatttttcaattcttcggtaatattggtcgtgtacaaggcgtagaaaatattctgcatgctattcagaaaatgaaatatgcacatttggcaaaattcatttttattggtgatggtgcatatgttgctcgtcttaaagagcaaatacagtctttgggatctcaaaatattctttattatggatctttagatcagaaagaaaaaacaactggtttaaatgcgtgtgatgttgcattgattactttggctgatgggatgttaggtttaggggttcctagtaaatcttatttttctatggcggcagataagcctttgctagcaattatggatagtgagtcagaagtagcagatatgattaatactcatcatatcggttgggtagtcccacctaataatgaagaggctttggcaaaacgtaaaattctaaatattattagaaaatttacttaa

SEQ ID NO: 68109 - DNA, 234 bp, Acinetobacter baumannii
gtgagaactagttttattaaatttcataattttttattgatttttagcgtatgtattacttcaaatgctacagattataaaccagaacagttagatgagaaaacaatatatagtaatagtgagcatgaactgaatagtgtgtattcagatataaaaggctatatcagtgataataaaaatgaagttaaatatcttgttgatactcaacgtttttggttcatatttggaccttga

SEQ ID NO: 68110 - DNA, 357 bp, Acinetobacter baumannii; identical to SEQ ID NO: 46762

SEQ ID NO: 68111 - DNA, 405 bp, Acinetobacter baumannii
atggattatatgaataaattgcataagaatgaatctccagaaatgattctagcttttgagagtgctataagtacatttaaatatttttggcgtgaactttattgggaatatcgacgaattgttcctgctttagaactggcttatgtgaagtgtgcatttatccaagaaaaccttgaagataaaaatgaacctttaattgagtatatgtggattgatcaagttgattttgatgggagtacaatttcaggaactttgttaaacgaaccttatattattgataatgtgcaatctggtgaaacagtaaggcttaaatttgagtctatagttgattggatgtttttatctaatggcactgttcatggtgcgtttacgattcaagaataccgtaagactttggcagagtaa

SEQ ID NO: 68112 - DNA, 1374 bp, Acinetobacter baumannii; identical to SEQ ID NO: 45850

SEQ ID NO: 68113 - DNA, 306 bp, Acinetobacter baumannii; identical to SEQ ID NO: 68026

SEQ ID NO: 68114 - DNA, 918 bp, Acinetobacter baumannii; identical to SEQ ID NO: 46092

SEQ ID NO: 68115 - DNA, 180 bp, Acinetobacter baumannii; identical to SEQ ID NO: 51115

SEQ ID NO: 68116 - DNA, 960 bp, Acinetobacter baumannii; identical to SEQ ID NO: 62972

SEQ ID NO: 68117 - DNA, 732 bp, Acinetobacter baumannii; identical to SEQ ID NO: 61660

SEQ ID NO: 68118 - DNA, 861 bp, Acinetobacter baumannii; identical to SEQ ID NO: 61659

SEQ ID NO: 68119 - DNA, 867 bp, Acinetobacter baumannii; identical to SEQ ID NO: 62720

SEQ ID NO: 68120 - DNA, 255 bp, Acinetobacter baumannii
atgctgattctgacccgccatgtcggggaaacattaatgattggggatcaagtcagtgttactgtgcttggcgtcaaaggaaaccaagttcgaattggtgtaaatgcaccaaaagaggtttctgttcatcgcgaagaaatttatcaacgtattcaacatgaacgtgcaatgcatgaacaccttcaacatcttgatcaagattatcaagtttcatatgaagatgataattatgcacagaaaaacttcaatcgttag

SEQ ID NO: 68121 - DNA, 393 bp, Acinetobacter baumannii
gtgttatttctaagaccagctttcaccactatatattggaagaaatgctcatcaggatttaatctatgtttaaataatgaaatatctctatctgtaattgagtttaaaataattttcaattcttctctacgaattgaaaaccaattacttccaaaccagaaatctttcttggtaataaaaattttatctaatatctttaaagaaaaagtaaataatttacctactagcttacgttgccatctagtctcaacatggggagcaaaaaatcttacacgatatctatgtcgaggagagtccgtaagttccataaaaatattagaattactccaagttaaagtttcagataaatttttatttgttgatagaataacatcttcaccacttactacatga

SEQ ID NO: 68122 - DNA, 267 bp, Acinetobacter baumannii
atgccattcgaaactgatgaagagctcattcaactgatgaatcagtcacgctttggtttaaccgcaagtatttggacaaatgacttatctaaagctttaggtttaattcctaaaattgaagcaggtaccttgtgggtcaatatgcatacattcttagatccatcagttccatttggtggggtaaaagcttcgggaattggcagagagttttcagatgcctttattgaagattacaccgaattaaaatcggtcatgattcggtattaa

SEQ ID NO: 68123 - DNA, 369 bp, Acinetobacter baumannii; identical to SEQ ID NO: 46136

SEQ ID NO: 68124 - DNA, 198 bp, Acinetobacter baumannii; identical to SEQ ID NO: 51551

SEQ ID NO: 68125 - DNA, 561 bp, Acinetobacter baumannii
atgaatgcttctttaattctgtctcataaaaatattgatcatatttataatttggtgcaacaaatacttgattctaatttttatattcacattaatttaaaggttaattttgttaaaataaaaaaagctacttctaatataggaaatattttctgtgtggaaaatcgggttgatagtaaatgggctagatatagtatagtgaaagatattcttaatttaatgaactatattttacagcaagatactcggaataaatattttcatttaattaatagcgatgatgttatttcaatcaacgaacaggtttgggacgactctacaatatatatggaatatgtagggacaggattattttctcgttcaaagtacttcttcattgactctgctttaagtaatattctgattaaagggggatggttcttatatacattatttttttttatttttttaaaaagagagaaggattacagagtaaatgcaacattcataatttttgtatgtttctatttctatgctgtctcttatacacatctgacgctgccgacgatctactctgtgtag

SEQ ID NO: 68126 - DNA, 267 bp, Acinetobacter baumannii; identical to SEQ ID NO: 68122

SEQ ID NO: 68127 - DNA, 435 bp, Acinetobacter baumannii; identical to SEQ ID NO: 49446

SEQ ID NO: 68128 - DNA, 201 bp, Acinetobacter baumannii; identical to SEQ ID NO: 48494

SEQ ID NO: 68129 - DNA, 4308 bp, Acinetobacter baumannii
atggcacaagaatcccgtttggtcattgttattgattcgcaaaatgctgaacgtaatgcgcgtaatctaggcaatgaacttgttagcattgaacgtaaaggtgaatttgcatctaagtctatggacagcttgtctgtagccaccagagctttagctggacacatggctggtttattaacagtaggttcagccatttcaaagatggatacatatactggattacaaaatcgccttaagttagtcactaacaatcaagttgaactaaataaagcaacggaagacactttccgaattgctcaaaaaacctattcagcttgggattctgtgttacaggtttaccagcgttttagtgataatgccaaaactttaaacctcacaatggatgacacagcacgtttaactgaaacagtttctaaagctgtagcaattagtggtgcaagcgcagaagctgctgatgcagctttagttcagttcgggcaggccttggctagtggaacgttgcgtggagaagaacttaattctgtaatggagcaaaccccagcactagcaaaggctattgctaaaggtatgggtattactgtaggtgaattacgttcagtagcagctgaaggaaaaattacttcacaagaaattgtaaaagcgcttagaaatgtagaatctgatgttgatgctctttttgctaaaacagatatcacaatcgggcagtctctcacactcctaaacaacgagatcacaaaatttgttggcgaagcaggtaagggaagtggtgcggcacaggtattagctggatcagttcaaactcttgcaagtaatttagatttaattgctgatggggctttagtagttggtattggatatatcactcgtgcaattttgatgaagagcgctgctattaaagagggaatggcttcaactttagcgagccgccaagcatctgtattaaatgctcaagcagaatatgcagaagctaccgctgctttgaatgcagcaaaagctcatctcgcgaatgtgcgagcaacaaatgcagaaacccaagctaaatttggcgcaacagcggcagcaactcgatacgcacaagcacaggcagcagtaactgctgctacaaatgcacaaacagcagctcaaattaagctaaatactgcaacttcaattgcagggagactagctaaaggggcgtttggattaattggtgggtgggctggagttgcaacattaggagtaatgggattagcggcagcctattcttattttaataataaggcagaggaggcaaagcaaaagcttgctgaacaagctaaagttgctgagaaagctgatgaggagttaaaaaaattaactggcaatgataaggctaaagcagttaatgatttaactactgcttttaatgcacaaaataaagcattagagaaatcatcgcgtgctgtagggtctgcattaattgatatcgagaactatgcacgaggaaatagggaggttgaaaaaatttcccaagaagcgagaactggaactatcagctatacagaagccattgaacgtctaaataaaattaagttgcctacagatctatatgaaaatctgaaaaaacaggctgcgcagtatgatgacaatgcatctaaagcaagtttatcagctgagaaacttaaattattaagagttgaagtgaaacttggaggtaatgaagcacaaaatgcggcaattcagcatcaaaaacaagcggatgctttaggaaatactgctactgaagcagaaaaggcaactaaggctttgcaagattatcaagccaagcaaaaagatagcgttattgattcaatctataaatcaggttggcttgataaaggttacactgttgctcaagctaatgccattttagaactgcaaaaagctaaaggaatgagtgcaattttgtctaaagatgaaattgatagcgcacttagaaatctcaagatcatcgaagaacaacaggagcgagaagataaattaactgaagctaaaagaaagcagacgcaggaaattgaaaaacaagcaaaacttactaaacgcttggtcggtatttccggtcaatccggtattggtactggtccacatcttgacgtccgatatggtggctcattgtcaggtcagaaagtttctaatgaacatctggctcgattacaggcgggaggaaaacctttaacttcctacaagatcagttctaattatggtccacgaaaagccccaactaaaggggcttcttcatttcataaaggtattgatttttcaatgcctgaaggaacaccaatcacgaccaatgttgctgtgaaagatatcaagacatggtatgacagcaagggaggtggttatgtcagtgaagtgatctttgaggatggagtgtctcttaagcttctacatcaatctcccaagatgcagagcaaggtgaaaggtggtgcaagtaaaggaagtgataaagcagctggtgatattcaatctcaacttgaacgtcaacaggatttgcaacggtcacttgaaaatgaggtggctagtgaagtcggacggattaacaataatagaaaggcaagactggaggatgttgataaagcaaactttagcccggaacgtactgcagaaataaaggcggaaataaatcgtcgtgcagataatgatattgctatagccaaacaagcccttagaacgaaattggaagactataaggagttccagaaaaccgaggaacagttactagaagagtcctttaaccgtaaaaagttcaatgcagctcatgaccttgaattaagtaagtttgagcagaagcaagctgttgaattgctggaacagcaaaaacagcaagagttagggttattaaaactagctcaggaacagcggttgtttcaagcccgtttatctctgctttctgaaacgcaagccatgcaggaacgttacagactcgaacgggaggaaattcttaagaataccaagctttctatagaagagcggcaaaagctaatcgcattatctaaagccaatcaggataaagagacacgcgataaagtgaataatgctgctcaaaactggggtggtatccaagcggatatgaatggtaccggagaatttttcagacaggatcaggaacgatttagccgtttaaatgctgcaaatgatttagcagatagtcaatttgctgctaccgacctgaatgagcaaaactctttagatggtttgaatgctcaattcgaagctggactaattaagcagcaggatttcgaaaaccagaaaacagcaatcattcaagctgctcaggaccaacgcaatcagattgctgccgaatatgctcagaatgctcaggatattgaagataaatatcagcaagatcgtttgaacacccaaattgcatttggtggccaaatgatgggttctcttacatctatgtttggttcaatgtttggagagcaatctaaagcttacaaaatcatgttcgctgcagataaagcttatgcgattgcagctgctggtattgcgattcagcaaaatattgcagcagcttcaaaagctggttttcctcttaacttaccgttgattgctggggcagttgctcaaggggctagcattattgcaaacatccgtgcaatcaaagatcaaggctttgctgacggtggttacactggatctggtagaaaatatgaacctgcaggtattgtccataaaggagaggtggtctggtcccaagaagacattaaaagatggggcggagttggtttagttgagaaaatgcgtaagagtgcaaaccctgaagcttttctcaataacaatgcctcggctgatagtgtcatgcgccgtgcaatgatgagttctaatgcctttatagaaagccaaaagcaagctgacatctttaatcaaccggttcaagatactcagattatctataaaggtaatagagacacacctaagttggcgtcttcggcaaattctgacttattccatgatggcaaggtctacttctcatcaaatggtttagttcaggatcgttcaaatctggatgatgttcaggattttactttaggacgtacttcacgccctcaagctgagattatgccttcaattgagcctgcttcaccgacaatcaatttcaaaattgaagtgattaatcaggtgagtggagcgacagttgaagctgaacaactggatgagcaaacagtccggatcattgttacagatgaactggataagcagcttccaagaaaggtaccgaaacttgttagtgatcaaatcggtaatccaaactcaactattagtcggtctttgactgagaatacgacagcaagacggaatcgttaa

SEQ ID NO: 68130 - DNA, 864 bp, Acinetobacter baumannii; identical to SEQ ID NO: 51097

SEQ ID NO: 68131 - DNA, 267 bp, Acinetobacter baumannii
atgtttccagcaattcggaacggttggtatgtagtttgcgatccagatgctgaaccagttccaactgaatttgtacaagtgtgcttaaaggatggacgctgcacaattaaggaatttgttggaataaatggtggggttttgagtttgttggctgttaatggtggcgaacgcctatcttttgacatggatgaagttgaaagtattaccgctattacagatatcgtgccgccaagtcagcacagacaagaacatccttattcgcattaa

SEQ ID NO: 68132 - DNA, 921 bp, Acinetobacter baumannii
  misc_feature (880)..(889): n is a, c, g, or t
atgcctttaatggctcaaactactataaaagttacaacatttaatgatgaagataatgagaacatgaatacatgttctttacgtgaagctattacagctgcagaaatgagaaaatcttatggagggtgtgaggttccagcaattgatcaaaattatacaattcaacttgatgctggtacctataccttaaataaagagttaacacctaaaattgctttaaatattattggaaaagaggcgacagattgggagcgtaaaggagttttaactaatgactatcctgctcaaaaacctcttcaaactcgtataaatgctggtggaaaatcacgaatttttaatacagctgtttaccaacaatcgttaactttaaccaatatcattttggaaaatggtaaaagtgctgagcaaggtggagcaatttacgctggtgctgatgtaactttaaaaaatagccagatcttaaactctcaagcctctaaaggcggggcaatttatcttggcggaagtactgctagtttaacaatgaatcattcattagttcaaggtaatggtaaggcttcgactgaaggtagtattttggcaatgagttgcatgtttaataattcatacagtggacgtatcttttcatttgattcaaatagttttattgataatggtggaataaactctataagtatttttgatttttgcggtagtcctacggcgaaatttactaataatacaattgctaaaaatttagcgagtcttactaatggtaatattattaaatttactggagatgctgatccattaaaaaatcaaactagtaagttaagctcatctagtagtttaacattgcaaaataatacaatcgttgagaactctgcatacaccacattcnnnnnnnnnntgcatacaccacatttttatacgataaattag

SEQ ID NO: 68133 - DNA, 450 bp, Acinetobacter baumannii
  misc_feature (373)..(382): n is a, c, g, or t
atgacgaatacattttctgaccacaagcaagttgaagtggtatctacttttgctgaacttgtgaatacacattttcagggaaataagaatgctatttgttggcacagaaatttggtgggcgactttaaagaaattgtggctaaacttgagttaatagaaaatattaccgaaatttctactgaagacctgttaacacttgagctttcagaacaaggtgatttggctcgagacattattttaaaagacatgcagctcttaactgatatgggtgcatcacctctacttaatttacttaagcattatgaacgtgatgaagagctcgattttatttcaacagatgtctattcatttcatgttgatcgttcccctattnnnnnnnnnncttatgtacttatcacggtgcggctagcgacattgtgccgaatgatcaggttgaacaaaaagttttaa

SEQ ID NO: 68134 - DNA, 426 bp, Acinetobacter baumannii; identical to SEQ ID NO: 61578

SEQ ID NO: 68135 - DNA, 399 bp, Acinetobacter baumannii; identical to SEQ ID NO: 48650

SEQ ID NO: 68136 - DNA, 216 bp, Acinetobacter baumannii; identical to SEQ ID NO: 67632

SEQ ID NO: 68137 - DNA, 159 bp, Acinetobacter baumannii
atgaaagaaacttatcctgataataaatatgcagataagacttggagatcttatactattagacttattcgctggttagaattaacaggtttcttacagccagctacagagccaaatacatggatttataaagattttagaaattttaaaaaaatttga

SEQ ID NO: 68138 - DNA, 537 bp, Acinetobacter baumannii; identical to SEQ ID NO: 50961

SEQ ID NO: 68139 - DNA, 2430 bp, Acinetobacter baumannii; identical to SEQ ID NO: 49456

SEQ ID NO: 68140 - DNA, 309 bp, Acinetobacter baumannii; identical to SEQ ID NO: 64768

SEQ ID NO: 68141 - DNA, 612 bp, Acinetobacter baumannii; identical to SEQ ID NO: 62716

SEQ ID NO: 68142 - DNA, 456 bp, Acinetobacter baumannii; identical to SEQ ID NO: 62975

SEQ ID NO: 68143 - DNA, 1617 bp, Acinetobacter baumannii; identical to SEQ ID NO: 62717

SEQ ID NO: 68144 - DNA, 285 bp, Acinetobacter baumannii; identical to SEQ ID NO: 62718

SEQ ID NO: 68145 - DNA, 660 bp, Acinetobacter baumannii; identical to SEQ ID NO: 64545

SEQ ID NO: 68146 - DNA, 666 bp, Acinetobacter baumannii; identical to SEQ ID NO: 61661

SEQ ID NO: 68147 - DNA, 861 bp, Acinetobacter baumannii; identical to SEQ ID NO: 61659

SEQ ID NO: 68148 - DNA, 867 bp, Acinetobacter baumannii; identical to SEQ ID NO: 62720

SEQ ID NO: 68149 - DNA, 1233 bp, Acinetobacter baumannii; identical to SEQ ID NO: 62436

SEQ ID NO: 68150 - DNA, 156 bp, Acinetobacter baumannii
atgagccgctctattcgtctactaaatcaaatagaatatttaaaaaatttaaaaataatcttgagtagcttttataatattcgcttgaataaaattatgtttttgattatgattaatttgattaaaattttaaaatctatatcaagtaataattag

SEQ ID NO: 68151 - DNA, 441 bp, Acinetobacter baumannii
ttgtcgtgtacagagcgaattactataagttttgataacggaacaaatccggatactgctcaggtccaagtacaaaatagtattagtggcgtaatacgtcgcttaccggatgaagttcaacgccaaggtgttacggtaagtaagtcactgggtgacacttttatggtaattggcttatatgactcgactggtaaaacaggaaacattgagctatcggactatttaactacgcatgtggtagataacctgaaccgtattgaaggggtgggtgaaactgatgtatttggttcacaatatgccatgcgtatctggttaaatccggataaattaaaacaatataatttaatgccaagtgatgtagcgaatgcaatcaccgcacaaaatactcaggtcgccgcaggggcaattggtgacttacccgtattgacggtcaatatttaa

SEQ ID NO: 68152 - DNA, 780 bp, Acinetobacter baumannii; identical to SEQ ID NO: 15299

SEQ ID NO: 68153 - DNA, 786 bp, Acinetobacter baumannii; identical to SEQ ID NO: 16905

SEQ ID NO: 68154 - DNA, 468 bp, Acinetobacter baumannii; identical to SEQ ID NO: 46819

SEQ ID NO: 68155 - DNA, 504 bp, Acinetobacter baumannii
atgtcccaatttaaacttgaagatgcagatattcttatcgatttagcaaatcaaactttaagcttacctaaacataataagttttacgtggtctctactggcaaaaatggaattggggaacaagaaaatacgggtaaaaccccacgtggatggcatcgggttgttaagaaatttggtatgcaatctcccaaaaatacagtttttattgcacggcagcccactggtgaagtctataacagtgaattagccgcacaatttcctgagcgagattggatattgtcacgcattctttggttagatggcttagaagagggctttaacaaaggcgaaggccacgacacgatgcaacgttatatctatattcatggtacacctgataaagaaccgatgggggttccaatgtcacatgggtgtattcgaatgcgtaatgaagaaatcattgaattgtttgatttagtctctgaagatgcattagtttatttgtctgaacaatctttaacctaa

SEQ ID NO: 68156 - DNA, 459 bp, Acinetobacter baumannii
gtggcatatttgaatcctggtgacttctttggggaaatggggcttttcgaaccgaaccctcaacgtacagctgaagttcgtacccgtgatgtctgtgaaattgcggaaatttcatatgacaacttccacgaactgagcaaacagtatccagatctcagctatgccgttttcgcgcaactcgttcgtcgtttaaaaaatacaactcgtaaaatgaccgatcttgcatttattgatgtgtcaggtcgtattgcgcgttgcttaatcgacctatcttcacaaccagaagcaatgatcttgccgaatggccgtcaaattcgtattactcgacaagagattggacgcattgtcgggtgttcacgagaaatggttggccgtgtattaaagaccttagaagatcaaggtatgattcaaactgacggtaaagctattctaatttttctctgtacacgacaaaaatag

SEQ ID NO: 68157 - DNA, 249 bp, Acinetobacter baumannii
atgaccgatcttgcatttattgatgtgtcaggtcgtattgcgcgttgcttaatcgacctatcttcacaaccagaagcaatgatcttgccgaatggccgtcaaattcgtattactcgacaagagattggacgcattgtcgggtgttcacgagaaatggttggccgtgtattaaagaccttagaagatcaaggtatgattcaaactgacggtaaagctattctaatttttctctgtacacgacaaaaatag

SEQ ID NO: 68158 - DNA, 213 bp, Acinetobacter baumannii
gtgctgcaagaatattcagatcgtgagaaagaacaaggcgcaattggttttaaatcgactgactacaagattaaaggcgctcagttctttaatgattatatgcatcagaagttgccagccgaagctaagttgatctttgattgggatttcacaggcaaacaaccaaaggccgtgttagtagctttggattttgatggtgtggaagcagcttaa

SEQ ID NO: 68159 - DNA, 1137 bp, Acinetobacter baumannii
atgaagaaaatttttatttcaattgtatttggtactcgtccagagctcataaagttggctccggtaattttattagcaaaacaagactcacgatttcaggtagaagttatttttacaggacaacatgatgaattagttcgagatgcgatagatttctttggggttgaaattgatcatcgccttaaaattatgaatgctggacaaagcctaaatcagcttttaattcatggcttaacgcaacttgaaaatatctatacagatggtcaaaaaagagatgcaattgttattcaaggtgatactacaaccgtgttagctgctgggctagttgcattttcaatgaagattcctgttgcccatgtcgaagcaggcttacgttcttatgatttagatcatccatttcctgaagaaggcaaccgccagttagtttctcgtattaccaaatggcattttgcccctacagaacaatcaaagcgtaacttgttaaatgagcagattccaccttcattgattacagtgacagggaatacggtagtcgatgctgtgtatttaggaaggaaactcatagctgaaaagacgggtttgaaaaatcaacttgagccttacggaattgaattaaaacaaaatgataaagttgtacttataactgctcaccgccgtgagaattttggcgaaggaattcagaatatttgtaatgctgttgagtatttagcaaaacatcatcctgatttacattttatttggcctgtacatttaaatcctgctgtacataatgtagtgcacgataagtttaaaaatcatgctcaaattcatcttgtgaagccactcgattatccgagtttattggccattatcgaccgctccacctttattttaacggactctggtggtttacaagaagaaagcccatcatttaataagcctgtcttaattttaagagacacgactgaacgccctgaagtggtagaggtgggagcaggagtattggttggaacaaatcagcagaaaattattgaagaggctgagaaacttttaacggattcgcagcattaccaaaaaatggctcatgttgaaaatccgtttggtgatggacgtgctgcccagcgaatattagatgaaattgccagaacttataactag

SEQ ID NO: 68160 - DNA, 225 bp, Acinetobacter baumannii; identical to SEQ ID NO: 46522

SEQ ID NO: 68161 - DNA, 357 bp, Acinetobacter baumannii
  misc_feature (316)..(325): n is a, c, g, or t
atgagaatactaataggttttgtatttagcttcttttgtttgattattcatgctggacaaatagattgggctgttgcaaaaacttcatttccgagtgatcaaagtattggtgatactgggcatgaaaagacacctaatggttatgtagatttaatgagtggtaatctaatttatgatactcctgaagtaatattaaaaggtgatagggggttagattttacactttctaagtcttacggaaaagtgaatagtggctttcgtgccatgggtaactgggaattggaagttcctagactagtaatgaatacgggaccannnnnnnnnnaaaggagatatagatggaaatggaatttgtga

SEQ ID NO: 68162 - DNA, 441 bp, Acinetobacter baumannii; identical to SEQ ID NO: 68151

SEQ ID NO: 68163 - DNA, 258 bp, Acinetobacter baumannii; identical to SEQ ID NO: 46674

SEQ ID NO: 68164 - DNA, 336 bp, Acinetobacter baumannii; identical to SEQ ID NO: 46673

SEQ ID NO: 68165 - DNA, 249 bp, Acinetobacter baumannii; identical to SEQ ID NO: 46672

SEQ ID NO: 68166 - DNA, 435 bp, Acinetobacter baumannii; identical to SEQ ID NO: 46671

SEQ ID NO: 68167 - DNA, 693 bp, Acinetobacter baumannii; identical to SEQ ID NO: 59010

SEQ ID NO: 68168 - DNA, 336 bp, Acinetobacter baumannii
atgggactttcatcatttaaccgtgcacgggaaaaacaacaaatgacagaaacaaaaattgctgaactcgaagaacaactggcaacagtaaagggcgaatttattgcctttcaaaatgatacggaagcaatgaaagcacgtattgctgaacttgaatcaggtgaaggtagtcaaacacctgaagatgaccaaaaaccaagtgatactcaaccacaaccaattaactatgcaggcctcaaagtagatgagttgcgtgcggtcttgactgaaaatggcattgcatttgaagcaggtgctaaaaaagaagaacttttagcattaattccaaaggaataa

SEQ ID NO: 68169 - DNA, 252 bp, Acinetobacter baumannii; identical to SEQ ID NO: 56364

SEQ ID NO: 68170 - DNA, 393 bp, Acinetobacter baumannii; identical to SEQ ID NO: 45786

SEQ ID NO: 68171 - DNA, 411 bp, Acinetobacter baumannii
  misc_feature (373)..(382): n is a, c, g, or t
atgcgggttttgtatcagtttcctttgtctcattattgtgaaaaagctcgctggttgttagaccataaagaacttgattacgttgcacataatttgattcctggatttcaccgtgcttttgcacaacttaaaacaggtcaaaatttgttgccgattttaaaagatgaccatcgctggattgctgagtcgactaaaattgcgctttatctggatgatacttatccggaacatgcacttttacgccgtgatgaacaacttagacagcaaactcttaaaattgatagtttggcagatgaacttggggtgcatgtacgtcgttgggcacttgctcatactttagctcaaggtgatcatgctctagagattatgatgnnnnnnnnnngatcatgctctagagattatgatgggtga

SEQ ID NO: 68172 - DNA, 396 bp, Acinetobacter baumannii
atgggtgaacaaggctacttacgacagtttgagaaaatatcaaaaccgtttctcaagactctagtcaagaagaactataagcttgaagaagagctcgtaagtcagtcaaaaggatgcatggatgaacttattaatgagttaaaccactatttaattgaaaaccaagcacgttatatggttggtgaccgcttaagcctcgctgatatttcagtatgttctatgcttgcacctttattagaaataaaaggtacaccatgggaaagggaagaagatggggaagtatcgcccgattggagtaattatcagaaatatttacttgatttgccgcttggacagtacgttttaagaatatatcaaactgaacgtaatgcacgcgttgattggcgaggaatttaa

SEQ ID NO: 68173 - DNA, 162 bp, Acinetobacter baumannii
atgtatcgccaatttgatcatcttgccgatgttgaagtgtttttaattgtggccgaaaagctttctattagtgcagctgctattgatttatctacaacgccttcggtcattagtagaacaattacaagactcgagaaaaaaattaggtatccagttttttag

SEQ ID NO: 68174 - DNA, 195 bp, Acinetobacter baumannii
atgaaatatttcgctttaacgcaatcgcatactcaaaataatgtaaaagaacactcacctatctataatctggctgcttatcagcaacgccaacgtcaattcaaacgtcaaaaactcctgaagaactttttcgacacagctatatttatcagcattgccggcttcactttctctatgttgttttggggagcttaa

SEQ ID NO: 68175 - DNA, 444 bp, Acinetobacter baumannii
atgaaaaataatagccgaaatttatttcttattttgttggggcttgtcactttgctttctggctgtatttatagtgagccatattttacagttccaccagcaccaaaagttgatccaacttcccaaagagtgcctatgacagctgaagaagctagacatttatataatgaacaagctcaacaacgaacaataaataacccttttagttatgatggatctacaacgactccttctttgccaaaaagcagaactgcgcataatagtacgagagtcataaagcaaagtacttctacttctcaaggcagtttaaaatgtggatctgtgcctagatactgtaaagaaatggtgaattgtgcccaagcaaaagctgcattgaaatgtggtaatagtcggctagatcgggatggtgacggcattccatgtgaaaatgtatgtggtggatag

SEQ ID NO: 68176 - DNA, 447 bp, Acinetobacter baumannii
atgaatagattaaagattttggctagtattctgtttctggggattgcatcctgttcgaatgaatctgaaataaccttaccaaatgtttctcaagctggtgtaggcagtgctgaaaatattataaaagcagctgagctccaacctataaaaattattgatagtacagacagccgagatgctgttaagaaaatttatcaatttgatggtgtttttaaccaacttgaatttagtaaaaattatattttaatttcttggtttcaacataataaaactagtttggataaagctgtacgtttaggaatagcaacgcttggtaatgatgctggctattttattcataaggtagatattcaaggagaacatactgattattcaattcaaggtcataggataagtaatagcacgtgtatatctaaattatgcgctataacaatacaaagaaattaa

SEQ ID NO: 68177 - DNA, 279 bp, Acinetobacter baumannii
atgacaaattttttcatattttttattatcgttttcgtattatcgctactcatcttgtggatgatgttggattatcagttcaccagatatattcgtgcaataaaagttgctcagcaagaaaacatggatcctgagtctgttttcactggtgagatacgaatcaatcaaaattcagaatcaacatcaaggggtgtaagaatgtggctatacccagcacttatcggattaatcattggtgtaatgatcagtggttcattattcctctatctcgttggataa

SEQ ID NO: 68178 - DNA, 468 bp, Acinetobacter baumannii
atgcagcaaatggaacaaaagaagagtacccaaaagcgcaatcagcttcttgctgccgcccttgatgtgttttcactatatgggttcagtggcgcaagtctggatgaaattgcccaactcgctgacatgcataagtcgaatattttctattactatgaaaataaagagtctttatatgtggaagtgctgaccacagttttacaaaaatggctagctcccttacaaaccttagaagctgagttagaaccagccgaagccttgtctcattatttaattcaaaaaatcgaactttctcgtagccaaccaaaagcttcgcgactatttgctttagaaattattcaaggggcaccgcatattttgcctatactgaaagggcccttgaaaagctatttaagcgcaaagctaaggtcattcaaacttggcaagagcaaggaaaaatttcaccggatatcgacccggaacttttaa

SEQ ID NO: 68179 - DNA, 399 bp, Acinetobacter baumannii
atggcaaataaaaaacttttaatctgtgctgcaattgcggctggactattgttaaccgcatgcgttaaaaaagagacaccgaaagaagaagagcaagacaaggttgaaactgctgtttcagaacctcaaccacagaagcctgcaaaatttgaatctttagagagtgtagatactcaagaagctcaagttcaagagcaaccacaagttgaagttcatcgtgaagaaactgctaacacgacaactgaaattcgccgtgaaactcgtcctgcgcgttctgatgaatcttcaccggaaaaagctcagtcaaaaccagctgctaaggcaactgaacctgcgaacacagaagatgatgccgttgctgctgctattgctgctgcaacaccagcacttaagaactaa

SEQ ID NO: 68180 - DNA, 528 bp, Acinetobacter baumannii; identical to SEQ ID NO: 46876

SEQ ID NO: 68181 - DNA, 495 bp, Acinetobacter baumannii; identical to SEQ ID NO: 20174

SEQ ID NO: 68182 - DNA, 177 bp, Acinetobacter baumannii
atgaattacgaagaattacaagctcacgataataggtggctttcagttatcgatcaaatgaaccaacgtaatgcaactctaactgaaatttcagaaattgaaatgttacgtcaagaggatcgaattacattctctatttcatcctccctgatctctgaatcagaaaaacaaagttaa

SEQ ID NO: 68183 - DNA, 1008 bp, Acinetobacter baumannii
  misc_feature (974)..(983): n is a, c, g, or t
atgcataatccagtacaaatagtattaaatgctcagcactatattaatagggttgatcctttaccaggagggggtaataaagatttttttgaaggattggatgacgattttaaaaaacataagcaaaacttagttgaagaattgcaaagtctgtctgtagaaaagtcttttaatgaagatcctctaatttatgctcgtgtagaactacaaagttctgcatgggcaaaaagccataggccgactactcaaatgtttcctacaaataaaatacgtactatgagtggaaacgaattagggagtttaattgtagaacttaagaaatcaactaattgggttataaatgagaaaactaagaagttagaatctaaaccacgaagaatcagaagtgaagtgggtgcaattactcatattcaactttattctagttcagataggcgtaaattttctattgaacaagctatgaaatggcttaacgatcctagaacaggaaattcttattacatcgaaacttttttttctgaaaaagcatgggacaaaaataatgaccatgaacgtgcagagttagcacaaaagatgatggcagattttcataaaaaattgaaatcgttaaaagtcccaattgaagttagtatggttaataccgagtggacgcctaatgctttgttagtaataaaaatgataagagaaggtggagcttccatacaagatcatcaagcattaattaactttttagatcaacaacagatagttagaacaataatactacccccaattctacagtcagcaaatagccttggtaaggctgaatatcctatatcattagtatctcctgaattagataatttacctgttgttggaataattgatacaggagtagctgatgttagtaatttgacaagctggaaagtaggcggagctgattttttggatgaggaggatcaagaactctctcatggaacttttattgctgggtnnnnnnnnnnctgggttgattgctggtggaagtga

SEQ ID NO: 68184 - DNA, 258 bp, Acinetobacter baumannii; identical to SEQ ID NO: 46547

SEQ ID NO: 68185 - DNA, 891 bp, Acinetobacter baumannii
  misc_feature (864)..(873): n is a, c, g, or t
atgaattttcagcgcatgactgaccttaatttagcaggtaaacgtgtccttattcgtgaagatttaaacgttcctgttaaaaatggtgtgattactagcgatgctcgtttacgtgccgcacttccaacaataaaagctgctttagaaaaaggcgctgctgtaatggtattttcacatttaggtcgtcctgtggaaggtgagccaaagcctgaacaatcacttgcaccagtggctgcatatttaactgaagcattaggtcaagaagttaaattatttactgattatttaaatggggttgaagttgaagcaggacaagttgttttgcttgaaaatgttcgttttaatccgggtgaaaagaaaaataatcctgaacttgcacaaaaatatgcagctctatgtgatgtgtttgtaatggatgcttttggtactgctcaccgtgcagaagcttctacagaaggtgtagcacgttttgcacctgttgcagcggcaggcccattattggctgctgaattagatgcacttggccgtgcaatgcaaacacctgaaaaaccaatggtggcaattgtcgctggttctaaagtttcaacaaaacttgatgtgttaaattcattatctggtatttgtgaccaactgattgtaggcggtggtattgcaaatactttcttggcggctgctggttacaatgttggtaaatctttatatgaagctgacttggttgaaactgcaaaacaaattgctgctaaagtaagtgttccacttcctacagatgtagttgtagctgatgcttcacaaattaacttcgaagatttcttaggttctttggcagcagcgcaagcagtaattaagaaagttgaagatgtcacnnnnnnnnnntcacagcaaatgatatga

SEQ ID NO: 68186 - DNA, 177 bp, Acinetobacter baumannii
gtgactggtcaaagcgccgattttattcttgaattagttgcacgtaatatggacgactacagcgaaattttattaagacggattggtaaaattgataatgtcgttgctctgcattcgagctttgtcattaaagaatacaatgtatttaactgttataacttattaaataaagtataa

SEQ ID NO: 68187 - DNA, 1338 bp, Acinetobacter baumannii
  misc_feature (1315)..(1324): n is a, c, g, or t
atgcaaaggactacgaaacactttcaaattaatgcattagcacttgctatagcaatgagcacaatttcagcgcatgcagagactgatcagcagacttcggaatatggaactcttcctaccattaaagtaaaagctggaagtggccaagaaaatgaaaaaagttatatagcagggaaaacagatacagcggttccactgggtttatctgttcgtgaggttccacaatctgtttctgtcattactcaacagcgtttacaagaccagcaattgtcaactttagttgaggtcgccgaaaatgttacaggggtaagtgtcaaccgttatgaaaccaaccgaggtggaatctattcacgtggttttgtagtagataactatattattgatggtattcccaccacatatagcttgccttggtcttcaggtgaaattttctcaagtatggccttatatgatcatattgatgtagttcgaggggcaacaggtcttacatttggtgctggaaatccatctgctgcaattaatatggttcgtaagcgtgctacgagtacagagccaacagctaacgtagaagtgagtgcaggtagttgggataattaccgtgttatgggcgatattgccaactcccttaatcaatcaggaacagtacgtggacgagcagtggcccaatatgaacaaggcgacagctataccgacttgttgtctaaagaaaagctatctttattgttaagtgctgaagcagatttatctgaaaatacccttttatcgggtggggtaacttatcaggaagatgatccgcgtggaccaatgtggggaggtttacctgtctggtttagtgatggcacaaaaacgaactggtctaaaaatatcactacaagtgctgactggacacgctggaatgttaaatataccaacctatttgcagatttaactcataaatttaatgacaactggtcagctaaactgtcttattctcatggtaagcgtgatgctaattctaagcttttatatgtttcaggtagtgtagataaaaatactggtctagggctatctccttatgcatcagcgtatgaccttgaggtagagcaagataatgcttctttgcagctcaatggtagttttgatttgtggggcttagagcaaaaggttgttttgggttatcaatattccaatcaggactttacagcgtatgctcgttcaactgatacaaaaatggaaattggcaatttctttgaatggaacggcagcatgcctgagccagtgtggaatgcacctacactcaatgaaaaatataatattgaacaaaatgcactattcnnnnnnnnnngattgagcctctaa

SEQ ID NO: 68188 - DNA, 252 bp, Acinetobacter baumannii; identical to SEQ ID NO: 56364

SEQ ID NO: 68189 - DNA, 300 bp, Acinetobacter baumannii; identical to SEQ ID NO: 49175

SEQ ID NO: 68190 - DNA, 819 bp, Acinetobacter baumannii
atgcttggtatcgtcaatcttgaaatgcatgtcttggatggtacaactttttcaaatgtgcagcagcgaggaacttatgattccgctaaacaagcctgtatgacattaaaggaacttgaatactatatcgtttattggattactaaagtttatcatcagaagaagcattccgctttaggaacatcacctattgttaaatgggaagaaggtgtttggggaacgaagacgacagcaggaacaggtttgaaagaacgtgtatcagatgaagataccttgtttattgattttctacctgaatttgaagcgaccattcagcgtacaggggtgcagaaagataacttattctattttgcagactgtttaaggcaatgggttaattctattgatccagacgacaataatcgaaagcgcaaaagaaaattcttatttaagcgtgatccgagggatatttcacagatttggttttatgagccattttctaatacctattttaaagtacccactgcaaagcgagagataccaccgattagcttatttgaatatagacaggtacagaactatctcaagaatgggcgtcaggatgttcagaatcaggatgagatttacaaggcgattttacatctacgtgagcagcttaatcaggctcgaagcttgactcgaaagcaacgtcgctcaaaccaaagaaaaaaggaaaatgaaaaagccattactcagctatccgaacagaatcagtctaaaaaggctgtagtttctgaaagccttcagacaagtgatgatttgtggagtactcctttaactgcatttgatgatttaaggtga

SEQ ID NO: 68191 - DNA, 318 bp, Acinetobacter baumannii
  misc_feature (302)..(311): n is a, c, g, or t
atgggaaataagataaaaagtaataaactttttactaggaagtctgaagcaaaaaatatcattccacttctatcacttggtggagccatctttctctcaaactcggcctttgcagcctcgccttctgagacaacagatgctgaaaaaaagcctgaagcactccctacaattacaatcaacgcttcacgtgcagatgaactttctacatctgccaaacaagtgaccaagctagatgaaaaacaaattgaacttttaagaaatggttcatctggaaatattgcaactgttttagctaaagccgnnnnnnnnnngcattag

SEQ ID NO: 68192 - DNA, 1866 bp, Acinetobacter baumannii
ttgaaacagattaatgaccagaacgtaaaagatctgaaagttgcctggacattccgtactggtgatttcaaaacagataatgactctggcgaaacaaccaatcaggttacaccaattaaaattggtaataacatgtttatctgtacggctcaccagcagttaattgcgattgacccagctacaggtaaagaaaaatggcgttttgatccgaagcttaaaacggataaatcgttccagcatttaacttgtcgtggtgtaatgtattacgatgcaaacaacacaactgaatttgcgacaagcttacaaactaaaaagtcgacttcaactcaatgtccacgtaaagtctttgttccagtcaatgacggacgtttagttgctgtaaatgctgacacaggtaaagcatgtactgactttggtcaaaatggtgaagtgaatttacaagaattcatgccatatgcttatccaggtggttataacccaacatctccaggtgttgttactggttcaacagtggttattgccggttcggttaccgacaactattcaaataaagagccatcaggtgttatccgtggatatgacgtaaacactggtaagcttctttgggtatttgatactggtgcagcagatccaaatgcaatgccaggtgaaggtacaacctttgttcataactcaccaaatgcttgggcacctttagcatacgatgccaaacttgatatcgtttatgttccaacaggtgtaggtactccagatatctggggtggtgaccgtaccgagttgaaagaacgttatgcgaactctatgttagcgattaacgcttcaacaggtaaattgatttggaacttccagacaacccatcacgatttatgggatatggacgtaccgtcacaaccatctttggcagatattaaagacaaatctggtaaaactgttccagcaatttatgtcttgaccaaaacaggtaatgcctttgttcttgatcgtcgtaatggtcagccaattgttcctgtaactgagaaaccagttccacaaacagttaaacgcggaccacagactaaaggtgagcattattcaaaaactcagccattctctgatttgaatttggcaccacaagataaattaactgataaagatatgtggggtgccactatgcttgatcagcttatgtgtcgtgtgtcattcaaacgcctcaattacgatggcatttatacgccgccatctgaaaacggtactttagttttccctggtaacttaggtgtgtttgaatggggcggtatgtcagttaaccctgaccgtcaagttgctgtaatgaacccgattggtctgccattcgtgagtcgtttaattcctgctgatccaaaccgtgcgcaaactgcaaaaggtgcgggaactgagcagggtgtacagccaatgtatggcgtgccttatggtgttgaaatcagtgcattcttatctccacttggtttaccttgtaaacaacctgcttggggatatgttgctggcgtagatttgaaaactcatgaagtcgtttggaaaaaacgtattggtacaattcgtgacagtttaccgaacttgttccagttaccagctgtaaaaattggtgttcctggtttaggtggttctatttctaccgcaggtaatgtcatgtttgttggtgcaactcaagataactacatccgtgcgtttaacgtaacgaatggtgagaaactttgggaagcgcgtttaccagcaggtggacaagcaacaccaatgacttatgaaattaatggtaaacaatatgttgtaattatggccggtggtcatggttcatttggtacaaaaatgggcgactatttagtggcttatgcattaccagataacaaataa

SEQ ID NO: 68193 - DNA, 570 bp, Acinetobacter baumannii
  misc_feature (462)..(471): n is a, c, g, or t
atgaatcaaccttcttcaagatcaggtttaacgacttttaccgtaattattattgggttattggcgttattcctgctaattggaggtatttggctcgctacactaggcggttcaatttactatattgtagctggagtcttacttctcattgttgcatggcaactctacaagcgcgcttctgctgctttgtgggtttatgccgcattaatgctaggtactattatctggagtgtctgggaagttggaacagacttttgggcgcttgcaccacgtttagatattttaggtattcttggtttatggttattggttccggctgtaactcgtggaatcaacaaccttggatcaagtaaagttgccttatcttcaactttagcaattgcaatcgtgttgatggtttattctatcttcaatgatccgcaagaaattaatggtgaaatcaagacacctcaaccagaaacnnnnnnnnnncccctcaaccagaaactgctcaagccgttccgggtgttgcagagagcgactggcctgcttatggtcgtactcaagctggtgaacgttattctccattga

SEQ ID NO: 68194 - DNA, 180 bp, Acinetobacter baumannii
atgccacaagttaagttgaaagaaggcgaaccagttgacgtagctatccgtcgtttcaaacgtaaacgcgaattctacgaaaaaccaactcaagaacgtaagcgcaaaaaagctgctgcagttaaacgctaccaaaagaaattggctcgcgaatctgtacgtactactcgcctttactaa

SEQ ID NO: 68195 - DNA, 150 bp, Acinetobacter baumannii
atgaatactttaaatattaatgatattaaaaaacatgcagacgttattgcttctcttatccctacttcatggattggggaggtaaaagaagatcaagtcattttaaataaaaactcagaagaagttaaagaaaactggcaagcgatttaa

SEQ ID NO: 68196 - DNA, 1359 bp, Acinetobacter baumannii
  misc_feature (1347)..(1356): n is a, c, g, or t
atgagtaagaaattatcagaattagtatcagtacaccgtaatttcttacgctcaattcgtttagatactgatctaggtcgagcagatgcaataagtggttacattttacagtctcctgcaaaacagttacttgatattacaggtagttatttactggagtcacaacagaaagcatttacttggacaggaccatatggtggtggaaagtcatctcttgctttaactttagcttcttgtgttaatgaaaagaaagatattagagatttgtcacgctctatattgggtgatgaaataaatgttggtattaagcaatatttctacacagatgaaccttggattgtattgccgatagtagggaaaaagacttcgattgaatcgcaaattcaggcgacgttaaactccatagatgaacaatataaatcactaattaatcaagaagattctgtcataaatcaattggttaagttggcagaggttttgccaaaaaaatctggggttttattattaattgatgaacttggaaaatttctagaatatgcagcatattctggagaagatataggattctatcaggaccttgctgaagcagcggcaagatgtaaaggaaatcttgttattatcgggattttgcatcaatcttttgagcaatatgcagctaagttaggaagtaacgttcaacaagagtgggcgaaagtacaaggccgttatattgatattcctttagttacaaatacggatgaaactctggagttaataggcaaggcgattcatgttgagactcaatatgaagaagcacgaaaagttgctgaaaatgtctccaaggttattcacaaaagaagaccaagcgctgtatcgaatctttcagttttattagaagcatgttggccacttcaccctgtaatggctgttatgttaggacctgcatcaaggaaaaaatttggtcagaatgaacgcagtatctttagctttttaacttcggtagagccgctaggattttctgaagtattacaaggaatggatggcgagatatttgactattattggcctcatcaattttgggactatctacggggtaatttcgaacaagcaatactagcttctgtagatggacatagatggtcaatcagtgtggatgctattgaaagagctgaggcgatcttttcaaatgttcatgtaaacttagttaaaacaattgctcttatcgaaatatttagaaatggatcaggactcgttgctgaggatcagttattgaattgctcagtgcctaacgcatctattactgaaattcatgatgccttaaatgatttagcaagagcatcaattttaatttttagaaaacatataggnnnnnnnnnntag

SEQ ID NO: 68197 - DNA, 1026 bp, Acinetobacter baumannii
  misc_feature (1011)..(1020): n is a, c, g, or t
gtgagtgttaaatcaattttcattcaaacacacgcaccacatcaaagccgattagtacatggttttgactccatggtgaatagtggtgcttgttcaattgggtttattaagggtgattaccgtcaaattaatgctttagtcactgaagattacacggaaaatgatttctggcgtgttgtaaatttaaaaggcaaaaagggtgggatagatgcgtttgattccgttgcggtattaggcgctatcgatgaccagcatgcagctgatttagcgatactgcaattcggccgtatgtttgatgcttgtgttacagatgttattgaaacgaatcaatttggacttaagcgccatttatcatcacaacaatttaatttgacgggttcaaaaccgattcaaagatggcaactagaacaattacaaaatgttgtagcagctgaaaaacctgaatgggatggaatcaatttaatttctcatgagggtgatacttctaagttgttattagatatgcaacgaaatgatgatcacagccaattattgagtaaatttgatgggttacctacacttttatctagtctaggcgtagaagaagcgctttacgactctattatcgttgattaccagcatttagagcagctgtctgcaattttgcatcactctatggatcagttttcaaaaactggcgtcaaaatcgttaacgttacggaaagtaagccatttaagcataaaaaagtccttcaaattgctcttacttatgattttgatgacggccaaaacttcacaatcctttttcataagccagatcgattatcaaaaaaaattagtccagcagattcattaatttcatggaagattttaatgaacaatcgggatattacggctgcaattcagccgaatcagggagaaggaatttcaattccagttctcgctggtcgaattatgaagttgattaaccaaaatagtaatcgttttaagcggttacaatctaaaaaagcagaaaaggccaaggctttagcnnnnnnnnnntgctga

SEQ ID NO: 68198 - DNA, 798 bp, Acinetobacter baumannii
  misc_feature (721)..(730): n is a, c, g, or t
atgaagcaaaagaaattgctcaagtatattgtggttgctattttactaggagtattgacgggttggatctgtcatcacttctttaatgaaggcgagcaactgaagcaaatcgcttcttatttcaacatcgtcacagatatctttttacgtctcatcaaaatgattattgccccattggtatttgctacaattgtgtgcggcattgtttcaatgggcaaatcaacttcaattggtagcatcacactcaagtcaatgacttggtttattaccgcttcgtttgtctcacttgccatcggtatgggtttagcaaactttttccaacctggcgcggcgctagacctagcattaccaacagctcaacaacttagtagttcttctctcccaacaactactggttttaccttgcaatcattcttgagtcacgtgttcccacgcagcattgcagaagcaatggcgaacaatgatattttacaagtccttgttttctctattttctttggttcagctcttgcttttgtaaatcagggcaaagaaaaagactcagttatcattcgcttaactgatgaactcagtaaaatcatgtttcgcattactgactacgtaatgatgttcgcaccttttgcagtatttgctgcaatcgcttcagcaattacagtacaaggcttaggcttaattgttgattatggcattttaatcgcagaattctacttcggtctgctannnnnnnnnngctattactttgggtcattttgttctctgttggcgcaatcgtacttaaaaaagatatcttccgtttag

SEQ ID NO: 68199 - DNA, 573 bp, Acinetobacter baumannii
ttgttctctgttggcgcaatcgtacttaaaaaagatatcttccgtttaggtaaattgatccgtgaacctgtaacacttgcttttgctacagcttcaagtgaatcagcctatcctaaagttatggatgctttaaataagttcggcgtgcctaaaaaagtgactagcttcgttttaccattaggttattcatttaaccttgatggttcgatgatgtacaccacatttgcggtactctttatcgctcaagcttacaatattgatctgagcttcactcaacaaatcttgattttgttaacgcttatggtgacaagtaaaggtattgcgggtgtttcaagagcttctattgtggttatctcggcaacactcacaatgttccatttgcctgaagccggtattctattattacttggtattgatcagttccttgatatgggccgtactgcaacaaacgtagtaggtaatagtattgcgactgcagttgttgccaaacttgaaggcgataaagtggctgatactgaagaattaccagagcctgtattaattaaatcaactcaagaacaaacaatcgcttaa

SEQ ID NO: 68200 - DNA, 330 bp, Acinetobacter baumannii
  misc_feature (11)..(20): n is a, c, g, or t
atgaaacacgnnnnnnnnnncgaattgactagccatggttttctagcaaatcatgctggtggtattttaggtggtatttcaagtggccagaccattcgtgtggcgattgcactaaaaccaacagcaagtattactactccgggtaaaacgattaatttaaatcgtgaagatactgatgtgttaactaaaggccgtcatgacccgtgtgtgggcgttcgagcaactccgattgcagaagcaatgttagcgatagttctaatggatcatttcttacgccaccgtgctcaaaacgcggatgttgttcctccatttgcgccaatcgaaccatag

SEQ ID NO: 68201 - DNA, 213 bp, Acinetobacter baumannii
  misc_feature (141)..(150): n is a, c, g, or t
atgctcacagatcttgatgatttttattgttttgcccttgttgttgagcatggtggatttagtgccgccgaacgtgttacggatattccaaaatcaaaattaagtcgtcgtgtttataacttagaggaaaatttaggggtnnnnnnnnnngttctcgtcattttgcagttaccgatattggtatggatatttatagacacgcccaagtcatga

SEQ ID NO: 68202 - DNA, 456 bp, Acinetobacter baumannii
atggtgccctatcaattaggattaggtgttgaccgtcaagcggttaaatactccgtaagaaattgctctacagtgactgcagctctacctgatcatcctagccataattttttacgagatgccttaaaagatacattgcaaaagcaagacgtgtgtatggaatttcttatacagccaagaacttcgactaaaatgctggttgaagatgcaatgaccgagtggaaagaaaatgaagcacctttttatcaagttgcgaccattcatattccaaagcaaagctttgatacacctgaacagaatcaattttgtgaaaatctctcttttacaccgtggcatgctttacctgagcataaaccgcttggcgcaataaatagaatgcgtaaaattatttatgaaaatataagcagagttagacacgatatcaactcagctccccgacaagaacccaaaaactaa

SEQ ID NO: 68203 - DNA, 180 bp, Acinetobacter baumannii
atgctttcagaaaaattttataagattttttcttacatagttatatcttcaataacttcttctttctttgttttaattgagagtttttttgatagtattgtagaagaaagaattagagaagcatgtttgataaattttttgacatacagattaaatttcgaaatttttaaatctaaataa

SEQ ID NO: 68204 - DNA, 198 bp, Acinetobacter baumannii; identical to SEQ ID NO: 51551

SEQ ID NO: 68205 - DNA, 849 bp, Acinetobacter baumannii; identical to SEQ ID NO: 45840

SEQ ID NO: 68206 - DNA, 498 bp, Acinetobacter baumannii; identical to SEQ ID NO: 63246

SEQ ID NO: 68207 - DNA, 384 bp, Acinetobacter baumannii; identical to SEQ ID NO: 63247

SEQ ID NO: 68208 - DNA, 606 bp, Acinetobacter baumannii; identical to SEQ ID NO: 63248

SEQ ID NO: 68209 - DNA, 966 bp, Acinetobacter baumannii; identical to SEQ ID NO: 63249

SEQ ID NO: 68210 - DNA, 1290 bp, Acinetobacter baumannii; identical to SEQ ID NO: 63250

SEQ ID NO: 68211 - DNA, 1209 bp, Acinetobacter baumannii; identical to SEQ ID NO: 63251

SEQ ID NO: 68212 - DNA, 1539 bp, Acinetobacter baumannii; identical to SEQ ID NO: 63252

SEQ ID NO: 68213 - DNA, 792 bp, Acinetobacter baumannii; identical to SEQ ID NO: 63253

SEQ ID NO: 68214 - DNA, 774 bp, Acinetobacter baumannii; identical to SEQ ID NO: 63254

SEQ ID NO: 68215 - DNA, 1062 bp, Acinetobacter baumannii; identical to SEQ ID NO: 63255

SEQ ID NO: 68216 - DNA, 501 bp, Acinetobacter baumannii; identical to SEQ ID NO: 63256

SEQ ID NO: 68217 - DNA, 756 bp, Acinetobacter baumannii; identical to SEQ ID NO: 63257

SEQ ID NO: 68218 - DNA, 291 bp, Acinetobacter baumannii; identical to SEQ ID NO: 63258

SEQ ID NO: 68219 - DNA, 939 bp, Acinetobacter baumannii; identical to SEQ ID NO: 63259

SEQ ID NO: 68220 - DNA, 2103 bp, Acinetobacter baumannii; identical to SEQ ID NO: 63260

SEQ ID NO: 68221 - DNA, 1380 bp, Acinetobacter baumannii; identical to SEQ ID NO: 63261

SEQ ID NO: 68222 - DNA, 1572 bp, Acinetobacter baumannii; identical to SEQ ID NO: 63262

SEQ ID NO: 68223 - DNA, 1581 bp, Acinetobacter baumannii; identical to SEQ ID NO: 63263

SEQ ID NO: 68224 - DNA, 1290 bp, Acinetobacter baumannii; identical to SEQ ID NO: 63264

SEQ ID NO: 68225 - DNA, 753 bp, Acinetobacter baumannii; identical to SEQ ID NO: 63265

SEQ ID NO: 68226 - DNA, 1263 bp, Acinetobacter baumannii; identical to SEQ ID NO: 63266

SEQ ID NO: 68227 - DNA, 231 bp, Acinetobacter baumannii; identical to SEQ ID NO: 63267

SEQ ID NO: 68228 - DNA, 1104 bp, Acinetobacter baumannii; identical to SEQ ID NO: 63268

SEQ ID NO: 68229 - DNA, 933 bp, Acinetobacter baumannii; identical to SEQ ID NO: 63269

SEQ ID NO: 68230 - DNA, 684 bp, Acinetobacter baumannii; identical to SEQ ID NO: 63270

SEQ ID NO: 68231 - DNA, 909 bp, Acinetobacter baumannii; identical to SEQ ID NO: 63271

SEQ ID NO: 68232 - DNA, 150 bp, Acinetobacter baumannii
atgctgaattatgagcagggacaggatttttctcacgaacaattgcaattattaggtaaactataccgtcaaatgattacatcgcttttaggtgaccgtcccctaaaaagtcgacaattgtggattcaaaatactcaaactcaatcgtaa

SEQ ID NO: 68233 - DNA, 606 bp, Acinetobacter baumannii
  misc_feature (589)..(598): n is a, c, g, or t
atgaatataatttttaaaattactagcgtactctcagtaatattacttgtagcctgcggtgatgaaaatagcaacagtgtcagtgaagaaaaaattgcacaatctacccaaaatcaagttacttataaactaatctctggtactgcattttcaacttctgttttaaatggtgcaaatgtaacagcaatttgtaaagatgggcttggtttcaaaaataaagtaattgttaatgcacaagggcaatggcaaggggaaatagacaccagtaaatttccttgtcgtttagaggcaaaagctgaggggcaaacttatcatagttatatcgaccatgagggaagggtaaatattaacccgctcacagatatggttgttgcttatgcaagtaatcaggttcctgtaacatggtatcaatctggaagtatgactacagaaaagttaaattcggcaaattctgctttggtcgctgaacttattaaaaaggggtacggtattaataatgatatggatctatttactgctgagatgaaagcaaataaccctattcatcaagctattcaagagttgttggaagctattcagaataatagannnnnnnnnngattatga

SEQ ID NO: 68234 - DNA, 447 bp, Acinetobacter baumannii
gtgaatggttcaaatccttcttcaacaataggaaaacataacaaagaattctttctaaaaaattatgaaagtacggttcaaatatataataaatcacaggacgttttagtagaatatttgaacggttcacgaactttgacaccacagaatagggaggctattcaaaaagggtataccatacttttgcagttagcagatttaaaaaaggatgatattactttttctattaatcctgatattaagtattcgtatgagtatgctttaggaatcaccaaaaagaatgataattttagtggcttttggaacttttattataaagccgtagtttattggtttttatttattttaatcccttttggcatacttaacggtttatctgaattaaggcaatatgaactgagaaataaaattagaaaaatgattgagccatattataagcataattaa

SEQ ID NO: 68235 - DNA, 255 bp, Acinetobacter baumannii; identical to SEQ ID NO: 44740

SEQ ID NO: 68236 - DNA, 606 bp, Acinetobacter baumannii; identical to SEQ ID NO: 53590

SEQ ID NO: 68237 - DNA, 606 bp, Acinetobacter baumannii; identical to SEQ ID NO: 53590

SEQ ID NO: 68238 - DNA, 606 bp, Acinetobacter baumannii; identical to SEQ ID NO: 53590

SEQ ID NO: 68239 - DNA, 171 bp, Acinetobacter baumannii; identical to SEQ ID NO: 51532

SEQ ID NO: 68240 - DNA, 216 bp, Acinetobacter baumannii
atgagtgagtttgagggtaaatctggaaagtgggcttgggagattcaaaaagaacaacaagcgaaagtggaggagcttaaaaaatcaataagtgaaatggctcagaggtacagagttgaggcacatgaattaagtcgtataagagattttgaaaagtctcagttgtatagccattttgctagggagttggaccatttgcttaaaggtggtgcttaa

SEQ ID NO: 68241 - DNA, 162 bp, Acinetobacter baumannii; identical to SEQ ID NO: 46251

SEQ ID NO: 68242 - DNA, 2301 bp, Acinetobacter baumannii
atgaataagcaaataattgagcaactgcttgaacaaaataaaattcaccaatgtattgaaactgctaaagaatatttaacagatcatcccagtgaccttgatatcctctacttgatttcaaaagcctattaccagcaagccgcggctcaaagacatcaacagatccatattgtcttaaaagataagattttccccaatctcaagaaaattataaatcaaaataataatgctactgtcatcaggacattgcttgactatctttttgactatgaaacatctctagacagtacctctcaacatctttcattacttaatcatggaagtgctgatgaatataaaaaactgatccagcaactttatcagcaggaaaatgaaaaagaagcagccctgcgtttttatctgttacttgccaagcaacagcagcaggtaaatgacttcttgaaatatcatgccgaatataccgaactgtatcaacagcggtatgcccataaccgtgaactgcgcgatatcatggtttcccagctctggctcgacaaagtgtatttcctggcatcacaacaacatcctgacttaatcatgcacatcgaaaacggtctcgatctgctgtctgttgaagatgaaaccgaatatttgcatttggcagaaattgcgtatgagcatcaggaaattaccctggcacaaaaaatactattaaaactgatcaaaggattaaattaccaacccgaagttccggccggattagtccgctggtatcaccgctttgaagaaatgattaaaaatggttataaccaccctgaagtgcgctattaccagattattattgagcggaactattatgaacaactcaataaaaccaaatcctcctactatcaacgctgtctaagcaccattgaaaaatatccggatgaagctgctgccttccattttgctggaacttatctgtatgaaaacgaacaatatcagcaagcacttacttatctggaaaaagctcaggccttagaaccggatgtagtgacctggcgtagatgggtgaaatcgaaatatctggctcaacaaccgatccatctggaagtacctgtattcagcaaggccctccccagagacctgtatgctacaggggtgagtctgaacgagttttatcaggagaattatcagttcgatgaggaaactacgacttactttcaccacttaaactgtgaagtttaccgtcagtcttatcacgcctttaaacaatattatgagcataatcagtatcagagcgatttctacggggactatcacgtttttgccatgtgctgtaacaactatgccattcagttgctgaatacggaacactatgatcaggcagcacagattgcaacagaagggttacagtattctgaatttatggagttacattttaaccggatctgggcttatcaatattctgaagattacccgcagatggaactggccttaacagaatattttgaaaaatatgatgaaagctgtgtgccgtttattgaacatcaggttcgagtagctgagcaggtggcctgtaaggcaaaattgggccgactcaacaatattcagcaagaggccgaaaaagtattattccggctctatgatcattatgcgaaaacacagcacatgaatgatcaagactatcgtaatcttcatgttgcagagggtgcagtagagaggctaatttatgaactctatgaaaatcaggatgcattgatccgcaaagactattatgaaagtgtcactgcacgttatccattagcctcacagccttattatgtcttaatgcaggtctataatgaattagaggattatgaaaaggtaaaccaatatgcttatcgctatttagagataaagcgcaattttatgatcgcaccacaagactgggacaaagcgatttatctgctcataaaaagtcactgcttacttgaacaacacgagcaagcgatccagttttatcaacaccatgcagccagaatagagcaggaatttgatccggataattttccgacgctcaaccaatacctcatacaaagctttctcaagctaggtgattttgcaatggtacatcagctggctgaacagtcccgaacaatttatgaagagcaagcatgggactatgatgacatcatggaaaaaatctatctgctcgaagctgaagcatactacaacagcggtcagatcaaacaggcgcaccaacatctagatcacatcctgtcatttagcgaccatacccctatagccgccgaatacaaaaagtcatggaaaaaacccgggttcttctccagatttttctaa

SEQ ID NO: 68243 - DNA, 3195 bp, Acinetobacter baumannii
gtggcacatcaacaaaactatgattggatcaaagcttttagcaaaattaaggaattggtgattggttatcgccgtgatcaaaaaggattgatcactattcttaaagacgctggtattgatgttccagatgatgaatatcctgaaaaaaacaaagtgccattagaacaaatagatcctttttcatttttatctttaattaataagcatccaaatgtttaccgtcgtgcagaatttgtaaataaaattctaggtcaaaatattttaaatatcgacatagagaatttttctggtgtgccaacatctcagggaacggctgctttattttttccttataaatatcaccgtaaagcggatgatgttaacttgctgtgggatctatttgaaagtatagatgatctatctaaaattacaccacagttgttccaagatattctttccatacattcggttggtttttcaaaacttacacaaggtttgttttggtatgctcctgatttatatcttccaatcgatgggcaaactgttccatatctatctgatataacttttcctcaagcttataaagtaaaaaataaaaagacttacagtgtcgcatggcaagaatataagacatgcttaaatcaggtaaagaaacaagattcgaagcctttttataagatttcatttgatgcatggcttcaaaatgggaagaaatactctgctcagcaagcgattcaatacttagaaaaaagatatgggaaaccaagtggttcaacacatattaagatttttaaaaatagccaaaatcgtgaaatggctttagatccaagcttacagagcgctaaggtttttgtagaatccatgccccaaattgatttttttagcaatattgatcgggtttatggcatagctgaaaagcgtaactatcatttggatacgtatggtgatcatctcggaataatgcatccagctgtacttattaaaaatctaaatgaggaactcttgggtctactttgtgattggtatgatctatcagagtctggacgtttgaaagaacggttgcagcaatttttatctgtctggcctttacaaagtatttctactttaaaatttaaagattattatcaattaaaacagtatgatagttttgctcgctggattgatttatttgatgtcagtatgggagctacatatggtaacaactttcatgtatggcgtcccttaaatgcaaaaaaagaaactcgagagcatacaatttaccaatatgaaaataaatatgcatgggaaaaagcatttgggaatacttttgatgaggcttttgaaactgtcaaaagaaaagtgaatgatatcgctcaattagctcgacaaggtgattttcagagtatagaagcaattgatctaaatgagtctttaaaatggaaagtagcatttgtctatcagaattttaatcttccaaaagtctatcctatttttagtaaagaagactttaaacgattaggttacaagagtgtggtaaattcatcttcatttacttatatggctgcttatggacagatagaatctgacagaaatgaaaaagaatattttgaatatgtggaacaattacacgagagaattttagaagtaagaactgatgaagtggataaaaaattagcagaaaaaagtaagtttgttgaaggggagaaagaggtgaataagaacgatcatgagttaaaccgtattctgtttggtgcagcaggtacaggaaaaacttaccatacgataaaccatgctttggctattctagaaaataaagaagttgatgaaattaatgcttatgaaaaagcacattatagaaaggacttaaaagatcttttcgaaaaacgaaaatcagaaggtcgtatagaatttgtgacctttcaccaaagttttagttatgaagatttcgtagagggcattcgtgctgaaactgaaaatgggaatatcaattacagcgtacaaccaggtatttttaaagtcatctgtgagcgtgctagagaaaataagaaagtcatgaaagacttaggtgtgcgtcctgatgccgctgtatggaagctttcaattggagatctatcaactcgacaatattgttttgataataatcagattcgagttggttggggacaaacaggagacttgtcgattgaagaaacgaaatatagcgatggatacacacagtttagtgcaactgatcatcatactttagagcaattcacaagtggagttgagattggtgatgttattgtttgcctaaaaactacaagtgaaatttgtgctgtaggtgttattacaggtgattatttctttgatgcagagcatccacgtcaagttagagaggactatctccactgccgaaatgtgaactggattttaaaagatttaactttcaacattcgtgacctcaatggtggcgttggacttactttaaaaacgatgtatcgcctatggcgttttacatggaatgatctattaaaagcattgaataaggaaggctatctattaagtaatgaactaagtgatccagaaccttatgtactcattattgatgaaatcaaccgagggaatatttctcgtatatttggggaacttattactttaattgaagattcgaagcgtgagggagcagacgagccactcagtgttaaacttccttattctaaaaaagaatttagtgttcctaaaaatctttatatcattggcacaatgaactcatcagaccgatctttaactggtttagatattgctttgcgacgtcgttttacctttatagaaatgctaccaaagcctgagttattaaaggatatcaaagtagaagatttgaaaattgataagctactgggaattattaatcaacgtatagaagtgcttttggatcgtgatcactgtcttggtcatgccaactttatgactttaaaagaaaaaccaacactgaagcatttggcatctatttttagacaaaaaattattccgcaacttcaggagtatttctttgatgattgggagaaaatcgatttagtactcaatcgaaatggaatgctagttaaagaaagtaacaaaaaaatttctgaattatttcctgcagatgtgttggaagggttaggttatctcaatcaaaaagagatttggaaaattgaccctgatgcattcaataagatagagaattataagtcaattctaggaatgcaggatgcttcctaa

SEQ ID NO: 68244 - DNA, 1305 bp, Acinetobacter baumannii
atgaaggacatcacagttcgagagtatgcatacctctgcgttgagtatacgaatcatccaaaaaatagcctcgagagtgcttatattagtcaaagtgcgtttgatgcgatttgtgatctatcagcaactttctcgaaacaaggtgttaaggtctttgagttggctggtcgtaagaggattaagttagatcaatatgtaggtattattgaaacagcatgtggaacacgcattgaaattttgccgaagcatattgttgtaggcgaagagcaaaaaatagaagacattattaaaaaagaaagactacttttacaggcgatgctccgtactgctttagatcttaattatcgtgaggcaggtgaggcatccttaaataattatgtccaacctttacatgagtggattatcaaaaaatttcttaaatgttttgagggactaatacagcttggtttaagatttgattataaccgtgtgcaagaagacaaaaaattcttacgcgggcaattgcagcacgctaaatatatgcgtcaaccgccatcacagcgtcacattttccctattgaacatgatgtttatgaggtcaatcgagctgaaaataggctgatccgtactgcattagagatagtctgcaaaaaaactaaagatggagcaaattggagattggcgcaagagctacgtttaatgacgggtgagattccaaaaagccaaaatattcaacatgattttaggcagtggcaatcaggaagattattagcattgtatgaacaaatcagaccttggactgagttgattctaggtgaatatatgccagtatctacgcatggaatagcgcgaggaatgagcttactatttcctatggaacgattatttgaagtttatgttggtcgtaaaattcaaagacttttgcctgaatggcatgtggctttacaaaagcaggatcgctacatgtgtgaacaaaatggacgatctatatttaagttgaaacctgatatttttatgcaagataaatcgggtcaaaaccttaagattgtggatactaaatggaaattattagatcaattagatcgaacattaaaatttggaatgaaggataatgatgtgcaacagatgtttgcatatagtgcttattacttagatcttaaacatgaagttgtaatggtttatccgacacgaaaaggcatatttgataaacccttacctataatgaaattcaaaaatggtacttcaatgttgaaggttataccatttgatctggatgaaagcctagaagggaagcatgcagagttcataaaacagttggtaggttag

SEQ ID NO: 68245 - DNA, 1587 bp, Acinetobacter baumannii
atgactttgttagacctgaaagatcttgaaacccatttgtgggaagcagcacatatcatcacaggtccgatagatgcttcagactataagacctatatttttcccatacttttctttaaacgtatttgtgatgtttatgatgaagagctagaagaggcaattaaagagataggtgatgaagagctcgctcgtgggtcaatgttccaccgtatcgatattccggaaggttgccattggtcagatgtgatcgcacatacacaagatgttggtaagcatttaagagaggctttcaataaaattgaacaggctaatgaaaatctttatggtatttttggtgatgcaagctggaccaataaagaacgtttatcagatgagttgttaattacgttattggggcattttaataagtatcaccttggtgttaatgacgttcgtaatgatgacatggggcgtgcatacgagtatctgatcaagcgttttgctgataaagctaataaaaaagcaggagaattctatacaccacgttcgattgtacgtttgttggtgaatattcttgatccaaagtcaggtgaaagcatatatgacccagcgtgtggtacgggtggtatgcttttggaaacgattcatcacgttgctgaaaatggtggtgatccacgttcattaatattgaaaggtcaagagaagaacctgacaactgaagctattgctcgtatgaacttgttcttacatggacaagaagacttccaaatagtacgtggtgatactttacttgagcctaaattcctgcaaaacgatcaacttgagcaatttgactgcgtgattgcaaacccaccatttagcttaaaagaatggggttataacaagtggtcatcagacccatatgcacgaaatgtctatgtggtagaagagctagatgaaagtagtgaagaccctgaaaaaaccaaattggtacgtaagactttcttagcgccaaaaacaaacggcgattttgcttggattcaacatatgttggcctcagtcaaagatgatggtcgaatggcagtggtattaccccacggcgtattgttccgaggtggttcagagctagaaattcgtaaacagcttttattatcgaaccagcttgaagcggtgattggtgtagcacaaaacctcttctatggaacaggtattgcagcctgtattttggtgctacgtaaagatagaacaccaatgcagttaaaagatggaacagtggtgaatgcaccggtgctattcatcaatgctgaagagatctttaccaaaggccgtgcgcaaaacatactgagcaatgagcaatctgatgaaatttatgatctttacattaaagctaaagaagagcatcaagagctaattggtcaatcacgttgggtgccatttgctgaaattgaagagaatgagttcaatttaaatattgctcgttatgtccaaaagcctttagaacaagagaccatgacactagagcaggctttaagtgatttcactactaaaatggcagatttagaaaaagctgagctagagttagaaacgttgttaaaagtccaaggttttaagatggagaatgtaggttaa

SEQ ID NO: 68246 - DNA, 1488 bp, Acinetobacter baumannii
atggcgaatgaaaatgcaaaattagaagacctactttggggtgcggctgaattcctgcgtgggcaaattgatgcttctgactataaacagtatgtatttccgcttttgttctttaagcgtttgtctgatgtatatgatgatgagcttgaagatgccaaaaaagaaatggatacagatgacctattcggtttcttacaatttcatcgttttgaaataccaagtgaagcaagctggaaaatagttaaagaaacgactcaagatattggtaaagccattcaaacagcattacgtaccattgaagcgaaaaatgagcgtttagctggcgtctttggtgatgctcagtggactaataaagaacgtctaccagaccatttacttaaagacctgattgggcactttagtaagattgatttgggtttacataaggtcaaacaagacgatcttggtcaggcctatgaatacctgattaagaaatttgcggatgattcaggccatacggcggcagaattctataccaaccgtactgtggtgcatttcatgacacggatcatggaattaaaaccaggtgaaaccgcttacgatccaacttgtggcaccggcgggatgttactcaatgctgtgatggatttgcgtgagaaaggtgaagaatggcgtagcgtgaagctctatggtcaggaagtaaatttactgacctcggcgattgcacgtatgaatatgttcttacatgacattgaagagtttgatatacgccgtggtgatactttaggtgagcctaagtttattgaaaatgatcagctcaaacagtttgatgtgattttagcaaacccgccgtattcgattaaaaaatgggatcgtaagaaattctcagcagatccctttcatcgcaatatgtatggtgtacccccacaaggctgtgccgattatggcttctatacacacatcattaagagtttaaagccagatacaggtcgtggtgcgatgttatggccacacggcgtattgttccgtgattctgagtttgaaattcgtaagcaagtgattgaatcagacattattgatgccgtgattggtttaggtccaaacttgttctataactcgccaatggagtcttgtattgttgttttgggaaccaataagcctaaagaacgaaagaataagattctgtttatcaatggtgtagagcatgtgacacgtgagcgtgcgcatagtcgtctttctgaaaaagacttagaagtattggtcaatgcttactttaagcctgaagaaagtgaaattgcacgtttggtggatttagatgaggttcgtcaaaacaaccataacctttctattcctttatatgtgtctttaaagaaagagcaagaaacggtatctatggatcagcttttggatgattgggtagataaccgtaaacagttaaaagatttggttgcaaatttgatgaaagatttaaaaaggttagatgttcaatcggtggagcaagatgtatga

SEQ ID NO: 68247 - DNA, 1137 bp, Acinetobacter baumannii
atgagtactgatttgaatatggaatatcaagaagtaaaatttggtgagattgccaatcatatttctaagcgtgttgagccaagtgaaacgaccttagaggtttatgtaggtttagaacatcttgatcctgatagtttgaagattactcgccacggtgtaccaagtgatgtggctggtcaaaaactgttggttaaaaaaggtcagatcatttttggtaagcgccgtgcgtatcagcgtaaggttgctgtggcagattgggattgtatttgttcagcacatgcgatggtacttgaagccattccgggaaaaattttgcctgactttttaccgttctttatgcagtctaatcagtttatggaaagagctgttgagatttccgaaggctcgttatctcctacgattaaatggaaaaatttagaacagcagtcttttattattcctaatctaggggaacaaagtaaggttattgatagagcattagcgatagataaagttagatttttaaatagaaaattacttgataaaaaagccgaaattattaacttattatttatctcagacaagtctcacagagctaaagtcaatttaggagctatttgtgaaattattagaggggcttctccaaggcctaaaggagatcctcgatactatggtggagacattcctcgtgtaatgactgcggatatgaatagagatgggaaggtggtcttcccttgtatcgattttttaacagaagagggcgctcaaaagagtcgaatgctacctaagggtagtttggtgatgatctgtagcggtggagttgatacggtaggacttccatcttttttgggagtagatgcttgtatacatgatggaatcataggcttatctaatttagatacaaaactttgcataccagaatttctctattattacttaaaaataaatcagtttaatctaaatgctaatgcgactcatggtggagtttttgttaatttaacaacggatattttgaagaagttttctctagatctacctagtttagatatccaagaaaaactagttaagaaagcaaatatgattgagcaaacatttagtctgctcgaaaaaaagttaaaaacccttgataagttgtatatgaataatttagtaaaatga

SEQ ID NO: 68248 - DNA, 3063 bp, Acinetobacter baumannii
atgtttaatgaatcaaatggaccagaagaagcaattgtccaaaaactacaaaatttaaatggggtaaaatgggaatttgtatcgggggatgcaattcctaaaactcctcaggatgtcttggtgggcgcttggttcaaacaggcattgattaaactcaaccctgcaatccaagccaatccagactatgcggatgaagtgatctataagcttcgtgcggtattcttagacgcaaaacatacaggtttagtgaaagcgaatgaaaacttctatgagtggttaaaagcagagaagtctttaccttttggtgtgaatggagagcatgtcaccattcacatgattgactacaacaatcttgaaaacaaccattatgtagtatcaaaacaggtccattttattgcagccacagaagcgtatttcgacattgtcttatacgtaaacggtataccgcttgtcgtcggtgaaatgaagacggcaactcgtcctgcaataagttgggaagacggtgctgctgatttctgtggcggaacaaaaaattattggaataatgttgctcctttttttgtacctaacttactgtgctttgcttcagaagggaaaacatttgcctacggcgcaatcaacgcacgcctaaaagattggggcccatggtataaaacagaacagcgagatgaaattttaccgggaatggcatcagttcttgaaagtgcagcaggtttactcaatccggatacacttttaaagctactacaatcattcactctatattcatcggtgaaaatcggtcagaacttagcaccgacaaaaattaagattctgccacgttacccacagtttgaagcagcctcacaaattgtagaccgtgtaaaagctggctatccaaagaaaggattgatttggcacttccaaggttcaggtaagtctttactcatgttgtatgcagcacaaatgttacgtgcagacatgaagctcaagaatccaacagtcttggtggttgtagaccgtaaagacttagatggtcagattaacgatacctttggtggtgcagatattaagaaccttgtacctgttcaaagctgtaaaaaacttggacagcatattgaacaagacagtcgtggcattctcatcacaactatctttaaattccaagatgttgatattgagcaagacaatgcaaaaggcttaaatgaccgaagtaatattattgtccttgtggatgaagcacaccgtactcaagagggttcattgggcgagaaaatgcgttgggccttaccaaatgcattcttctttggtttaacaggtacaccaatttcaacattagaaaaaaatacgttcaaactttttggtgctgaggaagacgaaggacgctatatgaataaatatagctataaacagtctattcgtgacgctgcaactaatcctgtaaagtttgaacctcgcttggctgagctccgtgtagatcgtgaaacgatagatgctgagtttgagaaattagccaaagaaaatgatttaagtgaagaacaaaaagcacaactttcacgccgtgcgggtaagttagcgctcatgctgaaagcacctaaacgcatggcacgtattagtgaagatattgttgagcactttaactcacatgtcaaaccaaaaaagcttaaagcgatggtcgtggtctatgatcgtgatgcgtgtgtgcaaatgtactacttactgaaagagaaactcggtaaggatagtattgaagtcattatgaatgtagaccgtgccccaattgaagtgactgatggaaataagaacggaaagcttaataaagattggcgccgttggaaagaagagctcaagttaccaattgaaaaagatgatttcgaacgttggcaaaaaattgatgctgatagtcaaacgcaaaaagatattttagaaggatacaaagattcagagaatcctttacaaatcattattgtgacagcgaaattgcttactggttttgatgcaccaatctgctattgcatgtatttagataaacctcttcgagatcatactttgcttcaggcaatgtgccgaacaaatcgtttgtatgagaaagatggtgttaaaaaagaaatgggcttgattgtcgattatcttggtgtatttgaaaatttacgtaccgcacttgcatatgatcctgaagatattgataaagtcgttgaagccattgagagttttaaagagctatttgagcctgccttgcaaaaatgtctagatttctttccaggagtagatcgtacagtcgaaggctttgaagggattatggcagcacaggaatgcctaccaacaaatgaaaaacgagataactttgctcgtgcatttggtgtggtaaataaactctggacggcaatttatccagataattttttaaatccatatcgacaagattttaaatggcttgcacagatttatgaaagtattcgtcctgcaactggtacaggctcattaatttgggctgcactaggaccacaagtgatacagatgatccatgaaaatacggatgtaaatcgtattcgtgatgatattagctcactgaccatggatgaacatgcaatctttacacttactgaaaaagagcaagaacgtaaagcacgacaactagaaatcaatttgcttggacgtttacgtgggcatgatgatcctcgctttgtgaaactcggagaacgtttagaaaaacttcgtcaagactatgagtcaggtgtaattaaagcgattgattggttaaaaggtttgcttgaaaccgctaaagaaactgttcaggctgaacgtgagacaggagatacgccagtaactgagcttgataacaaaaaggctctaacgaagctttttattgaaacgcgaccagaaaagacaccagatattatccgtcagatcgtagagcaaatcgatgaaattgtaaaagttacaagatttgatggttggcaaacttcagtaagtggtccacgtgaggttcaaaaagcattgatcattacgttgaataagtttggtttaggaaaggataaagagctttttgataaatcttatgggtacatcaaggagcattattga

SEQ ID NO: 68249 - DNA, 1617 bp, Acinetobacter baumannii
atgaattttatagtcattggaaatagagagtggtttaagtctgaaggtaagaatgttacttatttaaaaattgattattgggatgactatgatttttgtactcaattttctgtaaagctatttgatgataagggagttggggttgaattaggtgatgtgaaaattggatatcaaggtcagcctaaggacactgattttccaacctataaaaagttagatcagcattttcaaggcttagatgatagttttttctcactcggtcaaagtgttgaatattataaaaagcttaatgatgtttctgaattcagtagaaaagaatatttggaagcacttaatgatttagttcagcaacctaatttgattgatattatttctaaagaggaagtctttaggcattcacttattcgagatgtcagtttaactgcaataaaaggccaatttaaaaatgtcctagaaggtggtaatgaattaacaccttttaattttaaatttaaaagtcttgatacagagagagttggagggattgaactaaaatttgatgtggaagttggttctaagccatctactaatctgcatgcaattataggtaggaatggtgttggtaagactactcttatcaatagtatgatagccagcatcatgaatagcgatgcagataatacagctaatttttatgatctaagccgatacagtgaaaaagttattagtaaagattattttagtgcattatttttagtttcgtttagcgcatttgatacttttaaaccgcctcttgagcaaaatgatccaactaaaggaacttgtttttactacttaggtttgaggaatcttgacgataacgatagtttaaaaaactttagtgaacttaggggaaattgtctgatatctctaatcaattgttttaataacaaaaaaaagaggagaagatggataaatgcaatagataagcttggtactgactcaaatttttttatgatgaatcttaaagagttgttgactatatatagggatactgtgaaagaagtatctgaattattcaaactagattcaaataatacagagaataaaaaaaataaaagcgaatatataaagaacaaatttggaaattttttgatctcatatctatctagaatgagctctggtcacgcaatagtttttatgacaattacgagattagttgaaaaggttgatgaaaaaactttaattcttttcgatgagccagaaactcatttacatccacctttattgtcagctttgataagagcattatcagacttattagtgaattgtaatgctgtatcaattattgctactcactctcctgtagttcttcaggaagtacctcgtgattgtgtttggaaattatttagacgagggaaaagtatggagttttctagaccgaaaatagaaacttttggtgagagtgtaagtgatttaacgactgaagtttttggattagaagttacaaattcaggttttcatgatttactacaaaactctgtaagtgaagggaaaaattatcaacagatattagaggagtttaatcatcaaattggttttgaaggtagggccttactgaaagtaatgattactgaaagagataaggataatcaataa

SEQ ID NO: 68250 - DNA, 867 bp, Acinetobacter baumannii
atgaaaagattaactacacctaatcataactatagtgatttgattgatttatgtattgaaggaattgctgatactcaagccatgaagcctagaattattgcgaataaacaaaatctacttttagatgcgagtgtatacgatactaaaattaatcagggagaaatttatacatatactccattaattagatttcatgatggagtatgcattagaagtactaaagacgattatgaaaagctatacacgcaatactttgtacctaaagccaaaaaaactagagtgatctacgatgcaatattaacatcagcgaaaggtgagtgtcctttttgtggtggtttaggtgatccttcaaatttggatcattttttacctaaagcggagtttcctcaatttagtatttatccttcaaatttagtaccgtcatgtcgagattgtaatatgggggaaaagaaagttggatatgcaaaatctgctgaagagcaaacgatacatccttatttagataaacaaattttttttgaggaacagtggattacatctgattacattgctgattcaaatttagatgaacctggtgagtttaaatattatgtgaacacaccaagtcattgggatgatgtggataacaaaagagctgagaagtattttaatgattttaatctatcaagtagatatgctaaacaagctacgtcttctctgaaatctaaattaagatcaattaaacgtgaattagatagagggatcagcattgaagaaattattactgatgtgattcagcctgatattgatgatgcaccttttgtaaattattgggaagttgggatgtgtgatggtctaattcgccatttaaataaaatgaatttataa

SEQ ID NO: 68251 - DNA, 852 bp, Acinetobacter baumannii
atgcgccagatagatagaactctagttaatcacccttacaatcttttaaatttaacagccgaacaaatggctcatctaacaaaccataaaaatatccgttctgctatttatgcccatgaaaatgttaaacaagctctgaaatctatataccatgaaaagtgttatatatgcgagtgctatgtcggtgataattatgccgttgaacattatctacctaaacagtatttctcacatcttggttatacatgggataatttacataaagtttgcgatcaatgtaatttagctaaagaaagtgatcaattctttattaaagatcaatctgataatatcgtagacatactacttttggatccatcaaatccttcctataatatttcagactatctaagttttaatttagatggtgaagctattttagttagctatggtgtagatcaaagcatacgtcgaaaagctgaacacactgtaaattatctgaatggaaatttaagaaaagctcaaggtaaaccttttgaacatgcatcaaaattaaatcatcttagatcatcacgtattggagcttttgaaagatttttacgtgaaaccaatttaatgatataccgacaaaatattttaagtattaattctacaataagcacttatcaagctcaaaataatacagaaaagcaacaattagacttagacacatatcattttcttgcaaatctttttaaaaactttcttaatgatgagtgtgtatactgctctaccttaagagattattgttttacagtatttagaattaaattcaaaaatttaaaaataattcttgaacacttaagaaacatatatagattaccagactattaa

SEQ ID NO: 68252 - DNA, 1344 bp, Acinetobacter baumannii
atgacaatcaaatcaatcaagattaataattttaaaagtatatctaacctagatttaactattgataaaaatcaaaaagttatatgctttgttggtgaaaatggcagttcaaaaacctctcttcttagtctaattgttgatactattattaccaatcaatctatttcatttccagactatgatcctaataatgggaaacgttttagatcaattagccaacaggaaattggagaaattacagatcgttatcaatttaaattagaatatatatctaatgaacaacatataatcaactataatagaatagtctttgataaatataagaccgccgaaaactctgaaatatttcaaaattcagatgatattcttattttagaaaataatttccatggtgaaaaaaatacacctaacctaaataagtcaaaccattacttccttgaaaatatttttctatttagaccaagttatcgttatgaatctgatgcattagaaataacttctacagatgaaaactttcattttcaagtatctacaaaagctaaagctgatgtagattatccattcccatttaagatcgctcactctggatataatattgaaaatcttataattgagttattcctagacatgcatataggatatcaagattcaggaagtgcattttctattatacctaaaattttaaataaaataactaataaagattatgggaattttcaaatatcgcgtcatccctatcgtagactatggtcatctactaaaggtatggtaacctctttatctcaaggagaattagatttattagtaacgatatcttcaataatagcacgccaattacacatatataatcaaaatcctattatgaaaaataaatatgataattttcgggatattccaggccttgttattattgatgaagtagatttacacttacatcccagagctcaagagacttatatagaaacacttacctctatgtttaaaaatgtacagtttctagtaactacacatagtccatttgtaattagaggacttcctgaagactccatcgttattcaactacccacaggaattactataaaagaaagtttttctatgatggatattgatagtataacaaattttatttttaattatgatggtagattttctattgaagtagaaaatgatttaaaaatatttaaaaaaatgattagccaattcaatcagcaagataacaacttacactatttatctaatatgtataaaaaatacagatcatctccatcaataattaatgaattagatacttatctttccatattctcatctccagattttacaataaaaataactggagaataa

SEQ ID NO: 68253 - DNA, 432 bp, Acinetobacter baumannii
gtgttctctatttcatatttactaacatcaaaaagacaaactcacattgccttggtcggtccagcgtggttcaatgaaaatttattgatccatcgaacaaatgtgctattcaaacagctacaaagttttgaaactcatatgttgaataatgctgatcgtattattgtttttagtactttattgatctatcaacatgaagcctatatgcgtgcttatcatctgaaccaatggatcttacataagttgcaaaaaggtaatgaaatggaaaaagttcaagctggttgggtggctattggtgaatcaagtaattttatagcagttgatctacagtcaaaaattaatgagattaatcgtcaattagatatttatagagaacttgctaaacccggttcagcacagcctaatctttctcatcagcttaaacctgcttga

SEQ ID NO: 68254 - DNA, 1068 bp, Acinetobacter baumannii
atgatgagtatatcggatcgaatccagcaaagtcagtgggtgcccttgttgcgtgatagcgacaatatttattttgcgccagtcattcctaataaaaagttgcaaggtgccatgacttatcttcctcatggtgtcagtcccaacgatgtattgatgttaattgatgacaccgtgtttggcagcgccaaggctggcatgtgcctcacggcaaaggggatattttacaaagctagctttgaagatgaacaagcctatctgtttgagcatatccagcgcgtagaggctgatattggaatactcactagttccattctgatcaacggtcaggatgaattgaactttactcaactggataaaggtgttgtaagaaccctagtcgcattcttaaatgaatgttgtcagggtagacaaggcactcatcagaaggttgtaaaaattgacgctgagatgcagatcatgattgatctgtttgcctattttattacgtacagtacgggccaatggaatgcccgatcgaaagaagctgtatccgatcatttcactaaattgaatgatgaggctgtgcatcagtatgtcgaaaaagtactgagtgaacagatgagcttcgaatatgacgacttgttgcatcgtctggcagatatgaaggataagcttgcctataacttccgtagggaaatgattgagcaactggtctatgccatggcactcggtcaaattgagcagaatcaggctgatctttttatgactcatttatgccgtgtaactaacgtgtctagggcagtctttccagacctcgtcaaaattatctatcagtgtctgactggtgaaatgaatcagaataaagtttctgatctgaatcatgaacaactacaggcatgccaactttttgagattcagcccgaactattgagtgagcaaacactgcaagctgcttaccgaaaaaagatggctgagttccaccccgataaataccagagcttacctgagtcagtacagcagcttattgagcaacaagcccagcaattcaaccaagccagagctgtattaaaagcctatttgggagtctag

SEQ ID NO: 68255 - DNA, 1422 bp, Acinetobacter baumannii
atgaaatcatatatttataatttacaattgtttttattttttaaacaaatttttcaaataataaaaaataattttttaaatacagatgtaatacttattatttttcttatgactattccacaattttttttcatttttgtagattattttttagatgctaatcgttactattttgttgttgagtattatttttgtatattatttttcttttttaaaagtatatatttaagagtcattggaatatttttatatatatttgtttttatttttgatatttataattggattaaacagttttttaattttataagatttgaagatcttatatatttgactaaatttgcaaatcaagctcctagtatttaccttttttatatttttttgttatttgtagttcttcttactaacgttatcttagtcagcttaatttcagttaaattaaggagtaaacgttctttattttgttttttattctttggtatcgttttttactttttctatgattatcgtggggcagatgtatctacacataggagcacaattggttattggggaagtttaattgaatataatgataatttaaaatataactattatgttagattatacaattctaagaataattcattctctaaatcaaaatatcctagtatattaaatgagtatatctctcatagtgataagaatgtactttttattttaaatgaatcatggggaagttttgataaaaagataaataattatattttagagagtatctataaggaaaaaaattattttaaaaaaattaactatgggcaatcagattttgaaggagtaactgtacagggcgagttgagggagttatgtcaattaacatcgactaaattaaattttaaggatgatattgatgaaaattttgataattgtttacctaataagttgttggaaagaggctatgtgacgaatagttttcacgttgctagtggatttatgtacgatagattattttggtactcaaaagcaggtcttaagaatagtattttctttgagaatatggaaaataaagaaagatgccattcttttaatgggggatgtgataaaaatataattgattctgtttttaatagttttaataatagacataaaccagtatttacatattggttaactctaaatacacattatccatatgatctagcagatttggaggggacgagtgtaaagtgtgaaattttagggttatatgaagaatcagaggtttgtagaaatgttaaattacataaacaattctttgatagattaatggaaaaaattataaaagataaaattaataatattacgatcattattgttggtgaccatatgcctcctataataaatagttcagataaggatatggtgaatcaggggaaagtctcttggctttatcttgaattgtag

SEQ ID NO: 68256 - DNA, 153 bp, Acinetobacter baumannii
atggaaatgtggaaaggttggcaatttttagagtttgcccctagtgagatgaaaaaaggaaataatttcatcacacctcaaggactgttaaagaaaaagaaatatggtgcgcggcatcgtataaaacaggaaggtcacgatgactacacttaa

SEQ ID NO: 68257 - DNA, 171 bp, Acinetobacter baumannii
atgaagaaaccaggtcgttttttagcaccgattgtcattgcgggaattaccgtaggttttttagcaagtgcttataaatttgtatttaacaaatctaattcatcaaaacagacaacaactcatacgcgtaattctgaaaaatcgtcaaatgattcgaaagcctcaaattag

SEQ ID NO: 68258 - DNA, 570 bp, Acinetobacter baumannii
gtgatttataaacttaaaatgtggatctctagggaagtggttgatccatttttttcattatattcgtatatttataaaaattttgttcttgtcctttccttaagtttgtgtgtgattgtactgctttgtgctcttaacccaagtatagtttttactcctagaaaagagagttttgttatttatgagcctgaatttcattttaaaaatagacgtataaggtcgttagtcgtagaaagagataatgaaaattttcttattaattgtgcatattttagaaatgaaaatggttcattttgtgacttatataaacctagaagattgcttaaattagaaggaagtttttttccttatccttcaatattccttgatggtaataaaattgtagctagtaatgttcgttttgaagatgaaaaggggagagtaattaatttttcaacaagtgacgaggaagttgcttcttggtggatttgggttatgttccccaccttattgatgaggtatttaattttaatttggttagtggtggttgtttcaatattatgtttaaaattagttaagcataagaaataa

SEQ ID NO: 68259 - DNA, 327 bp, Acinetobacter baumannii
atgaatggtttttggcgaattttttgtatattacatatatttttaggcatagcttcaatattttttttctttttattggtattttatccaattatattgggcataaatctagctttaactggacttatttatataatttttatgtttataaaaaaatataaagttaatgatttttttaatactattttatctttaacatttgcaatttctttaagctttttagtaagtcttatttttttgagtttggaaaatgcttttggagtcatgttatatacttcaatttatttagggcttcaattttttttaaaaggattggtcgaagactaa

SEQ ID NO: 68260 - DNA, 645 bp, Acinetobacter baumannii
atgatttatgctggactggatacatttattgaaatgtcatctggcaaccctcgtaacttactaagtattttaggtgcagcatatgatttggcgaggtttaaaaatatagattttatcaatggaaaaccattatctatagaagaccaaagtaaagctgttttagattcagcgagatttatatttgaacaagattcaaattttggcagaccttcagatcttgctagagatgctgtaaaaaatttatgtgaattactacgtgtagctagatttgctttaaacattccagaagtttccccactactaattagtttttcagatgaaggattaacaaaacaatctaaagaaactttgcaaagtgcactaaattattcatttatatttgaaataaaaaatggacgaccaaatagaaataatttaaaaattaatcgaaaattctctctcaatccaatgatttcacctatatatggtcttccaattagtaaacgtggtgatattggactaccaccaaacttagtaaatgctatttttgattttaatcgggctaaggaatttgaagctttattaaaaaattatattatcaaatggaatcaaccatttactagagatgaatcatctttggcacatgacgatctttttaatttttaa

SEQ ID NO: 68261 - DNA, 960 bp, Acinetobacter baumannii
atgattgattattctattttttatactcgctcaattgaatatacaaaaatttcggatagccttcctaattttgatatttttatctctgctttcaatgatagtgaaagagttaaaacattatttgaatctataaactcttccagaaaattttggctagttcatccagaatacaattttagtaaagaagaaatacctcaacaagaaacaaatgaagtagttatcccatctgatatcactgatattgtgcaagttaatgaattactgtcccgaattggggatttaaacaataaaaaaatctgtatagatattactggctttatgcgtcatgttttaatttttttagtagcttctttaaaatataaaggtgtagataaatttacagctatttattctgaaccaatgttttattccaatggtgataatacagattttagtactacaacttcatcaattgtaaaatcagttagtggaatttcttctacctcaaactctgaatttaaagaccatctaattattaatgttggctatgaccacaaaatgctatcacaaatatcttcttataaagatggcgccacttatcaccctttattctcatttccatcattaagtgcagacatgtatcaacaaagttctatgagagcagctttaagtggaagtattactcaaaattctgattggataactaaaagaaaattctcacctgctaacaatccatttgctacggctcaagttattagtgacttaattaaagaattagacttaaattttgatgggaaaaataatatatatttagctcctctttcgacaaaagctcaaactttaggttttgctatttattgggcattagaaggtaatgacaggggagtaactattttattaccagaatgtttaagctattcacgtgaaacttctcaaggattaagaagattatggtcttacgaagttgaactcaggctttag

SEQ ID NO: 68262 - DNA, 771 bp, Acinetobacter baumannii
atgaaccctatacaaactaacaaattaacttttttagaaagctttactaattttgtctcggcaaattggttcagtattttttcatgggtcttcggtattgctttggcaatatttctttattatcttcaaaataaacgtgcaaattcagcttatttagaacaaatcaagcaagccaaaaaagaaatcattgataatttagaaggttacataattaatgaattagaagtaactaagtcgttgatagagaattttaaagctggaacagaaagaaattatcaaattattttagatcgcaattggacttccatagaaatattgcaagacattagttttagattgcaaacaagtagacatctttctgttatccaaaaaatgaaatactccagaactttggatgatttaatatcttcttttagactaaatgatgccattgaaagtttatcaaagaaaatcaaagaaaatcctgagataaatatcaaaaaacaaattattgatttattaataacacaagaacaggatcgatacgataattatcaacaaaataggaaaaaggaaagacagtttgaaatgattatttcctccgtttctgtttcatttatactcaccatggtagtttttaaaataaatgaatcaaaggtaatagatgagatcgctcaacaaactgttaaaaatatttctgatatctcttccctatcttttttactcttattaagctttatcataattttaacaacttgtttcgctctacttttaaaaattaaaaagaaataa

SEQ ID NO: 68263 - DNA, 900 bp, Acinetobacter baumannii
atggatgaacaaaaaaattcttttagttttagaaaattaccttggggatggattctgttagggattaccttatggtttttattcccttggatattttctgttttctttaatttaattattaaaaatccaaaggaatatggtgaaagctttggtgcagtgggcgatatatttggaagtctaaatgctcttatttcatcaattgcattgtgcgcagtcgcttattcaacttggttacaagtaacttcattaaaagaaacacgtgaagtaaatgccaagcaattaacccttgctaagcaagcccatgatgaacagatcattgaatctcaaaatgcaatttttgctactaaattttattctttattaaattttaagaaagataaattaaatactattagcatacaaagaaaagtccgttttggagacacagaatttagatcaattcaagaatctggtatacaagccatggatgagttggcaataaaattctgtaaattacttaaagaaaataataagttatatagtggttttgataaaaccgaattgtttgaagatttccgaaagagatgtagagaacttaattatggacaagtctctgtactgctttcttatttccatatttatacagatttatgccgactaattaaaatatcaagtatttctgaagaagataggtggttttataaaagtatactttctaattctatgacgcaaagtgaacaaatattactattttggataagtccaatgtttggcgtcattgatattgaggattcggaaatatttacattgtttgtatattcagaaatatttaaagagttcgctctcgaatttcatgagagtagccattttaaatctaataaatggaaagatgcctttgctaaagttgaaaacccggcctaa

SEQ ID NO: 68264 - DNA, 1044 bp, Acinetobacter baumannii
atgaagttaacacattttattattcatgaaattgagaaaaacaatgaaaaacaaaactcaactgatttgatgcctaaactaattttggattctgatcaagagtttccattggatagaccagcatcgattacattctccacaagacttagaactaaatatactacttctatcagcggttatggctgtatagataagtcagaaaactctatttttcagctacagttacaagattatcgagatggtaaaatcgattttattaaattgtcgaagctacatgttgaaagactaatgacagcattgtctgaaggacaacaattaaagtgggcgacaggtggtttaatagtttttcttgaatatctagaagcaggtaatacttatttacttattactatgattaaagaaaaaacagcaataacatttgatcgtgataattttaaccttgaagaattgctgtcaattgatatggaaaaaattcatgagggagcacgaattgatattaaaaaatgggaaaatgatcaagaaccgtatgtatcttttataaaaaaatctagcaaagatgtatcagattattttagagattcgataaactgtgataactatactagttcaacaaaatatacgaaagcagtatttgatgcgttaaaaggttatagtactgatcaagaatgggatgatgaaactaaaaaggctaaaaaacaattattacaagatcattttgttgatgcaattaataagaagactgataatggcgagccaattgtatatttaaaagaaatatcagttattttaaatcaagaggaacctgaaagtttctatacttatatacgtcaatcaaatatcgaaataagtgatgagtttcaacctgatcgcgccacagtccgtcgttggaaacgtgttactgtcaaaagcggtactatcaatgttacctttgatgtggcagactacgaaagtggtaatatagtactcactgatgatggtaattttgtgatttccaatgttagtgaaaaggctaaaaaacaataccttgaaggaattaaaccttaa

SEQ ID NO: 68265 - DNA, 1164 bp, Acinetobacter baumannii
atggctcaatcaaagacagcggatgaaaagttagatttcgtcgttaatttattaacgacgttagatgacgtttgctttgatgataagtctaattgtattcaggggagcttgggaaagcgatccattttaagttttgatgaaatcgagaaacagcttgagtcatttgatattgatacttctgataatgactcaattagaaatatattagtaataccattaacctctacgaatatttattttgatattaatcattatttgaaaaaggatagtcgtagacttgatgcgtctcctacacaatcattttatatttatgatcattctgtgaaatttattccagagacggattgtagtaataatgaaataaataatatctttgtagttgcaaacttattttcaaatctgaaattaatttctgatttacatggtgacgcaggtaataagtcatttattatttttgttggtaagaaaaacttgaaaataaactcagagtatattgctgaggatctaaaacgggacttaattttagtaaaaagttttatccgagagtatattcaaaatgattttcatcaagaagatagacacttatctgtaattaatggtttacatgaagcttttaaagaaagtgaaatttcattatctacatttctgaaaggctttgagacttttcatagagtggttaaaagtaacttccaattgtatatggataagttctcgtttgatgactttaagaataaagttgaagaggaccgtagagaatatacaattaaaattaataaagttttctctgatatgcagaatcaattacttactctaccaatagcaacagtgcttgctgctggtcagatggtgtatgtcactactgcaggagatttcattaaaaatattttgattgtcatcggaattggaattttctgtatttttgtattgatgcaaatttcaaatcaaaatagtactttgactgcattagatgatgagataaatcttagaaaaagtgaaatggaaaaaaaagaagagtcaaattacaaaactgaatatcttggagcttatacgcaattagatacaagaataggtaagttgaatgacaatttgtctttagtaaggaatataactcttgtcgtaacaacattagtatttctagtttttcttacacgctttttcctttga

SEQ ID NO: 68266 - DNA, 342 bp, Acinetobacter baumannii
atgaatcaaattgatcaagcgattaaccaagaacaaatcaaaaacccaaatgaagaagtagtgactttagaagaaccgattcaaatgggtgaacaaatgattacccaagtcaccattcgtaaacctggtgtaaaagccttatcaggcacttccttgaaagatatttacaaccatgatgtggacgcgctttgccgtgtacttccccgcgtaacttctccagcattaacaccacaacaaattgtcatgatggatcctgtcgacttcgcacaacttggaggacatttagtcacttttttgtaccccaaagaactgcagaagattctgaaagaacagacgatgtaa

SEQ ID NO: 68267 - DNA, 516 bp, Acinetobacter baumannii
atggctttaccaagcaaactaaaaaacatgaattacttcaatgaaggtaatagttatttaggtcaaatcaaaacggttactttgccaaaattaactcgtaaaactgaagattaccgtggtgggggtatgaatgctcctgtcaaggttgatcttggttttggcgatgatggtcttgtcattgaatcaacttttggtggtctagaactgcttactctacgtcaatttggcatggaaaaaattgatggtgtgtatacgcgttttgctggtgcatatcaacgtgatgacactggtgaagttgatgccgtagaagtagttgttaaaggccgtcatgaagaaattgatatgggcgaccaagaaccaggtgaagacactgagcacaaagtcgtaaccaactgcacctattacaaacttactgtcaacggtgttgttgaaattgaaatcgacattttaggcttcaaagaaaccatcggtggtgttgaccgccttgaaaaacagcgtagtgctatcggtttataa

SEQ ID NO: 68268 - DNA, 1674 bp, Acinetobacter baumannii
atggctggtgaactttattattcagtttttacagagcaaggtttgtcccttttgcgccaagcaattcaaaatggaactaagctcggtattacagatatgtcatttggtgatggtggcggatcactacctgtaccagattcttcatttactcatttagttaatgaagtttttaaaacacagcttaactctttggcaccagatccaaataatggtaattggttacgtgctgaagccattattgctagtgctattggtggtttcaatatccgtgaattaggactttgggctggggatgttcttgttgcttattcgaattatccaccaacatataaacctaatccaaatgatggcacagccagaattatgacatttcgcatggtaattcagattgataatactgctaattttgaattagtgattgatccagatattgttctagcaactgtacaagcggttaataatgctaaagttgaagtacttgaaagtactgttccaataaaaaaagattttcccaaagttttagctgaaagaagtattagatttgatcttattcattcaaaaggtgcattacgttatggcttaaatgatcaggtacctttagatgatatggtaaagaatcatttccgaggtctaaaaaacaaagatgcgtgggccgaagaaaatattggtatcggatcagcttcatttggtcggaatggatgctcaccagcttatctttctaatacttttggtcatgatgcagtttcatatggtgtcgcatctttggctggcggagctggagcctgtacaggtaatccagatgtaccaaaggatggtactaattatggttactgttcatttgcctatggtaaaaatactaaagcccaaggtcgtataagtaatgcaatgggtgaagaatgtgagtcgaatagccgttatgcttctactgatggttataaatgtatagctggtaaatcagaaccagaccatcctgattatacaaatgaaggatcagagggtgcagctgcaagagcacatggctttagatcagaggcatacggaaattttgcgttctcttatggatctttcttgatagctttcaatggttcgcaggttatcgggaaaggaataaatgaaggttcgccacttgctaccagtaaacgagggttaggtcttggttataacgtagatattccaactatcttttgtcaagaagggccgggcgaaaatggggcgcatgcatgggttggattcaatactgatacacccatgaataagtatgattttcgtctggaaaaatctgatactgtcgttcatgttattgatgctcagggtagtgactctactctagccgcattcgaagtaaaaggtttgatgggtgataatacttataaaagcctccataaggttatcattacacatcctaattctggtcaaccatatggtaatgcaacatattatttaaataataagccctatttaatcgttagtcaggagctcaaggcaacttttaaaggtgcagttgaagctgctggcgctggttttctggttgaaggtaaacgtgtggttggagggcaactcccatcaatagcagacctagctcctaatgcaaccccttcagaaattattgaaaaagttaatgcaatcttggctgcacttagagatggcacaggacatggcttaattgcaaaataa

SEQ ID NO: 68269 - DNA, 609 bp, Acinetobacter baumannii
atgaacttacttcctccaaacacgactgcttttgaaaagaaaattgttgaaaccacagctaaaacaacagagctaaatactaacttatcaagcctaattcgatttgatgaagctccttcagatttcttatctattttagcttggcaattttctgtggatcgttggcaagatgattggccagacgagattaaacgtgcacaaatcaagaattcaataaaagtacatacttacaaaggtactaatttcgcacttcgatcaatagtagaaagttttggctattcagtgactgttcatgaatggtggcaagaaagtccaaagaatgagcctggtaccttccaaataacaattgatacaaatggaatacctttatctgaacgtgatgaaaaaactctggttgaccttcttaaagatgccaaacctttgactagggaattaaaagctattgaaaccaatgttttaaatataaatggtgaaacaaatatcgcatgtgcaatgtatgacggtgaagaagtaactatttacccaaaacaagatgaattaaccccttcaatttatccaatttttgctcattacgggcatgacgaaacaacaatatatccgagatcataa

SEQ ID NO: 68270 - DNA, 1002 bp, Acinetobacter baumannii
atgtttttgctgccaattttttttagcatctattatttttgggatcactatcctgaaaaattaatggaaaaagatactcaagttgagatggcaaaaaaccagaattctgaaatatttaactggccattatcaacatcaatagtatactcaacatctcaaaatgctgaagaagaaccaaaaactaaatttcagaaaattggtgaaaagtatggtacttatggtgactcgtatggatcattaaataccttattcacaggtcttgcatttgcaggattaatcatttctatttttattcaacttttagagcttagacaaacaagaaaggaacttgcagaacaaagtaaagctatggttgatcaaaaaactgagtttgcagcacaaacaaagattttggaaaagcaaaccagtatcagtgctgaccaacaaaaaatcataaatgatcaatttattgaaactcaaaaggtcaattttttaaatcacttttataaactaattgatgaaaaaaataatttaatgaataatctttcactccaagaagaagacaaaatattgactggccattctgttttttcgatatttactaatgaatttattaaaatttcagaaaattttgaccctgacacacacaacgatgaatatttcttattatgttttaatgaatttttagttttaaaatacggaaattttaattatcaattaactacatattataaaatttatagagttattcttcatacaatttataattctacttttctaacagaagctgaaagaaaatattatgttgatgtatttaaaatgtttattagccttgaggaagttacggtattaatgtggattagcattaatgataaaaacctgaattttctttgcaataacttctcacttttaaaaggtttatatcatgaaaatttagaaaaagcaggtgtctatttttttaagtatagtgctttcaaaacatctacatgggaaaatgtatttataaaatataaaaaaatttag

SEQ ID NO: 68271 - DNA, 126 bp, Acinetobacter baumannii
atgaatgttaatgcagagttggatttaaatataattgtaaataaattgattggtaatgcttatggtgttttttttctttgtttaatcggtatttttataatagtggagagcatttttggaatataa

SEQ ID NO: 68272 - DNA, 810 bp, Acinetobacter baumannii
atgaatgagccagctataaattatataaaagaagatattcaatatcataataatgttgagaaacttcaaaaatatttaaattttaaacatacagatatagatttgctatgttatattatttcttgtagaaataaaaaggcagcaattcaatattttaaagcttcatcatcttgtcttactaaagatagagatttaaaaaaatatattttgaagaaggaatatagtaataatcgtattaagattctttattggataggaacaatacaatattttggtctgattgcggcttctctttttccaacatactgggttttttatattttatggacaactaaggaaaatattaataatctaccaccagtattttttatattgcaatttatattagcaattgttgcgattggaatagcatttatattgctgggctttttcttgaggccgtggaaggctaaacagtttttaaaacttgaaaaagttaaaagtcagaataataatcatataggtacacttgatgatatttttaaagttaataaaattttgaaattgcatttagtaattaatcgtcctgagggtgataatttgtctacctttgagaaagaggttttagataatatggtgaagaaaaatatttataaatatcaaaaaataatagaatcaggagaaggggagtttatatccttgactcaaggtgttgtggatgaaatagtattggctgctaaatatggttacatagagtataagtcacagaatgaccagggttatacttttaataagagtattcatcctttaaccataaatgaatctgcctaa

SEQ ID NO: 68273 - DNA, 378 bp, Acinetobacter baumannii
gtggatagtattgagtttctaaatttttcaaaaaaaataatatctctcgcccctattagtgaaatcgatttcagacaagttgttagccgaagttattattgtgcatttcatcaagttaaaactaaatctacagccttaggaattccggttgatgcatataaaggtggaacacatacctctttgaggcaaacccttttaaacctaagaccagcaaattcaaagcttaaaggaatagcttttagattaaataattttcatattttgagagtaaattcagactataagcttgatttaataattacagaaaaatctgctagagagtctattgcgctttgtgagaagataattgaagaacttagcttagttgaaaatttataa

SEQ ID NO: 68274 - DNA, 777 bp, Acinetobacter baumannii
atgaacccttctcctaaaacagttttttctgaaatatttgatgagatgttcgcaaatattgtaaaaactacaaatgaatttaaaattcattcttggaaaagaagagctgaaaaaattaaagaagttgatatatttgaatataaattattgatatctatattactttcctatgaaaataaattttcagaagctcttaagatggccgaatcattattgccgattactacttcgcctattcaaagggcaatggttttaagaacaatggggaatattaattttattcaacttggaggttatcttaaatctaaagatctttactgggaggcttatgaattaacccatgatgagagttattttcaaagctgccttttagttgctacaaattttgatttgtacgattcaaggttagaggatatgagcactcttaattctagtacaaagcaagaagttcaaaaaaagttgaatggtttgcaagaagagattaatgatataaatcagcataatcttaatattgatatttatcgtgaaataatgaatcatgcttatgtcatatttttttctcactgtagtagacagattaatcgttttcctttaattagtgattcaaatatttccactattctatttaatgatgaactagatatctcaactgttgaatttttaaatgataagatgaatgaggcattagttaatttgttagataaatatgattatgaagaacttttaaaatatcctgtactttttacagcagaagattattctaagcgcaaatattaa

SEQ ID NO: 68275 - DNA, 825 bp, Acinetobacter baumannii
atgacgattcaaacagtaaatttaggtacggcacctactggcgcaggcggtgatactttccgttcaactggcgcaaaaatgaatgaaaactttacgaatagcacccatgcagctagtcgtttggttggtacacaagccggaaatgtaatggaagttggggcttttggtatcggtggcgtagtaaaagttttggatggggtaaatgcttcatctttagatgtgcagtccggcttatttggagtagtcaattcacagggttttccagaatccggatggaattacttgattagtatgagattattagctactaacctatatactttatatctaactagcaatatttacggtgatattcaggttgctacaagagtcgatgggcagctgggttcgtgggtgaaatatttatcaacgagaaatactactactgatgcaaacggatttattaaagccgcttcaccgatcgtaaaactatttgcaaataagattgagttgaatgatgaagctgctgagcagaacattacttttgaaaagctcgatgtagggcactacttgctaaaaggaacgtcaggttttgcaacggaagggtggtatatcgaaacacctaaagatgcaaatgggaacattctgtttactgtgatttatcaccagttagaaaataaagatattgaaatcaaaacttttaaaaagaagtttgatgttgagtctgcttcaattattcctaatttggataatccagttgatatttcaacgggccgctggatcgatattcgcttgcaagaaattcctaaatcagtaccagaaatatcagtggtgacaaaaaaatga

SEQ ID NO: 68276 - DNA, 438 bp, Acinetobacter baumannii
atgggcgaagaaagttcaacaaacgacggattagaaaaatccacttctaacactgactcaataaagcctttttacactgcaatacttagtgatgagtttttgtattattacgataatgttttcactgatgaaaaattagacttgattgatgattttttagaacattatgaacagaatggcttaacaggttggaagggtaaaatttcaccttcttggaaagttcctgagtgttaccaagatcataaagaaagagctaaatatgctcaggagatggatctttggcatgctcatattggtttaccatcttggcaaaccagaaaaggtgcaaattattctacatctgatcaggttttacattttcaaagaactagtaaaactgaaatctttgttttatcaattagtaagcacaatccaatggatttgcctgatattgaatga

SEQ ID NO: 68277 - DNA, 180 bp, Acinetobacter baumannii
atgatcgattgcgctgtggttcatcccgcaacaatccatgcggacaaaaatcatcatttaggtgttgatattcagcatcttattgccctaactaagcaaaaatcgtataaaatgccttcaggattaactcgtgaagaaagaagagcatgggcgaagaaagttcaacaaacgacggattag

SEQ ID NO: 68278 - DNA, 171 bp, Acinetobacter baumannii
atgacttggagtgcacatgaggtctatgacagctttcaggttatacctgacgatgatttaaaacaccattcaacatttcattgcaaatgccatcccaaatatgaggatggcatttttattcataactcatttgatggtagagaagcgactgaaacgcttttaccgagttaa

SEQ ID NO: 68279 - DNA, 669 bp, Acinetobacter baumannii
atggccagtaaaaaattagaagataaaattaaacgagtttgttattttgttggtggtggagttctaggctacttgttaattagttttattatattaagttcatttccatggaaccattatgtactcgataaaaagcaagcttacgatgttttaaaagatgcattcacattaggtgcagcatttctcgctccagttgcagcatttgttctgtttagcgattggagagttcaacataaagctctaaaaaatgaaaagttaagtgaagatatcttaagaatccttaacacggaattattatccttttataattttaatcctcgatcaaaatcagatgttgaagattttaataatcatcaaatgcaatttcataggaacgttgcaaatatttatgtgatgttagatgaaattgatgcaaatgaagagcaggcaaaccacttcattgaaaatattaaaaaaatagaggttgatctagatggtttatacatgagtatttttaaacaaattgaaattgttattgaacatgatgcgatttctgattttctagatactcattcaatgcgtaaaaaagaaatattattaaaaaaattaaaaaaatttgaaaatataaatgaaacccattatgaaaatttaattaaagtaatttcacaattgaaacctttaaaagtttag

SEQ ID NO: 68280 - DNA, 333 bp, Acinetobacter baumannii
atgaagattgatattgaaatagaaaggttaaataaaagtgcagttgaacttaatgaagtaaggcggaaaattgaatttaatattgagaatagtaattatcaaaatagtacattgtttgataaatatcttgaaataataaagtcagacttaataaatcatgatgaggttgattataaaataaataagtatttagtcagtaaagttggtagtaagtttgcttattatcgaatgtattttattgatcagaattttacatcaatattttatctttttataacatttttaagcttttcttcaattatttcaattattttgcaggtaatgttgaagtga

SEQ ID NO: 68281 - DNA, 2379 bp, Acinetobacter baumannii
atgaaaaaaacgattaaatttgaaaaagatagtaaaagttttgagactaatctagctggatttattgaagctgttagttttaaagaatcatcatcaaatttactactacccttaacacaccctataaatatggaagcagccagtataacaaatgaaatgggatttataggattattccaatggggtgaagaagccttatatgatttaggatattatttaggagatcaaggtatatcctatgccgatattaaaaatacagataagaattcctctttgcgtataagttggaaaaatcaatttaattcaaataactgggtagggaaatggtcaggaaaaagaaatataaattcaaaaaaagattttttaaagcatcctgaaattcataatgaatatttcggtacaaccattcaaaatatagaaataacagaatcgggtgcaatagctggtatgcatcttgttggaatagggggactaggagctttcttaggaatcccaaaatttcatggtaaaaaacaaacagatggtaatggaacccacattaaaaaatatattgaaaattttggtgggtttgatttggagcaatgttgtaatagaaaaatctacgttacattaaaagataatttaggtttggaattaaaggataaagaagtaataattgtttctcaaaataagggtaaatatgtttctggagaaacaaaggttaaagttaagagcgatgagaatggtaatttacctgttattgttagaagtcccaatacagaaataaaaatttgtgctgacggaaaagagtcaaatactattattcaaaaagcaaatgaaaaacaaaaagcaattctaagtgattttaaggtttcaagtcatccagcaactctagaaaaaaatagtacaccacaaccaaaaccgcaaactaataaaacaccacaagaagtaagaaatgaaaaatcacaaccttctactgctccagaaaaagagaaagactcttcatctaaagatgtagactttaatattcaaatagttgaaggtgactctggtaaagcaatctctaatatgaatttttttattacgtataaaggtaatattaaaaagcatactgctgatagtcatggggtcaagcaaaatattattgcagagataggccaagacattgaagtttctgtacagggtactggacataaacaagttatacatcattttacagcaaatgcagcattaaaaaataaaactgtaaaagtaagtcttcctgtacattcttttaatatttcagtaactcaggataataaacctgttccaaatactttgtttagtattttttacagaggtagagaaatctctaaaaggacagatagccgcggtatactgaatgttcgaatgttaacaggatttgtttttggcttcggtataaagggaaaaagtttaatattaagtcgagttgaaaaaaatactgtaacaaaagcttttacagtgaatgggagtgcggttcatgcttcaaaagcatatgaagctaatgatgcaaaacagaagcaaaatgtaaatttaaataagcatcagaaagaaaagcaggaggaaactgccaaaaaacaagctgatcaagctaaaattcagaaaaataataaaaatgaagtaaaacaaagtaatacttatactgaaaatggaggtaagccattaacaactgttagtaatcaagctagtgttacaagtgatacaactagatttcatatttatcataatgggaaaataaaaagagagaataaagctgcaacaggttttgctgagtttatttattatgatcaaaaagggaaatcccataatttaggaaaatcgagatatgtagttgctaagagatgggaaaaaaaggatgtactaggtaatggtaatattttcttaatagatgtccgacctttctcatcgtaccgtcagggtgatgtcggatataaaatgttaatgaatagtggacagcaaagatactatcttgctagtgtggaaatggctgcttttttaggtggattatgcaaatcgggctatgatgatatttcattcaatggttttagtacagtcaatggatcgcccggagagagcgcatcccatattaatggagaagcgggagatataagatatcttagaaaagataaaaaagctaaagctgtgactttacaggatgaaatgtatgaccaccaaagaagtttagagctaataaataatttcataagctttggatgggggaaatccaaattaatgataagtgaatatttcactaatgctaaagcaggtgtagagcataattatatttttccaaagtgttttcaactaaaaagcaaaaagccaagacataataatcatttgcatatgcaaggattattagcaaatatagaggatatttga

SEQ ID NO: 68282 - DNA, 852 bp, Acinetobacter baumannii
atggataaaactaattctattatggtattaggaaagccaaatagcggtaaaactgtttattcagctcaactatatggaagattaactcgaggcgtagagcaacaaattgctatacgtaatactccagaaaatcttgatatctttcaagaagctctagaaaggttagctgagggtaataatcctcaaagaacaacctcttctcagtttgcgaatgtatcattacctttagtcataaaaaatgaaaaagaagtagatcttacttggttcgattatgctggcgaacagttgactcatatttttgaaagcagatcagtaaatgaaaaatgggccgaaactttaatcaatgcaaatggttggatggtatttattcgcctgaatgatgaaactaaatataaacataaaattgaggatctattaacaaatcgagatgtaataaaaaaaggaaagacaaaacaagaggacacagatagtgttgatgctaacatctggtggattgaactatttcaaatcatacttcatgtttgtaatttgaaaagaagtaaaagaatttcaaaacctaaacttgcaattgtcttatcttgttatgatcagatctctaactcaactagcactactacacctaaagaaatttttgaaaaagaattaccattattaaatcaatttttacattctaactgggaaaaagatagaatctctatatgggggttatcttcactaggcagacctttagataaaagatcacaaaatacttttgtagataatggtcctgaaaatcagggatggattatttctccagataaccctgaaagaagtgctgatctaacctcacctatagtttggatttatggttaa

SEQ ID NO: 68283 - DNA, 381 bp, Acinetobacter baumannii
atgaaaattcgtttaagtcttagattaggtggtgataatttaaatcaccaagaaattatagatagcataaatactgattttgtctatgaagtttataattatgatgattattcatgcttcacatttttccatcctaagggaatttcggatgaatatcctgataataattatgaggaagattttattatctttattgaagaaaattatgaaaaattatttcaacaaggtattagaagctttgatctatttatagaggtttattatgttgatcagtgtaattttgaaatactaaatagtagtagactaaaaagattgggtcaatttgatataagtattccaattagtgtgtatcatgaagatgaaaatggtaatcttcgatag

SEQ ID NO: 68284 - DNA, 219 bp, Acinetobacter baumannii
atgagcttaaacaatattcaagaattaaaagaagttgataacattcaagaagttaatttactattgaaacaaggatgggttttgctttcgattcttgaatcaaaggatagaaatgtatatgtagtaggtctagatagatggaaaaaatttgatgcagattaccctgtagatcaagaagcgtggaatgaatttttccctaaaaatcctgatcacgaatga

SEQ ID NO: 68285 - DNA, 1197 bp, Acinetobacter baumannii
atgatgtttgacaaagaaaattttgaattcagtgagattaactctgctttatctcatttaacaccagaagaaataacgaacttagttaatgattactatagtggtataaaagtaagtgagcttatcgagcactataatatagctgtcctcagctctaagcttgtttcattatttccgccagtaaagataaatagcgaatgcgagttttgtaatcttccaatgattacaaagcttaattctaagagttcctatgaacagttgagtcgaaaagatattatttgtcccaaatgccaacatcaacaaaatcgagcctgtacatgtttcaaatgtagagaaaaagtaaaacttgaagagttggaaaagaaacgccagcaagaaagtttaaataataaaaaaattgcttacttagaacagctacaaaaaattccttctataagtgaagaagaattatctttaactgataaaatttacttagcaagcctattaagagagtgcttgcatgaagatgctgagtatattgaagaagttaatcaaaaaggtacagctattactccttatcttgagtttacctctgagcttttgcaacacctactatctagaaggctcattattccatatttaataaatgatcttgatcaatttcaagaggaagaagatggatcaataacttattttatttattatattaaatataaaattaatattcagtctaaggatgaaaattatcaaatgatgcttcatcgtttgatgtatccgagatcagatgaatttttagaagattctactttttgctatgagttttggaagaaaattgcattttatgaaagtatacaatatttaatgtttaaaatggaaagtgtacgttatgatttttctccaggtactaaaacatatactgtctttcagaacttggttaacaatttttccgtaggtcaaatttacaatattatctatagagcaattgcaaacagtacagagcaatatcaatcaggaaaaatcactaaaatccatgctcaaaatatggttatctcatcttgtgaagggcaaggcgaaagagcaattgctaataactgggatcttaaaaactacgcaagagttaaagagttacttcagtcacaaataagcaaaatcttctttgattcgatacttcagatttcatatcttggattttcggagaaaccaacacgccgtttatag

SEQ ID NO: 68286 - DNA, 909 bp, Acinetobacter baumannii
atgtctgagaatcgaattaaatcagctctatttttagatggctggaattacgaatcgggtaacaaagatcatttacgcagaaatgctacaagtattattgctaaagaatttgatatttcaatgaaagataaaattttttgtcccatatgttctactcccttaactagaaagcctttagtagaagatttttttacaaatggtagagaagcttttttttcacacttaccttcttatcgtgaagttgattgtagattaagagtacctaaaccagaaggtcaattatacgaaacagaagaagaagcaagggaagcaattgaaaataagcaattggctattatccataagtttaaatcagagcctccagtagaaaatgattctgaatcagaagaatatgatcaaacagcggtagaagatgaggatggaccagtatctgctattccaatcgcaagacacactggtgaaacattaaatttaccgactaaaattactacagtagcaggtatttgtagaaaatttgatgaaaattactataaatatttttatatgccaaattcaaatgtagcaattctactaaatgaattacttcataacgttgaagatgttattgaagaagatgatgaacccaaattatattttggtgtgattagaagctcacatgtagctggtgcgggttcagatagtaatgtaaggatgacaagattagtttctaatccagcaattaaagatttttatctcaaagacttaaatggtgttcaaaagaaacacggaattaatgataattctgcaggtcgaattgttctcttttggggaagaattacggtcaatggtatcggcctttgtgttgaaaatcttgagtggggtgaatatggtctattacccgagaaatataattcaatactattaaattga

SEQ ID NO: 68287 - DNA, 696 bp, Acinetobacter baumannii
atgattaaaatagatgtgaacgatatcgtagatagagaaaaactagctcccctccagtgggtagtctttgttttaggtttcttagtatttttctgtgatggacttgatactggaattataggttttatagcaccacctttgttagatgaatggcaaatttcaaaggccgaattagctcctgtatttggtgctgctttaatcggcatgagtattggcgccttaatatcaggtatttttgcagataagtttggccgaaagaaaattatgattatcagcatgctaatcttatctatatttacaataatctcggcttactcgaccaatacagcagaactcattatctatagatttatcacgggacttgggttaggtgcgacgatgcctaatgtaagtacaatcgtttcagaatatatgcctaaaaagcatcgagcatttctcacgggtttagctggttgtggatttctaatgggagtatcttctggaggattcctttcagcttatctattgaaaatttttagttggtctgaattactaattattattggtttgatacctgcattacttacccttgtactcatttttaccctcccggaatccacacaatttcttattattaataatcaaaagaaaaaagctcttttaattttagaaaaaatacatggtaaaaaattgataaagagcttgtcttatctatag

SEQ ID NO: 68288 - DNA, 258 bp, Acinetobacter baumannii
atgcgtacatttgaagcaattggagcaggaaaaaaattaattacaactaacttaaatataaaagaatatcctttttataattctgataatatttttataatctcacgtgataaacttgttcttgaaaaagattttttcttaagggaatatagaccactggcaacagaattatataataaatgctcaattgatggatggttagaagatatatttttgggagaggaaaataattattggatgaattttaaatattcataa

SEQ ID NO: 68289 - DNA, 426 bp, Acinetobacter baumannii
atgccagcaaatggttgtatttatattcaaagagatggagtggatttacgagaagtttttgatcatgtagaacgtgataaaggcttggaagaaaatgcttcttattatgatgttgtattgggtaaggatactgtacgtttttatgtaatgccttctcaagagattccaaatcatttacaaggttttctgcgttatatagcttctttagatcacgatcaaaaacgcaaggatgatacctcttacgcaattagtcatacaaaggtagtattaggacttgttactgacaaagagtttgatgagaaccctgctatttggcaaagtttatttaagatagcagataaatatgatggccttatttttacatatgatagtgttttactcccaagtggtacaattcttgttggtccgctattaaataataaataa

SEQ ID NO: 68290 - DNA, 255 bp, Acinetobacter baumannii; identical to SEQ ID NO: 44740

SEQ ID NO: 68291 - DNA, 1869 bp, Acinetobacter baumannii
atgatgaaaattgataaagtaattctaaaaggttttagaaattataaagatgcgacaataaattttaataataacactttaattattggtgaaaatgatgttggtaaaactaatctcatttatgcattacgcctcatgttagacagaagtgtttctgaattggatatagagccatcagagttggattttcatgtacagggtggtgtccagtctgaaaatttagaaatcataattaaattctttgatattaaagaagaagctgcattatccattttgaaagaacacgtaagtgatgatggagaatgtgtttttaaatacatggcttctaaagaaaatctagattacaaattatatcttggtcaaaatgagacagacttatctgaaattcaaagtcgttattatttaaaatatatcaatttaaagtatatttcttcccaaagagatttaagcaaatttattgctaaagagaaaaaacaattacttaggatctccaaaacaaagattactgaagaacaagaaaagcttgatcgagaaaacgtactagaaatttctaagcaattggttgacctagacgataaagttgcacaattagaatatgtaaaaactgctactcaagaagttaatttagaattaaagaaattagcttatgcccatgatgattatgatgtaaaactaaatgctagtggtatagaagtggatgattttattaataaattacaattaggggcaatgagcggtggctcaaatgttatgttgggtggtgatggacgtaataatcaaattttaattgctttatggaaggcactgagcgaatttgaacacgattcaaatgatgaagtagtgttttatgttgttgaggagccagaggcacatttacacccacatcaacaaagaaaattagctagttatttatcttcagaattacaaagtcaatgtttaataacaacacactctccgcaaatagcctcaagtttttcgccaagttctattattagattatttaagaaagatttctctacaattgcggccagtaatggttgtacaaaagaactagaaaaagcatgggaagatttaggttataggatgagcattatccctgcagaagcatttttttcaagtggtgtttttttagttgagggcccatctgaagaaattctatataaggaactgttgcttaaaaataaagttgatattgattactacaatttatccgtttttgcagttggaggaattcaatttaaagtatttgcagccgttttaagagctctagaaatacctgtttcattaagaactgataatgatattagtactgtagaaatgaattgtaaggtttctagttacactagaattgatggtgtaaatccttgctatgtatataaaaggattgaaattaattataaagaagaaaaatgcaaaaaatggcagtatttgggggttaatagatgctatggagttttaaatgaaaattctgaaaagtgggaacatagcctttatcctttaaatagagctaagattctaggtgataaaaggtggaaagcttttgaaaagatgattaattctaaaggcatatttatgtcaaatagggatttagagttggacttagtaagtgttgcttcagaagaaattaaaaaagctttaagtaaaaaaactgatactagctcggttgattttcttaaaaccaataaggcactaaatatgcagatattagtatcaaaattagaagatgaagggtttaagaaaatttatgaaagttattttggtgagcctataagatatttaataaaaatattaatgagtaagcctatattaaaaactgaatcggaaattgaattagaaactgaatatgctcaagaagaaggtgcagcatga

SEQ ID NO: 68292 - DNA, 483 bp, Acinetobacter baumannii
atgaagagacctgtacatttgccgttgtatcacgaattcttagaattattcgataactatgaaattcaaaattgggaagccaaacaattttgggaaaaacttaatattagtcagaacaacagaaatgaaaaaactaagaggcttatgtattctggtttaagagttttaatgcaacttcaatatttggaagtaaatccttcaatatccaaaaaaaatatcttttcttatacggaaacaccacgtatgaatgaactcaggaatcgaacaaagaagcaaaaactggaagagattttttctaaaaagaaagcagaatttttagatcagatcaaagataaagaaaataatattgaatttctacagtcattattatcagatgataaaacgttagagaaatattttattaactataaagaaactatggagaatgatattaaaaatataaaatcaaatattaaattaatggacgatataatgaataaataa

SEQ ID NO: 68293 - DNA, 195 bp, Acinetobacter baumannii
atgatcaagtcaattaagcaagttcgagatgatttttctcagtctggaatttctatagccgaatgggcacgtattaataatttctcacctgatcttgtatatcgaattttaaaaaataataaagtcccactacgcggagagagtcacagaatcgcagtaaaactaggtattaaggagcaaaaaactatggattaa

SEQ ID NO: 68294 - DNA, 1542 bp, Acinetobacter baumannii
atgaacacatctattgaaaaaattaggctagtaattagctatatatttagtcataaaagcaatcgagaaatagctaaaattgtagaaatctctcgtgaaactgtatcaaaaatcaagtccttactaattttgacagaattaacttatgaagattttactaaactaaacaattcagaattagaacaaaaattaaaaattaatcgctcaataaaacgtatcaaaaagtcacaacctgactgcgaagcgatatgtagtgagttagctacgtataaaggacttacaaaggctattctttgggaagaatatagattgaaaactcatggaaatggtgttggatacacacggttttgtgaactaataaaacaagcacaaaaacaaaaagacattccaatgaagcaagaatattatccgggtgaaatagtacaaattgattacagtggggatcttgtagatattgacttatttaatggtgatgtaataaatgccaatatttttgttggggctttacctttttctagtttaatttttgcttatgccacggaatcacaaaaaaccgaagattggattcgaggatgctctcaaatgtttgataaaattgatggtattcctcaaactattgtttgtgacaatgctaaagcattaattaccaaacatagaaatcgaatcgttgaagttaatccatattttcaagaatttttagaatttcataaaattaatgttctgccagctcgaccacggaaaccaagagataaagcagtcagtgaaaatgccgtgaatattgtacaaaagcagattttaatgagaatacgtcatgaaaaatttacaagtataaaggctttgaatgaaagacttgaatatatggtggattgttataatcataaaaaaactaaaactttttcgcagggtcggatggctatatttcttgagcatgaaaaaaaattacttagacccttacctttaatcaaatacaaagtattgaatgaatattcgaaaacaatagtaccttctgattatcatgtgaaatatttgaacaattcttactctgttcctcatcagtatattagagaaaaagttgagctaaaaattttagataatcagctatatatctatcaagataaaaaactaatcgctcaacatacgcttcttcaaggcgaaggaaaaatctctacattttatgaacataaaacggagaatcatagaactacagattatctatcgaaggaaagtattttaaattggtcccaatcaattggcactaacacgttcaattactgtaatatgattatttgtaaaaactcaaatttatacaacaacttaaattatttatttgatttcagaagttgggttaatagtaaacaattcattgatcgacttgaacaggccttatgttatgcctataaattaaaaatagaaaatttggctagattaaagtccattattgaatcaagatcatatttggagtttgatcggctttgttgcacaaatagacgaaaggtagagttgtctaatcttcagatatttatgcaacagccaccgttttag

SEQ ID NO: 68295 - DNA, 756 bp, Acinetobacter baumannii
atgttaaatcctcatttatcaacattacttgcacagttgaaattgcatggttttactcaatcattagattctaatattgatgctgtttattcaggtgaaatcaattttgaagaagctatgattgatgcttgtaaaaccgagttgttaactcgggcacgaaagctcactgaacgactaatacgaaatgcgcatctaagatatcctcatgcttgtattgatgaaattaagtttgatatagaacgtcgtggcttatcaaagcaatttgttaatagattttcagagtgcacttggattaatttacataagaacatgagcatacaaggtccaactggggtaggaaaaacatggcttgcatgtgctttcgcaactgaagcatgtaaaaaaggttataagactattttttatagagcatctgagttttttgaagcattagaacaagctatagatcaatcaaatgaaaagctttttattaaaaaattgattagatatgatttacttataattgatgattttggtcttagtaatattcctccaaaaatagaaagtcttttactagaatttattgataattattcaatatgcggcagcttacttattacaagtcaattctcatatgatttatggcacacaaaattccaagatcctaccattgctgatgcaattctagatcgaattatccataactcttatacactggaaatagatggtgactcaatgaggaaaactgtaatgctagatacaactaccactctttaa

SEQ ID NO: 68296 - DNA, 1449 bp, Acinetobacter baumannii
atgatctcaaatctaagcaataattttaatctagaaaaaattgaaattatccttaaaacagctagtgaaaaaaagtcttataaatggtggagtgaaatagttttagctggatttagtcacaatataaataaaaccaatgggttagcgtctgaatacttatcactattatccaatcctatcatttcacaaattatagaaaatattcttactgataaaaaatcctttgaagttaagttgtgtgataagtctcaattttcagaagaaaatattactaaaaacttcttagatttttgcaagaaaaataattggtatcatgcacatgcattagccgcaggatacttttatgatgctaaagaatctcttacacatcaattaactttcaataactcacagagcttacaaaccttggtagataattatcctaattcagagataatttacgctatcattgaatataaaaataccagtattttaaaatttgtaacaaatagaattttattagataaaaaaatattaaacaatattgacctaggtaattacatttggcttaaagtatggcttaactgtcttgatatcgacaataaaattcttccaactaaagaaacaaaagaatattatattctctatattttaagtgaaattattagcaacaataatccagaaaaaattctcaacaaaataattcaaactttgcatatagatgacgaaatctctaatatttttttaaattatgataatagagatttaatatggtcacatattgaaaaccctcaaaaaaatttaatacttcattctgtagctgagaaaatattgactctactagcagttaaaaatattagccaaccagaatcattacttagtcaaaaaatcattcaacttgctcaacaaaaaagctctttacctttaaatacgattatacaactaatccaatggcgctctataaatgaggaaattgcaagatatctacttagccatggaagttggaaaagtcagggaaatatgattggtattataattagccaaaacaagtggaaaaacattgcaaaagatatctattcttcttataagagtggagacaagacatttaaggaaactattccacatattaaggccttattatctaagacagaaagacttaagttaaaactattcgaggccagaagctttcctacaagaaatacgattatttctcatcatgaaattaatgaaataattatagagttatgtgcggagctttttgctgacagattaaaaactatatggctaagagctggtggaaatgctagtgatctagttactaacggcaccatttacgatcaatgggttcatgcgattaatgtagcgtctcaaggtaaaattcataaatatccaaaaagtattgcaaatattttatctcaagaatttccacgcaatgaagatgtgagaaatcttgttcaacttctaggatag

SEQ ID NO: 68297 - DNA, 363 bp, Acinetobacter baumannii
atggttgaacaaaataaaacacctgagacaggaaatgaacagttttggcaaggtttaagtagtaaatcaggatatatacaacaagagtttatccaatcttcagagtttctaagcctggcattaggtgagtccgaatatggtgtagcgaaacatgcgcctttagaaaaaaagatcaaacccaaagagaatgaaatctatgcctttgaaccaccagcagtattaggtgggccacaagttattgagaatataaaaaaagtagatttattccaatacattccttttgtagctcaactagataagtttcaagtgatgttggatattgccaaagaggttgatcgtttgggcatcaaaccgaaaagttaa

SEQ ID NO: 68298 - DNA, 162 bp, Acinetobacter baumannii
atgggttgttctaatagagtatatgaccaaccttctaataaatatccatttgaactgaagatgaaagaactatttggcgataatcttgaaatgatgaattcattgtataaagcagaagttcaaatttcttcttttgatttacccaaaaaactaattaaatag

SEQ ID NO: 68299 - DNA, 453 bp, Acinetobacter baumannii
atgaaaagaattacactacttaagattaaacaaagacaaaatctgaatcctgtcgatgaaagtattgatttttacaatgaaatattatctttaaaaaaatcaaatcagatgttgatagaagctacagaaacacaggataaggttttaataagtaaaaagatcattaattttattaagaatattcctgatgaagatcttttatttaatgtatcttttagtcaatatgaaacatttttagatgatggcgaatactataatatttcgcctttacctgtttttaaattgaacaaggatcaaatttcatttttatttgattgttatatatataacaatctttattttcttgcaattatttctgataattttaagttagtgttagatagttatgctggaaatacaaattcatcagaacctgatttaccaacgtatgaatattttgaagaaattaagtaa

SEQ ID NO: 68300 - DNA, 363 bp, Acinetobacter baumannii
atgccaattccgaagcattcaaaagagttaaaattaaaagtcattcaagcttatttagatggaagtaaaggatataaaatcctttcacaagaatttaatgttgatctccaaaccatccgcttatggattgaaaactataaggcacaaggtgaagatggcctgaatgttaaaactaaaaaaacctactactcttccgaatttaaaatcaaggctgtacaaatgcttcttgataagataccggtaagagaagttagaagacggttaaatctgagcgggacgtcaattttaagaaggtggctcgctcagtatcataaagaagggattgccgggtttagaggtggtcccacatgtttgaacaactaa

SEQ ID NO: 68301 - DNA, 309 bp, Acinetobacter baumannii
atgaaaaaaactgtagctgaaattgttatatatagtttatcgattggaatcagtctaatacttgctaaggtatcaaagattgcgtatgtagcaatatgtagtgcgcttggttggcaaaaaagttactttattagttttatattaacaatattgtacgcaggttttatgggttttattttttcttatgttgttgaggggctaaaggatgaagagaatttagaaaaaatacaaaaacctttgaatatgataatagccgttttgtttagtcttcttatctttggaatacaagcctttgtagatatgtcttga

SEQ ID NO: 68302 - DNA, 252 bp, Acinetobacter baumannii
atgaaaaaaaagcttataaaaagcggtttactcatcactagtttttttatttataaccaaacctatgccaactgtactttaagcaagggctttaccacagtcgatattccaatgacgattgggactattgtagtacgcccaaccgacccaatcggaacagttctccaaaagaatacttttactatttcacccaatattttactgcaacttgcaatcgtgccagtgaccaaattacagcggcacttccattaa

SEQ ID NO: 68303 - DNA, 330 bp, Acinetobacter baumannii
atgaaaaattgggatgaggtcttagaggctgcttctgcatttgttaattttttagaacaaggaaatttttttaataaaccatttctgataagtggagattataaaatcattactgatgctaaggttggtatcaattatgctacgaatgatgactttgatagttttgatgaatgggaaactgtttcaaattcatatgaagtttttccagaaagctttgaatggagccaaagaatttcagctaaattagaaaaaaaaacttttttgactttcatgaaaaagactttaatggagcagtcgaaaaatgggaatatgatgagtcttgtttattaa

SEQ ID NO: 68304 - DNA, 696 bp, Acinetobacter baumannii
atgattcatatgctcaaagcagcaaagtcagcatttaacttttttgaaaattcagaaatcgtcaccaataatatccgcttccatggtcagtattttgatgaagagacagcgcatcattacaaccgttatcgttattattcgccgtatgtaggtagatttattagtaaagacccgattggattgctgggtgggtttaatgtttatgcatatgcaccgaattcaacaagttggatcgatgctttaggactaaaatcagaatggcaaaagaattgggaggttgtacatggaacattaccaaaagattatgaagttcatcatataattccaaaaagtgcatcttcagtaagagctgcgaaaactatatgtcctaattttgaggtaaataattcggataatttaatagcacttcctaagaatagtaatgtgaaacaaataacaggagctggttttgggaaaactacacataatggttaccataaggggtatagccaagctgctgaaggagcaatgaatattgctgcgagaatgaaatcaagtgtaccaggatgtaaaagattggcaattatacaagcgggtttaaaaaatcaattaattattggtggacaaactatgtatggtaaagggcatccaaatggtgtaccaggtgtgaaaagcgattggaaaggaactgttagaaatcatgttagaggtaaataa

SEQ ID NO: 68305 - DNA, 429 bp, Acinetobacter baumannii
atgttaagttctaaagtaattaattatttgaagcaaaaaaatgcttggtttgaagatgtagatatcgattgtgaaaggtatagagagattctgaaagagttaaatttggatacgagctctgactttggcattttctatacacatgcagaggaaaatccaggaggtttttattcaaaaaaatttgaattatggcaaatatgttggatgtatgaaaatagtgattatagagttattaatagtagtttaagaagagatttgggtttaaatgataattattatgtaatttcagagtttgagggagaaagggcatatttttataataaagaggaaaatagtgtcgaaataattggttactctgaaaatggagtagatgttattgaaaagtgggaatcatttaatgatttcttagaatggtattttgagatttaa

SEQ ID NO: 68306 - DNA, 246 bp, Acinetobacter baumannii
atggctggtcatctgttaatttacatcactcaaaacaaaatgcaaataggcctttattcgaattgtctggaaacagccatagtaaaaaatagggccttaccagctcttcatccgtatagaccaaaacagcatcctgactatcctgttaatagagatgattttaatgatgatagggacggatattggaacgatagagcaaataaagagttagaaagacgaaatactagtagtggctgtcctttataa

SEQ ID NO: 68307 - DNA, 159 bp, Acinetobacter baumannii
atgatggtaataaataagagtaaagatttattcactttaatccagattatacatgtctctaaggatgtagttgagttagagggttttaatgatgatggtgagtggaataaagtggttttttttaacccgtcgtatagcttgaatattattgatatttaa

SEQ ID NO: 68308 - DNA, 450 bp, Acinetobacter baumannii
atgaccgatcatacaggtacggtcatttggaaagctgaatataaggcttggggtgagtgtaaagctgaaaaagctaaatctaacttctttgaagactctgagatcatcagtaataatatccgttttcaggggcaatattttgaccaagagacaggttttcattacaaccgttatcgttattactcaccgtatgtagggcgttttatttccaaagaccctattgggttattgggaggattcaatggttatgtttatgcacctaatccaataggttgggtggatccttatggtttaaataataatcctcttgtaggaatagatttatcaaacaagagtaggagtgaaatagaaaatattttaagtaattctagtgaggtaaattataaaggtggtctcctgataagaagttcatgcaatggaaatggaatgataatagtcaaacagcagtaa

SEQ ID NO: 68309 - DNA, 318 bp, Acinetobacter baumannii
atgaaaaataagctctggaaaaaatataaatttcaaactgaatctaataaattttattctattttatcagattcagattttcaggaaatggatttaacagatttaccgtgttttaatatccgaaatacagatattggtgtttttttggaaatatatagtttaaatcaaacagatgtgtatattgttgataataactttaatattaaagatgtgcttgaattagtgaataagctgagccaatttagttatgtctctgcattgaaatatattaaatttaaatatggatttaaagatcaatatattttttttgaaaattaa

SEQ ID NO: 68310 - DNA, 333 bp, Acinetobacter baumannii
atgggtgagttaaatatcaacagatacacaacctgtgacaacttgaaaattaatttttgtccagagtctcaccctgtagatgatgacatccaagaacttcttaatgaaatgatttctgaatattcaattaacaatatgccaataaatgttgattttagaaaacttgtgtcttggctaaaagcaggtgatcaattaactcatcagattcatccatatccagcaaagctactaccccatataatttacttctttctaaaagctcatagcaatttgaaacataaaattgtattagatcccttctgtggctcaggtacagtagctttagagtcctga

SEQ ID NO: 68311 - DNA, 1701 bp, Acinetobacter baumannii
atgattaaacgaactttgtggtatcaatttgaaaaagagtatttgccagtaactcaagaagatttacctaatatggataactccttagttattttaggagaggcaggtatgggaaaatcttgcctgcttgagtggttaggaagcttggataattttgcatattgtacggctcgacagttactctatcgtcataaacctaatagtttgctgaataataaaaaaattcttgtaatcgatgcattggatgagttgggttcatctaaggatggggatggtatcgatttaattttgcaaaaattaggagaacttgattatccacagtttgttttgtcatgtcgtgtagcagattggcgtagcgcaacgggtttaggagccattaaagaacaatataatattgaaccactagaacttcatttaaatcctttctctcaaagtgatatgaatgatttcttaagtgaaaaaataggaaatgagcaagcattgaaagttgtggatcattttgtgaagttgggattagaagggctattgggcaatccacaaacattaaatttgatttcagaagttgctagatcgactcaactacctgagacattaactcaactgtttgaccaagcagttaatttactaagaattgaacattctgaacagaagatagaaagacaactatctaaagaaactgaactcgaagtagcaggagctgcttttggaagtttaatattgtcagcaaatgaagctattactagaaagcctctacacaaaattgatgatggggaattgccaataagtgaaataaaaagtcttgcacaagggcagtacattgaaaatgtaattggttctcgcttatttaaagctaatggtgttgaacgctttacctatctacatcgtaggataggagagtttttaggtgctaaatggctaattaaacaagcaaatacaagacgtaaaagaaaacgtcttctatctttttttcatgcatatgagcttgttcctgctaatttacgtggtatgcatgcatggttaattatggatcataatttagctttcgaagttattaaatctgatccaatcggaatattagagtatggggatgtcgataatctttcaatagaacaagctaaagttttattgtctagtatagaaaacttagcggaaaataatcctaggttttataaacgaaatagttatcagattcgggctttcaccacaccagttattttaagccaaattaaagatattcttttaaattatgagatttcttttacgtttagaatttttttacttgaatctattcagtcatttcaattgccagcttattttattgaagtattaaagaagttagttttagagactcaggtagagtatgcgattcgtaaagctgctggtgaaacattagcaattcaaaagcaactaattgtttgggaggatatctatcttactctctctaaatttaaggatgaatcatcatttcgactagctttagagctactacaagatattggatataacagaattgatagtaagctaatagctactttagcttttttatatttaaaaactgaagaaactatttcgggaccactttggtttatcgaaattgatctacctgatagtcaattagaaaattttcttgatacttttgtagaacatttaaagtcagaaggaaaaaaatttcaacatgaagaggtggtcccacatgtttga

SEQ ID NO: 68312 - DNA, 462 bp, Acinetobacter baumannii
gtgaatcttacaactggttttggttgcagaatagaatgttttccaattaaaccaacagatgataagttattaaaatttggtaaaaatgtacaactaaatgattatgttcatattactgcagctcattcagttgaaataggcaataatgtgctgatggctagtaaaatttatatatcagattgttcacatggtagttatattggtaataacgatgatagtgatccaaggataatccctgcagatcgtcctttatctgtaaaacccgttaaaattcaagataatgtttggcttggcgagtttgtatctgttttaccaggtgtaactattggagaaggaactattgtaggtgcaaattctgtagtaagcaaaagtttaccttcttatgttatagctgttggatcaccagcgaaacctattaaattttataatttcgatactcagaaatgggaaaaatatgtttaa

SEQ ID NO: 68313 - DNA, 1074 bp, Acinetobacter baumannii
atgaaaattttattttactttaatagtatgactccagctggaggaattgaaagggtaattagtactcttgcaaatcattttagtgattttatggaagtgactattttagttaaagatcaagcatatagtcattatccgctttcagataaggttaagcttgtttctttgaattcaagtcttaacttggatatgaataataaatttaaaaggatggggcaggcaggtataaacttgcttcaaagtacagctaaattaaaacaacatttagctgtaaatgaatatgacttatattatttagcacatccgatgaacgttttggagtttcatctcgctagagggatcgataaaaaagttattattacagagcatggtggaattaataattttatttataaaaagataaaacaatggctatatcccaaggcacgttgttatgttgttcctactactagtgatgctaaagcatacgcagctgtaggtcttcctgttgtttatattccacattttaaatcatctttaaagtatgtatctagtgatctatcgaataaagttgttttgtcaattggccgtatgacagaagctaaacgccaatggattatgattgatttatggaacaaaattgtaaatgagcatcatataaaagattggaaattgcatctagttggaaatggtaatttatatgagcagttgagcaacaaaatactaacccttggcctgcaagaatatgtaaaaatattgccacctatacaggatgttgaaaagtactataaatctgcatcagcatttatgttgacttcacattctgaaggctttggtatggtccttttagaggctatatcattcggtttgccttgtatttcatatgattgcccttcaggccctaaagatatcattgaaaatgatgtgaatggctacctgattcctatggatgattttgaagctttaaaaaaagctacattggatttgctgactaatccagaaaaactgaataaacttgcggctggtgcttatagtactagttttaactggaatgatgaggctgtgttaagtaaatggaagaaagttctttattaa

SEQ ID NO: 68314 - DNA, 912 bp, Acinetobacter baumannii
ttgtggtatccgcctgaacacaaaaaaaaattagaaattcttttaagagctattaatgaaattgaaattacagatgagaaagatttcttcaagatttgcttttcatctttagcaaaaaagattagctatgctgatccagcaattagcgtacctgttcgtttaaaaactaaagaatctttttcagatgccactaatgagcgaattcaaaaacgattagactggatcaaaagtcttagtgtaatagatgaatttcataatattgtaaattcaaatattgaacgtattaaacaaacaaatgaacaatatcctcaacgagttgttgctaaaaatgtaggtattgatgcaagaaatatctttactaattctgatttaacaacacaaatgccagataattctgtaccactgattattacgtcacctccatatggaagtgcacaaaagtatataagatcttctagcctttcattgaattggttaggttttgtatcgcccaaagagttaagatctttagaagagaaatcgattggtagagaacatttaataacagaaccattgtgcttaaaagccggtgatctaccagaaaattataacaatcttattgaacgaatagccaaaactaacaaaagtagagccagaataactcagaaatatcttattgagatggaacaagtagcacaggaactttctcgtatcctagctcctaatggacgtatcatcttcgtgttaggaaacaatcaggtatgtggtgagactctaagaaatgatgagtttatgacttattgctttaaaaaatatgggttacgattgaaactggttcttattgatgatattaaatctagagggttaatgacaaagcgtaatcgaacagcgtcaataatatctcgtgaaaccgttttagtatttgaaaagtaa

SEQ ID NO: 68315 - DNA, 747 bp, Acinetobacter baumannii
gtgattgaaacagctcgtcatcaccgtgaatttattcaagacccagttttaaaacagcgtgttacttcattgattggacaagaggcgattcactctaaactgcacaatgaatataacgatgcacttaaagatgttgaataccctgtcgatttataccgtttcttgggcgaaaacttctttaaatatgtgtttttgaaattcccgcaaccgcttaaattatcgatgatggctggtattgagcattttacagcggtacttgccgaatacatgatgaaacatgaaaagaatttctattatactgacgatgccaaaagtcgtgccttatggatgtggcatatgcttgaagaatctgagcataaagatattgcttatgatgtatatcaggttttaaacggtaattatccgttacgggcaacgggctttttaatggctttcattactattttagggcttattccaacagcaactttatttgtacctctattgcgtaagccaaaagaactgttgaccagaaaattttggaaagatgcacgtcgtggcgtcaacttaatttttagtccaaaagatggcgtatttggtagcaccattggtcagatttttgattacttacgtccagacttccatccaaatgaccatgatacgactgaatatctagagtactacaaaaagaaattacttaacgagggcggtgcaattgcgccttactttgtgaaggaatttacaccaccagttcgtgcagtttcataa

SEQ ID NO: 68316 - DNA, 366 bp, Acinetobacter baumannii
gtgcgaaattataaagatattagtaatttaaaagattgtgaaaaatcaaaaaatcttattattaatgataaccaaactaatgtagatgttgataaaagaggagtggtaacagcaataaatacaacaaatcctaatgctatagatgctaatggaataagcgttggagaaaatgaaaaaaaattattgaagctgaaaaatattaccaaaacaaaaaaaatggatgcggaagagggaggtagctattatgaatataaatttctctcacagcactctgattcttattatatttacactgctaatcaccaaggtaaaattgattctattggattgttttctaaagattatataagttgctatgaggattaa

SEQ ID NO: 68317 - DNA, 189 bp, Acinetobacter baumannii
ttgtggaaatatttattgttagtgatcgaattagaaaaggatcaaagttttgatgtttggtatttgaaagatcatgggaaaggtaataaatcattaccagcaaaggatcaagatagtagaggattggtggggcattttgatccataccatttgcttaaaaacccattatctttaagtaaagaaaagtga

SEQ ID NO: 68318 - DNA, 375 bp, Acinetobacter baumannii
atggtatttttatctctaacaatattgcttttctcatcatttattgaaaaatttattgggaacgaatatgagggtataagtaatttattgatgatattgtgtttagttcctatttttagtgcaataggtggggtggctggccaaatgggtctaattgcatatattgatagtgcaaaagctaagaaaactttccaaaatatatatattatagccggtctttttgctgtttttcaggtcactatttttacttatttatttcaagcagaaggcacaagttttgcggtcctatcaacagaaatgtttgtagctggattgatgatctactattttaaaaagtatttaaaaatagaagaaagaaacaagacttatatgtag

SEQ ID NO: 68319 - DNA, 861 bp, Acinetobacter baumannii; identical to SEQ ID NO: 50190

SEQ ID NO: 68320 - DNA, 738 bp, Acinetobacter baumannii; identical to SEQ ID NO: 53196

SEQ ID NO: 68321 - DNA, 357 bp, Acinetobacter baumannii; identical to SEQ ID NO: 46762

SEQ ID NO: 68322 - DNA, 153 bp, Acinetobacter baumannii; identical to SEQ ID NO: 61079

SEQ ID NO: 68323 - DNA, 1794 bp, Acinetobacter baumannii
atggataatttattcatatctccaacaattggcatgcgttttatctataaaaatagagagtatgaagttacttttcttttaatagacaaatttcgagttacaaccgcgcatggttgtgtaaacagctactggtcgatagataaaattaatacactttataataaaggtgatattaaaattatttatgaaaataactccatcctaacaaaccctaaagatattaatacaataaaaagaagactttcatatgttcatgaatctttaaaaaaaggaagtagatgtcaagcaaaggaaaacttagaaagaacaataaaaataatttcaaaaaagattaatgatcctagcccgccttgtactcgaactttatctaaatggattaaagcatatagatcagattcgtatgatataaaatgtttaattgataatagaaaaggtaattcaacaaaacgaaaaccaatttatattaacgagcaacttgatgaaaaaaatataattcatcatgaagatgatcattattcaattcgatcaattcaaagatatatgaaaaaatttagtgacccttttttacaaaaattgagaaaaaatggaaatcggtatgcacaactatatgttcgtgcatctgctatgagtcaaattagcgatgggttattacacgtagtagagatcgactctcataaactagacatcattgtattagagaatgggtctttggaggttatgggtagagcgtggataacacttgctatagatagattctcaagagtaattgtggggttctatatctcgtatttacccccatctgcttttagctctcttcaaacacttaaagatatgattacacgcccagcgaagcatgaaatgggcggaattcctgctacaataatccccgacaatggttcagaaaatattaataattcattttttagattatgttcatcactcaacattactattctacccgcacaatttaaaactggtaacaataaacctttcgttgaaaatttttttaaaaacatgacaaatagtttgattaaaaaaatttctggcacgactttatctgacccagatgaaagggaagaatatgactcaaaaaaatatgcaagcgtaacattagaacagctaaaaaattatattccgaattggatcaatatatatcatagagaacttcatagaggtattaatagagttcctcaagctttgtggaatcaagaagcaaaaaagtataccccaaaaggcataactcacgatgaagcagatatattatgccgcactctatatttaagagatattaataacggaagagttttatttgaatatatctattattattcacatgctctaaaaactcatgagctaaaaggtgttaaacaggctaaaattctagtagatgaatctgatttaagttacgtttatgttcttataaataatgatatttgtataaaagcagaatcaactcaaaaagaatatactgactgcttatctcttagtgaacataaagctgtacgtgaaataaaaaataaattaaagcttaatgacttagaagaatatccagaaaaaaataatatatattcacgaattaaattaagacaacttattaaaagcgatatagaactaaacaaatcaagtaaaaagaaaagaaatctagctaaactcataaaagaatcaaatattcagtttaatcaagaagaaaaaataaatattaaagaaagttcattaaaaaataatgaagttataagttttggggattttgaaagatttggatacgaggaattggagcttgatcatgaagtctga

SEQ ID NO: 68324 - DNA, 477 bp, Acinetobacter baumannii
atgcagtttaacaaattattaaaatgtggattaattgaaaaatgggattataaagaacataaattcttctttaatcgaaacaaagtaaatgatatttttagacttacaaatagcaatgaacatttgactattgatgaggctagagatgttttacaggtatccaagaattggttcttcacatattgggtaaccacaggttttattgaagtaattgatctttgtttgtggcgactcgtgtcaaaacaacaagtagaagaagttctaaaaattaaagaaatttatttcactggtgtagaagcgagcaaatttcttggtatgcaaaactcgcatgtcacaaatttagcatctcaagagatcattacccctatttatcttggcaaaggtcctaaaattaggctttttaaaaaagaagatatctttgctcttaaagatgaatactctaaaaccaattatctagatgatctagcaaaagtttaa

SEQ ID NO: 68325 - DNA, 225 bp, Acinetobacter baumannii
atgaagagattaaaagttgttattaaagatcagtttgaccaagaaagtattgctttggcaaaggttagacctgcgaatgatcagaaattagagctgtataaaagtgtagagcatatcgaaattgatgacgatattattctaccgaatatggatttactgtatgaaaacccaaaagatggaaaaatttataaattagttggcccgtttaatgaagatgaaatatag

SEQ ID NO: 68326 - DNA, 441 bp, Acinetobacter baumannii; identical to SEQ ID NO: 68151

SEQ ID NO: 68327 - DNA, 258 bp, Acinetobacter baumannii; identical to SEQ ID NO: 46674

SEQ ID NO: 68328 - DNA, 336 bp, Acinetobacter baumannii; identical to SEQ ID NO: 46673

SEQ ID NO: 68329 - DNA, 249 bp, Acinetobacter baumannii; identical to SEQ ID NO: 46672

SEQ ID NO: 68330 - DNA, 435 bp, Acinetobacter baumannii; identical to SEQ ID NO: 46671

SEQ ID NO: 68331 - DNA, 1287 bp, Acinetobacter baumannii
ttgactcaaaaagggctaaattttggtgcgaatgaccagaaaacaacccaaggcaaagcagttcaccgtaagcttggtgacactatcaatattgtaggtggtgcggatgcaaaaactgctgaagataaaactagtggcgagaacatcattacccgtaccacagaagatggtgtcaaaattgagatgttaaaagatgtgaagttcgatagcgtgaatgtcgggggccatgtcttaaatcaacaaggtctaatcatcaagggtgggccaagcatcacagtgaatggtattaatgcaggtggtaaacaaattaccaatgttgcagacggtattaatgcaaaagatgcggtgaacaaaggccaattagacaagcaaattaacgaagttaaagatcaaattggtaaagatattggcaagctttctgatcatgctgtgcagtatgacaaagataaaaatggcaatgtcgacaagaactcagtcactttaggtggtggagaaaaaggtaccaatctgaaaaatgtagctgacggtaaagttgctgaaggctctaaagatgccgtgaatggtggtcaattatggaatattcaaaatcaagtcgataagaactcgaatgatattaagaatattcagaataacatcgacaacatttctaatggtaaagctgggttagttcaacagcaaaaaccaaatggtgaaatcacggtcggtaaagatactggtggtactagcattaatatggctagtaaagagggtgatcgtgttgttcaaggtgttaaagatggtgagattaaagctggttcgaaccaagctgtaaatggtggacaaatccataaaatttcagaaagcatcaaaaacagtattggtggaaatactacgattgatcctaaagatggctcaattacaaccaacaatattggtggtacaggtaagaacaatattaatgatgcgattgggaccttaaaccagtcgaaccaagaattgggtaacaaaattaccaatctgggtgatcagttacaacaagtgttctatgacaccaataaacgtattgatgacgttgagaaaaaagctaatgcaggtattgccgctgccatggccttagaaaatgcgccgtttgtagcaggtaaatatacctatgctgttggtgctgcatatcatggtggtgagaatgcagtcggtgtgaccttacgcaaaacctctgacaatggccgctggtcaattacaggtggtgtggcagctgcttctcaaggtgagccaagcgtccgcgttggtattagtggtgtgattaattaa

SEQ ID NO: 68332 - DNA, 1050 bp, Acinetobacter baumannii
atgaccaattctgatcaacaaaaagaattgcaattaataattgatgaatgtcgtattagaggaattactttagatgatttccgtaggtctttccgttctgtttcagcagaacaacctaaacaatggagaagtatccctagtattcttagtatgctaaatcaagaaaatttagaaaagctatcagaaaaaataaaaaaacttttagagaatcatcgactttataatgataaattattagttatctatgaaaatcaagacaatgcatatttacaagaattagatcaactttttaataagataactgtagaaaataagcaacttgataatagttatgtagctgatagttcgtatattttatcgcaaaaagataaagtttcattgcatcatttcagaaaaattagagatatattttcaaaagaagatattgatattgatagattaccgaaagatgcgcaatctgaacttaatgaatttgatcgtattatcggagttcgtgctaccaaattagattgctatgatgctgttatttttgactttaaagaaaatcttatgatcctgcaattagatctaattagtatgcttaatgcaggtgaaattgataaaaatattgaagactttttgaaaacattaaactctcttatcagtagtaatattggtaatacttataagattgataaaaaaacaaatgctgttaatctttatccatgtattactaatttttataaaaatagtgagggtgcgattacacgtttatcttttactacttctaaaggtgttcatcatgaaacattaaaaggggcagcaactgatatccggaaagctgattatcatattggtggaaaagctaaagaaagtggaaatatttatccttatagagtaacgaaaaagtttgaattagatatagataataaacctcaagcttttattggtgtaaaatataattactttgctaaaccgggagcaaaatttttagcttcagcgagaatttttgatgtaatgaattttacaagttatacttatattataagtaaaataattgagaatagataa

SEQ ID NO: 68333 - DNA, 447 bp, Acinetobacter baumannii
atgaatattcaatccaaaagctattttcataccttaattacaaacactaggttttctatagatacggatgtaaaacaaggttgtttagagcttttggattttcttattgagtacccttctctagatcttgaaactagtttttattttgatgagcttagaaaacatgtatctttagaggttgaagatgacgattttatttatagcgtattttatttagctcgtcctgagatcaatatattaaaacaagagttttcagcatggaaagaatccgtccatgattttgttttatttgaagataaaaattttattttagaaatgctcagagataaaaattatgtaaatcctttttcaggagaagaccttagctcagaagagtttgaggaacaagtacttactttttttacgccaacatcttattttttggaaatgagaaatgtccggatttag

SEQ ID NO: 68334 - DNA, 705 bp, Acinetobacter baumannii
atgtccggatttagtctattgcaaggcactattcaaagccttaccccgaaacaatttagtgatcatgatgatttcctcttcaacttatataaagtaattgatagagcttgtaaaaaaattagttcacgatctaagaaaatttctaagttagaaaatattgaaaaaatttatgagattctagaaaagttagaacaagacgataaaaaggaagttttgaattttatttcaaaaacccttgaagatgatatttctattcgtattgtagatattatttcggaaaattggaattttagagtttctcatgaaggctaccataatggccgagttgatattttagttgattcttgggattacgagcataagtggttaggcgaggcaaaaatttataatgggccatcatatactgaatttggattaaaacaactcgtttatgattactctaaaggagagttgaatgaaagcgggggtattctaatctatgttgacagtacaactcttggaattttagaaattattaaaaactgggaaagaaaattactagagttatcagaagatcccgctcataaattagaaaatataaaatttgaatatgatataaataacccaagagtcttatttactcaacatactcatcatctttcaaaggatctatataagattcgacacttttgtattgatttgcgtgataactctcatactaaataa

SEQ ID NO: 68335 - DNA, 237 bp, Acinetobacter baumannii
atgtcagcatgtgcatggttatatgcaagccaagttaagataagcagagaaaaagctgtgaatcttctaaaaaagagagcacaaaaaaataatgaaataccaaatttagcggggttctcttttgatggttgggatttgagagaaacactaaatgcacaagctaaatggaatagtattggtgcaatttttgctagtatatcaatgttatgccaagctatactacagatattcttttaa

SEQ ID NO: 68336 - DNA, 1449 bp, Acinetobacter baumannii
atgtttactcatgaccaaaaaataatgatagatcgcattgtaaaagaattggaagaaaataattttgcaatatttgctggtgcaggtttatcatcacctgctggttttgttaattggagggaacttttaagaccactttcagttgaacttgacttggatatcgataaagaaaatgatttagtttctttagcccagtattatgttaacgaaaatcatggaagaagtaggttaacagagagacttattgatgaaattgatatagctaaagaacctacagttaatcataaaattttggcaaaactaccaatttctacttattggactacaaattatgataatttaattgagaaagcgttagatgatgaaggaaagttagcagataaaaaattcactaaaaaccatttatctcagacaaaaaaaggacgttctgcagtagtttataaaatgcatggagatgctagcttacctgatcaagcaattataactaaggatcagtatgaatcatatcctctaatatatgcaccattcattacagctctttctggtgatttagtatcaaaaacttttttatttttaggatttagttttactgatccaaacttagattatattcttagcagaatacggattcactttgaacataatcaaagacaacattattgtattttcagaaaggtaaatagacaggattacgagacagaagaggatttttcttacaataaactaaaacaagaatttgttattaaagatttagcgcgatttagtattaaagttgttttaatagatacttggaaggagctaacatctatattggaagaaattactaaaaggtttagatgtagaaacgttttcttatctggtagtgctcatgaatttggacagtggagccaaagtgcaacagagaattttttaacaaaacttggggaaattttaatacaagaaggttttaaaataacatcaggtttaggtttgggaattggaaatgcttttattagtggagcaattaaagaagtttacagtaaaaaatatgcaaaaattgatgattttctaacaatgaaagtatttccacaatttgtagaagaccctattgaaagaaagaggatatggagcttatggagaaaagatctattaggccaaactggaattgccatcttttttatgggaaataaaatcattaaagatgatattacaggagagactaagcttgttttagccgatggtatggaagaagagtttcaaattgcgaaagaacttggtttaaaacttattccagtaggagcaagtgggtataaagcaaaggaattatttgaacgaataatatcggattttgatcattactatccaaatgtatcatctcaattcagagaagcatttgaaaagttgaatgaagatgttgatgatccgatacagcttttatcaaaaattcataatattattaaattaatttag

SEQ ID NO: 68337 - DNA, 441 bp, Acinetobacter baumannii
atggcaagaaaagtattttttagttttaaatatgatgatgtttctcgagctatgatagttcgaaatagttgggttactcatgattccgcaggatttattgataaagctgagtttgaggaagtaaaaagaaaaggagatgctgccattaaatattggatagataatcagcttaagaatacttctgttactgtagttttaattggtgaaaatactaaaaaaagtaaatgggtacgatatgaaattgaagagagcattaaaagaggaaatggcttaattgaaatagatattagcaagattaatgcacttggaaaagggacttctgattttggtgggtggctattaggaagtcaatataaaaaatttcgatggaatatagatgagggttataccaatctccgccattggatagaaaaagctgcattagaagctggaagaaaatag

SEQ ID NO: 68338 - DNA, 501 bp, Acinetobacter baumannii
atgccaatacttctagataatttaacttcttattctcgacgttttaatagtacaacatatatatttgattccatttttagaaggaaaagagcttttttatgccatagccataaagatgctgaatatatcacaggatttgctcaataccttaaagaagagaatattgatgtttatattgactggcaagactctactatgccagaaaaaccaaatcgagaaaccgctgaaaaaattcaaaggaaaattgagcaagcagactattttttctttttagcgaccccaaatgctgttcaatcaagatggtgtccatgggagataggttatgcagatggagttaaaccctatgaatcaatttttataattccgacaatagaccgtagtggtaacttctatggtaatgaatatcttcaactataccaaaaaattgatataacagaacaaggagtattagcctattcatatcctaactcatataatagcaagaatatgagtacattataa

SEQ ID NO: 68339 - DNA, 747 bp, Acinetobacter baumannii
atgattgatgaaaaaaaaattagttcttttgaggatattcataatattttaaggaatgtatctctcgatgatgggcattacttccgtggtgagcggcgtagtgattattcattaattcctaaaattggtcggataacaagtaaacctcagcagtatgaaaacgggaaaatatattttgatctcagatatccagtcagtattatcaatgaacgtgaagcttttaaacgcttcaagaatgctgctggtccgtatcttgaatcaccgccagtaaatgattgggattggctagctctcgcacaacattatggattaccaactcgtcttttagactggacaacaaatccactcgttgctctatattttgcagtatttgaatttgtaaatgatacttggttattgaaagagcagatcgatacgcctgattttcttggggatgctgcattctatgttatgcgcgtaaagcatccaccactagacattaactcttgtgatccatttgcgagtgatggtttgtttttttcaaatcatgtaagccctcgaattacttcacaatgtggactcttttcaattcagcaaaatccacatattccactaagatgggggcgtataacaaagtaccatatcccattttcagttagaatggaaataaagcgtgaacttgcactttttggagtgacacacagttttatctacccaggattagagggaattagtaaagatttacaagagcgaattaattgcttttga

SEQ ID NO: 68340 - DNA, 612 bp, Acinetobacter baumannii
atgccaaagaagaaagaattcgagcatggcggtgcacgggaaaacgccggccgtaaagcacagttcaatgaacccaccaaagtgattcgtgttccagaatctcaagtcaactttatcaaaaattggttactgaataatgtcaaaaccgataatcagacagatttcacctcaaaactaaaaatacagcaggtgcatccgaacaacgataaaatttaccatatccctttggcgacagaacgcgtggctgcgggttttccatcgccagcacaagatgatattgaacaagcactcgacttaaatgagtacttaattagaaatgaaaatgccacttttattgtcaaagccaattcgttgtccatgttagatgctggaatcgatattaatgatccgcttattgtagaccgtagcattcccgctaaatcgggtgatattgtgattgcacttatcgacaatgatttcactgtgaagcgcttaatgattgatagtcaatttaagccgcctaaagtttggctaaaagcagaaaaccctgactatcagaatatttatattgaagaggggcaggaactggttatttggggagtggtgacttataacctcaaacgaatgagataa

SEQ ID NO: 68341 - DNA, 1782 bp, Acinetobacter baumannii
gtgattgaaagtgtatccccaagattaggaataaaatcttctcttccagatcatttgcaagcgtttgttacagcttatcttatatggagaacaaacgataaacctgtagttatcgaatattctgaagagtatattaattcagatggtctgaaaaaaataaaatttaaaaatacgatcctgaatgccttagatagattgttgagtacgaatactaattatgattccaaagtgtttgatactagtcctcttttaatggcacaaattgaacacttacaggtaggattacttaattgctataaagtagcatatacaactcatttagatattaagctctcgaactcatgtgaaagatctggtggtaataggtatgacaaaaaattagaatatacttctttcatcgatttatttaattgttttgttgaacactctttagatgactatttagatttattcattttaattttaaataaaggtgactttgtttctcataaattctttagacaattttcaggatttattagttttcttgtcgaacaaacgaaatataaattagcggatgacacagaaagagatcggctatatcaaaagtttgaaggaactatagatttttttaaaaatggcccttctagaattttaaaaccttttacaaataatggattatatgatttatatcctaattcaacatctttaacttctatagaattacgaaataaaaaaagccgtattgataatttatttaatatctttagtgttaattatgacaatgaaagccgtagtgaagacgaagagacggatactgaatctaacccaacttcaagagaaattaaaggctacaacaaaattatttatggtgctccaggagcagggaaaagcgcatcgattaaaaggtttatagaagaaaatacaacagaaatattacgagataaaaactatattcgaactgtttttcatccagaaactcaatattcagattttattggctgtttaaaaccacataaggactctagtggaagtatcacttatagcttccgaaaaggtccttttattcagatacttgaaaaagctcttttagataagaaaaatcattattttttagttattgaagaattaaatcgagcaaatactgcagcagtatttggagaaatttttcagctactagatagagataataaaggaaatagtgaatatccaattctgatacaagatgaagatttatattatgctttaaaaggaactttaggttcagagcatgaattcattgtaaaacgtcaattgatgatccctaataacctatcaattatcgcaacaatgaatagtagtgatcaggcagtttttcccttagatacagcatttaaaagacgctggatttttgaatatttgccaatagattttactaattgtgcaacaggaaaagttccaatttatcatacaggtttactcaaggtggaatggaaaacattagcccaaactattaatactgttttgtgtcaactcaaggttgtagaagataaacttattggtccgtggtttattaaagatagtgatctggttgaagatcaagctgaacagactttcattggaaaaatttgttcctacttatgggatgatgcccttaagtataagaataaagatgaaatttttagaagtgatattcatgggtatggtgagctatatcaacgttattctgataagaaaccaatattctcagataaatttatggagatattacaaaatacacaaattgatgacattgatacttctgaaaagccagaaacagaatga

SEQ ID NO: 68342 - DNA, 1272 bp, Acinetobacter baumannii
atggaatataaattttttgaagataaacaatttatcgattcaaaagaaatccctgattatgtaattgataaattagtttcaattggaggccttgaggtagttaatcaggggcgaaaaattgcattttgtggggtcattatctttgatggttgtacatactgttttactcctgcaaaatctgaatctaaaaaaattgaatctataggaaatttaatcaaggtgattcatgcttataaaaactctatcgattctagtttgttagcattcgatgaagatgaaaaaggtaatgttattgaggaaatttctttaacagaaatttttgaaattatagatctatatttcagtgtgggtatcctaagatctaaaacacatacttatactgaaaagggtcgaacaaattggtctaaaacagtaaatagagagtttcctgtctttactagtgataatgttccgatctactttgacctgcataaatacccagtttccatttatcaagatgatttaatttccagtatccactgcgaaattattttggatattttgaataagtttcactggttagatgaaaggtttaactttgtttctaaaagtcagttaagtgaaaaaaaattatttattgaattggatgttgatcaaaaagtttctcttctaaatcaaaggttacactcaaccttcgtttctttagaaattagaactcttcaattattgattagatatttagagaggattcacgaaagtgggtctaagaatattatgattggaattcgaaaatttcattacgtttgggaattcttacttagaaatattttccatgatgttgatgaaaaaattaatacattactaccagtacctaaatatcaatttttaggtcctacagatttcagtgaaacttcgaatcaaaaaggtatgcgcttagatgtgttcattaaaagtgaaaatacttgttgggtcatcgatagtaaatattataaggctacaggtgcacaggatgccccgggctggtctgatttagttaagcagtttttctatatcaaagcagttaaattgatttaccctgagcttgaaacgtttaaaaatatttttatttttccaggaataaaaaatttactatctaatattgaaatggtttatcgagaagaatctaaaaataataaaaaattatcaaaactagcggaaaattttattccaattgaatgcttatatttggatccgaacgatttaatggagaagtacttaaattctgaaaaaatttacatcacagactacatctag

SEQ ID NO: 68343 - DNA, 885 bp, Acinetobacter baumannii
atgaatttagaattatttattggattttggaatgtcaacctatctcctcctgtgggcaagttatggggtaaatctaaagatgagaaaaaagaaaaggtaggaaaaattataaattcccttttagatactaacttggattttttatgtttatgtgagatatcacccaaagatattgaatatattgatcaaatgatttcaataattggtaaagggtatgattatgaaattaaacatgaaagttttaatggtctatattttgatacatgcgtaatatataaaaatagttttaattttttatctatgaattatgaagttgatggggaaaatagaaataaaatcaaggtgtttcaaaaatatgaattttttagtagtgagttaaaagaaagaataattctgtatgtcactcattggccttcccagcttaatgataattctgaaaggagacgaactatcgcatcttatatgcgaaaagatgttttagaagagaaaaaacttcttaaaaatacgaagattattgtattaggtgatttcaatgttgagccttatgattcatctattttgcatggtttgagaagtactagggataaaaaagtaatttctcataatagctctttattttataatccttattggaaatttttaccaattcaagactatttaccttctggtactcattattatgataaagcagagtatcatcattggcatatatatgatcaaatcctaatttctggaaatttttttaatgatggatgggatttagatggtaaaaatgtacggataattgatgaattggctttgaaatctcttcatagagagatttttaacaatccttcagatcacttgcctattttaacgaaattggagaagttaagtggaatttga

SEQ ID NO: 68344 - DNA, 459 bp, Acinetobacter baumannii
gtggaatttgatttcaatgatgcgattcaagctggaatttcggctgctataaatcgagaaaaaaatattgcagaaatagataagttacttttaagtacccataatgccatttttaactcaactgaaaataaagttggtttgcattggaggttaaaaacctttaatacattaggtatgcttgccaatttatctagtataccgctaacagatgtaaaaattgaacagcaagaaaaagaggatagaattttatacgtttatcaagagaatgatccatcactccgtcatgatctaaccgttttggttattaatccaaatggttatccatgtgagatgaatgttaatggtaataaactaatcgcacatgatataacctcacttgcagaaaatattaaaaaattgctatctagtgcattctttggacaaaaagttagagaattaatggaaaccatttcaaactag

SEQ ID NO: 68345 - DNA, 810 bp, Acinetobacter baumannii
atgaaattggatactattcaaaatgacctaaacaaactttatagccaatttatttctattgatgatctaattggtttattggaagaaatacaacccaatagtaataaagaatccattatacattggctaatacataagactgaattgttagaaaaaaccaagtatttattgtttgttaatgattgtgaaattgttgagtattctcctaacaatcaatttaatttaccttcacccattgaggttttgcataaattaaaagaaacatcttattgtataagtgggtattcagagatggttggttttgctaaacaaaggttattaattgaacttaaagcaaataatcttccaattactgacgagatgattcgaacttcaataccttatcttcctttatctgtaacaaaggcagagtctaaagagatgtcttatatttttgatgttattaaagacatacaaaattttaagaatgacaatgtaaaaattgatttgcaagatcaaaatgcatggattggaaagttaccgcccaaattacaagcaactattaatgcacatcataaaataaatattttgggacactatgcaggggaaagatctaaagcaaaaaaagttaagatctttttagaagatcactatcccatgtataccaattcattcctcaataaagtaataactacgcttattaactcaacaattgatgacttattagctggtgaagaaatagccaaaagtgataataaagttgcagaggaaatcagaaatttaggttttaaagagcattttaaaaaggcaaaaaaattaaaagtagaataa

SEQ ID NO: 68346 - DNA, 348 bp, Acinetobacter baumannii
ttgcaccctacatcaccttatagccttccatatggactattaagccttaaatttggtaatacaattgatctcaaatattgtgtagtatttaattctcaaaaagaagaaatagttaactttcaaaattgtttattgaataatatgaaccctttatttacaaaatctagatattttgtgatgcacacagattacgaagagttaaattatttatacctgcaagtaatggtgcagaaaaatataggatcaatttatggtaagggtttgaatagtcacaaatatataattaaaaaattaagatcgcgcattgcgaaatgtgaggctaatttacagctctcacttttagagtga

SEQ ID NO: 68347 - DNA, 1758 bp, Acinetobacter baumannii
atgcaaaatttaaatcacttattaaaaactgattattcaaacagttacgcactaatcattggaatcaataattatcaaaatgtatctccacttggttatgcagtaaatgatgctcaagaagtttcagaagttttaattaacaaactaaattttccaaaagaaaacgtaaaaatacttatagatggagaagcaaccaaatccaatattttaaaggcttatcattcgtatacatcggactctatcaatattgatgatagattaattatattcttcgcaggtcatggtcatactttaaaaggctatcgaggggatgtaggctacttagttccttttgatgcagatactagtgatacttcaacatttattcgctgggatgagcttactcgaaatgcggagctaattcgtgcaaaacacattctatttattatggatgcatgctttagtggattagcaatatatagagatgcaaaagtgggggcaaataggtttctccatgatatgtataagagattttcaagacaagttattactgctggcaaagctgatgaacctgtagctgattctggaggtcctttacctaaccactctattttcactggccacctgattgaaggaatgcttggtaaagctgcgaatgatttaggcattattactgctaacagtctaatgtcatatgtttatacaaaagtatcacaagcacctaattctgaacaaactccacactatggacagtttgatggtgatggagattttattttcttttgccctgatgattttaagcaaccatcagatccccaaatagggacagaccagttaatctcaattccctatgttaatgaagctagaactttacaaagtttagatgataaaattaaaacattaaaagagttactatcttcttcaaactcaaaaattaccattgaagactttcttaacgatgaaattagaacatttttatcaaaaaccaatgaagaactatttaatttaaattcaaataatctagattaccctcaactcattgaaaaaattgacaagtatgaagaaataagtagagatatttgcgtattagcagctttaattgcttattggggagaggttcaacatttatctttattagaaaaaataattaaacggtgttcggatccattattagatagtcagagtggattagtaattttgattgaattacgttggtatcctttaaccttacttcaatactttgcaggcatttccgctatagcaaataaaaattatttaacactaggcaaaattttaaatacaaccttaaatgaatcaaataaaaatgaagagaatgaaaccttgagtttaagattatcaaactccacatccgaaattataaagatttttaaaaaaatgcctggacatgaaagacaacataccccaatgagtgaatatctattaactcttatccaaccttatttagataaccttttcttcttaggaaaaagttatgaatactcttttgattattttgaaattttgagatcactggtcatattagacactcaactaattcaagatcctgattgggcttggtgtcctattggaagattcggttggaaatttaaatcttttagtttttcaaaaaattcaattttatcaaaagttaaaaatgaaatattaactgaaaaaactaattggcagccccttcaagcaggattatttggaggtaaatatgaccgtgcagagaatgctataaatcacctagaaactcgattaaaaggtattaatttctaa

SEQ ID NO: 68348 - DNA, 195 bp, Acinetobacter baumannii
atgaaaacatttactgctacgcgttcgcacactcaaaattttgttttagaacacactcctatctatgacctggatgattatcaaaaacgccagcgtcaattcaaacgtcaaaaattactgaagaaccttttagacacagcaatatttgccagtgctgccggcctcactttctccattttgttttggggagtctaa

SEQ ID NO: 68349 - DNA, 456 bp, Acinetobacter baumannii
gtgaaatatttcatcttttcttatgtattgttaatgagcagtaatgtctttgctcaatctgctgaagatgtgatttttggtatgaatattaagggactcgattttgttgaaccttttgatgcttctacagatcctaaccatcaattaggtagacccaatcaatatattgaaaaggtttcttggccagataaacgtattgatccaaactttgaacgtgatggcttttatgatgatgaaattgacccatctgaatacaaaggtggaactattgaaaagtttcaaagtcaggctgatttaaatagacggtataactatattaaaaatattcatcttaagatgccgtatttaaatgaatatatgtataaaaaggggctttttcttatgcgcttagataaagatttcacacctactcaagccaaagaatatgagagagaatttaacaaggttattaaatag

SEQ ID NO: 68350 - DNA, 648 bp, Acinetobacter baumannii
atgaaatttaaactacttataattcagttgtgtgtaattgtttttatattagcaattctctttttttctgttacttggatcaatattcatttacagaatcggatagactcatttaaagaggccatggttctaacaatttcttttttaggtcctgtaagtactatttttgcagcgatagttgcgacattcctttttaatgattggaaagaacagcataataaaactgtaattgctaatgaggcaaaaacagctttcaacttaatttgtgatgaacgacatttgcttaatgatttaaaaagaaaactccccaattttaaaaatcaagaacctaaaatctatttcacagttaatgatgatgaagcccataatatttttaaagatttattagcgaatcttgaggaaagcagatctaaattatatgagtttgttagattgatagaaggcaaaagtatatttaatgaaatttcagcctatagggatgagattcagaatttgaataaaaaaataataaactggagggaggcaatcaaaaattatgatgaagtatatgatgagtatgaatccagtctacaaaatattattaatttaaataacactattttagaaagtctaagagcatttattctttatgaaattgaagcctcttaa

SEQ ID NO: 68351 - DNA, 222 bp, Acinetobacter baumannii
atgaacagttatattgaagcactatatgaaagtatgctgccacgagtactagatgatattaaaaaaaatggatttgctttaatttcactaagatttagctccgacgagcagataaaatttcaacttttagacaaattcattgatgaaggttttaatgcagaatttaagaatgaaactgttaatcttgaagtgaaaaatgaatatctgttaattaaaaaatag

SEQ ID NO: 68352 - DNA, 2250 bp, Acinetobacter baumannii
atggcagcacaatatcattcgctttttactgaaaaaggcttagagctacttcgagagtctattcaaaatggtacaaaattaggtattacacatatgtcctttggagatggtgccggttctgtacctactccaaatgcagcgtttatcgcaatggtaaatgaagtctaccgtattcccttaaatcgattagctccatctaaagataatccgaattggttggaagccgatggtgtcatccctagttcagtcggtggatttaatattcgtgaagttggtttatgggcaggcaatgtcatggttgcatatgcaaactatccaccgacatacaagccttcaggtgatcaaggtactgctcagatcaagactatccgtattgttcttcaaattgataacactgctaattttgaattaaaaattgatgcaagtattgttatggctactttacaagctgtagatgaagctaaacactcagcaatacaatatgcagatgatacaaaagttcatgtattagattttcttgcagaattgagcgatatccctgcatgggacggccgagttgtatatgtcaaagcagtaaaagttgggcaaaaatttggtggaggttattttaaattttcaaaatttaatgaattagaaccagatgattttattgtaattgcaacgcccgatggaagatgggttaaacagcaaacaatctttacagttgatgattttggtgcatttggtgatgactctacagatgatagcattgcatttaatacatacgcagaaagtccttatactggcattaatattttattaggaaagcgaaaagctgtatatgtcatttctaaacaggtcgactgtaaaggaaaaggaatcatcggacatggtttttcaaaacaatcaggtgcattttatgatcatacttctataaaagtgaaagatgccgatttttcaaatgcaaaccccatctaccacaaccgcgcgtttatcaatgttggggcggaaattcgtgacttacaattaaaatgtgatgtcaaaacaattgatggcttacaggttggaggttataacacgaccatttcaaacatcaattttacgaatttttataatcaaatctatgtcgatggggcaacggtttcatttcgtgtttcagatttaatgtcgattggatgtggtaatgctggagtatttgtagcagataatgccaataatcaaagtacaacggcctattttgatcgatgtagttggcagtggggggaaaatgcgattctgtttagtaaagaagtatatggaagctcattcaagaatattattgctgagtatatgaacggatgtctaaaagcgaaggttttttcttcatgcatttttgacaatatttggtgtgaacaaactaaagatggggttgctaaagattggctaatcaatacaatgaaccagcagtcttttaataacacttacaacaatttatatattagaacaccttggttggatagaacaaatcctactgatattgcaaatggtgataactctggtggtgtatcaatttcaaaaagtgcgatggcaattaatggacctacaggagcaaaagcactttataaaatcaatggaatagggacaaggcatgcagattggttcggatctagtaacaaccctgtatcacttagaaagctatcaatttcatctcaaccaaaagctataggctctaattacattacgcctgtggtaattgaggcaccgaatggagcactttggtataaaaacgatagtgatacagactttacgccagtgacgaagcgtacacttatcggagcgtcttcggatggactttcagcattttatggtgttgatatatacacaaaaacccaaaaaaaatggacgacttcagatcataattcagggtcaatcggtcaatttcttgctccgttaatgttaacttatgacgctacctgggctaatcaacaaaacaatgctggctgggtaatttctaaagaatcaacaggaatttatctcttacaaagatcagcttctaatgtttcaccaatgagtaatccaaatatcattgttggaggtatgactcttggtaataagaaaggttcaggtggggcagttaattactcacttcaatacatagacacttatgggggatcttggaattcatattctgagtgttcaggcgtaaagatattttttagggatcaagcaggtgccctagttgatgtctttagatttacagtgatgtttacactaacttcaggattttcataa

SEQ ID NO: 68353 - DNA, 453 bp, Acinetobacter baumannii
atgagaactattttttacagatactatatttggtttttaatatttttatatgcgggagtaaattattatctatataatataattgaaacacaacttgatgttttgctggtagtttttattaatttatctacattgttattaaccttgtaccctttcttaataaaaattggtaataaaataaaaaatgaagacttcttaaactttatcgaagtcccaaagagatcaataaagtttccagatttaacagctttcttaggagagcaagctttgggatctttattagcaactctaacaatagtttatggtagaaatattcttgaaataacaaatagtggtatcttagcaggcgtgtttatatttttgctttttattagcactatggcgataacaacactctcattaagtaagattactttacaagttatttacttaaaaataggaaagtttaaatag

SEQ ID NO: 68354 - DNA, 1428 bp, Acinetobacter baumannii
atgattataagttttgtagatgaatataaaattgatagtttgaaattcgaagaaacaggcgcttttgatcctattttgggggtggatacaaggctttttattgatccaagtttaataagagatacaaaaatacctgaatttaaaaatgcttattctaaaattcaaaatttttttgaaaaagtcattaggttattgaagcaagcccaagaaacatctaaatcagatttattttggaaaaaggctttaagtatatttaaaacaaatgaaattaaaggttttagtattggttactcatccagtaatcaagggagtgggataggagagaaaaagaaacaacagatattggagaatattaaagcaataatcgaagctggcaacgaggatccagccatttttgaattagttggtgcttttgaagatggtgttggtccagatttaataagtgatatgacaactaatattttaattgatgagttgattgcatatacacaaagagtttgtgcagaatttaagattgatctaaaagaactaagattctcgaaatattataaacaagcaaatttacctgagaatccttatacaaaagaaccgattatattaatacctaaagagttcttaagagatttgccagttgcaaatgagtttgctgatcttaattggattaaatcccataatgaagaactccgagttttctttaatgatttgttgggtaacgcatataaatcagttactacccaagaaaagaagcaacatgtaaaaaatgtatttatacaataccctgatttgttgaaagaattgttagaggcctattccaactcaagacctagttattatgactttaatgaagataaaacaggggaagtgatttggtatagaacagctcaagatgtattagctaaacaacctctagaattaactttaaagaaaaacccaactttggatgatgtatatacagtagttaaaaaaatatgtatgcattttaaggaattaatagagaataatgggctgagtaagttactttatgatgataaagataaaagaaagcatgaatcagcagcacaattattattttttggaattgcaagtgcatattgttatgcaaataatttagatttatcccctgaggctgatgcaggtagaggacctgttgattttaaaattagtgcaggcgcatcaactaaggtattagtagaagttaagctaacatcgaataatcaattagctcatggttatgaaaagcagctccctatttatcaaaaagcagagaaaagtcaaaaaggcatatatttagttttatataatgaaggtattacaaaggggcgctgggagtccttcaattcattagttaagaatacgagactaaaaaatttagacgttataattgttaatgcaattcctaaagcatcagctagtgttgcggatgagtaa

SEQ ID NO: 68355 - DNA, 942 bp, Acinetobacter baumannii
atgctaaaaactatacttataatggctactgttactatattgggtggttgttcgattttttcccatgaagctccaggggcatattggtgcaatgaaccttttttaaaagaggattctagacagtttggagatgatgagttagcggctgcaaggaaaggttacatgtatgtaacagcagcagccttagctttacaagggagtgagaatgaagataaagatcattggataagtatccctagcagattaaaacctattcagcctgacccattttttggtgttgatggcttccaagcaagagcatttttgctctacgacaaaaagcaacccgatcaaattgaagctttagtcattgcttatacaggttcacaatcaaatgatatttgggaagactggattaaagcagattttctgaaaaatcaatctcaatataatcaagcacgagagctacttaaagatctatctgctaaatatccagatgttcataaaagaattgttactggtttttctttagggggagcccttgcagcacatgttgctttacataaagatacctctagtttagtttcagaggtatggacatttaatccaagtggccgtatttatgatttacgctctaaagccgaaaagaaaagtatggctaattcaactttaagagatccaagattctggttagttgcaaactatcttgaggcagtaagatatacaagaagtttaacagctcattatttttttggttccgactggattcctgcaccaaaatcacagtttgttaatcgagtagaattatataaaactaatcctgttcaaggacattttagatacattctctttcgtgacttgttgtgggcaggtgagttagatgcacgtataaataaacttgatgaaaatgagcctttggaaattttaaggaatactcattttagttcgtgtagaacaaaataa

SEQ ID NO: 68356 - DNA, 498 bp, Acinetobacter baumannii
ttgatcatcttagatactaatgcgttaataacattattgactgctgacaaggtcagtgctgagtatttaaatttggttgcttatcttaagcagtgtgaacgtttgacacaggctttacccatgccagcaatagctgaattcattgctggtgatgaaaatgaatctagaagtagtatgcttttaagtccaaattctaagtttaagaatctggacttcgatgctaaagcagctttaattgctgcacgtatatataaagattataaaaagcttcctaaaaatcaaaaatctcaaaatcctcaccagaaagtaaaggtggatattcagattttaggtattgcacttgcgaataatgcaaaaatgattgtgacttgtgatagagggattaaaactattattgatgcattagacttacaaatttcagtttttgattatgctgataataattatttagaacagatgattggtgcagaagtagcgcaaagtaatttagttcagtag

SEQ ID NO: 68357 - DNA, 348 bp, Acinetobacter baumannii
  misc_feature (262)..(271): n is a, c, g, or t
atgactaaaagaacaataaatatttatggtgccagacaaaataaccttaaaaatatttcattgaagattcctaaacataaaatcgttgtctttactggaatctctggttcaggtaaatcttctttagttttcgagactattggcgcagaagctcaaagacaaattaatgaaactcaagatagttttgtacgtaatcgcttgcaacattttggtgttactgacgttgataaaattgaaaatttaaatgtacctgtgattattnnnnnnnnnnggcaatattcgctcaactgttgcaacaattacagatatttatgccaatcttcgcttgttattttcacgtatgggtga

SEQ ID NO: 68358 - DNA, 453 bp, Acinetobacter baumannii
atgaagaaatatttattaatttgccttttgccctttttaactacaggttgtagcgcaaaaccaacaccagaagaagaactagatatccaagctagatttttacctacggtttttaatcttgatgcgggtacttatgctttagctcaaaaagaacctccttctcccttaactaagcaaatgtacaatgatgctctttttaaattaggtttattaaaaagatatgatgaccaagcaagtacagaatacaagctggagaaaactgtaaaacctattcctttaaataccttgtgtttaatgagtaattttgtgactaatccagcctatgtaaaatcattaaagcatagtattgagcaagaaccagatttgaataaatggattaaagaaaaacaaccacagtggcgagaagttttgaaaaaggaaaatccagaaatttttgattacccttgtatataa

SEQ ID NO: 68359 - DNA, 210 bp, Acinetobacter baumannii
atgctgaactctcggcctcaccctacacgccctttaattaaatatggaacattacttttaggtgcgcttttagcgggttgtaattcctcatcaagtttagaccccacaccgacacaaaagcagatcacaattaagcgcgataaattcggtacaccacatgtatatgcaaatgatacctatggactttttacggctatggatattcggtag

SEQ ID NO: 68360 - DNA, 1608 bp, Acinetobacter baumannii
atgaatcaacaatatgactatatcgtgattggtgctggctcagcaggctgtgtggtcgcagcacggctattagaagccaaggcagggcgtgttcttgttctagaagcaggaagccgagatagcagtatgtttcataccatacctgcaacggtggttaaagtattccagcaaaaatcatggcaatacatgactgttccgcagaaatattgtaatcatcgtgaaatgatccttgcacaaggaaaagtgttgggaggtggaagctcggttaatggcatgatctattgccgaggccaacgacaggattatgatttatggtcctcggaatggggatgcaatcagtggtcttatcaacatgtgctgcctttttttaagaaagcagaaaaaaatgaaagtcttgctgatgaatatcacggacaagatggcattttacctgtcagtgaaaaccgttatcgccatcctttaacacttgcttgtattaaagcaggtcaacaaatggggatgaattatgtcaatgatattaatggttgggatcaggcgggggtagggttttatcaaactactactcaaaacggttctcgggcgagtacctcaaaaacttatttaaagtcagtcgaaaaccacccagatcttacggtgattactgatgccttagtacataaaattgaaactcaaggtgatcaggttactggggttacttacagtgttggcggaaaatcaccgattacggtgcaggctcaaaaagaagttattctgagcgctggtgcaattggcagtcctaaggttttattactttctggaattggcccaaaacagcatttagatgaactcggaatagaatgcattcgtgacttacctgtaggtgacaattttcacgaccatttgcatatgtcggttaatgcgacagtaacaaccaataatagtctgctcggtgaagatcaaggtttaactgcggtaagacactttttacagtggtgttttacacgttcagggttgttaaccactaatattttagagggtggtggttttattgacactaataacaatggtcgacctgatgtccaatttcattttttacctgtgctggataattttgataatacccccggtgaaaaagcagttgctcaggcacatggacttaccattaaagtcggacatgtacagccaaaagcacgtgggactttgcgtttaagcagtaaagatcccaaagatttacctgttattgaccctaattatttaggccatcaagaagatattgacgcaaatatccgtgcggtacaggccggacttcacctattacaacaaccggcattgaaagcgattatcaaagaagtgattgagcctgcaaatatcgatcctgatgatattgaagcgattgataaatggatgcgtcagaacattaaaacggtttatcaccccgcgggtagctgcaaaatgggcaatgctccgcaagattcggtcacagatcagacacttaaagtacatggttttaaaaacttacgtgtggtggattgttctatttgcccacaagttccaagtggtaataccaatgcaattgccataatgattggtgaacgtggtgcagactttattttgaatcaggtcgcgtag

SEQ ID NO: 68361 - DNA, 1176 bp, Acinetobacter baumannii
atgaaaaaaatattaaccctaacaattttaatttcatcgtcttgtgcttttgctgcatcaaataacggagctgaacaagatatccgtagttattctttattgcatggtgttagtacagcagaagcaaataaagcattatttttagaagctaatcgagactctgcattagatgctattgaaaaggagtttaaaggacgtatagctggtatttatgtggaaaactcacctacatataaaattgtggtcagagtcaaaggttatggccggaatgagaaaagaaatatagctgtagggaatactatttcaaaaagtaatttgcctatagaaattcaatatggagctaaagagactagagaggttgctaaagggcaattgaataaagctgcaaaaattgccagtaaatatttttctaaagttcaaacggttagttacaatgaaaaaagtgggagtatagttgttgaagttaaagggaaaagtactactgagaatttaaagaaggttgatgaaatacaatctctttggaataatccaaatctaccaatagaaattaaattcgttaattggactattaaacctttggttgacgctcatggtggaactttcgttgcaggacaaatcagtccaacaatgtatggtgattgtacaactgcatttggcataaaaaattctgctggcacaaaatatatgagtacagcagcgcattgtccaaataacttcaagagtaaagcagatggtaccccctatacatttgtaggtgagattccatttgcgcagtctaatgatttccagtggaatagtacaacagccaatattactaatcagttctatgttgggccaacaacgactagaaccttaacaggcagacgaacgttatctgcaacaaaaataggtgacagtgtatgccattatggtctatcaactggatatagctgcggtacggttgaagcagtggggacatctattggtgatccaaactatcccggaaatttttgggttaaagtaaatacaaatacatgtggtcatagtgatagtggtgggccagtttttactgctctcactattgctagtggtattctttcgcttggggcattagatgatgcaacagatgaatgttatggatattactatgttcctacagataaaatttatgaaaatggcttttcatttatttattaa

SEQ ID NO: 68362 - DNA, 441 bp, Acinetobacter baumannii
atgatttatatgagaaatttattaaaattaatattttcattttctttgttaataccaataggttgttctaatcgagtacatgagcaaccttctaataaatatccatttgaagaaaaaatgaaagtattattagggaataatcttgaaattatagattctataaataaatatgacgcgcaaatttcttatttcgaatttactaaggaccctggtaaattagacaaaatagtcaagtatttagagaaagatggatgggtattaaaggggaaggggcaaggagttgatacatattgtttaggtctaaataataaaattaatatagttaatccaatttttggagaaattaaagattataaaggtggggagttaaaaataactaactataatattaatacgcttttgtatcgttactataagtggggagatgatttatgtgaataa

SEQ ID NO: 68363 - DNA, 222 bp, Acinetobacter baumannii
atgttagttctacttttttttatattgcaagttagttgttataaacgaactcataaagaagatgctgacaaatacatgtttttgattaaaatgagacaaatagtaggtaatgatgtagaaattgttaattcgttaaatcgtgcggaggatcaattagcttacttggaattgccattaaagtcagataagacctctaaaattattgaattattgaattattga

SEQ ID NO: 68364 - DNA, 1275 bp, Acinetobacter baumannii
atgccaaaaaaatccaaagagctttcagcactcagtgtatcaagaattaaagcgactggacgacattctgtagggggtgttgatggcctatgtttgaatgtagagggtaattctcgtgtatggattctacgtgctgttgtaggcaaacgcttagataaagatgggaaactaaaacctcatcgccgtgatattggtcttggaccctaccctgaagtttctttagctgaagcacgagcaaaagctactgagttaagattgcaaattcgaaacgggattgatcctatccgacataaacaggaacaacgtgaggctttacttcttcaacaacatcgtgaaaagactttccgtgaatgcgccaagattgtaattgagaagaaaacacttgagcttaaaaatgaaaaacatattgcacagtggtcatcttctttagaaacctatatctatcctgttattggtgatcgtgtgattggctctattactaaaacagatattgttgcagcacttgagcctatctggatagaaatacatgaaacggcaaaacgggttcgtggtcgaatagaaaccattttcgattatgctaaagctatggaatattttgttggagataatcccgctgcatggaaaggaaatttagaaccaattcttggtaatttaaaacaagaatcacgtccacatccctctttaccttatgaaaagctagctgaatttatccagcatttaagacagaaaaagggcatttcttccaaagcattggaatttgcaattttaactgcttgtcgttcaggtgaagtatttggcgctttatggaaagaaatcgattttaaaaataagatctggattattccaaaggaacgaatgaaagcggataaagaacatcgtgttcctttatcacaagtggctattagattacttgaaaaactttatcaagaagcccaccctcaaccagatgactttattttccctacaccacgtagtggtgagatgctttctgatatgtccttgactgcaatgatcaagcgcatgcatgagcagaagtttaaagaagatggtaatggctatattgatcctaagcaaaatcgagtgatcacgacacatggtttccgttcaactttccgcgattggtcagcagacaaaacagattaccctcgtgaagtttgtgaacatgtattagcacacaaactgccagatgaggttgaagcggcttatttacggggagcttatctcgaaaagcgtaaaggattaatgagggattgggctaatttctgtaatacatag

SEQ ID NO: 68365 - DNA, 612 bp, Acinetobacter baumannii
atgactacaagagtgaagaaattccaacagattaaaagcgaaaatacgcgacaaaaaattattgattcagcattaaaattactagaattaaaaggttattcaaaaactaatattactgatatagcaaaaggagcagatattacagttggagcttttcaacatcatttccctacaaaagatgctttacttgaagttctcgtattagaagttttatcccctttgaacatttcaagtttttcaaatgtttggccaaacttagaagataatattgttgataaagcagattattttgtaaaccaagtttggagtcaaatctatggaaaaaaaagttatatagcttcttggagtttaatattaggctgtcgtgccaataaaaaactgtttgacttgattttggaacagcgttcggtcaatgatcctatttttaatttaaacttcttaaaatactttccagaaatccaagaaaaagtacctaatgcagaacactttccctcttttatttattcaacattaagagggatggctattttagaaattctaaaccctgaaagcaaagaagttgaaagtcagttaaattttataaaaaaaacaatagtaatgtacgctcattaa

SEQ ID NO: 68366 - DNA, 978 bp, Acinetobacter baumannii
atgcaaactgaagcacaaacactactaagaattgagaaactcctgattaaagttggggagttatctcaagaacaatggcgttatactgccagacttaaactcattgttcgagaatgctgtcaactaattcatgacttcaaaaagatatatgactctgagctgcattatgctcccttcatcaatgcttttagatttaatgtagtcggttttgttgatgctttgtgccaaaccaaaggttgttcattggcggatattgaacactgtgatgagtggtttggagtcatgaccagacttcttaatgcatatcagttcatgatcaaagaagagcaatacgctttcacacgccaagaaaaacgtaatgcttgtagtcttgggaaatatgtaaagagcctgatagagcactatagccgattaacctttgtgcgagttgatttgaagtactgtaagaactctccccaagaaattacaataaatgatgtttataggcatttggcaatactatgtaaccgactttccaatgcagatggttgctttaaatatttgcaagggcatgcctgggcgatagaacagggagagaaggacggtggttatcatattcatttgctcctgatctatgattattcggagcttgacaatgataagcgacaagggaagcttgttggtgaagaatggttgaagatcactgaaggatgtggggcttatttcaatatcaatgattccgaagtccgtgacggttatatcgcaaaggggatagatggtttggggctagtcagccgagatgctcctcaaaaagtgaagaatgccatcaatgctgctctatatctcacccgaccaagcaagtttcagcaacggctacgagttaaggtatcgagcgcagcgcatagctttgacaagggcgattatgaacgtagttttcgtcgtcagttaaaccctcacgttgaatttaatctatatgactacgaatggctcggttgctag

SEQ ID NO: 68367 - DNA, 924 bp, Acinetobacter baumannii
atgattaattttaccccaacttatctggaacatgatgtcgctgcgcgttttgagcgagatattaaccaaatgtatttacgtgttcggtttaagcacggtggtgattacgatcacaaatactggtttgaacgatttttagagtattacaacttttggaacttcttatgtattaccaatgagttgcaatcgggtatctggattgagtcatttagacaatgcttttatgccagtaaacaggagttaatgcgaccaggtgcgcatccagtgcatgtgccagagtatagagtacagttacttgaattgattcttgccaagctggtcaagatatttagtgttccagcatttctggaagaactaaaagctagagaagaaaagcacggtaaacttgttgagcgatacagcaatgcttatgatgaggcaacgaaacattactttgatctgaataagattaatctgtttctgggctatctgccagattacgcaaattatgtatcgattctggatatggcaaagcacatcaagtcctttgaaaaatttctgaaccagtttagatattttccattggactatttatttcaatatcaacgggtagttcgtctacctgaaaaaaatgaatatgggttactactttcattgactttgaacgcaaatatttatcaggatagagcaccgattgttatgatgctaatacagctttggcattttgcgactgaaagtatgggaatgggtattgatctagatatagaggtgacagcagaaactcatcctgttggattcatgtttggtgagtttgatgataagagtgaccttgatttattgctacgacaggatttaacaagtacagccgagacttcaacgaatgttcgggtctggcctatcgcttttaagccttttattggtagagtgcctcgtagacgaggttaa

SEQ ID NO: 68368 - DNA, 495 bp, Acinetobacter baumannii
gtgcttgaaattataaggtatatttttacattcttcttttctagaagagggttagagacattttggataccatgcacctattggacttttcctattattttaatgattacgttcagccgttttgaaaatgcagataatattacacggcgtataggtaatgctaagctagttgaagtagaaggttctttagttgaacatgatagttccaagtatgggggtggaggactttatatctatggtaagacggtttctctgattgataatggaactttggtacaactgaaagtggtttctgctccatcaaacctttatgagttcgctaataaacagaataaagagacaattattctatttggaagagttatcgaccagtctttatatccgactaaaatcacaaacttaaatcatgaagagtatacagctttatcctcaaaagaatttaatgataagtttattcaactgcaagagaaggctcctaaagaagcaaagcaatga

SEQ ID NO: 68369 - DNA, 285 bp, Acinetobacter baumannii
atgaataatagtcaatttttaaaacgtttctttgagatcgaagctggcaaagaattaccccatcttgaggatgattatcaccatataactttcaatataacaactactcctgatgtgcctaacaaagattacattgtggtattttcaggtgatcacttgatatttcctataattcttcagtttcctagaaatgaacattacttaagattaggctgggttgataaattttttattgggaaaaataaggttcgaaaaggaaaaaaagaatcgagtttcttaaattga

SEQ ID NO: 68370 - DNA, 1455 bp, Acinetobacter baumannii
atgagttttacattccccaatacttccgagtttactggactttacgaaccttgccgtatcgaagcggatatcactgatcttgtaatagaaggtgatattccttctgctattaaaggtacgttttatcaggtagctccagatccccaatatcctcctatgctagggaatgatattttctttaatggtgatggtgtagttacggctattgaattgggtgaaggccgtgttagtatgaaacgtcgctatgtacagacaccacgcctcgtagcccaaaaacaagcccatcgttccctaaatggtgtatatcgaaatatttataccaatgaccccctagctgcaaaaaataacaccactgccaatactacagttattgaacataatggcgtgttactggctatgaaagaagatgccttaccatgggcattggatcttaaaacgctggaaaccattggagaatgggactttaatggtcaaatcaattctgcgacattcactgctcatcctaaaattgaacccaaaactggaaatctactctgttttgcttatgaagctaaaggagacggaacaccagatattgcatattatgaaatcagtgcaacaggagaacttttaaaagaaatctggtttcaagcaccttatgcagcaatgattcatgattttgcagtcactgaaaactatgtcatcttccctataattcccttaactgtggatattgagcgtatgaaaaaggggggacaacatttccaatggcaacctgatcttgaacaattattcggtattctaccaagatcaggtcaggctgaagatatacaatggttttacggtcctaaaaatggttttcagggacacaccctcaattcatttgaaaaaaatggaaaaatttatgtagatatgcccgtcgcgagcggaaatgtattctactttttcccacccgctgaagcacctgtgcattcagaacaaattacctctgctctcatgcgctgggagtttgaccttcaagcaacagatcatcatgttaagcctcaacctattaccaataagcaatatccatgcgaattccctcgttgcgatgagcgttttaatggtctcgaatacagctatggatttttacttgcttttgacccagatttagcatttgaccatgaaaatcttggagaatatcctttccagttttttaatcagttggctcgtgttaatgtccaaactgggattacagaaacatggtatcctggcgataaatattgttttcaggaacctatttttattccaagatcaaatgatgcttccgaaggtgatggttgggttgctagtattatgaatgacttgcttgaagaaaaatcagaattggtgattttagatactcaaaactgggaaaagggcccaattgcacgtgtcaagattcctttccgtttacgtatgtccttacatggtaactggtcccctcaggagaaatag

SEQ ID NO: 68371 - DNA, 1461 bp, Acinetobacter baumannii
atgtatcatgacaaatatactggccaatatatcaatggccaatggaagtcaggctctcaaaaggattcactaaaagtgactaatccttacaatcatgaaatattgacagaaatatcactagccaatattcaagatctggatgaagcttatcaagcagcagctaaggctcagaaagaatgggccgcaaaatcctcttcagaacgcgcacaaatcctaatcaatgttacccaagtaatggataaacatcatgatgaaatcgtagatgttttaattcgggaatctggtagcactcgaatgaaagctgaaatggaattttccgctactagagcctgtacttttgctgctgctatgctgagtcatcaagcaacaggtaaaataatccaaggtgatacacctgataaggaatctagagtctaccgttctgctaaaggtgtcattggcattattagtccatggaactggccattacatttatccaatcgcagcatcgcccctgctattgccctaggcaactccgtagttgttaaacccgctgaagatactcctatcactggtgggttattacttgccagtctgtacgaagaggccggtcttccggcaggtatcttaaatgtggtagtaggaaaatcttcagaaattggtgatgcttttacactacataatattcctaaactaatttcttttacaggttctacacggatcggacgccatattggacaactagcaatgacaggtccttcattaaaacatgttggtctagaactaggtggaaatgccccatgtgttattttagatgatgctaattttgaccatgccataaatgcggccgttgtaggacgttttttgcatcaagggcaaatttgcatgagcagcaatcgtattattgttgagcaatctttatacccacgattctgtgaagcttttatagagaaagtcaaaactctaaaagtcggtgacccccaagatgctgatacagtgattggaccacttattaataataaacaggttaaggctgctactcaacgtatacagaatgccattgctgctggtcagcatctcgctcttgctggtgaaataaatgaacaaatagtttcgccacatgtatttgtgaatgtagataaccaaagtgaactggctcaaacagaacagtttgcaccaatcgcccctctaatttgtgcgcgtgacgaagaccatgcccttgctttagccaaccaaactgaatatggccttgcaagtgcagtttttactgaaaatgaggcacgcggcttacgttttgcaaaacaggtacaagcaggcatgacacatattaatgatattaccccaaacgatgacccctatgtcatgtttgggggcgagaaaaatagtggcttaggtcgttttaattctgaatggatgatttcagaatttacaaccgaccactggatctcggttcaactaaaaaagagaaactacccattttaa

SEQ ID NO: 68372 - DNA, 1596 bp, Acinetobacter baumannii
atgtcgaaatttaaacttatgctcgatagtacagtagcagcaatgttagctttaatttttgcttatgctctgggctgggaacatgcgtggtgggcggccatgacggtatggttggtcatacaaccctatcgaggtctgatggctgaaagaattctggctagaagtctagggtcaagcattggttcaatcataggtgccatgattatactttttatagcgcctgtatccttacaactgctgtgtttaggtctatggttacttattagtagtggtttaggaagcttatttctgcaatatcgtaattatgcgtttgtagttgcaggttatacagcagctatcgtaatcatgttctgctattttgaaaataaatttgatgttgagctagcatatacccgtattttttgtacatttattggtgtatttttctgcggcttattagtactgccatttataccaaaaactaaacataaagaagtcttccagaacttatcgagtattcaaaaacaaattcagtatctttttagcaaaaccactggtctcaagcctgagccaaaaatttatcccttttgctttgaattaaagcgtatttatcaatattcattgtttcatcaggcttttacaaaaaaaagaaattatcaacaacttcttcactccctccttcagcaattatcacttatacaaggttttactcagcctgaaaccagaagctattttttagaaaagcaaaaagaagttgctgactatacacttccattgaagaaaagactgaaatatttctttcaatatttcactttgaatcaacgaactctacatgtcattcatgtggttgtgcgagttatgggagtttatttctttacccttctactttggtttggtatagggttagaaaaggcgcctttaatggttatgacggcaatcctatttgcttcattattttccaaccatacccatgctccgcaggcactcatcgatgtcatcaagggaagtttactcggtgcaatacttggcctgatataccgaatttttattgtgccaatgcatgattcaggttggatatatttagctttgttcatgatcctgttgttcggtgcgtttcttatgaatcacactaaaacagcaaaaatggcaattgatttaaatatgacatttttactaattgcccaacctctggcagaagtaaaccagcagatccctgatattttactggaatgtctggctattttaacaggtattgtcatcacctttatctggttcagatacggtgtcccttatttttttaagataatttcatgtaataaatacttttcagacaaactggaccataattttaaaaaaataacagaatatcaagagcttaaatacattacttcgctcatacgaaccaatttatgtacccaaattttagaacaaaaccagactgcccatgaacttgaagctgctttaagtgttttgaaactgatttgtgtgctggaagttgaaaacctaccaccacataactttcaaaaatcaagtatccagattttaatgcaagaaatttctcagctacctaatttgcaatatacccccgttcaaggagaacaatcacatgtatcatga

SEQ ID NO: 68373 - DNA, 612 bp, Acinetobacter baumannii
atgcgggtaaaaactgaagaaatgaggaagcattttatatatacagctggaaaattatttgtagaacaaggttttgccaatgtttcaattgaaatgattgcaagtaaagcgaaaaaatctaaagttactttatataattattattcaagtaaagatgatttgcttaaagcctatatctttgaaataggaaaagatttagtagagaatattcctaaaattttattaaaacagggacaatctgtttccgaaactttgacagaattagcaaagtcatatttaagtctgaatacctatcaggaaattgttgagcttaatcgtctcatgattgccgaagccaaaaggtttcctgaacttgtagaatattattataagcatggtccatatcgggtttttttgtatatagcagaagtattggagtatttaatggatcaaaatttattgataaaggctgataaaaatttgatggcacagcaatttaaagcactatgtgatggcaaatttctagaagctcagctttggggacttgtgactactgaaaattttagtgaacgggatatagatcttcacattcagcagacaataaatacatttttaaagatttatcaaatttaa

SEQ ID NO: 68374 - DNA, 756 bp, Acinetobacter baumannii
atgagcaaaatacataatttttctaaattactagtagcatttcaaaataccccatctattgatatcgattttgtcaaacaagaattaaatctatctactgcttccgcctatcgatatttatccaatttggaaggaatcggctttctggaaaaaaaatcagcatcaaattatattttaggaccgctcattattgaactggaccgtattattcgtgaaaatgaccccctaattcaagcagctagccgtcaaatggctgaacttgcttaccatctagatgaggcagttattgttttggcacgtctatatggcaatcgggtattatgtgttcatcaggtcaagggtattcattctcgactaaatatcagctacgaacggggtaaggctatgactctttttcgtggtgccacttcaaaggctgtattagcgtggctatcggaaaaccacattgaagacatttatctacaagtaaaggatgagcccttttttaagcaaaaatatcccaatctagatagattaaagaatgagcttcatgaaattcgcaaaaataaaacatgtatgacttatagcgaaattgaccctggtgtatatggcatagcctcacccattttccacggtcaaaaactaattggtagtctgagtattgtgattcctgaaagtagtatgaaccagctcaacataaaaaaaattaatgaccaaatttaccgtttaagtctacaaatttcagcacgtttagaaagccagcctttaatgccataa

SEQ ID NO: 68375 - DNA, 798 bp, Acinetobacter baumannii
atgtgtgaaattggtgcgaagctaaaacacttaaccttatcgtcagagcaaccgcagattttggcagatttctatagtaaggcttatcaactaaattctgacaaatccagaacttcggagctggaagaagctgttagtctcgagtttagagaaggaatatctgggcagatgtatcaactcatctatacttttaatagtcccgcaaattttaaaatgtatcagaaacgagtcatacagaaaattagtgttgaggtgatttctgaagaagcctttatggtacatgaccccttaggacatcgtttaatttttcagtatgaatcacaacagcctcatccagagaataagttgagattgcaacatatcggactgcgagtacaagaaattcaacaagtcagtgaattttatgagcaagtgcttggttttactatttctgaccgcgtattgaacgatcagaacgaattgactgcaatttttatgcgtactgatgatgagcaccattcgatggcactgtttaaatctccgattaaccgatttgatcatttttcttttgaaatcaatgactggcagggcatgaaatattgggctgaccatatggctgctaatggaattgagttggtatggggaataggtcgtcatggtccaggaaatgatacttttttcatgattcgagatgctgatgggaacatgggagagatttctgctgaactggaacgctgtgagcctaatcgtccaatcgggtactggaaacatcatcctttaacgcttaatcaatggggcgttgctattatgcgttgctaa

SEQ ID NO: 68376 - DNA, 1590 bp, Acinetobacter baumannii
atggaaaataatcaaaaaactgaggtcctgataattggtgcaggacctgtaggattgttattggctaattttctaggagcctatggtgttaaaacacttgtactagagaaaaatcctacatatgaaatagagccacgagcggtttcaattgatgatgaaagtctgcgcagcctgcaatttattcagctcgctgaaatattcaagcagcaagtcgtcttaggatatggggttcagtattatgactggcagaataaacccttggcagaaatcaaacctaatacacaagattatggttaccccaaacgtaatgcatttcgtcaaccagatcttgtcaagttattggtcgataatctcaaaaactatccttctgtaaagttgttatttcagcatcaattattgagcattgatcagaacgatgatcaagtagtctgtcaagttcagacaggtgaacaacaagatatccatgtacaggctgattggatggtgggctgtgatggggggaaaagtaggacacgggagctgattaaagcaaaacttgagggacaaacttatccgcaaaaatggttgattgttgatctggcagaacgtcagtgtagtttaagacatactcagacgttttgcgatcctgtccgtcctgccattcgtttacctgggccaaatcgtacactacgctatgaatttatgttgcatgaaaatgatgatgatcagcatgtgcttaaggaggcagttttccgtgactggatccggcagcgtaggagcatagatgcagatctaccactagttcgtaaggcggtctatagttttcatgcacgaacagcttccctttggcaacagaaccgtgtcttactagcgggagatgctgctcatttaactcctccatttgcagggcagggtttgaatagtggtattcgagatgtaactaatctggcttggaaactcgctggagttttaaagtggaatctgccagatagtttaattaatacttatgagattgagcgtaaacctcatgcagcagcattaattaaaatggcattgcagattgggacttttatgcagcctaaaagcaaatggagcgctttttggatgcaaaatacactacgcacggcttgtctgatttcaccagtaaaagattatattttgcaattaaaattcaagccaaagccacattttccaaaaggctggtttatttcaaaaaaacatcatgaacaagcggagttaattccacagccatatgtacaggatcaaacaggcaaagttgctttacttgatgactatctgggacaaaattttgcagtggttagttgggcaagtgagagcttttgcaatgatatcaaaaaattcatacctcctaatgtaccaatcacatatattgccttaataaatcaggatgaagattttatttcacaagagtgtaccgataatttcattttattgcgtgactgtcatggtgtgattgagaagatttttaaaaaacatcaagctgtcgccatgataattcggccagaccgttatagctataacatgctgaccgctcaggaattacaagcatccgtagttgataatccacattttaatacagcatttgcctga

SEQ ID NO: 68377 - DNA, 849 bp, Acinetobacter baumannii
atgaagttaattagttttcaaatctcaggtaagaatgcttatggcgcaataactactcagggtattattgatttatcaaaagaattttcagatcgctaccctgacttaaaaagtgcattgggacaggaagctcaagctgaacttttggaatatatcaatcaggcttccattgattataccgaagatgaggtaacttttttacctattataccaaatcctagcaaagtcttatgtattggccataattacgaagcacaccgtctagaaaccaatcgggcaaaaacggattatccttctgtatttatgcgttatgccgaatcacagaccgcacatctgcaaccaatgattaaaccatatgaatccaatatgctggattatgaaggcgaaatcgctgtggttattggaaagcagggacgacgtattaaaccagaaaatgcatgggaatacatagctggaatgagttgttataacgatggttcagtacgtgattggcagtggcatacccagcaatttggaccaggcaagaactttgagggtacaggcagttttggaccatatctgcttacagtggatgaacttgacccgaacgaagtcttatcactcactacccgtctcaatggtcagatcatgcagcaaggtgatactggcatgatgctttttccaattcctcaattaattgcctattgttctacttttatcagcctaaatcctggggacgtcattgttactggtactcccgcaggtgtaggagctaaacgtcaacctcccgtatttttaaaagagggagatgaggttgaaattgaagtcactaaacttggcatattacgtaataccgtccaacaaggttaa

SEQ ID NO: 68378 - DNA, 1341 bp, Acinetobacter baumannii
atgtctcaaaattacatggacgttcaaaaatttattgatcaactcaggtttggaaaagtacagaaactgattttattactttgtttttgtgttgtagcaattgatggttttgatactgcttcaattggttttattgcacctacattaaagcaggactggggggtgctaccaacagaactagctgctttatttgcatctggtctgattggattaatgctgggagcattagtttttggaccattggctgatcgttttggtcgaaaaactatgctggtgctttgtatttttctatttggttgcagcagtttagcttcggcttattcgcctgaaatcaattttttaatttttttaagattcctgactggtattggacttggaggagcaatgccaacagcaatcactttaatgtctgaatattgtccttcttccagacgttcagtattagtaatgactatgttttgtggttttaccattggctcagcagtaggtggaataatatctgcacgattaattcctctggttggctggcaaggtattttatttataggtggaattttacctcttatcttgttgcctatattttactttcttgttcccgaatccttacgttttaaagtcctgaaacgacatactgagactgatattcaagcaatcataaaacgacttgcaccccatctacaaacgcgagtcatattgaaaagtcaaaaggaagaaaatgcaacatcttctgttagagagttattaagtcgtaaatattggtgtagtaccttactcatatggacaacttattttatgagcttaatgatcatttatttgatttcgagctggatgccgacactactgactaatataggagctacactcgaaaaagcctctttagctacggcagtatttcagattgggggaacattggggtcaatcacacttggatatttgatggataaaataggagctgatcgaatgctatcttcggcttacttattgggtgcattatttgtcttttttagtggtttttctacatcaagcctattctggttaatattgagtatttttattgtgggggtatgtatcagtggtggacagactgggctcaatgcttatactgcgggtttttatcctactcattgtcgtgccacaggtgtcagttgggccaatgctattggtcgatgtggttctgtattaggatcttttatagggggatggttaataagttttaatttagatatcagtgccatactttcactattagccatgccagctttacttgccgcattaagtttgtggttactgagaagaaatcgacaggactatatgttttctccggaatatctagaacattga

SEQ ID NO: 68379 - DNA, 1182 bp, Acinetobacter baumannii
atgactaatattgatcggaaaaccagtgtactggcgattatggttgctcactgcgcaggcatggtcgatatgattgcacttcccatttgggttggggtgctaattggacagtatcattttaatagtcaacaagctggtatggtggttaccctgtttttggctggagtaacaattgccagtctaggcagttcatctttatttaatcgttttactgcaaaacccttcatagtattgggattttttgcttcggcagtggcatttgtatgtacttattttaatacgacattatccagtttgaatatattacattttattggaggattagcaacaggtattgccttgagttttactcatggaactattggtttatctaaaaatccgcaacgattatttggtattgccggatgtgctatcggaatttttggtattatttttacaacggctattttggcagttctagctagatatcagggatcttatttctttcttgcattagcactgataatggctttggctggattgattactgcaatattattacccgatattgagagcaaacatcatattgctatcacaggttcgacactacaaaaaaatgaaaaattcagtaaagctgtatggttatgtatgtttggagtggctgttctagctctgaatcaggctatgaatgtcagtttttatgaacgtattggagtagatcgtcaatttgatcagcatattgtctcatttgctctcattatttacgctattacttgtatttttcctgctccattagcagcttttttgcagaataaaattaatccactttatgtattatgtataggaccgctctttcaagctgtattttctctcatcttaacacagacgcataatttaaccctttatattatttcgggttctggtattgcattttgcatcatctttatacacacctttgcctttggattattagcaaaaatggatcctacgggacgtgctgttgctgcgacgcctgccatgcttatgacaggttcagctattgggccaattttaggaggaaccctgatacagatttcaggttttacagcgattggatttttaactttgtgcctagtgttgttacaaatcattttatttcatttggttcgtttaagttttaaaccgaaacaggatatttctgttcataagctgcctgtttcttaa

SEQ ID NO: 68380 - DNA, 960 bp, Acinetobacter baumannii
atgaaaatttcaaaagtattatggactatattatttagtggctgttgcacggtatatgctgcaacacctagtgtaacgttgcctggtggtgtcaatcttggagcgactagtttttatgatggctttggtggtcagccaggagatagtttatggcagacttatgtgggatatacagatgcgcaagatctgaagaaccaacaaggaaataatgcattactagggtcttcatcattaaagtctactgtgctaattaatcagtatattcatatgtttaaggatattaaaccaattctaggaggacactctggtatagaaattaatgtgccttatatctttttagatggtgatactcaatttccgataaatctaaaaaccaatagtgctgggattggggacccaactgtagcattatttattcagcatgatccattgatacgtaatcaacaaccctttttctcagatcgcattagtgtaggtattatgtctccattaggagattacgataaaaataaggattttaatcctggatcaaattatttttctttatttatatacgctgccatgacctttcaattcaatcctaaatggtcattaagcttacggccgtattattattataattttaaaaataattcacctgctagtagtgcaccattagatgctgatgttgaagatactcaatcgggtcaattttttactactaactataatttagggtataagttgaatgagaatttaacagtaggtattaacggctattacttaaaacagttaactgacgataaaattaatggagaaaaagtaaaagattccaaagagcaagtatttgcgattggcccaggagctatgcttgattatgggaaaaataagttttatttaactgctcataaagaatcccaagtagaaaatcgttttaaggcagagtctaatgtaacattacgttggttatatgtgttttaa

SEQ ID NO: 68381 - DNA, 210 bp, Acinetobacter baumannii
atgaataatagtcaatttttaaaacatttctttgagatcgaagctgacaaaaattacattgtggtgttttcaggagatcatttgatatttcctattattcttgagtttcctaaaaatgaacatcgcttaaacctaagttggattaatatcttttatatttcgaaaaagacagtccgtaaagccaaaaaagaatcaagtttcttaaattga

SEQ ID NO: 68382 - DNA, 153 bp, Acinetobacter baumannii
atgacaaagccaatgaatcctcaagaacaggaagcatttgatcaattcgaagaagataaagaagaacaaattcagcaaatcatggctgaaaaaagttgctctgaacttgaagccgcagcaatatgggaagaagagtacaatcaatctatttag

SEQ ID NO: 68383 - DNA, 1218 bp, Acinetobacter baumannii
atgagcaaatttcagcaattaaatagatatttagctgaagccaaaccttccgcaacatataaaatgattgatcgagttgctgaaaagcgggcttctggtgcaaaaattatttcacttagtgctggtgagcccgacttcgatactccagaacatgtacgccagtcagcaaaagatgcgattgatgctggctttactcgttatacacaagtagctgggttacgtcagctaagagaagcaatcgctgaaaaattccaaaaagaaaatgatttagaaaacgtaacttggaaacatacgattgtttgtagtggtggcaaacaagtactttataatgcgcttgctgcaaccttgaatgaaggcgatgaggttattattccggccccttattgggtaagttaccctgaaatggtacaacttagcggagcgacgcctattattgttccatgttcagaaaaacatggttttaaacttacaccagaacagctggatgaggcaattactccacaaactcgctgggtaattttgaattcaccttcaaatccaactggagctgtgtactctaaagatgagttgcaagccttagcagatattctaataaaacatccccatgttttggttttgtcagatgatatttatgaacatttaatatttgatggacaaaaatttaatacaattgctcaagttgaacctcgcttaattgatcgtactcttactatgaatggtgtatcaaaagcatatgctatgacaggttggagaattggatttgcaactggtcctgaatggcttttagatgcaatggaaaaacttcagggacaacaaacttcaggggcaagttcaatttctcaatatgcagctatggcagcattgacaggttcacaagattttgtaaagaatactaataaggtcttcgaaaaacgtcgagatatgatggttcaattattaaatgacaccccatatttaagttgcttgaaacctgaaggtgctttttatgcttttgttaattgtgcagaattgattggtagaacttcacagtctggaattaaattaaacactgatgaagatgttgctttagctcttttggatgaagcaaatattgcagttgtacaaggtagtgcttttggattggctccatacttccgcatagcatatgctttggatgatgaatcgttgaagactgcttgtattgcaattaaagatttttgtataaatacaactccttaa

SEQ ID NO: 68384 - DNA, 624 bp, Acinetobacter baumannii
atgagagaggatatttatcaaaaagcagtagagtttggttcatcaactatttatgaggcatctggtttagatacttcggttgatcgtgacataaaagcagtttgggctggtgcagccgttgctggtcctgcttataccgtacattgtgctccaggtgataatttgggtattcatattgctatggaacgagcacctaaaggaagcgttttagttgtagcaacggatgaccatattgcaggttgctggggtgaagtattgacttgtatggctcaagctcgtggattagcgggacttctaattgatggaggtgtacgtgatattgctgctttacgtcgtcgtcaatttccagtgtttagcagaggtattactgttcgcggtacgatcaaagattatgttttttcagtaggaaaagatatggcatttgggggagttcgcgttgctactggtgatttagtagtagctgatgaagatggtgttgtaattgtacctaagcatgccattgaagaaactatgaaaaatgcggaaatacgttccaataaagaagctgaatggatggataaacttgcggcgggagcatcaaccttagaacttatgaatttgaccgcgtggagagaaaaggtatga

SEQ ID NO: 68385 - DNA, 666 bp, Acinetobacter baumannii
atgagcttaactgataaagaaatagttgccttatttaaaggtttggatacacctggtgtcagtgatgctatggataaactcggtatccctggtcaatgttttggaattatgccacttgcaaactattctgaaacaattataggcccagcatttacagtgcaatatgttcccagtgcacaaccatcgggatcagtgggggactttatcgatgatgtagctgaaggagatgtaattgttatagataatgatggccgtactgattgtaccgtatggggcgatattatgactcagtatgcaggtatccgaaaaatttcagcgactgtaattgatggcgtttgtcgtgatgtatctaaagcattaactgataactatcctgtgtttagccgcggtcgtttcatgcgtactggtaaagaccgagttgaagttgcagcagttaatcaaccggtttcaattggacaaactagggtatgtgctcgtgatattgtgattgctgatgccagtggagtagtggttgtacctcgtcaccgagctgaagaagtagctcaggttgcacgcaaaattgaaaatattgaagcccgtattcgtacagcgataagttcaggaaaaacacttggacaagcacgagaagagttgggttatcacttactgcaaagaaaggatgcataa

SEQ ID NO: 68386 - DNA, 663 bp, Acinetobacter baumannii
atggaaaaacagctaaaacgcttatcggcattagatacaacaaccatttctgatgcattggattttttaggtctgccgggtgcgacagttggtattacaccgctttgggcttgttctaaagttgttggtcgtgcaagcactgtgcaacttggacctaagaaagaatcggtaccaacggttcatttaatttctcctgtgatagcaagtattaatacgaatgaccgcgttctaatgatcgctggaggtatagatggtatttcttgttggggagatattttggcaaatgctgcgaaacaaaaaaatatccaagcgacattaattgatggatttagccgtgatattgaagcaaatgaggacattaattacccagtatatggtcgtggggtaacaatgattagtgctcgtaatcgagttattcagtatgactcaggtaaatcgattcaatttgcaggtgtgacagttaatgaagacgattatgtaattgccgatcgttgtggtgtggtagttattacccaagatcaaatagatgaagttttagagttagctgaacgcattaagactagacaggatggaatggttgaagctgtaaaaacaggtcgttcagtagaagatgtaatgcatgataaagagtttgaggcaattaaagtaggtactgcatcatga

SEQ ID NO: 68387 - DNA, 903 bp, Acinetobacter baumannii
atgataaattttcgtcttatgcgacatttatggttgtttcttgtagtagctgaagaacaacattttggccgcgctgctaaacgattaggtatgacccaacctccacttactgaacaaattcagattcttgaaaatgctctgaaggttaaattatttatacgctcgaaaagaggagctcaactcacacctataggtcaagctatatatcctgctgtgaaaaaattttctgaacaaatggagcaactggaatttgcagtttctgaagcaattcatggtcaaaatggaactttaactattggtgggatttctacggcaatgtttgaagtcctaccaaatttactggaccaattgcgacatgagcatccggatttaacaattttagttaaagaaattgacagtgctgacgctgtaccattgcttgaatctggtgaaattgatcttgcttttgcacgtttacaaggtgaagtaggaactaacttaaaatcgatcaaattaactgaggataagcttgctgttgttattcctaaaaatcatcatttagcttcatttcaacaaattgaattaaaacaactttctgaagaaatttttataatgttttctcgcaaatttagtccaatttactttgatactattgtgtcagcttgcaatactagtggtttttctccacgtattttacatgaagtccattctgtttcgactcaagtcgcttttgttagttgtggacaaggcattgcactagttccagcgtctctacgaaaaattgctccagaaaatgttgtttgtattcctttaaaagaaaccattaaagtagtgacaacagctattgcatggaatactagaaatactaatccagcaattgtttttgctttagatcaagtagcaaagaattttaatatagtttga

SEQ ID NO: 68388 - DNA, 825 bp, Acinetobacter baumannii
atgtctcaagtaacgccttttgaatacaaaaaaatagatttatgtattgaagatacaaaaattaatctatcaattattcaacgcctaacgggtaaagataagataattttatttttacatgggtttggttcgaccaaggaagattatgccaatcttgtctattatgatgcatttaatgaatttgatttcatagcatatgatgccccaagtttcggtgcatcaacttgttctaatcatgaaaaattaagtatcccatttctggtgaaaacagcaaaagccgtattaaatacttataacgttgataaatttcatgtaattggacattcaatgggaggcttaacagccttattgctcgctcatgatcttccgaatcaagtaagcggttttatcagtattgaaggaaatatttcaccggaagattgttttttaagccgtcaaattattagttttccagaaaatgatccacgtgaattttttgataaatttattgaacgagtaaaagtttcctttgatccagcggcagccctctatgctgcaaatattgaaacaaaagttaatccttctgcgataaaaccaatatttacttcaatggttgaattatcagattcagaaactttaatgactaaatttttgaatttgccatgtccaaaaatgtttatgtatgggattactaatcgtcatttaagttatttagaaaatatacaaaaaaaaggggtcaaactttcagaaattgatttttgtggacattttcctatgtattcaaaccctgtgcaaatgtggaatgacatatctacatttttaagtgaaactatctcaaaaaattaa

SEQ ID NO: 68389 - DNA, 1479 bp, Acinetobacter baumannii
atggacaaatattttacagacatactaatgtcatgggttaatttcctaaatgctcctttatgggattttcttgtcatctttttacttgctgttgggatcttttttactgtctataccaaaggagtgcaaatacgtttattttttcatagttttagaattatgaaaaatagtcggcaaggtcatcaagataggcaaggtatcactccctttcaggcattcgtaataggtttagctagtcgagttggtgttggtaatatagcaggcgttgcaattgcaatagcaattgggggcccaggcgctgtattttggatgtgggttaccgcacttttaggaatgagctctgcatttattgaatctacattagcccaattatttaaagtaagagatagtcaaagccacagatttcgaggtggtcccgcttactatattactcaaggattaaaaaataaattccttggttttacatttgctatttcattaatttttacgtatggatttgtctttaactctgttcaaattaatgctgttaccaaagcaacagcccatgcttggggatgggacaaactagataaagttattcaacttggtaatcatcaactcgtcatctcttgggtaggacttgcattagtattactggttgcgattgctattttcggaggagtaaaaagaatcgcaagctttgctgaaacatttgttcctttaaaggctggcttatatttatttgcagcaatatatattgctcttagtaattacacaattttacctgaaatctttaagttgatatttacagaagcttttcaatttcatgctgcagctggaggtttttttggcacagtcatttcaatggctatgatgcaaggaatcaaaagagggctattttccaatgaggcaggcatgggatctgcaccgaacacagctgcagcatcggatgttaagcaccctgtaaatcaaggattagttcaaatgttaggagtatttgtagatacttttattgtttgtacatctactgcacttataatattaatttccggtgtataccatcagactggtttaattggtgtagaacttactcaagttgctttagaatcagaattagggacatggggaggagattttctagccattatattatttttattttgttattcagcagttttaggcaattatgtttatgctgaaagtaacctacaatttattaataataatcctaaaattatgctgatatttcgagtaaatgtattattaatggtatatttcggagctattggtagtgtacctctagtatgggcaatggccgatctctttatgggggttatggcaatcattaatctcatagcaatcttactcctctccccattcgcttgcacagttttaaaagactatgtgtcgcaacttaaacaaggcaacaatagtcctgtttttaggattgataaatatcctaaaattaaagaaaaagtaaaatcagatatatggaattaa

SEQ ID NO: 68390 - DNA, 1017 bp, Acinetobacter baumannii
atgaaaaaattacttttaaatagtggtgctttagttgtattaggtttttgtattaatacaggggctgaagcagcatgtacgactagcagtggtttcagaacaattgatattcctatgcaagttggacgagttgtagttcgaccaagcgaccctgtaggtaaagtcttggttaaatcactttttgagatcagaccagatccttatactacttatacctgtagcctttctgatatgatggtggcgcggctattacaaaattatccaattagttcacttggtaatagtatctattcaacaaatatccctggaattggtattcgtctctatcgtgaagcttttaatgctgggaatttctcaggttattatccttatactcgtagcgttccaggtactcgcattaaccttgctgagggttattttgttgtagaaattgttaaaacagctgaaaatactggatctggtactttagtccctggcacttatagtacatattatgctggaaaccgaagtgatcgcccatttttaaccagtagcgtatatggtaatgcaattaccatcgcttcctcttcttgtgaatggcgcggtgctattaataaacagatacagcttccaacagttacaaaagctgggttcaaaggcgttggttctactcaaggagatcaatccttcgaactaaatattctttgtaatggtggtataaacccaactggttatgaagagaaaaacctcattagcttgagttttgattatcaacaagacggcactaatacccaagttttaaaaaatcttgaaccaaatgcaactaaagcaaatggtgttggagttcaacttgtatggaattatcaaaataaaaatcaagttattggcttaggtaataaactagaattaggaacagtgaaatcaaatcaaactattcaatatgatgttcctttaacagctcgttactatcaaacggcagcaaatgttacgccaggtaaagtacgtgctatggctactgtaactattgaatatgattaa

SEQ ID NO: 68391 - DNA, 1035 bp, Acinetobacter baumannii
atgacttattgttgctctaattgttttaatgatagtcaaataaaaaaatatatctcaaataaatgtcacgatgaggaggttagccgctgttcattttgcagcagtaatggagttcagttaattgaagcatctttattatttgaatattttgaagtattggtaaaagctcttgatcagagtgacgatggccgagaattaaaagattctttacaacactatttttcagtatttaataatcaaatttatgataaagaaactttagttaaatctatttttaaaaataatttagagtatttgaattataaatatatcttttcttattcgcagttatatgatcaagattgggaatcctttaaggaagaagttgtaaaaaagaatcgttttttccctcaaactcctatatataaagatattttttctaagggagatggatcaaaagttttctttgagcttactgagactttattagctacttatggaaatggtgatattttatatagagcaagaatatctgaaaaattattacagcaagatgatatgggaaagcctccttatgaaattgcttcaattggtagagcgaatccgataggaatcacttatttatatctagcaaataatcaagaaacatgtattgctgaagtccgtcccagtaaaggtgaaaaggtttgtataggcagttttaagcctgttaaacaaatcaaatttctagatttaactcagccaagagagaaagctacttttctgctttttaatggagaggatttgattaactcattaaattatattgccttacttgaaaaatttgctaatgaattatcattgcctgttataccatctagaagtcatttagattatatacccactcaatttatctgtgaattttttaaagttatatgcggttatgctggagtgatttttaatagttcttttggtatgggagtcaatattgtgctatttaatgatgaagatgttatttgtgaggatgtaaagcattatcaggttgctaaaataacgcatgaaaaaaaattattatag

SEQ ID NO: 68392 - DNA, 492 bp, Acinetobacter baumannii
atgaaagtatctgatgctttaattgttgccttagtaactgttattattaatttttttattcaattgtttttcaaatataaggataataggtctcaacaattatcaattcaattagctattattgctgagattaaagctttaaaaaaactaattgaacaaagaaagtatgtacaagatattcaaaatatagttttgtaccttgaaaaaaatagaggttatagaacaacgctttcactagatattcaagaaaatgtattccctgtgtattccagtaatttagacaaaattggtcagttatctcctaaaatagctcctcaagttgtcactttttatgccttgctttcctctattctacaagatgtgaaagtagggggattactaagcatacgtgaacagggaaattaccagaattataagaatatctatgatcttttaactaatgccttagagatagccgatgaaataattagttcgagacataactcggtttaa

SEQ ID NO: 68393 - DNA, 192 bp, Acinetobacter baumannii
atgggtgggctgattattgaagatgctacattatgtgcggtactaaaacttctaaaggaggagggggttgatttaaatgaactgcaaaagaaatatgctcatcgattaatgaataatgaaatcccaatgattccagaagactatagagaggaatcattaataattttaagaaatgcgatagataatacctaa

SEQ ID NO: 68394 - DNA, 960 bp, Acinetobacter baumannii
atgattgatttaaagaaattaaagttaatattatgggcttcatacgaacctattccccaatctagtagacgcttacttaaagttcactctgatggtggaatggatggtcgatatacaccatcttcaactggggggcacgtatcaggagttttgttatggttcaactgcaaatatttttttcttacagcaagacattgtttacaaaaatttagagatgaatctgggaatgaaattccgttagagaaattttataatcattctccttattggattaacttatctgatagttttaatgattatggacaagttgtagattttctatatgttagaaaaatatggtttattggtgaaaattttaaattaaaagtattagaaagttgtgaaggtgttgatttagaggatctttgtttattggaaatctactatcctggaataccagtaaaaaattatgtagatttaaataatttagataatgtggttcgatcaaagtctgagttaaataatagttttatgggatttagtggttaccctgcagaaaagaacccatatttttgggaagataatgaaatagttccaatcaaaggtgatgctacacatagtacagtgttctatcgttggtttgatttcgggatgaaccttgccgatagtaattgtatagaattatttaaatctcgagagttcgattatgaaggaatgtgtggcggcactgtatttaaaatagaagaatctggtattaaatgggcaggaatgtatatttctggctcagatactaaagctcgatatcttccaagctatctaattttagattttattctaaattacagacaatcgaggtcaataacaattgatgtcgatgctgaaatatgtgggggggctaatcatgtatcgaatgcacaatacagagaagctgttatggatatggaaaacttttttcgagaaaataaaattagacagcattaa

SEQ ID NO: 68395 - DNA, 2193 bp, Acinetobacter baumannii
ttgtcgattgtcttaaatgcatttccgctgaaagtttctgaattggaagttaaggtttgcgagataccttatagcaaggaaattttagatcagtttcgtattagtcatagaaaaactcatacatttcatcgtaaaggcaataatatcctgatcttctcaatggatgggacgtttcctaatttgggggtaccacagacaatctcgcttatggataatgtcggtattttttgttcgttagttaaggctgggcttattcgacatctcacggagttgggacgtaatccttctggttttaatccaatcgagttggtaagcattaaacctaaagataatcttctggctccgattcttggtgaagcttacccatttaaaatttgtataaaatattcaattgacacacgtattattcaaggtcagccatgtctcgttattgactgcacaacacgtaaagtcattaaagagaactgcttgtattttttaaatagtggttttaatttgattggacggtatgtcatttcagagcagaaagatggatataagaaatttctaggactaattagtggtgtaacaggagagataatttctgttactcgaccagacggacaagttgtgcagaccaatgctcgggatattttcctagaggccaatctaacgaattttgatgattttatttttcacacgcacggtacaaaaaaagatgccatcgtagaacgtattcggcaatccatttctctttttaatgtaggtgataataagaagaagtacatcgataggctaaaggaatacattcagtcaaacaccatctcaatgattaatggcgtagacatagaaatcgaggattcatatgatattcagaaatattgtggacaaatgcagaaaccagtatttgtctttaatgacaacggacaggccgactgggttgaaaaggggttgacgaagtatggtccttacacgaaacgtacttttgatagaaatgatccttccatttgcgtgatctgtgcccagcatgacaagggacgtgtagaacaatttgttcgtaagtttttgaaagggattcagaacagtaagtatttcaataacggacttgagggtaaatttacgcttggtacgagccgcattgaagttttcacgacagcctcagagaatatcgaggggttcaaaagtgcaattgaagctgcaatccgaaaaaaagcggaggatggtggtcgttgggatcttgctcttgtgcaagttaggcagtcttttaagaagctaaaggtagaagataatccatactatttaggcaaaagcctttttttcctgcatcaagtacctgtacaggatttcacaatagagcttctgtcacagtctgattataacctcagcttttcgctcaataatatggctctagcatgctacgcaaaaatgggtggtgttccatggttgctgaagtcctcgccaacactttctcatgagctagtaattggcatcggtagtgcaaatcttggacaggagcgtggcatcaatggacaaagagttatggggattaccactgttttttctggagatggtagttacatcgtttccaatacgtcaaaagctgttgtaccagaagcctattgtgaagctttgacttcgattctcagtgaaactattgaaaaaattcaaaagcgcatgaattggcagaaaggtgatacgattcgcttgattttccatgctcaggtgaagaagttcaacaaagtagagattgaagctgttcgcgctgttattgacaaatatcatgattatcagatcgagtatgcattccttaaaatctccgaagaccatggtcttcatatgtttgattctactacagctaatgtgcaaaaagggcgcttagctccattgcgtggaaaaacattccaactttccaagcacgaaatgcttatttatttgataggacagcgtgagttgcgacaggaaactgacgggcatccacgaggagtgatccttaatgttcataaagactcaacatttaaggatatcaggtatctgagtgcacagatccattgctttgcgtctcactcttggcgaagctactttccaaatcctatgccagtaacaataagctattcagatataatcgctcgaaatctaggatggcttaatcagcttccgggttggagtgactcagtcatgatcggaaagatagggcagtcccaatggtttctgtag

SEQ ID NO: 68396 - DNA, 1155 bp, Acinetobacter baumannii
atggtttctgtagaaaaagacaatgcgtatcaattacgcgagtatctatatttgaaagtatgtgaggatgcacgcaatgatccgtttaagaattacttcctatattttctgaaattatctgagaatcctccaattttcgaattcactaatttatctttatatcagcgttgtgcaatctcaggccttgggatactctcagaaacaattccaagccgagatatctcgcgtttacttggacaagctgcgaaaatcgactctactccacggccttgggtatcagatgtttttggcgttttagctataaaatggttagttgaaaaattgggagaagcgagcattgattctgagttcaataattggatttcaggatttctagagcaacaaataggtggcgatcacctcgatatctttgagaaagatattgctatgtttgttagcagaggtgattctgttgttttttctagtgcatgtgtgccactgttttttcattacctgaagatattacatattgaagatcaccaaagccgcctttcccttattagccgtttcctgaatgaattccgagcgcgagcaaaaggagagacttcaactgcacttctgagcttgataatttacgtattcgatcaaattaatcaggatgtagctgtagtggcgcctaatggatggagcttcgatgatctagttaagtttctggaaaatattccaattggtctcaagcgttggacatgggaggatggaggacgaactagaggggcgatgccagttaagtggctgatagaaaatgaatatcacgttcagaatctactttatattttactcgccccgatctttagtgatatcgctgacgaagtaaaccttcagccagttggacaaaagaatccacgtattgatctttatctccctgcactacatacgattattgaagtaaagtatcgtaaagatactaaaaaatcatttcctgcacttattggtgagattgccgaagatgcatcgctctaccgtgtagatactaaatacaaagatgcacgtataattagtttcttgtgggacaagacacgttcaactcaagaacatggtaaattcagggagggtattttaaagattgaaggaattgatggatgcgttgtaattagtgcaccttccatgatggaataa

SEQ ID NO: 68397 - DNA, 657 bp, Acinetobacter baumannii
atggaaaattttttaaaaattcttggggtgttaatagttcctattatagtggtctttttgaataataggttagcgaagcttaaacatgaacgtgaaattaaagctgagttcctgaaattagctgaggaatttgagaataaagaagtggaaagaagatccttactttacaaagatcgattggctaaatctcttttcaatcatgatgctttaacatatagagaggtaaagttctttgctcaatacgaaaatgcggatttatggattaaagaattcatcaaagttcgagggcgaataaaacgcataggagatgaggaggaaaatattagcggtttgactacaaaacatactaaatcaaaaatatttttttctgtattaggatatatcttttttacatttataggtctaatcccttttgtaaaattcaatacgtataggcagcaaattattagttattttcaagaaggaatgtacttaaatgtatttttaatgatttcaatctttttaatatgcttggtatgtggactcctttgtctaaaatatattgagaaatcagtagatagctggtttttcctttatacgtttaaaagggaggcttttaaattgaaaaaaaaggatgagcataatagtgagtcatatactacagatgtagatctctaa

SEQ ID NO: 68398 - DNA, 2295 bp, Acinetobacter baumannii
atggatatcgataagaaaacagagatattggaaacttgttttttattttatttgcatcgcatgggggagagtaatgatcacaagaaaaaagcaacagtagctacaactgagaaaattatcttaaatttattagagattgaaaaaataagtctgagacaccaatatggcttagagttatcgcgagaaaaattggatgaagtttcggcatgtttagataatttaaggtcgttacaaactctaaataaaaatagatattattatcctatcaagagtaatcccacctctgaagtcattctaaacgaagttgagttttctgctagaacctctttacagcatcccctcagatcatattcattggtgttcaatattgccaagcaacaaaatgtgaatagtatcccttcactgggatttttgaattctgtattttgcaatgaagcacatcctttagatacagataatagaacttttttgccattatttaaggaacagttagataaatactttcatctagacaaatctttgaaagctgtatatgtggatttgagctataattttagtagcgtttccagagatattatcaaaaaacactttagtttctttttacagctacttcaagaacagagccaatatagaggttattttcataaactcgattatagtgtcacggacggcttttcgatctttttcattggactttttgaaaatttaaaaagtgtagctgttaaccactattacttgtatatcacacaagcatggaaaagggcttttgaaaaattaaaagtttcatctgttgaattagatagtctttcaaatttgatagctgaaactaaatttagaaatgtaatcgctgatcgttatctatttgcaaacaacatagcgatagttggtaaagagggggttagttatcaaaaatttattgaaggacctttggcatatattgctttaattgatgagtttctgccgatatttttaaatggtgaacagctacagggtgatctaggtgtaacagcatatccttcagtctataattttcaaccggtatccgttcctaaaaaaacaagaaagcacaagcaaaaaaaaatttacaatgtagaaaatgatagcctttttaaaaaatatttttcagacattagactattaaagccacttgaaaaagatattaaagatatatgtttttgttacgagtatattggcaattttttagcccatgaagaaaaagacatatgggaaaaattattacaaatcgaagtaattaccttattagctcaacattggaagcaacctgctacggaaatcattgatgggaagatcgttcatcatgatctaggcaagttgctactcagtgtaattggaaataacccaagtttatttagagctaatgtgattaaaaaaaataattttcagggagttcgttcttgtatctttttgaatgcattcgaacgcgttgagagtaaaaatttatccaatacatcaattgtaaaccgggaagtatggttttatcaggatttaattggtgaaattaggaattatctaaatttaccgattcaaaagtttttacccttattcgagttacatacaaatataaaaggtatctctccagagaaagaagaactggtagttgaaacacagtcacaggcaaccaaagagcaaacagtgcaggaatggctcagtattcaagagcgttcaagaagacaatcttttcggaagttggaagaatattgtcatgcaatgttaaaaaatggacaagtacataagctaattcgtattcaattaggttctgagtcgactcaagatgcatcaatactgccattaattgataagcttattagacagtcaatggaccctatgcaaaggaaattttgcggtatacggggttatttaggtggttgggagtttgattttaaaaatcataactactattttgaattaaatttattcatagattcccactatattgagaaggatttacaaccattgatggaatttctatgtgaacaaatcaatgagaaaaataaaaaaaataatggatctacttctatcttgttaagcaattctcatctgtctgaaattaacttacatgatcaatcaaacactattgctcatattcttggagagtttatgtcacataaaacttctcccaaaaaattaaacctaagcaaatatttaaggaattggtgtttttatttggtccatcgtgatctttactgcttaacctattttcttcccatgtctcaaaaatctataagagggaaaatgagctataaattgagaaaatcctctaatacaaacagttag

SEQ ID NO: 68399 - DNA, 690 bp, Acinetobacter baumannii
gtgatagatttttttcaaaatgccccccctgaatctgtacattcctcccaaatgcaaaaacttgctttagaatcacttatagcctgccaaagtgttaaaaagcaaaataaagagtttgattggttaatttacaataatgtttcagatagctttaatactatagattccgaggaaatcttagaggaacatgctattaggattaagattgcagaatgcttaccatatcctagtaaatatgtacccattgatcttctaagaagatttagagaagataatattgaacaacttgatcacttgcattatgaaaaatacaaattattcgagaaaattagtaattttgatagtaaagataaaagagagttagctgaacaatatgaaattagtgctttcgataaagcaattaaagattatcaagatgtttttgcagctcacttcccagcatactcattaaaaccaattattgctgatataaaaaataacaaacccactttatgggaattaggtgcaactgtaggagatatattcttaactggaggaagcctagcaggtatttataatattggaaaattaggacttgagatttttggtaataaacaaaggatccatcaagctaagctcaactcacctcagtttcattttatttcatctgctattgaacaaggtataattctgcaaaatcataaactatga

SEQ ID NO: 68400 - DNA, 378 bp, Acinetobacter baumannii
atgacccagttccagtcttctaggctgagttcgtcaaatttaccgcctaaacctactccagcattattaatgacaagagtcacaggatgcccaaataagatttcagcagtttcagctaggtggttaacttgttcagcgttacccacatcacagcgcatagcaaaagcttttgcaccttcttgttcaagaagttttactgtttcttcagcagcctccagattaatatctgcacagactacgctgccaccacgttttgccagttcaactgcaaagcttcgtccaatcccactgcctgccccggttacgaccgcatatgcgtttcggctcggctggtctttcttaccaaataaaatcatagtaaatcctaaaaaattttag

SEQ ID NO: 68401 - DNA, 606 bp, Acinetobacter baumannii
atgggggctaagcctgcacagactatgctcaatgccggcaccttaaaaagttataccgctggtcttgagcacttaaccgagcatcaaggtattaagcatttggcaggtcaaactcaacaaggcaatcaggctcagccacaactgtttaaagctgatgttgagcttttactggcaggtgaccagcttttacaggaagaaatctttgggccaaccacagtcatcattgaagttgaagataaagcccaactcattcaggcattacaaagcatgaatgggcaactgactgcgactttaattgccgatgaggctgacttaaccgagtttgcagaggtagttcctgtattagaagaaaaagctgggcgattacttataaatggctatccaacaggtgttgaggtgtgtgatgccatggtacacggcgggccatacccagccacttcagatgcacgaggtacttcagttggaaccttggccattgaccgttacttgcgccctgtgtgttaccagaactatccgcaaagtttattgccggaagccttaaaagacagcaacccgttgcagattttaagattggtgaatggtgagatgaccagagaagcgatctaa

SEQ ID NO: 68402 - DNA, 465 bp, Acinetobacter baumannii; identical to SEQ ID NO: 49359

SEQ ID NO: 68403 - DNA, 567 bp, Acinetobacter baumannii
  misc_feature (545)..(554): n is a, c, g, or t
atgacgcaacaaaacgctcaatcgacttctgaaccaactatttccgaaaacgatttaattgcacagcgtcatgccaaattaaagcaaatccaagatgttgcaaaggaaactggaaagagtccttggccaaatacattcaaacgtgaacattacgctgctgatttacaagaacaatttaaagatcagtctaaagaacaaatcgaaagcgctgaacatgtttatgtaaaagttgctggccgtgtcatgttaaaccgtggttctttcatggtgattcaagacatgactggtcgtatccaattatatgttgaccgtaaaggtttaccaaaagatacgcttgaaactattaaaggtttagaccttggcgatattattgctgctgaaggttatatcggtcgttctggcaaaggtgacttatatgtacaccttgaaggttttgaacttcttacaaaatcgcttcgtccattgccggataaatttcatggtttgaacgacacagaagttaaatatcgtaagcgttatcttgacttaattgtgaatgaagaaannnnnnnnnnacacagaagttaa

SEQ ID NO: 68404 - DNA, 168 bp, Acinetobacter baumannii
atgctacaaggttttattgtattattagcagtagttacttttgttttaatggctgccgatccacgggatagtggggcacaagcgactcagtcagcatggcaaaaaacacaagcggcagacatgaccaagtcgcaaaaaaataccaataatgatgctgattttatttag

SEQ ID NO: 68405 - DNA, 846 bp, Acinetobacter baumannii
atgagcatacctcagtctttgcttgaacagtcaattcaaatcaatattcaacaagcattacaagaagatattggggacggtgacattaccgccatgctcacacctgaagatgaacaagctaccgcaactatcatcagccgtgaagatatggttttagctggacagccgtgggtgaatgcgctcatctcagcgtatgacaacactgtacaggtgacttggttaaaacaagaaggtgaccgtgttgctgcaaatgaagcctttttaaagcttgctggttctgcacgtagcttactgactgtagagcgccctgctttaaactttattcaaacattatcggctgttgcaacaaaaactgctgaatatgttcagcatcttgaaggtttaaacacaaagcttctcgatacacgtaaaactttaccgggcttacgtattgcacaaaaatatgccgtaaccgtcggtggcggacaaaatcaccgcctcggtttatttgatgcattcttaattaaagaaaatcatattatggcagcgggcggtattgcccaagcgatagcaaaagcacatcaaattgcgccgggtaaacctgttgaagtcgaagttgaaacttgggatgagctaaaccaagcgcttgaagcaggtgcagacattgtcatgctcgacaattttagccaacaacaaatgattgatgctgtaaaacacgtggcgggacgctgtaaactcgaagcttcgggcaatatcactattgaaaacttacgcgaagtagcgactactggtgtcgactatatttctatgggcgtgttgactaaagatgtcaaagccgttgatttatcaatgcgttttaatgcctaa

SEQ ID NO: 68406 - DNA, 570 bp, Acinetobacter baumannii
atgaagcaaatcacaccgtatgaagttatagatggacaattaaaaggggcgagacaagtaccttctccaaattttaaccagcgtcccgctggtagcgaaatacaaatgattgtggttcataatattagcttgccgccttctcagtttgggggaggctatattgaacagtttttccaaaataaattagattggtccgttcatccctattttcagactattgaaggtatgcaagtctctacacacctgttaattttacgaacaggtgaagtcctacagtttgttaactttaatgatcgtgcatggcatgcagggcgttcaagttacttagccaaagttgaatgtaatgattattcaattggtattgagcttgaaggaagtgatgacctacctttcgaagaagtacagtacagcgtactaaccgatgtagttactgctattcgtcaggtctatcctgaaattaaaaaccatattgcagggcattcagacattgcaccgggacgaaaaaccgatccgggaccttattttaaatggcagcactttaggcagttgttagcacagaaaaaaacttga

SEQ ID NO: 68407 - DNA, 1542 bp, Acinetobacter baumannii
atggcattatggcgatcgacttttattgtcagtgcgatgacgatgttgtcacgggtattgggcttagtacgagatgtcgtattgctcaacgtgtttggtgcgggtaaagattttgataccttcgttgtggcttttcgtattcccaacttctttcgacggttgtttgccgaaggggctttttcacaggcttttattccggtattgaccgaatataaaacaggtcgtgcgcatgcagaagtgcagatcttaattagtcgagtatttggctgtttgctgacagtcatgactttactgactttcgtggctatggttttagctccagcaattatctatatgtatgcgccgggtttccataatgaccctgaaaagtttgatttagcggtcagtatgttccgtctgaccattccatatttaatgtttatgtcgcttacagcttttgccagcagcatcttaaacagttatggctcgtttgcctcgccagctttttcacctgttttactgaacgtagcaatgattgcaggagcgtggtggcttacaccgtatatggctgagccaatcaaagctttaggttggtcagttgttgcggctggtattttacagttagctatacaaattcctgagttatggcgtaaaaacttactgatcccaccaaaagttgattttaaacatgaaggcgttgagcgtattttaaaattaatgcttccagcattatttggtgtctctgtgactcagattaacctattgctaaatacgatttgggcatctttcatgcaagatggttcagtgtcttggctctatagtgccgaacgtatgaccgagttacctttaggtttaatcggtgttgcgattggtacagtgattttgccttcactgtcagcacgtcatgctgaacaagaccaagcgaagtttcgtagcatgatcgattgggcagcaaaagtgattgtattggtggggttaccagcaagtattgctttatttatgctttctacaccgattattcaggcattgttccaacgtggtgagtttgatttacgcgatacacaaatgacagcacttgcattgcaatgtatgagtgcaggcgtaatttcctttatgttaattaaagtatttgcaccaggtttctatgcgcagcaagataccaaaacgccagtccgtgtgggtttaatgtcggttgcagctaatgcgattttaaacgttgtatttattggattttttaaactaatcaattggcatgcagagcatatggcgcttgcattagcctcttctggttcagctttagtaaatgcaggtttgctctatttttatctgcataagcgtaatattttccgatttggtgcacattggaaaaaactggcacttcaatatggtttggctaaccttgcgatgattgcagcactttggttcgggttaaattggtataacggtgaactctctcaatggattcgtgttgcagaggtagtcggtttatgcgttgtaggtgtgatcgcttacttaattggcttattactgacaggctttagaccgagagatttaaaacactaa

SEQ ID NO: 68408 - DNA, 696 bp, Acinetobacter baumannii; identical to SEQ ID NO: 49432

SEQ ID NO: 68409 - DNA, 723 bp, Acinetobacter baumannii
atgagtaaagccttacccattgctgtcgctgtagttttaggcggtgctgcacttgtacctgtatattatgcaactcaacatccgaccacagaagtcggacgtaaagcagacaaaaatgcttctccaattcaaaaaatcagttatgttcttgggtatgaagttgctcaacaaacccctcctgagctggataccaaagcatttgttcaagggatccatgatgcgcgtaataagcagcctagtgcttatactcaagaagatttaaaagctgccattgctgcttatgaaaaagagttacaacaaaaaatgcagcatcaagacaaacctgagcaagcgggtacagctactgactctgcagatgcacagttccttgcagaaaacaaaacgaaagctggcgtaaaaactactgtatcaggtttgcaatatatcattactaaagaaggtactggtaaacagccaactgctcagtctgttgttaaagtacattatgaaggtcgcttaattaatggacaggttttcgatagttcttataagcgtggtcaaccagtagaattcccgcttaaccaggtcattccgggttggactgaaggtcttcaactcatgaaagaaggtggaaaagcgactttcttcataccatcaaatcttgcatatggcccacaagagcttcctggaattccagcaaacagtacactgatttttgatgtagaactcatttcagtgaaataa

SEQ ID NO: 68410 - DNA, 429 bp, Acinetobacter baumannii
atgcaaattaaaaatattttggtggtttgtattggaaatatttgccgtagccccatggcagaatattttttaaaacagcaatatcctcaacttaatattgagtctgccggtatttcaggactcattggacatcaggctgacgaaaaagctcggctctgtatggaacgtttaggcattgatatgcaacctcatattgcaaaaaaactcaatgctgagctcattaaaaaagctgatcttattttagtgatgagtaccaaccaacagaaacatattgaacaaacctggccctttgcgaaaggtaaaacctatcgcttaggccattggcaaaataaaaatgtgcccgatccttaccagcatgagcaagctgtctttgatgaaacttgccagctcattcagcaatgcgtagctgactgggaaccttatatttaa

SEQ ID NO: 68411 - DNA, 1101 bp, Acinetobacter baumannii
gtgaagtattgccagtttttctctgttcttgccttaagtttaagtgctgccagctgtgcggttacttccggtttacaaacttatgatattccgagtgagggagtttataaaacggacctcggaactacggttaatgtagttaaaatttctcaagagacattaccggcaatacaaccagctcaaatcgattatcaacgggactacgcatcattatttaaaaatcaacaaactatttatcgtttaagtccaggtgatgttctctctattcagctgtgggcttatccggaaattactcctcctgtaagcaatattagtaatgaacaatctgttcaagcgaatggttacccaatcgatcagagtggttatattcagtttccgttggttggacgctacaaagcagctggtaaaacacttgctcaagtcaaccgtgagctacataaccaactggctcgctttttaaaaaatccggatgtggtagtgcgcgtagtgtcttatgaaggacaacgtttctctgttcaaggtagtgttactaaaggtggtcaattttatttaaacgaccaacctgtcagtatttatactgccttgggtatggcaggtggtgtaactacaacgggtgataacacttatattcaactgattcggaatggccgaacttataacctaaatacgattgatttagaaaaagcaggctattcactgcacaaacttttggttcagccgaacgataccatttatgtcagtactcgtgagaaccaaaaaatttatgtgatgggtgagtcaggtaaaaatcaagcactacctatgcgtgatcaaggcatgacattgactgatgctctaggcgaaagtttaggaataaatcctttatctggaagtgctagccgtatctatgtagtacggactaacccaaatgatcgtacaaccgaaatttatcatttaaatttaatgagtattggtgattttggtttagcaaatcaatttagactacgtagtaatgatgtcgtttatgtggatgcaaccggtttaactcgttggcaacgtattgtcaaccaaatcattcctttctcaaatgctttatataacatagaccgtttgggacaataa

SEQ ID NO: 68412 - DNA, 1275 bp, Acinetobacter baumannii; identical to SEQ ID NO: 46129

SEQ ID NO: 68413 - DNA, 999 bp, Acinetobacter baumannii; identical to SEQ ID NO: 46130

SEQ ID NO: 68414 - DNA, 1161 bp, Acinetobacter baumannii; identical to SEQ ID NO: 62584

SEQ ID NO: 68415 - DNA, 693 bp, Acinetobacter baumannii
atgcaactggcggttattcctgcgcgaggtggaagcaaaagaattcctcgtaaaaacattaaagacttctacggtaagcccatgattgcgtggtctatagaagcagcactgaaaagtgaatgttttgacgaggtctgggtctcgactgatgatcaagaaattgcagatattgcagttaagtttggagcgaaagttccatttctgcgaccagctcatttgtctgatgattatgcaactacagcagatgtcatgcagcatgcgacacaagcttttgctcaattacagggacaatcgccagactttgtttgttgtttatatgccactgcgccgtttgtacaggttgatgatctgaaaactgggttacagctattacaatctcatccactagattatgcttttagtgcaacgacttttgctttcccgattcaaagagctattaaattgaatgaggatggtaatgttgaaatgttccagccagaaaactttaataagcgttctcaggactttgaagaagcatggcacgatgcagggcaattctattgggggacagcaaaggcatggctagagaaatctgtgattttttcaaatagatcacggattgtagagcttcctagaacacgggttcaggatattgatactcctgaagattggcatcgtgcagagttgatggcacaactactattagatgtataa

SEQ ID NO: 68416 - DNA, 1047 bp, Acinetobacter baumannii
gtgatccgctgtttaacgatagctgatgctttagcccaacatggacacgagagctattttatttgtcgcccgcatcaaggcaatttaatcgagtttgtaaagcagcgtggctatatggttcatgctctttcagagccattatttaatatgtctttagagttttctgagtatcaacgttggttgggtgtaacagagcaacaagatgcccaagagacgctagcagttttaatagaatacccagtagactggatgattgttgatcactatggtttgtcagcaatatggcagcaaataattcgcccagaggttagtcgtattgtcgctattgacgatttggcaaaccgcaaacacgatgcagatatcattttagattgtggcttggcgaatacaccatcagattatgcaaaattaaatcaacgagtgggctattatttaatggggccatgctatgctttacttcgtccggaatttcgtacaaaacgattatggttagagcaacatccaaaaacatataatcaggaaaagctaagaattttggttaatcttggtggggtagataaagataatttaacagggactgtgctagaaactctatcaaatagcccacaggaaaagcatttatctgttactgtggttatgggggttaacgctccttggaaagaatctgttctgcaacaagcaaagaaacttccctttagcatcaatatacttattaatgctaataatatggcagatttaatggctgagcatgatttggcgattggtgctgctggtagtacagcttgggaaagatgttgtttaggactgcccacgattatgatttgcatggcggataatcaaaaaatgattgcaaaatatttgcatgatttaggtgtcgccatatctttggatcaagcagagattcatgaaaagttattatgggcattacaacagtttgatcaggaacaattgcaacttatgcatcaaaaagctttatccattaccgatggtataggtgtagatttgctcttgcaaaccattttttctgaggaatttaaggaatgttag

SEQ ID NO: 68417 - DNA, 516 bp, Acinetobacter baumannii
atgttagatcaaaagaatgctcagctcaggctccttggtcatgatgatctagaaatggtactgcaatggcgcaaccatgatgacattcgtaaatggatggttaactcggatattattactttaagtgaccatttcgcttggtttgagcggaacaagaatagaactgatcgattattttatatttttgaatatcagcagcaaccacaggggtacatctcctttgttatgatcccaaatagtacagcttatgaatggggtttctatataaaacccgatgctgaaaaaggaatgggacagttgctgggtaacattgcactgaatcatgcatttaataaacttggtttagaaaaagtttttggtcaggttttatcatttaatgataagtctttaaattttcatagaaaaatgggttttgtccaagaaggtttgttgagaaaacattttaaagatcagcgaggcgaatttgatatatatcaatttggtttgttgcgaacagaatggctagagggtaaatga

SEQ ID NO: 68418 - DNA, 1050 bp, Acinetobacter baumannii
atgagcaaaaaaattacaattaataatcgtgatatcggtacagactttccaccgtatgtgattgctgagctttctgcgaaccataacgggcgtttagaaacggcactcaagattattgaagaagcgaagcgctgtggtgctgatgcaattaaattgcaaacatatagtgccgacactattacattaaatagccaaaacgaagagttcatgatccgtggtggtttatgggatgggcagtctctatatgagctttaccaaaaagcacaaatgccatgggaatggcataaaccgctttttgaccacgcgcgtgctttagatattacgatttttagctcaccatttgatcgtactgcagttgatttacttgaagaccttaatgcaccagcatataaaattgcctcttttgaagcggtcgatttgccattaattaaatatgtagcttcaaccggcaaaccaatgattatttcaacaggtatggcggataaagaagaaattggtgaagcaattcaagctgcttatgatggtggttgcaaagaacttgtagtcttgcactgtgtaagtggttatcctgctccggcagaagattataatttgctgaccatggttgatatggcgaaatcttttaatgtgccagttggtctatcagaccatactttagataatactacggcaattacttctgttgctttgggtgcatgccttattgaaaagcattttacactcgaccgcaatggtggaggacccgatgatagtttctctttagagccaaaagaacttcagcaattgtgccaaggcgccaaaacagcttggcaggcacttggtcatgtagactatggtagaaaatcaagtgaacaaggcaatgctcaatttagacgctcactttattttgtaaaagatttaaaagcaggtgatgtaattgatgaatcaagtatccgaagcgtacgcccaggctatggtctaccacctaaattttatgacgaacttttaggtaaaaaagtaacgcaggacgtaagtgtaaatacgccagtaaagttagaaattattagctaa

SEQ ID NO: 68419 - DNA, 237 bp, Acinetobacter baumannii; identical to SEQ ID NO: 44371

SEQ ID NO: 68420 - DNA, 612 bp, Acinetobacter baumannii; identical to SEQ ID NO: 62716

SEQ ID NO: 68421 - DNA, 612 bp, Acinetobacter baumannii; identical to SEQ ID NO: 62976

SEQ ID NO: 68422 - DNA, 456 bp, Acinetobacter baumannii; identical to SEQ ID NO: 62975

SEQ ID NO: 68423 - DNA, 822 bp, Acinetobacter baumannii
  misc_feature (761)..(770): n is a, c, g, or t
atgctgttaaaagttggtgaattggctaagcaaacaggacttactgtccgtgctcttcatcactatgacgatatcggtttacttcagccttcggcccgttccgatgctggttatcgactatacacccctaaagacatcactcgtttgcatcaaattcaagcattacgagggctgggtatgtcgctagccgaaatctatacggttcttgaagatcccaatctagcacttttaccgattattgatcggcagattcaagcaattgatcaaagactggcagagcagaagaaattgcgaaatcagcttggacaattgaaatctcagctcatcaatggtgaagaacttgatttggaggattggctaaatatgctggagcttatagcaatgtacgagaaatactttacgcaagaagaacttgaaaagcttacatttttacaatcaggtactaaaacccaccaagaatggcaagagttaactcaagctgtaaatacggtatttaatgctggagaatcatctagcagtgaaaccgctcaaaagctcgcccataagtggatgaaaacacttgagcagaatacgcgcaccaatccagaatggcttgttaaattaaataacatcaattctgcagaacctgaatttcaggaaaaattaggattaatgccagaagttgttgagtttttacttaaggccttttcagagagtaagctgagtatttttgctcgttatttatctgataatgagtttgcttttttaaaggaaaattatgnnnnnnnnnnaaaattatgttcgcgaaatgaaaaaatggcctcaactattagtcgatattga

SEQ ID NO: 68424 - DNA, 426 bp, Acinetobacter baumannii; identical to SEQ ID NO: 61578

SEQ ID NO: 68425 - DNA, 267 bp, Acinetobacter baumannii
atgaatttcttaatattgataaattctgcccccaactataaatatttcttttatgagttagcgaaagaaatagaaagccgtgggcacaacatttattttgctatagattctcatcgttcaaagtatcttgaaccattacctgaattagataataatcaaaattctttcttttttgatagctatttagagaaaaattttgataaaaatttaagtgtttcacacaataataatcaagaatattggggagattatttttatttagtctag

SEQ ID NO: 68426 - DNA, 171 bp, Acinetobacter baumannii; identical to SEQ ID NO: 62472

SEQ ID NO: 68427 - DNA, 378 bp, Acinetobacter baumannii; identical to SEQ ID NO: 53214

SEQ ID NO: 68428 - DNA, 606 bp, Acinetobacter baumannii; identical to SEQ ID NO: 53590

SEQ ID NO: 68429 - DNA, 570 bp, Acinetobacter baumannii
  misc_feature (545)..(554): n is a, c, g, or t
atgcaacatcaaattaatggtattgctttaccaaatgaacaaggattttttggtgagtatggaggtcagtttattcctccgcatttaaaagaagcaatggatgaaattaatgttgcttatgaagaaattcgccatacaccagaatttcaaaatgaattagcagacctctttgcaaattatgtcggccgtccaagtcctttatttcatgcaaaacgcctttcagaacagttaggtggcgcgcaaatttatttaaaacgtgaagacttaaatcataccggtgcccataaaattaatcactgtttaggtgaggctttacttgctaagtatatgggcaaaaagaaaatcattgccgaaacgggtgcgggtcagcatggggtggctttagcaacggcttgtgctttagtgggtattccatgtgagatccacatgggtcaagttgatattgaaaaagaacatccaaatgtggtcaaaatgaaaattttgggcgctcatttggtgtcagtaactcgcggtacagcaaccttaaaagatgcggttgatagcgnnnnnnnnnnatttaaaagatcctaa

SEQ ID NO: 68430 - DNA, 435 bp, Acinetobacter baumannii
atgaaaattgctaatgaagaagaattgggagtaattgacttccaagacgcggttattggtgctgatacgtatgatttgatctcgattacacgtgatgcatatgtgcagtggaatgctgagcgtgtttatcaatggtttaaagtgttctatgagcttttaccagcatctgctaaacaaaaccgaagctttgaccaatttaaacgtgatgctgatttaatggcaattcaacgccatatcaaaattttaggtatttttgtccgtttgtttgagcgagatggtaagtctggttatttgaaggatttaccacgagtcatgtggtatttacttgaagagagccgtggctatcatgagcttgatgacttcatggcgtttattcacagttcggtaatgcctaaatttattgaaaaatatggcccttatgaggttgcagcataa

SEQ ID NO: 68431 - DNA, 225 bp, Acinetobacter baumannii; identical to SEQ ID NO: 46522

SEQ ID NO: 68432 - DNA, 840 bp, Acinetobacter baumannii
atgcaagaacttgccaaccgattggcgatacaaaatttcgtcaacgcttatatgcaagagactggcaaaggatatttactttcttttgaccaacaaagttcaactcaacaagcgtttagctctggtttgacgctgttaactcttcctcttccttctatacaagcagaatgttctgtacctttatcttatgtaagtcgtgtaggacgccatcgtctcgctgctttaccgaaaatgtgtattgatggtcaatggcaaaaaatcagtgcaggaaccattgttagtcttttacttgaagagttggttattgaatctcaattcaaattagatgctgcttcattgttagagaaatggatacaaagccgggacgcgctactacaattcttaaaacaacgccacaatgatttcgatgatttagtaaaggctggacagaattttattgaaagtgaacaggcattaattttgggtcatagtatgcacccagcgcctaaaagccggaatggttttgttcatgaagattggttgaggttttcacctgaacatgctggaaaaacccagttacattattggcttgttcatcagaattatattgctgaaggttgtgcaactgagcagccaatttcagatcaagttaaagacgcaatccgttggtatttatccgaaagcgatttaaacctgttaaagactcatgttgaatttaaattattgccactacatccttggcaagctcgttatttacaaggtaaaccttggtttgagcaattaaaacaaacaggacagttaattgatatcggtttacgtggatggcaattttcaccgactacatcctattcagaatcttaa

SEQ ID NO: 68433 - DNA, 318 bp, Acinetobacter baumannii
  misc_feature (33)..(42): n is a, c, g, or t
atgatttacgccgcacctttggcactatcgcgnnnnnnnnnnataggaagctatacgattaaaaggctaattaaccataccactgacgatgatgataacgatgtgactgatggatatattcaagtttctttcgatgatttaaagaaagctatgaatatgattgaagacgtgattatttctgaaccagtaaaagcattaatcaaaagtcgcttatatttcgagaaaaatgaatcgagaaatcaggctcaagaattaattaaccaccacattcaagtgttagataactttaaaatggcaggccaaattctagatttttag

SEQ ID NO: 68434 - DNA, 435 bp, Acinetobacter baumannii
atgagtgagcgtgttttaaaccaacattttgacaatgataagctctaccattttcaggcaaatgtttggcataaagttaaaacctcgccactttctgttttaaaaaactatatagaagttcaagatttaacaaaaactgttggcctaggacatgaaatctgggaccacattcgtcaaactgattatctaaaacagcaagtacatgatggtatctatacttggtatgtacgtaatcaggaacgtaattttgatttgttgctccgtgatcttaatattgacgaaaatttagtgaagcatgaactcaccgaattgcttgtacccgtactacaacaattagtcacaacaggacatttaagacgtcgtgcccgtgtgtacttagagaagttttattattctgaaaaagcattagagattttaaataataaaggcgcttaa

SEQ ID NO: 68435 - DNA, 324 bp, Acinetobacter baumannii
  misc_feature (30)..(39): n is a, c, g, or t
atgaagaccagagcgttattaaaagcttannnnnnnnnnaaaagcttacaagagcaatttgaactttatgctgataattttccgatctggtcagaacattcaacagcaattgctcaatttgcagtttggaatgtattagctgaacaaaatattggtgcttcattgcaacactacaatccaattattgatgagaaaattaataccttatttaatatcccggcagaatggaaactaagagctcagctagtttttggttctattgaaggcgcagcaggcgaaaaagcttttattgatgatgaaagccgcttcaaaacattcggctaa

SEQ ID NO: 68436 - DNA, 495 bp, Acinetobacter baumannii; identical to SEQ ID NO: 53190

SEQ ID NO: 68437 - DNA, 1113 bp, Acinetobacter baumannii; identical to SEQ ID NO: 53191

SEQ ID NO: 68438 - DNA, 384 bp, Acinetobacter baumannii
atgcctgcatttttaactgatgattggtttgcgactgtcgaaaaattaactgctgaagcaggtgatcttaatttgccaccagctcttgcgaatttggcaattaatttagtagttacagatgcttctggaaataccgaattagcgttagatgggggtaaaatccaaaaaggtttgtcttcaaatgccaaaactacattaaacatggatgctgaaactttacgtaaagtattccttgagtttgatatggcagctgctatgcaggcattcatgactggtaaaataaaagttcaaggcgatatgtctcagttaatggctttacaaacagctaaaccaagccaagaacaaaaagatttgttcaaaaaagtattagagcaaaccgcttaa

SEQ ID NO: 68439 - DNA, 822 bp, Acinetobacter baumannii
atgaccactttttcggtaggtataacgccgacttcagcaggtcagatgtacatttaccaagacaaaaacggcagtactttactgactaaccgtaaaagttatgaccattcactcaaaaaagtaaaagtcacctactacccggatagtaatattcatagttatagcaactgggggacttcagaagcttcggttctaccaagctatagcaaaaacaaaaatgcttttgaccatattattaagcaggcagcacaacagcacggcgtttcggaaggattaatcaaagccgttatgcataccgagtctggctttaacgtaaatgcccgctctccggttggcgcccaaggtttaatgcagcttatgccggctactgctcgtcgttttaacgtatctaacgcttatgatcctcagcaaaacatcttcgctggtgctaaatatttaagttggttgctcaaacgttttaacggtaatacgcaaatggcgcttgccgcttataatgcaggagaaggaaacgtcgataaatatggcggtattcccccattccgtgaaacccaagattatgttcgccgagtcactagccgctaccaaaacttatattcttctggtgtaggcctttcttcttttagcaattcaagtatttctgcccaagcgataaaccagccagccataccgcacagtacctctacgcaagtctctgctcagcctattaagtattcttcctcgcgccaaatcgtgacattgccagatggtacatatacagatgcacctacgggaacttatgtcaccaataatgcaactgctattgcacatatccggattgagtaa

SEQ ID NO: 68440 - DNA, 441 bp, Acinetobacter baumannii; identical to SEQ ID NO: 68151

SEQ ID NO: 68441 - DNA, 1626 bp, Acinetobacter baumannii
atgaaaagttttaaagttgcccttgctcagttttctccgcatattggcaatattgactcaaacacccaaaagatgattgagcaagcaaatcaggcgaaaaaacaagacgctgacctgattatttttcctgagctttctgtgattggttatccagctgaagacttattgttacgtccaaatttaaataagcggatgcaaaaggcttttgctcaacttagtgaagttaaagatattgtgatggttttcggcttcgtaaaccagacagaagatggccaacgttataattcagctgctgtcatgaaagacggtcaggttttaggtgtcttcaataaacataacttgccaaactatggcgtttttgatgaaaaacgttatttccaaaaaggccatcagcacttggtgtttgagtacttaggccataagtttggtgtactcatttgtgaagatatctggtcaatcaatacagtaaaacaattaagccaattaaatgttgatactgtacttgtgcttaattcatcgccatatgaagtgggtaaaccacagcatcgtaaacagacattaagtgagcttgcaaagcagcttcatttaaatattgtttatgttaaccaagttggtggacaagatgatttaatttttgatggtacaagttttgtcagcaatcaaaatggtgaaattgctttacaagcacctagctttaaagaagatctctatattgctgaatttgaccgcgatacaaaattatataaagttgtcgagtctgctcctgcactagaaacttttgcagagatctatcaaggtctagtcatggcaacacgtgactatgtagaacgctcaggttttcctggagtaatcttaggtctttctggtggtattgactctgcccttacgcttgctattgcagttgatgcaatcggtgcagagagagttcaagctgtgatgatgccatatacttacacttctcaaattagtgtagaagatgcagcggaacaagctcgccgtatgggcgtgactttcggtattgccgaaattcattcaatcgtaaatagcttcatgcaaactttgtatccgttctttggtaattcaccagccgatgcgactgaagaaaatttacaagcgcgcgctcgtggcacattgcttatgggcttatctaacaagtttggtaatttagttctttctacaggtaataaatctgaactttcagttggctattgcacactttacggtgacatggtgggtggctttgctgttctcaaagatgtttataaaacaatcgtgtttgaattagcaaaataccgtaatagcttaagcgaaactccggttattcctgagcgtgtaattactcgcccaccttcagcagaactgcgtccagatcaaaaagaccaagactctttaccagcgtatgatgtattggatgctatcctttatgcatacattgaggaagatttaggtcaggcagacattattgccaaaggttttgataaagaagttgttgaaaaagtcatccgtttagttgatcgtaatgaatataaacgtcgtcaaggtgcgattggcccgagaattacttctcgtgcatttagtcgcgaacgacgttatccgattgtcaacggttggacagcgaatgactga

SEQ ID NO: 68442 - DNA, 495 bp, Acinetobacter baumannii
ttgacctacttttcacatgctttagcgaccctagaagcaaatggcttaactgacgttattgtgatgattgatgagctcaatttagagtacgtatacatcaaacacccatcgactaatgaagtaatacgagcagactcaacagatcctgattacaccaagaacctctctttgcaagaacattttgaaattcgtaaggaacttaaactggtatctcaattggatatgcaaagactaggaaaggatagcgtatggtacgctcaatggaagttatacgaacgcattcaaaaagatgcttgttctaaaaacaagaagttaaagcagttaaaactagagcttcctcaaacacttaagaacctcttagaccaagatatgcttacagtgtctcaaccaatagacccttcagcttcaacatttatctcctcttctgaaatggatcttctaaatcaatcaaaccttgatgatgattttggaacattggagtttgatgatgaataa

SEQ ID NO: 68443 - DNA, 258 bp, Acinetobacter baumannii; identical to SEQ ID NO: 46674

SEQ ID NO: 68444 - DNA, 336 bp, Acinetobacter baumannii; identical to SEQ ID NO: 46673

SEQ ID NO: 68445 - DNA, 249 bp, Acinetobacter baumannii; identical to SEQ ID NO: 46672

SEQ ID NO: 68446 - DNA, 435 bp, Acinetobacter baumannii; identical to SEQ ID NO: 46671

SEQ ID NO: 68447 - DNA, 213 bp, Acinetobacter baumannii
  misc_feature (183)..(192): n is a, c, g, or t
atgaataaagtttatgccaacgcagaggcagcactgaaagatgtaattgcagacaatcaaacacttgctgttggtggttttggtttgtgtggaattccggaaaaactaattgttgcagttaagcaaagtggtgtgactggtctcacatgtatctgttctcttatacacatctccgagcccacnnnnnnnnnntctcacatgtatttcgaataa

SEQ ID NO: 68448 - DNA, 978 bp, Acinetobacter baumannii
  misc_feature (960)..(969): n is a, c, g, or t
gtgaaaaagttaaaattaatgacagtggtgggcacacgtccagaaattattcgtttatctcgtgtaatggctgcatgtgatgaatattttgatcatattcttgttcatactggacaaaactatgactatgaattgaatgaaattttctttactgatttgggtatccgtaaacctgaccatttcttaaatgcagctggtgcgacaggcgcagaaacaatcggtaatgtaattattgcagttgataaaattttagaagaagtgcaacccgaggctctacttgttttgggtgacactaacagctgtatggcagtgctaccagcaaaacgtcgtaaaattccgactttccatatggaagctggtaatcgttgttttgatatgcgagtccctgaagaaattaaccgtcgaattgtcgatcatacggctgatattaatttaacctacagtacgattgctcgcgattatttattagcagaaggattgcccgctgatttagtaatcaaaacaggtagcccaatgttcgaagtgcttcatcattataaagcgaaaatcgaagcttctgatgtacttgaacgcttaaatttaaaagagcatgaatattttattgtgagtgctcaccgtgaagaaaacattaactcagatcagaattttttagatttggtagaaatgttaaatgcagttgcagataaatataaatatcctgtgattgtatcgacacatcctcgtacacgtaagcgtattgaagagttaaatgttgagtttcatcctttaattcaattgttaaaacctttaggttttagcgactataacaagttacagctttctgcaaaggctgcgttgtctgatagtggaacaattaacgaagaatcatcaatcttaaatttccctgcacttaatttacgtcaagcacatgagcgtcccgaaggaatggaagaagcggctgtaatgatggtagggatgaannnnnnnnnncggctgtaa

SEQ ID NO: 68449 - DNA, 189 bp, Acinetobacter baumannii
atgatggtagggttgaaagcggaacgcattttacaaggtttggcaattttagaaggtcaaactagaggcgaaaatcgtcttttgcgtttagttgaagactacagtatgccaaatgtgagtgaaaaagttgtgcgtatcattatgagttacacagattatgtaaatcgagtgatttggaagaagtattga

SEQ ID NO: 68450 - DNA, 426 bp, Acinetobacter baumannii
ttggttgtcaaaaataaccgtataagagctcataagctgggtgagttaattacagatactatcgatagtgttattcacattagagatgaagtccttaatctaaataatcctactgaagatgaattagcgctggttaagtttaaaatgggcttgattagtcaagtggttgatttgaacgttaaacaaagtatcagcatttctaacattgctcgaactgaggcaatgttctggggcttagatgtcgatgatcttaaagaccagtcggaagttcaagcacggcgtagttcagttatttcaggtgctgaagaaagaatggcaattgcaaaagctaatatgaaaaagaaaaaagaagaggcgtttatgcgaaagttagcgttaattgaagccggtgaagtagagcctgaagatgaaaaaagtgaaaattga

SEQ ID NO: 68451 - DNA, 2322 bp, Acinetobacter baumannii
atgccctatatcagtatggggcatttttttgttatgacggattcaaatcaccataatccagttttatcttacgatgagctgggcttcatcatcgggatgaaacgagttgaaaaaaaagttagtacgattgattcaaacattgaaaagatcattggtatccttactcaaagctttgaagagcaaaaagcacaatttgcacagcctcagcctaaactgactgaatttcaaaagatgcttaatgctgtcaataatagacaagctttagattttgaagatttattaaaagacaaagctaatccaatcactcaatcttttgttgtagcagacaagctggtcaaagactttgctgatgttttggaccaatcaattaatgaccttaaaacagtagataaaaaacaaatcaacaaatctaatgggcgaaagcccgctatagaaattaatagtcatgaagacttatcaaaaattataaatcctactgttcctgagcgtgatgaaaggggccgttttgtatctaatccaaatgaaccccaaaaccaatcatcgattcgtaaagttgcccaaacgatatctacggcgattaaaggagtaatgccgaactcaacacaaggtgtagatcctacagttgacgcaatcaatgaagttggtcatttactttcacctgtacgccgtgcagcaggattagctttgcggccattaactggattgatgcgtagtaaaaagagaaatgagccattacctcgtgaacaagagaaccataaccgcaaacaaataaagttattgcagcgtattgccgataatttggcgtctaagggtggtttgttaggttctctagggaaattgcttacttccgtgttatctgctggtggtgggcttctaggtggtgctctaggcaaaggaaagaaaggtgtagggaaattaggaaagggcttaggtaaatttcttaagtttggccgtggtctacccgtaataggtgcattggctgctggtgcatcattattagattggaatgaacaaagcacacaagaaaagggcggtactgtaggtagtcttgctgggggcgttattggtggcacggtaggatcaatattaggcccagctggtactttgattggtggtatggctggttcatggataggtaataaacttggtaccgcagttgcgccgtattttaaagagtggacagattcattaatagctgcagatgtaccaggtattattaatactgcttggaaaggatttgtaagttatgcttctaatgcttttgatcaggcaaaaaacactgcttcaaaagttgtagacggagttaaagatactgctggtgataccttagatttcattaaagataaatttaaccgatttaatccatttcatgatggtgttccaacatggggcattgggcaaggagtttataagccgggttttggtgcaaataaaaatgtacctgcttatggttcaactgtttctccaattggtgaaaaaactaaggaaaagcaacttgcagtttacaatgcaatgaagagagctggttttaatgataattgggctgctggtttaactgcttctgttggtagggaaaatgactaccaagataaatatctgtttggtaaacaccaggataaagctggtggtacgaatatgggtatgatctcttggcaaggagcccgtaaagaccagcttacggcatatatgaaggaaaggggattacttgatgcaaacggtaatatggtacggagccaagcagctttagatgcacaaggtgcatttatgaagcatgaaatcgaaacgaatcctgaatatgcttcggttaaagcttatatgcagaataacccaaatgcatcaaaagaagatattgcccgagttctcggcacaaaatatgtaagatgggcgtatgggcaaacaaagcttcgcaatgggcagtcatttgattatagaccgcatttagaaaaggaatataaatacagagctaacattgataaaaccgttcaggaacagaaaactaatctacctaaagaaaataccccagctgtatcagatttgaaatcaagtcatattgtggaaaatacaagagctaaagttgctagtgttttaagcacccaaaaagctatcgttccccaagctactacaaaagcaaaaccttcattaaataatcaaaatagattattaactaatgtcacgccgtttaagcaacctttaaatactcctaacccacaggaagttgttgttgtaaatcagaataatggtaacatcgggcagaatgttagtgatcgtttccttgctcatgctctaactggcggcattggaatggggaaattagacgtttag

SEQ ID NO: 68452 - DNA, 645 bp, Acinetobacter baumannii
  misc_feature (623)..(632): n is a, c, g, or t
atgctcagtcgtcaattagaagtatcattacgtttggctgttagcatggctcgtcaaaagagacatgagtttcttacagttgaacatttactattagccttactcgataacgattcggctgtgaatgcattaaaagcatgcggagctgatattgtttctttacgtaaagaattagaagaatatgtagaacaacatactcctaagcttggcgaaaatagcgagcaagctccacatccaacagaaagtttcgaccgcattttgcaacgtgcaattttccacgttcaatcgagtggtggtgaccgtactgttgaaggtgcggatgttttagtcgcaatgtattcagagcgtgattcttttgctgtttatctgcttaaacgtcatcaaattaatcgattgactttaactcaatacttgtctcatgggacacgtaaagacgaagttcaggttgaagaagaagttgaagacattgagggtgaaagcaattcaggcaatgccggaccattagaactttatacgctcaatttaaatgttgaagcgcaaaaaggtaaaactgatccactcattggtcgtgagaaagaaattgagcgtacagcacaaattctttgccgtcgtcgtaaaaacannnnnnnnnnccattgttggtag

SEQ ID NO: 68453 - DNA, 333 bp, Acinetobacter baumannii
  misc_feature (294)..(303): n is a, c, g, or t
atgaacattaaagcactcttacttataacaagcgctatttttatttcagcctgctcaccttatatagtgactgctaatccaaatcacagcgcttcaaaatctgatgtaaaagcagagaaaattaaaaatttatttaacgaagcacacactacgggtgttttagttatccaacaaggccaaactcaacaaagctatggtaatgatcttgctcgtgcttcgaccgagtatgtacctgcttcgaccttcaaaatgcttaatgctttgatcggccttgagcaccataaggcaaccacnnnnnnnnnnggttattcccagaatgggaaaaggacatga

SEQ ID NO: 68454 - DNA, 1113 bp, Acinetobacter baumannii
atgaaaataaaattatcgaaaatagtaatagccagctcattattgatatttgcaaatatgagttatgcagagggagtaaaacggttttctgtctcggcaggttggttacatgtaatgcctcaaggtaaagctaatccatttaatatcaatacaagtgttaaaaatggaacagttgctaaagttggaagcatttcgccgaccagtttcttaaactccgttgatcctaatgctacagaggtagatgtaggcggtgaaccttttaatcaaaaagagtttcttgaactcgctttaaatgatgactttttaaaagggctcttacttgatgaagaaggcaatataaaacctgaggtagcaggtgaggcaacgattcaagggttagagcagtggcatcaaaatgatgccggccttgaagtagatgacacagacacattagggcttatgtttaactattacctcaatgacaatgtgtctttacaatttattggaggcattccccctaaagtcgatattaaaggccaaggtgaaatcttggcaccattaagcggtgtcgcgttgtcaccacatgaattagttaaaattctttttccgaacggcattaccttaggtcaagcagtcccgattaccaatttaggcaataaacctaaagcagctagtgttcgtgcctggacccctgcaattgaagcacaatatcaatttgggaagagtggggtgaacaagtttagaccttatttaggtgtgggtttaatgtatgctcattttaatgatattaagctaaatgacgaaattcgttctgacctgatctctgcaggtcatatgattcaaaatgtgttagatggtaaggctggggctgccttggatcgtaaagagtcgagtggaaatatggtggttaaagtagatgcagatgatgcgattgcacctatatttactgccggctttacttatgattttaatgattcttggtatacagttgcctcagtatcttatgcaaaactaaataatcgaacaaaaattgatgtcattaaccaaaatacgggcgctcgcttaattcatgggtcaactaaagttgatattgatccgatcattacatatttaggggtgggctacagattttaa

SEQ ID NO: 68455 - DNA, 255 bp, Acinetobacter baumannii; identical to SEQ ID NO: 44740

SEQ ID NO: 68456 - DNA, 477 bp, Acinetobacter baumannii; identical to SEQ ID NO: 44640

SEQ ID NO: 68457 - DNA, 171 bp, Acinetobacter baumannii
atgaataagaatgtagagctaataaattacattgatgtagctgagacagtttacgaacgggtatatgaaaataataaaatttcaaataatttgttaactaactttattggaaaaatttgtgagcccagaaagatgcaaagacagaaaaaaaacttcattaagtacctgtga

SEQ ID NO: 68458 - DNA, 654 bp, Acinetobacter baumannii
ttgggacaaaaagcattttctgtacagtgcgatgttgggcaagcagaacaagtacaggctttggctgatcgggcagaacagttattaggacatccggtaaccctcatcattaataatgctggcgtaggtctaggtggcaaatttgatgaaatgagtttggaagactggaaatggtgtatgcatgtaaatctgtggggtgttattcatggttgtcatgcatttgtgccaaagttcaaaaaactaggttacggtgcaatcattaatgtggcttctgccgcgtcgtataccgcagcaccagaaatgagtgtctacaatgtaacgaaagcgggtgttttggcattatcagaaaccctttcagccgagcttcgcaaattcaatattaaagttaatgtgctctgtcccacactggttccgaccaatatcattaaaaatggtcgtattccggggcgttattccaagcttgcagaccatgcactcatgaactatgccatgacaaccagtgatgcagttgcggctttaacattgaatcgattagatcgtgggcagctctacactacgccacagatcgacgccaaattattctggcttatgaaaaggacatctccaacgctatatgcaaagttccttgggctttcgtatcagttatttaaataa

SEQ ID NO: 68459 - DNA, 186 bp, Acinetobacter baumannii; identical to SEQ ID NO: 63817

SEQ ID NO: 68460 - DNA, 126 bp, Acinetobacter baumannii
atggaaaacatgttaactcacttagtatctaatgcatatgatcagcaatttgattctgcatatcaattattgatttatttttatccaatatggaaattagtaattataaaattattacaaatttaa

SEQ ID NO: 68461 - DNA, 4056 bp, Acinetobacter baumannii
atgggcgtccgtaatggcacagtagtcattattttgacgtcccaagcgcccggtgcttattggcaatatcctaagttcaatatggacgctgaaattggctatacaactccacctgacagttgggccgatggttggtcagcaagcttcatggctgagaccgatcttgcatctaacggcatttcggcaatcattgagccatctttgttagatatttcaacagagattaacgccaatgcttcggcaattagctcactgtcaaatacagtgactcagcagggtaatactattacttctcacagtaattctattacatccttaaataacagcattacaagcattaatagctcacttacaaataaagccgatgcaagtgctttaaataacctttcgaatcgcgtgacagcggcagaaggaaacattacaagccaaggcaattctattacaagcttaaataacacgcttacgaataatgacttgtcgaatcttgttctcaatcctgactttgttgatccaaagagtggttggacagcaggggtaatcgttgatgcaactgacgcagcgccaaacccaccttctccgaaggcattaagactgaataaccgcgatagttattatggcccatttgttaagtgcaacgtcggagatatgttctatgtttccgcgtggtttgcaacgccaaatacatcagcaaccgcttctgcagtaattggttttaatactcggaatagtgctggtacttatacttggtacaccgtagctgttaaatctacagacaaaaatgcttggggcttagttgaaggttatttcaccgttcctgcgggtatggttgaaatccgaccttggctacaagtgagcattgctgcgtcagaagcggcgggtcagcaatggcatgttacgaatattcaaattcgcaacattacaggtaacaagaagttagcaagcgacttgcaagcaacctcttctgcattaagtacgctcgattctaaagttaccaacattgatggtcgtgtaacttctgcatcaaacagcattgtttctcttaataatagcgttacaaatatcaataccgcactttcacagaaagctgatgcttctgcgctaaattccctttctaaccgggtaactactgccgaagggaatatcaccagtcagggtaattcaattacctcattgactaactccctagcggttagcggaaaggcgggcacaaaccttctcatcaagtcaaatcaagtcggtacatatgatggtgtctcttatccgcatcacacctacaaactcggtgaagattgggaaattggggctacatatactttaatttggtgtgccgagcacaaacgtgggactggcgatacaaactcatcacttgctgtatacgcaggtggtggctcacaacatctccaagcagtagtaaatacgaatggtaaggttgtcagcaaagttacctttgtaaaaaacagcgcagttgcctctggcccaattatccacttctacatgctcaaccgtccgacagccgacaagggtagcgttggtacagtttattgggcggtgcttgtaaagggcgatgtgctcacgactgatgcttggattccaagtgcctatgattacatccctgatagcaatgcaaacgcttctgctatcactaacctcactaacacggtcacacagcaaggtaatactcttacgtctcatacgaatagcattacttcgctgaacaacagtatcacgagcatcaacggcgttttgaatacgaaagccaatacttctgccgtttctgatctcgacagtcgtgttacggatgcagaagggaagattactgcaaatacatcttcaatcactagccttgcagcaaatttaaaaagcacctcaaatggcatcacaatgtctgcgtcaattgatgtggatccagatagtgaatggatttactggaccaaaaacggtgaggttacgagagctgatgacacatctgcacttggaggcaaagtctatcgctttggtaacaatgctgataacgaccatgtaaacgcaagatcaaaagcaaaacttccttttgatcaaaataaaacgtaccgcatccgtgctagataccgtcgagtcagtggaacgggaaccatttattgtgctgtatttggaattgcaaaagatggcgtttcacacgttaattcaagcaatacagtgacaactggcgctggttcttctaactactttgtttcaaaccaagcgcctgcacttaatgtatggcaagaagttacggtatatgtcaaaggtcgtgcggcaggggcggctacaggtggttggactttagataatcctcgtcaacttccaaatgctacggcgttcattagtgtccaattccttgcaaattactctaatgccgctggtattactgagcttgattacctcattattgaagatgccgatgcgattgctgccaatgatgctactgccaaagctttatcttcgctagatactcgtgtaacaacggctgagggcaaaattacctctcaaggtaattcaattacccagttaaacaacagtatcacgactatcaatggcacattgtcaagcaaagccgatagctcggccttaaacagcttggctaaccgcgtatctacagccgaaggtgcaatttcttctcaaggctcaagcattacctccttgaatagctctgtaactggaatcttgaaagatattgaagtgacagatactcggtcaacaaatcagccgccgtcatggtattggtcaaattaccctaaacgaattgtccgagaatttaaacaggcctcaacgcttggtctaacaggaatggggacatatgtttcgcttgaaacatatgtttattatagcgacgctactggtggaccgattattcaaattgcacgcggcacagattcgaaactgactgccgaacgccgaagtacaagtacatcaacatggggtacttgggtacaagacattaaggccataagtgataggcttgcaaataaggctgaagcttcagcactttcatcgcttgactcgaaagtgtcggttattgatgggaaagtttctacacaagcctcaagtattactactctgcaaactacggtaggtggtaatacggcctctattcaatctcaacagcaatcaattgatggtctgaaagcaagagccactttgaagctgcaatcaggcaacttagtcgggggcgttggcattgagaacgacagtaaaacagttgatttcattatccaagcaaaccgatttgccattggcgcaccttcagacgttactggaacagtgacaccaaaatatgcatttgcttaccagtcgactcctacaactttgccaaatggcacagttattcccgcaggtttgtatttagacaatgcctctattggctatattaatgctagccgaatctgggctgataatttaagtgcaattagtgctgatctagggacgattaaagttaaaaatgcaaatattgaagatggagctattgatacgctaaaaattaaggatgaagctgtaactgttccaataggtgtaaaagcaattgatgtaaagactatcactacttttgcaggtggagttacaagtggacagcctaataatgattttaataaccacttagctgcatgggaaaaccatataggcacacttttacaagttactctgaatagaagtggtggaaaagttagacttgatgcctcagtaaatatttgcaccccaaccttcggggcatttagtgtaagtgatggacgaggtaatccaattgcagctaacgatagggcaatggcttccttttatatttcaatatataaaaatgggtctttaattggcagaggctctctgggcgcgaatattgagactggtaatattaacgttaattttaatggtacagcggttatcgtttcagctattgatgataacagtactattggtaatgttacctacacacttaaagcaggatttgctcgacaggagggcgttaatatcccattaaatgtggaatcaagaagcaactttatgattacttcgagaacgttaagtgttattgaaatgaaaaagtaa

SEQ ID NO: 68462 - DNA, 516 bp, Acinetobacter baumannii
atgttgcaagcccgtttatttaactatgcagatgctcagcgttatcgtttaggtgtgaattatcagcaaatacctgtaaatgcggcacgttgcccagttcatagtaatcaccgtgacggtcaaggacgcatcgatgccaattatggtggtcttccacattacgaaccaaatagttttgggcaatggcaagagcagcctcagtacaaagaaccaccgttaaaaatcaatggggatgctgatttctggaactatcgtgaagatgacaacgattatttcagtcaacctcgtgctttgtttgaacttatgactcctgagcaacaacaggctttatttgataatactgcacgcgcaatgggtgatgctcttgatttcattaaatatcgccacattcgtaactgttacgcatgtcatccagcttatggcgaaggtgtggctaaggcgcttggtttgacagttgaaaatgctcaagcagctagagaaactgaccctgcacgtggtttaccaagttttatttaa

SEQ ID NO: 68463 - DNA, 786 bp, Acinetobacter baumannii
  misc_feature (716)..(725): n is a, c, g, or t
atgccaatagtgaatcaaaacgctcgtccccatattgaaaaaattttagctaatctgacccaacttccaggcgtttataagatgctagggaaagagggggagttgttatatgttggtaaagctaaaaatctaaaaaatcgggtgtcgagttattttgttaaaaccattgagcacccgaaaactcaagctttagttgctcgaatttatgatattgaaacgctagttacgcgttcagaaaccgaagcgctgcttttagaacaaaatctcattaaacagcatcgtccgccttataacattatgctgcgtgacgataagtcatatgtctatatctttgtatcggcagataaaccttatccgcgaattgccagtggacgtggcaaaggtaagcaccaaatcggtaaattttttggcccttatccaagtgcttatagtgccagagataccttacttgttttacaaaaactttttaatgttcgccaatgtgaaaatagttatttctcacagcgtaagcggccgtgtttgcaatatcaaatcaagcgttgttcggccccttgtgtaggcttggtttcaccagaagattacaaagaagacgtgaataacagtattcgtttcttacaaggtgacaccaaagaattaaaccaggaactgattgcgaaaatggaacaggcagcggcagatcttgaatttgaaaaagcggttttttatcgagatcggtnnnnnnnnnnatcggttgtctttacttcgcgaagtacaagcacagcaagccgttttcaaagtgaaaggtga

SEQ ID NO: 68464 - DNA, 411 bp, Acinetobacter baumannii
atgcttggtttcaaagaaagtattttccagtcatgtttagctttaggaagaatcaaagaaagccaaactgatttaattcactacaatcatttagatctagaattagccttaggccctaagactgttgcagaagcgagagctgttgttggtcattattttggccgtattttagaatatgaacaaactaattccctaccattgctcaaaaccctagctgtatttttaaaatatgatggcaattggaaggtaaccgcttctaaattagatattcatcggcagacactagtctatagattaagagttatagaagaattaactggcataaagcccacaacaagcttaggtattacacggttttggatagctttagaagcagcaaaaactataggattattagaagattattattaa

SEQ ID NO: 68465 - DNA, 705 bp, Acinetobacter baumannii
gtgcaaagcaatcgcgaaaatcaggctgaggccttattaaatcatgtcaacagatatcaagccggtcgactaacggtctttcttggtgcggcacctggtgtaggaaaaacctatgccatgctcgcccgtgccaaagaattatttcaacaaggcactgatgttgttgttggtattgttgaaacccatggaagaatcgaaactctaaaaattttggaagggttgcctcagattgctagaaaggaaatgcaatatcaggggcatactttagaagaaatggacttggatgctattttacttaggcatccgcaaatcgttttggttgatgaattggctcatcgcaacgtcccaaatagtcgtcatgaacgacggtggcaagatgttaatgagttactagatgcaggtattgatgtattcaccaccataaatattcaacatttagaaagcctaaatgatgtggtctatcaaattacaggcattcgagtaaatgaaacagtaccagatcgggtatttgaccgtattcgagacatccgcttaatagatttacccgtcagtgagcttattgaaaggctccatcaaggaaaagtctatgtgccagagcaagcaaatctggcattacaaggcttttttagcatttcaaatttaacggcattacgtgaactggcaatgcaatgcgttgctgaacaagtctatctcgttgcaaaatga

SEQ ID NO: 68466 - DNA, 870 bp, Acinetobacter baumannii; identical to SEQ ID NO: 49028

SEQ ID NO: 68467 - DNA, 264 bp, Acinetobacter baumannii
  misc_feature (247)..(256): n is a, c, g, or t
atgctcacagatcttgatgatttttattgttttgcccttgttgttgagcatggtggatttagtgccgccgaacgtgttacggatattccaaaatcaaaattaagtcgtcgtgtttataacttagaggaaaatttaggggttcgcttaattcagcgcagttctcgtcattttgcagttaccgatattggtatggatatttatagacacgcccaagtcatgatgaatgccgcacaagcagctcatgatnnnnnnnnnnagacatga

SEQ ID NO: 68468 - DNA, 384 bp, Acinetobacter baumannii
ttgagtcttagtattccgggattatcaggtatcacaaaccctggaccacacggtattagccaagtgttctatgaatatgtttctgcctttgccaacaatgggtcaggtttcgaaggtcttggagacaacactgtatggtggaatgttacttgtagtatcgctctactgttaggacgttttcccaccttaattttgccattaatgattgcaacacgtttagcagcaaaaagaaaagcacccgaaacagcaggtagtcttcaggttgaaactccaacctttgctttaacgctgattacgattgttgtgttgcttaccttattacaatttatgccagttcttgtccttgggcctattgccgatcaacttttgttggttaaaggctaa

SEQ ID NO: 68469 - DNA, 264 bp, Acinetobacter baumannii; identical to SEQ ID NO: 47948

SEQ ID NO: 68470 - DNA, 186 bp, Acinetobacter baumannii
atggaacttggttgtgatggcgtactgatgaatacagcaattgcagctgctcaaaatcctattttgatggcttctgcaatgaaaaaagctgtggaagcaggacgtgaagcatttttagcgggtcgtatgccacgtaaacgcatggcaaatgcgagttcacctgagacgggttatttctttaaataa

SEQ ID NO: 68471 - DNA, 696 bp, Acinetobacter baumannii
gtgattctgccactcgtgcttattgcgatgattctgtacgataaaatggttatgcctaaagaggcaccagctttaaatattcatgaggcgattgttcgtgagcatgaaaagaaatcaccgttcttacagactcatgatccgcatagttcacagttccgtcttggttttggtggtgcattacgttttgcgacatcagaaacagtgggacatatcggtgccttaattattttgatggcattgtctgcaagtgtaggtggtttaattgaacgctctgaagtggtcgaattattaccaactcatttaggcagtatctatatatcactggcatgtattgcactgttacttgcaattattggtatgtgtacagatccatttggtgccgtaattttagtggcagcaactattgctcctgtagcttacgaaaatggtattcatccaattcacttctggatgattgtattggtcgcattcgaatttggttatgtaacgccgccagttgccttgaaccatctattaacgcggttatccgttggtgatgatgaggtgaatgctgccgatgcagaagcgaaagagaagtacacaagtttctactaccgatatgaacgttggttattaccaattattgtcttgttctcatcattggtattggtaacttatgcaccactaatactgaaactatttggttggtacaaataa

SEQ ID NO: 68472 - DNA, 420 bp, Acinetobacter baumannii
atgatgtgcatcaagaaatcaatggtagattgtgactcaccagaagtgacgtatttttggatacctgaagtgtccagagttgcaggatcaacattcattcctacgcccggctttgcaatgttaatcaccacaaggccaatcagaagcgcgattgttgaaacgatctcgaagtataacaacgcaacaccgccagttttaccaactgacttcatgctttccataccagcaataccacttactactgtacagaaaataacaggtgcgatgatcattttaatcaaacgaataaaagcatcacctaatggcttgagttgctcacctaaacctggaatatgttgttcaacaccattaacaatttgcgttgtacttggtgagaaatgccctaccaaaacacccgcaataatcgcaataatcacttga

SEQ ID NO: 68473 - DNA, 969 bp, Acinetobacter baumannii
atgttagttagtgttgtgcttcctgcatataatgctgaattatatcttaaagaagcaattgatagtgttttatctcaaacatttactgactttgagttaattattcttaatgatggttcgatagatagaacggaagaaattattttatcgtataatgatagtcgtattgtttatgtgaagaatgagaaaaatttaggtttaattggtactttaaacaaagggattaatttagcaaaaggtaaatatattgctcgcatggatgccgatgacatttgcttaccagagcgatttaaaaaacaggttgattttctagaaaagaataatgaaattgatcttattggaacaaatgcaattaagattaataataacggtgacagaataggtgttattaatatgcctgcatcagatcatgatataaaaatgatgctttttattcagtctccatttattcatccttctattatggggcgtacaacagtttttagaagctttgaatatgaaaaagaattttatagagtggaagactatatgttgtggattagaatgtcccaaaatagtaaatttcataatataaatgagtttttattaaaatataggtatttagataatagtgagtcaaaattattaaacaaaaattattctaaaaaaagagatgcgctaataaatatttatagaattcttttcttgaataataatattagctttagtgaagatgaattgaaaacatattcttcgagtatggttcggtattgtgctaaagatattgattttaaaaaactatcgaaaatttattttcggattattagtaagttgaataatcgagaaattaagaataatttaggatataggtggattatctcttttttatttaatccaaagaaaatacttcaatatataaatcttttcttatgtaataaattgacatataagggtggagtgttactgtataaagagttgataaaaagatga

SEQ ID NO: 68474 - DNA, 243 bp, Acinetobacter baumannii
atgctctctatttatttaacagatactcaacaacatgtgcaatttaatgattacccaagtgatcagcctgttaaatttctgttaaatcttaaaaagatttttccaagtactggtgatttattattacctgttttacctgaagataatgatctggaaaatgtaacttgggaatcaacctcaaaagactttgaaatcttcaaaaagttattggcaggttggggtgtgattgagcttcgtttataa

SEQ ID NO: 68475 - DNA, 264 bp, Acinetobacter baumannii
atgggcggagcaaaagctcattacgatggaattgttgctttctctcaaacagattttactgaagacctcaaaaagattgaaattcctgttcttatcttgcatggtgaagatgatcaggttgtaccttttgaaatttcaggtaaaaaatctgcggaactcgttaaaaacggtactttaattagttatccaggatttcctcacggaatgccaactacagaagcagaaacaattaacaaagatcttttagcatttattagaagttaa

SEQ ID NO: 68476 - DNA, 2190 bp, Acinetobacter baumannii
atgttaagaatttctatatcatctccccaaattaagggttcattcccgctcagcttactcagtttaatgattttaaatattcaaggtgctaatgctgaggaattgattgactcctcatcaaaagccgcagccaccatgccaactataaaaatcgaggccatgagtgagctcgacccgattaaaagctatatcgattatgacaaggccaatgtcactcgtaatggtttagataaaaaagatatccctcaaaccgttgataccattgatgttcagaaatataaaatttatggctcgaatgacttaagcgtcatgctgcaaggtacaccaggggtatcaaccagttacgatatgcgcggcgatgggatcacgattcgtggttttggtgccgacacaggcgatatttaccgtgatggcatacgtgaaagcggacaagtacgccgcagtacagccaatatcgaacgtatagaaattttaaaaggccctgcttcggttttatatggccgtagtgctggcggcggggttgtaaatatggtgagtaaattcgccaattttgactctaaaagttcagttggcgcatatgcgggttcatacgataactacggaacaaccgctgacatcaaccaagtacttaatgacaatttagcagtgcgtttgactggagaatatggcgaggcaggcagcttccgctctggtattgaaaataagattgagatgttttccccaagctttacctataaaaatgacgatggaaaactgacttggaccacacaatatacctatgacaaattaggtcgagttcctgaccgtggaccaacacgtaacaacttgcctgcgggaacttcaattaaaatgggatttgctcaagacggtgattatgtggatgatattttgcaagtcgttcgtactgatgtgaattatgaatatgcgcctgattggaacttccactgggcggcgagttaccgacaagcagaacagaactttgaccacttttattttggaacttattgtggtttagatggaaaaaactcaaagaatgaggcgtgtacaaaaaaaggttacatcgatcaaatttactactggcaacaaaccagcaacaagaccacaaccaatacattcgatattaaaggaaagttcaagacaggccagcttgaacaccaaattatggtcggtacagactggacttatgaacaacgagaaccacgtctagccaataaaactcaaaatgggtcagctatttatggttacgttaatccaatcactggtgaacgagagtacagtcgtggcaatggcccattaaagattagtcagcataactataatgaaggcacaacttacggcgtatttatgcaagatttaattggtctaaatgaccaacttaaacttatgatgggactccgctacgattacttcgacttttcaactactaacaaaattaagaatgaacatcgtaatgtaaaagacagtacttttagcccatatgttggcttggtatggcaaccagttcctgaacatagcttttatacgtcttactctaaaagcttcgcaccgtttggtggacaaatgggtgtcaaccaagttactggaagtaccgatgtcgcgaaaatggataaagagcctcaatataacgagcaatatgaagttggggtaaaaagtgaatggttagataatcggttaaatactcaattttctgtctttgatattcgtaaaaataatattcgctataaaccaaaccctgacagtgaaccagaggtatgggcaactgctggtcaacatcaatctcgtggtctcgaatttagttttattggccgtgtacttgataatgtctttgttcgcggtgggtatggctataccgatgcaaaagtaaaagaagacaagcaaaatcctgaacgtgaaggcaactatttagcaaacacttctaagaacacaggtaatttatttgttcgttatttaccaaccgagcagtggtataccgaagtgggcgtgacctatgtgggttcttattatccaaatattaataatcaagtaaaaatggaaggctttaaccgtatcgatgcagcaattggctacagtgccgacccttggaatgtcacacttgcggtaaataacttaaccaataaagagtactggcgttcagacagcatgccaggcacaccacgtaatgtgttattgcgtttgaattatcagttttaa

SEQ ID NO: 68477 - DNA, 1269 bp, Acinetobacter baumannii
atgaatatcccacttcgaccatttaagttgtctgtaatcgcctgcgcgatttgttatgccaacctcacctatgcccaagatgcacaggtacaagctttgcaaacgattcaagtcaaagcatcaaatgcagaacagtcttctgaacagaccaaggcatataatgttaaaaactcaagtagtgcaaccaagcttaatattgaggctaaggaaacaccccaaaccattaatgtcgttactcgtcagcaaattgaagattttggccttaccagtactcgtgatgttttaagtaatacaccaggtgtgacagtaactggattagaaacaaaccgaacaacttatactgctcgtggttttgatatttcaaatattttggttgacggaatcggtatccctcaagttgatagctataattataataatagtgatgcagatagctatttctatgatcgcattgaaattgtaaaaggtgctgatgctctaacaaatgctctaggtgatcctggggctacaattaactatatccgtaaacgccctactaaagaatttcaagcaaatgctggggtgagctatggttcatgggatacgcagcgctatgaagctgatatctcaggttctcttacacaagatgggcgagtacgaggacgtctcgtaggttatgagaaagtcggagattcttatctagaccgctattcagaagaaaaaaacggttttcaaggaattttagaagctgacgttacagacactacaaatatttcagcaggatattcaaaaactcgtcaatacgctaatggttcgcaatggggtgcactacccttagttaactcaaaaggagaaccattaaattattcacgcaactataattatgcaccatcatggacatactacgattgggaaattgataattattttgccaatattgaacaaaatttatggggagactggaagctaaggttaggttataaccttaaaaaatcagaggttaaagataaaatgctttatctcaatggttctccttctgctacagacaatacatctggtatttcactattaccagaaatttataatcaaaaatttaaagaaactacagcaaatgcagatattcaaggtacgtttaatttattagggcagcaacacgaagcaaatattggttataactggtcaaagtataatgctcaaagtgtttattcgtatggtagtagtttaggcgttattactacagacttaccaagctggacacctgaagaaccgacttggggagactttacctaa

SEQ ID NO: 68478 - DNA, 720 bp, Acinetobacter baumannii
atggggaaagtcgattattctaaatacgcaaaactcagcccatttgaacttaaagataatttaatagaattagctcaaagcaaaactgaccgaataatgttaaatgctgggcgtggtaatccgaactttcttgccactatcccacgtagagcattctttcaactgggtctgttttctgcgactgaatccgagttttcattttcctatatgcctgaaggtttaggtggcttcccgcgcaccgttggtctccagtcacgttttgataacttcattttggaaaaccgtgacaaacccggtgtggtctttttaggtaaagccgtgtcttatgtacgtgaccagttaggcttagatccagatctttttttacttgaaatggttgaagggattttagggtgtaactatccagtaccagaccgaatgctcagagtgagtgaaaccattattaaagagtatgtcttacgagaaatgggcgtacaaggcatgcaaaaaagagatttagatttgtttgctgttgaaggcggaacagctgcaatggcctatatttttaactcattaaaagaaaataaaattattaaaaacggcgaccgtattgccattggtagccctattttcacgccatatctggaaattccaaaacttaatgactaccagcttgaagaagtacttattgaggcagaccctaaactcggctggcaatatccagagtcagaacttagatag

SEQ ID NO: 68479 - DNA, 279 bp, Acinetobacter baumannii; identical to SEQ ID NO: 52460

SEQ ID NO: 68480 - DNA, 855 bp, Acinetobacter baumannii
atgaatactcgtcattttagccaactaccaaaagcggcattggcttatccaaaagtagtgcaaggtttaatttttaaaaaaccgaaaggtccaaaaatattaccgcaagttgaatatgtggtagataccctagaaattgatcagaaccatttgaaggcttataacgaagtatgtggctttcaaaataatggctttgtacctgcaatttatttagcggtactttctcaaagcttgcaaatgcacatgatgacagcagaagccttcccatttccaattttaggtttagtgcatattcgtaaccagattaaacagaccagactgattggcgtaactgaaaaactcactctgttatgtaaatttggggaactaaaaccacatgataaaggcgttcagtttgactttattaccacggcaaaagttggcaatgaagtggtgatggaaggcttaacgacttatttatctcgtcaaaaagtcgagaaaagagtaggtgagaaagccaaagaagaacaagtaccagcttatgtgccaaaggcagagtggaatattttagaaaatacaggccgccgttacgcgaaagtgtctggtgattttaacttaattcatattcatgccattacagcaaaagcatttggctttaagcaagcaattgcgcatggcatgtggagtaaagcgaaagcattagcgaatcttgaattaccaaatgcttatgaagcagatgtatggtttaagctgccaatgttcttgccatcaaaagttgagtttttaacggcaaatgcagataaaaagacagatttcttgattcgtaatgccaaatcacaaaaaccgcatgttgcaggaactgtaaaagcattataa

SEQ ID NO: 68481 - DNA, 927 bp, Acinetobacter baumannii; identical to SEQ ID NO: 46613

SEQ ID NO: 68482 - DNA, 936 bp, Acinetobacter baumannii
atgagtaatatcttcacaggatgtatcccggcgctaatgactccatgtactcctaaccgtgagccagattttgatgcgcttgtgaaaaaagggcatgagcttattgaagcgggaatgagtgcggtagtgtattgtggttcaatgggcgattggcctttattgaccgaagctcaacgtcaagaaggtgtagcacgacttgtagctgctggtattccgacaattgtgggtactggggcagttaattcaaaagaagccgtttctcatgcagctcatgcagaaaaagtaggtgcacaagggcttatggtaattccacgtgtattatcacgtggtgcatcgccaactgcacaaaaggcacacttttctgcgattctaaaagctgctcctagcttacctgcggtaatttacaatagcccgtattatggatttgcgactcgtgcagatttgttttttgaattacgccgtgaatttccaaacttaattggttttaaagagtttggtggtgctgctgatatgcgttatgcagctgagttcatcacttcccaagatgactctgtgacattaatggctggtgtagatactcaagttttccatggtttcgttaactgcaatgcaacgggagcaattacgggtattggtaatgctttgcctaaagaagttttacagttggttgaccttagtaagaaagctgcagcaggggatgcgaaagctcgtcgtttggcacaagaattatcaagcgctttagaagttttatcgtcttttgatgaaggtactgatttagtcctttattacaagtacttaatggtacttaatggcgataaagaatataccttacattttaacgaaacggatgcattgagtgaatcacaacgtaaatacgttgaaactcagtatgaattattccgtacttggtaccgtaactggtcagctgaaatctaa

SEQ ID NO: 68483 - DNA, 1173 bp, Acinetobacter baumannii
atgtctataacaatatctgtggtaggtttagggtatgttgggctctctaatgcaatacttttggctcagcataatcaggtgtttgcgatagataataatatagagcgtgtaaacttagtaaatgaaaaaaaagccccgattcatgatagagaaattatagaatatcttaagaataaaaagttaaatcttcaagcaactttggattataaatcagcttatagacaatctgaagttatcattattgctacgcctactgattatgatgaggttaaaaattattttaatacctcatcggttgaatcggttattgagagtattttagaaattaataaagaagcccttattattattaaatctactgttccagttggatttgttaatacaatgcgcgctaaatataatactgataatatagttttttctccagaattccttcgagaaggtaaagctttacacgataatttatatccttcacgaattattgttggagaacaatctgaaagagctcaagagtttgcatatttattacaacaaggtgcaataaaacgggatattcctattttattaactaattcaacagaagctgaggcggtaaaattatttgcaaatacatatctcgctatgagagttgcattttttaacgagctggatacatatgcagaaattaagaatttagatgctaaacaaattatagagggggtatgcttagatcctcgtattggtaactactataataatccttcttttggttatggcggttattgcttgccaaaggatactaaacagttattagctaattatactgatatacctaatgatattattaaagcgattgtgaaagctaacaatacacgtaaagagtttattgtgcggagtctactttctagagatgtcagaacagttggagtctatcgacttatcatgaaacaagggtctgataacttccgttcttctgcagtacagactattatagataatttattgaaaaataaagttaatgttattatatatgagcctactttaaatgagaacatatttaatggatgttctatagagaataatattaatatttttaaaaaacagtgtgatattattatctctaaccgccttgaagataatttattagatgttttagataaagtttatacacgtgatatttttaataataattaa

SEQ ID NO: 68484 - DNA, 504 bp, Acinetobacter baumannii
ttggatgaaagtgatattattctaggccatgtaggggccttcaactctataaaaaatcaagactttatagttgatatttttgatgagcttttgaaaatgaagaaaaactatatacttttttttgtgggtgatggagacttgaaagagatagtaatttctaaagtaaaagaattaaaattggagaagaaaattttctttctgggacaaagagatgatgtaaactctttgttatcaatgtttgatatatttttatttccttcaaagtttgaaggtctaggaattagtgtagtagaagcccaggctgttggattaaaaagtattgtctctgaaaatgttcctgttgaaacgaaggtaacggatattatttcatacattcctctagaaagacagatatgggttaataagattattaatacaaatttagtaatagaaagggacaagtataataatattgttgaaaattctcaatttaatattaagtatgctgctaaagatcttaattaa

SEQ ID NO: 68485 - DNA, 747 bp, Acinetobacter baumannii; identical to SEQ ID NO: 49089

SEQ ID NO: 68486 - DNA, 531 bp, Acinetobacter baumannii
atgcggaccatctgccaacactggaagtatattgtctgcaagcgtccaggtaccgtcaccattgttcaccgctgggtaatccacgccatccacagtcactacaactgtcgcagtaggatcatcaatcgtaccggtcaatgcaggagttgtatcgttagtcgatacatccgcgaaagttactaccggtgctacaagatcaacgataaagccgtctgtaccgtcaagtacatcgcctgtacccaagttacccacaacatctgtgtagctgccatcagccacggcaatgcttggtgctgtgcctgtaccatctggtgtgaacactgctgtccaggtgatgttgtccgttgtagtcaggccagtcaatgtaccgcctacaaccgtgatgtcacttacatcaaagccggcaaccgcctcactgaacgtgaaggtaatgttggcatcttcacctgccgcaagtgcaaggtcatctgtcgtgatcgcaagtgttggtgctgtcgcatcaacagtcactgtacctgttaccggagttga

SEQ ID NO: 68487 - DNA, 531 bp, Acinetobacter baumannii; identical to SEQ ID NO: 57652

SEQ ID NO: 68488 - DNA, 357 bp, Acinetobacter baumannii; identical to SEQ ID NO: 53252

SEQ ID NO: 68489 - DNA, 1206 bp, Acinetobacter baumannii; identical to SEQ ID NO: 48909

SEQ ID NO: 68490 - DNA, 135 bp, Acinetobacter baumannii
atggcaggtattttaatgacttgtgtcagtggttttgtgcttaaattttttcatatagaaggtgccattctaatttctggtttattggggatgtttattgcggtaatagtcgaaaataaaatgggagaaaaataa

SEQ ID NO: 68491 - DNA, 237 bp, Acinetobacter baumannii
atgataatctatggtgatgtagattcaggtaattgttataaaatcaaattgttactatccctattaaatataaatcatagatggattcatgttgatattttaaataaatatactcaaacagcagagtttctatctttaaatcctaatgggaaaatacctgtcttagttttagatgatggacgggttctaagtgagtctaacgctattctagctacttggctgagggaacggaattga

SEQ ID NO: 68492 - DNA, 816 bp, Acinetobacter baumannii
atgatagtagtggctcatgcgttaggtggaacattgaagggtggcgtcttcaacatggtactaaattttaataaagagttgaaagatacctgtaaatttatatatttagtcatggaggattatgctgatcctaaagttatttatcaattagaaaaattgggagctcaagtggttgtaatcccgaattttagaaattttattcactatattgtctttttattgtctttttattataaaaataaaatagatgttgttcatgtccataatccaaacatagggattattgatatctttttctcaatgttttttggtgttgagaatagaattgtgcatagccatagctctgttttttcagctaaaattataaattgttatataaataaatttctaaatatttttctaaatattttttctactaataaattggcttgtagtaaaaaagctggaattgcaaaatttaaaaataataagtttcaagttgtttttaatggtattgatataaatgaatataaatattcattgagtgatagaaggctttatagggagaagtttgggttggatgaaagtgatattattctaggccatgtaggggccttcaactctataaaaaatcaagactttatagttgatatttttgatgagcttttgaaaatgaagaaaaactatatacttttttttgtgggtgatggagacttgaaagagatagtaatttctaaagtaaaagaattaaaattggagaagaaaattttctttctgggacaaagagatgatgtaaactctttgttatcaatgtttgatatatttttatttccttaa

SEQ ID NO: 68493 - DNA, 264 bp, Acinetobacter baumannii; identical to SEQ ID NO: 68475

SEQ ID NO: 68494 - DNA, 948 bp, Acinetobacter baumannii; identical to SEQ ID NO: 48681

SEQ ID NO: 68495 - DNA, 189 bp, Acinetobacter baumannii; identical to SEQ ID NO: 49479

SEQ ID NO: 68496 - DNA, 159 bp, Acinetobacter baumannii
atgtccaaagctttagcatatgcaccagctataaacacagcaaaaacaaaattaccagagacagaagctgatcccttatatcgttctatctcaaaacataaatatgcagagttttcactttgtgataaagaaggtaattctatatacttatatatctaa

SEQ ID NO: 68497 - DNA, 531 bp, Acinetobacter baumannii
atgcggaccatctgccaacactggaagtgtattgtctgcaagcgtccaagtaccgtcaccattgttcactgctgggtaatccacgccatccacagtcactacaactgtcgcagtaggatcatcaatcgtaccggtcaatgcaggagttgtatcgttagtcgatacatccgcgaaagttactaccggtgctacaaggtcaacgataaagccgtctgtaccgtcaagtacatcgcctgtaccaaggttacctgcaacatctgtgtagctgccatcagccacggcaatgcttggtgctgtgcctgtaccatctggtgtgaacactgctgtccaggtgatgttgtccgttgtagtcaggccagtcaatgtaccgcctacaaccgtgatgtcacttacatcaaagccggcaaccgcctcactgaacgtgaaggtaatgttggcatcttcacctgccgcaagtgcaaggtcatctgtcgtgatcgcaagtgttggtgctgtcgcatcaacagtcactgtacctgttaccggagttga

SEQ ID NO: 68498 - DNA, 309 bp, Acinetobacter baumannii
ttggcgaactggcacacgggtgcgccggatgcgattcctgctgttggtggtgcgatggatttggcggttggtgccaagaaagtatttatcactacagaccatgtgaccaaacaaggtgaaccgaagattgtcgctgagctgacctatccggtaacgggtaaacactgtgttgaccgtattttcactgacctgtgtgtaattgatgtgaccaatgatggtttaaaggtgattgagaaagttgaaggtcttagctttgatgagttacaggctttaacgggtgcaactttgattgatgcgactcaagggtaa

SEQ ID NO: 68499 - DNA, 177 bp, Acinetobacter baumannii; identical to SEQ ID NO: 47924

SEQ ID NO: 68500 - DNA, 291 bp, Acinetobacter baumannii
atgtttgatatatttttatttccttcaaagtttgaaggtctaggaattagtgtagtagaagcccaggctgttggattaaaaagtattgtctctgaaaatgttcctgttgaaacgaaggtaacggatattatttcatacattcctctagaaagacagatatgggttaataagattattaatacaaatttagtaatagaaagggacaagtataataatattgttgaaaattctcaatttaatattaagtatgctgctaaagatcttttggacatttataagttgattaattaa

SEQ ID NO: 68501 - DNA, 753 bp, Acinetobacter baumannii
  misc_feature (712)..(721): n is a, c, g, or t
ttgcaaaataatacaatcgttgagaactctgcatacaccacatttttatatgataaattaggtacaaaagaattaaattttaatatattagcgtttaatacaggttcttatgcatgtaaatatttattaggagcagcggcggctgaaaaagatactggactaaatttgaaatttaatgcattaaacttaactggtaatactcctaaatgtgatataccgacagaagtaatttctacaggcaatacgaatattgatataaaaaatgaagtttttagtaatttattagaacctttaaaagaagctaatgaaaataatggttttttaccaatttactatcctaaaaataatttttcagcgacagatttaattgatgttgatttggaaaataagggtacatgccaaactcaggaccaacgtggattatcgagattagtaagtaatacgtactattatcaaactctagaaaagagtaaaaatagttgtgatattggttcagttgaattaatgaagcttacagcaggtgacctagaaggtttaagtaatatttcatttacaacattattagaaacctatcaaaaaagttacgacttatatgatagtttgctcaaagatccaacaactccatcaaattttattgtttattataaagtccgtttagctgaatttaaggatttacttgataaatttaagaatgacagcgcgcatataaatnnnnnnnnnntacaaaatatcgagctatttatattgatttaa

SEQ ID NO: 68502 - DNA, 774 bp, Acinetobacter baumannii
atgaaaattgaatcgttcgcagttactgggttgcatggtacacgtggtccaatttatctagagtttcataaagatttgaatatattgtctggcagaaacggtgctggtaaaacaacaattcttaaaatgatgtggtatttcattagtgggaatttagaaaaagcattaattgaagttccatttaaatctgcaactttaaaaacagatttatatactatctctgttactgtcaatgatggtcaagataaaccttatgaggtagattttaaatttaatgatagcttacctataaaaccatcatcattatatgacataggatttgagaaaatgaatcctagagttaaacatgttattactaaatatcttggtagttcatattttttccctacatttagaataattgaaggtggatttactattgaaaaatatgatattaagcatgagttattgcagtcttttttaaaaaataaaaataatagcgattcagattcaattgacttattaaataatttcaaagcattgtcaagtaagctttctcaaaatgatcatggatttattacatctgtatcagcatcaaatattaatgaaatactcattagtaaatatgcagaaataatgtctttaattcagccataccaaaatgagagacgaaaattaactgaagaaattatagaaaatgtatccttaaaagatggaaaggttattatcgaaaaaggtttggaaattgataaagttgcctcatttcaaaataaaatgagtgacatcgaagattaa

SEQ ID NO: 68503 - DNA, 747 bp, Acinetobacter baumannii; identical to SEQ ID NO: 49089

SEQ ID NO: 68504 - DNA, 306 bp, Acinetobacter baumannii
atggttggtttcaaagtcattaaaccaaaaccacgaattaatttgcgttcgtcatcagacaaatcagccgcgcgagctggtttaccttcgtcaagtaacggttggattttctctaaaactgctttagttgctacagcttctttgtcaccgcctttagcaactttagttaaacgtaaaattgctttagcaacagtctcaaggtctgcaagtgcaagttcagtattgatagttgcaatgtcatctaatggatcaattttaccatttacgtggatgacgttttcgtcttcgaaacaacgtaccacatga

SEQ ID NO: 68505 - DNA, 612 bp, Acinetobacter baumannii
  misc_feature (588)..(597): n is a, c, g, or t
atgtcttatacaattcaacaagatacatatgcagtactactgccagcgtttaatgatttgaatattagaaatattgcagagccttttctaaggaaaggtggatgcagtattctattaggtgaaacgagagaagaatatgtaaacagaagaatgaatgaaaaacggataaatattgaaaagaaaactgattttatagatttattctgttgggcgaaaacaattcaacctaaccttaatgtggctatagattttgagccatatggtataaatagattagatggaaaagtagatctagaatggaaagatttgaataatattagtgaaaaagaattatataattattataaaaacaaagcgttggctttaaagcaactgggtattactatggtattaggaccaatagctgatattataactgggtcaaatccctggttgaaagacagacaaattaaaacaacttcatataatattagccagttagttaaaatatttattgaagctctacagtcattggagattgactgtgttactaaacattttccgggatataatcatttagaaaaagatccagcaatggaagatactttnnnnnnnnnngttaactacagataa

SEQ ID NO: 68506 - DNA, 348 bp, Acinetobacter baumannii
atgttaggaccagcagctgtagaggtttttgatcaggtgaattctgcgtcaacctctcaaaagttaataaattttttgaaagaagatctaaattataaaggtttaatagtcagtgacgatctagatgctccagcaatactaagaggtaaatcaatagatgaaattgctgttcaagcactgaattcaggagttgatttattattattgagttctgaaaatgatcttgatcaaattgctcaatatattagtctatcagttgcttcaggaaatttagatagagaaaggctatctaatgctgcaaataaggtaagaaatttatcattcaagaaaaatttgaataataattaa

SEQ ID NO: 68507 - DNA, 1566 bp, Acinetobacter baumannii
gtgataggaggtggctctgctggaagtacaatttcaggcagattaagtgagaactcgaataattctattcttttgttagaagaaggtcctagggataaaagtatttatattcatattcctgttacttattataaaacagctcaaggtccattactcaagcgctataattatgtaaggagcgcagaacaaacaccacaacataaagcgacgatggttcaagccaaggtattaggtggggggagttcagttaatgctatgctttacttaagaggtaatgcaaacgactatgctgattgggaaaaagcaggtgcaaaaggttggggatatgaagacgtaattaaatattttaaaaagtcagaagataacaatacttttcataataaagtacatggtgtcaatggacctcttggagtatcagattgttcgtataaacataatttatctcgcgtttggttaaaggcgtgtcaagaatatggtcttccttttaatgctgatttcaactcaggtgagcaacagggatgcggtttttaccaagttacaattcgaaatggtcgtcgctcgagtgcatccaaagcttatttatcaaataaaagagataatttaaccgttcaaacggggtgtaaagttttaagaattatttttgaaggtaaacgagctgtcggcgttgaatttattaagaatggaaaaaaagaaactgtatattcaaaaaaagaaataattgtttctgctggtgcttttggttcacctcatcttttattattatctggattaggtccaaaagaagatttgaaagagcacggtattcctgttgttaaagatttacctaatgttggacaaaattatcaagatcatattgaaatgtcccttatttataagcttaaaggtgctttcagttatgacaaatataaaaaattacagtggcaagctgtagcgggacttcaatttttgttatttaatgctggacctgcgacatcaaatattattgaaacaggtgcattctggtggagttctcaagggaaaacgttaccagatctacaattatttttcttagcaggtgcagggattgaagaaggtaaagatggggttcctggtggtaatggttgtacgatcagtattacacaaacacgcccagaatctgtaggctatattaaactacaaagttctgacccatataaacagcctttaattgttcccaactatattacatcgccaaatgatttaaaaactttagcggatggagctaaattggtgcaagacataatgtcccaagaggcttttaaagattatgttgaagcaagtcatgttccagaaaaaccactaaaaactcaggaagattttgaaaatttcgttcgtaaggaggcttatcctggtcttcatccttgtggcacatgtcgaataggggaagatgaaactacctcagttgtagatcctgaattgaaagttcatggcgtcgaagggctacgagttgcagatgcatcggttatgcctaatgtaatctcaggaaatttaaatgctgtaacgattatgattggtgaaaaagctgcagatttaatcttaaatggttaa

SEQ ID NO: 68508 - DNA, 573 bp, Acinetobacter baumannii
ttgagtggacctcttgacgtaaatgctgttattagtcattccgaacaaaaacaatttaatggttataaaggcctgttaggtctagaaattgatgagatcatagaaaaaacagcacaaaatttatcgatcttggcagatgtagctcaagagtatggtttagtaatttatctagaagctctggcatggaccccgctcaaaaggctagaagatcaaattaaaacaattcaattagcaaacaagaataatatcaagataattattgatttttggcatttgaatacttgcgggaatactccggaagatgtcaaaaaactagataagaacttaatttatggtgtacatgtttgtgatggtttagagaatagttctgctataccagaagaagttagattaagaaatgtcgacttaggtcaaggagttattcaattagataaatggatagaagctgttaaggcaaccggttatgagggttggtgggcatccgaaagtttttataagaaagagcatcaagattcaccattagaaaatgcgcaaaagcattataagtatcttgaaacactaattcttaattaa

SEQ ID NO: 68509 - DNA, 1032 bp, Acinetobacter baumannii; identical to SEQ ID NO: 49048

SEQ ID NO: 68510 - DNA, 147 bp, Acinetobacter baumannii; identical to SEQ ID NO: 48436

SEQ ID NO: 68511 - DNA, 162 bp, Acinetobacter baumannii
atgtctgctgaaactgtgcctgtacctggcaatgaagtgttgcctgcagggtcagtcgctgttgcagtcactgtatcgccatctaccaggttacctgggtttggtactgaccagctgccatctgtgcctgccaccactgttgcagttgtgccatcaggataa

SEQ ID NO: 68512 - DNA, 162 bp, Acinetobacter baumannii; identical to SEQ ID NO: 60432

SEQ ID NO: 68513 - DNA, 372 bp, Acinetobacter baumannii
atgaatatatatatgattttgaatgactatgataaagcgcatgctttaaatgataagcagcttgcacagaaaccaaatgacacagcacgacttacatttagatgtcagttactttcactacaagggaaagaagccacttcgattaataggtgctatgactatgtggcagaggttctaaaagtagagctgaacaaaccagaaaataagaaggacccaaattataagcaagctgaattttcatacttacttgtaaagtataaagctgggcaccttgaatacaaagagaaaatgaggaaattcattgatagtacaaatgatgaagctctaaaagcctctttacaaactgtctacgatgcagaaataaataattag

SEQ ID NO: 68514 - DNA, 705 bp, Acinetobacter baumannii; identical to SEQ ID NO: 8686

SEQ ID NO: 68515 - DNA, 546 bp, Acinetobacter baumannii
atgaatattgagcaatatttagatgcactaataaaacgcgaaggtggctatgtaaatgatccacttgatcatgggcatgcgactaaatttggaattacacaagccgttgctcgtagttatggttatcaaggtacaatggagaatttaaccttagagacagccagagaaatttataggaatcaatattggcttgagccgcgatttgatcaagttaatttgatcagcgtacttgttgctgaagagttattcgacacgggtgtgaattgtggtattagtttcacaaaaccacttttacaacgtgcattaaatttattgaataggcagggcaaagaaggctgggtagaccttaaggtagatggtgaatatgggccagccactttgcaggctttaataaaatatattaaaaaccgtggtaaggaaggtgaaaaagtgctggtacggcttcttaatattatgcaaggccagcgctatattgaaattacggaaacaaatccgaagcatgagcaattcttttatggatggcttgctaatcgtatcagcttataa

SEQ ID NO: 68516 - DNA, 501 bp, Acinetobacter baumannii
gtgaatgcagaaggaactttcgattttatttcacaaggcgaacaacacaatcaaggtattgagttgggtttaacaggtgccttaaccgatacactcgatgtaagttcaggtgttacctataccaaatctcgtcttattgatattgatacggacatctacaaaggtcatcaaactcaaaatgtaccgaaagtacgtgccacagcccagttatcttataaagtaccgtcagttgaaggattaagattactcagtggtatgcaatacagtagcagtaaatatgcaaataaagagggaacggcaaaagtaggcggatatagtgtctttaatattggtgccgcctataaaacaaattttgctgggcatgacacaacttttagattcaatattgataacttatttaacaagaaatattggcgtgatgtaggggcatttatgggggatgactatctgttcttaggtaatcctcgcacagctcaattttctacaacttttagcttttaa

SEQ ID NO: 68517 - DNA, 657 bp, Acinetobacter baumannii
  misc_feature (629)..(638): n is a, c, g, or t
atgaacatgctactttcagacaaagcacactatgagtcacacttagaagaatatatcgtgtctaaactcaaggcgcagggttggcttgttggtgaaagcaagaattatgacactgacacagctttatataccgaagatttgattggttggattaaagatacacaacctgagaaatgggacaatctgtttaataacaatggtgaaaatacagaaaagaccattgttagtcgtttagtcgctgaaattgaacgtactgacaacatcagtgtgttccgtaaaggatttaaaatggcgggagcaggtacaggcggtattattcacctgactgaaacagcacccgaagacaagcgtaatgaaacgaccattaagaactataaagccaatcgcctacgtgtcgtccctcagcttaaatacaatccgacccgtgatttccgtattgatttggtctttttcatcaatggcttgccaatggctacggttgaaatcaaaactgattttaatcaatctattgatgccgctaaagatcagtacagacaagaccgcaaaccgattgacccgaagactaatcgtaaagagccgctactgttaagcaaacgtggggcgattgtccattttgccttatcagactnnnnnnnnnngactcagaaatctatatga

SEQ ID NO: 68518 - DNA, 1638 bp, Acinetobacter baumannii
atggctgtaataccaaataacaatgatacggtactaacaaactttatttggaaaaatgctgacgatctacgtggtgacttcccacatacacagttcggtagaatcattttgcctttcacaattcttagacgtttggaatgtgtactagaagaaaataagccgaatgttcttgcaacttatgaacaattcaaagatcaagaccttgctcttgatgtgattctaaagaatgcaagccaacgtcctttttataacatctccaattatgacttagcttcattaggtggtaataaaaccaaagccaaccttgaagactatatttcaaaattctcagaaaacgtccgtaaaatttttgaaggttttaagtttgctcaaattattgctgatctagatgctgcaaaccttttacttctaatctcaaaaaactttgctgacatcgacctacatcccaatgtagtacctgaccgcactatgagtaatgtgtatgaacatctcattgccaagtttggtgctgaggtgggtacagggtcggaagacttcatgacaccacatgatgttgtgcatttggcgacaaccttattactacaccctgataatgaattatttgaacaaaatcttggacttgtcagaactttatatgatatgacctgcggtactggtggcttcctaagtgacatgatgaatcatgttgaaacctataaggacaaatataaagttgctcctgtattagtgccacatggtcaagaattacagcctgaaactcatgctgttgctttaggtaatatgctgttaaagcgtttggaaacagacccaagccgtgatctatcagcaaatatcaaacttggtagcaccttaagtaatgaccagtatgaaggtaaacgcttccattaccaatgcgctaacccgccttacggcatgaaatgggataaagactctgctgccgttaaagcagaacaaaaattaggttttgcagggcgttttggtgcaggtgttccaaagagtagtgatggttcaatgctattcttacaaaatttggttgcgaagcttgaaacccctgagaatggtggtgggcgtggtgcaattgtgctttcaggttcgcctttgtttaatggtaaggcaaactcaggtgaatctaatatcagacgttggatgcttgagaatgatttgattgaagctattgttgctttacctacagaaattttcttccgtactggcatcacgacttatatttggttgatttcaaaccgtaaacccgctcaccgtcaaggtaaagttcagcttattgatgcatcaggtttgggttcatcaatgcgtaaaaatgaaggtaacaaacgtacttaccttgatgaaaactctattgcagaaatcacccgtatttatgctgactttgaagaaagtgaaatcagtaaaatcttcgattacactgaatttgggtatcgccaagttcaggtacaacgccctctacgcatggatttccatttcactgaggacaagcaacgcttgcttcaagatactaaggaatttaataagcttagtgctgttgaacaaagcgaagtgttgaaatttattgagcaattaggaaatgaggttaaaccgttctcatggtttgaatctgagtttcttgaaaagctgtatgtttag

SEQ ID NO: 68519 - DNA, 291 bp, Acinetobacter baumannii
atgaagaatttaattgttgtaagatgtggtgataaatcgctgcatgaaaaatgggtttcaactgaagcaaattatgatattgcattaagttattttggagataatccaaaatttgatatagagaaaattaaattttttcatccttataagggctcaaagtgggaagggttatataatttttttactactactgacttttggaaagaatatgacgcaatatggttgccagatgatgatatagatacagatacacaaactattaatcaattttttgatttatttcactattag

SEQ ID NO: 68520 - DNA, 2136 bp, Acinetobacter baumannii
atgaaaaatggtaaatctataaatcaaaaatcatatccgttaacgcgttatggatttatttgtgctgtttcaagaatggaatcttcatcagatttaagtttacccttaacggcaccggtaaacattagagcaagccaaaataaaaattctcggggttatattggtttttttcagtttggggaagctgcactgattgatcttggttattataagcattggaatgataattctgataaaaccaaagcaaacgattggaccgggagttgggttggacataatggtgttaattctttatcagattttttgaaatcccctgctaagcaaattcagatcattggagaatggatagatcttctttgcaaacgattaagaaatagaagtttcaatgaatactatgggaaaataataaatggaattgaaattactgaatcaggtgctattgcaggtgctcatttagttggggaaggaggattaggttcttttttaggtatatcaggttttaaaggaaattataaagaagtagatggaaataatgttcacattagtagatatattgagatgtttaaccattatgacttagaaagctgttgtagtagaaaaatatatataatattaaaaaaccaaataggacaaatagcaaaaaataaaaaagttgttgtggtggaacagaaaactgttgatttgaagaaagatgaggtgaaaacgaatgctcctaaagatataaaatttgatatagcgataattgaaagtgacacaaatagaaaaataacgaatatgaggttttttataagatataaaggtaagatcaaagagcatacttctgatagttcaggaataaaaactggtataattgcagaagagggggaaaatttagatatattggtaaatggaagtaaaggttatcaaaaactaaaaacaatatctataactaaaggaatggaaaatagctgtatatcagtcccattaggactagtcagtgtaaaattgaagatacatgatagtaaaggtaaaattttaaaaaataataagttttttgtttcatatagaggtagagaaatagaaaaaataacggatagtaatggctttattcaattaaaaatgttgaatgcatttgtttataaattgcttctttcaaataagaaacctattttgacattaagaaatgatccaagtatttccgtaatcaatgttaacttaaattctgcagctacaacaatacagatgcctcgagtagcttcaaatcccccaagtaagacagtgccagcaaaaacaaaaccagcgaaagaaacgtcatctaagagagaagagagctttgttgattacttaattgattttattccttcattaggaaaaacagagaatgttcatacagaaaaaaatggtaatcctttaaccaaacagtatggtagtgatgtcgtttttactattaaaacaatcaataaagagacaggtaaggaagaaaatctagcttattcaattaagtataatggtgcaaaaagaacacattatactggacaagatgggattggattaaaaaaacatcggggtgaagagggaaagaaaattgaaattgttgtagatgttgatagtaaagaacaagtactttataccgctatattgaagaatcctatgccggttattgaaataagaatggataagccaaaagatgatgactcatatttattccctttaaaggcacggacaaattcatataaaaatggatttgctcgatttggttctaatcgtagtggtggaaaacgtaaacacgcaggttgtgatctgtatgcaccaacaggaactgaaattagagcgatggctgatggaaaagtccgtgtagtaaaaggtttttattctggtactgatgtaattgaaattgtacataaaaaacatattatacgctatggcgaggttctggcaggaaagtccttagtaaaagttggagatgatgtaaaacgcgggcaaactattggctatgtcggtaaactcacagtacaagttccaagtatgatgttacatttggagatgtattctaatcctaaagatactagtccattaacagttcgtggcaataatgcctatcaacgacgctctgatctaatagatcctactacttttttagataattcaacattatga

SEQ ID NO: 68521 - DNA, 261 bp, Acinetobacter baumannii
  misc_feature (225)..(234): n is a, c, g, or t
gtgatttcgacaaaagctgtaaagcccactctgcaacttgcctacgttaagctcatgatggacgttgttggtcgaggcttagtcatggcgagtcaagtagatagtgaaatacaagaggaagtgtctaaatttcctgttcactttgtactttcaatgaatgtcttcccaaatggaccagcattttttgcacgagtgacagaagataaacaattagaactgctgaannnnnnnnnngctgaaaagagcggaaaaaaagcctga

SEQ ID NO: 68522 - DNA, 807 bp, Acinetobacter baumannii
gtgattgcacttgcattgggtggcggtggagcaaaaggattttcacatattggtgtcatcaaggttttagaatcacatggtattaaaccgaaaattgttacgggtacaagtgccggtagcttcgtaggcagtatctatgccagtggacaaacgccttatcaactccaaaatcttgcgctcaaattgcaagagtctgatatccgcgatttaaccctgaatcgccaaggtattattcttgggcaaaagctacaggactatgttaaccgtaacgtaggcaataaaccgattgagaaattcccaattcgttttgcagcggtagcaactcgtcttgataatggccaaaaagcagactttattaaaggtaatgcaggacaagctgttcgtgcatcatgcagtattccaaatgtgtttgtaccagcaaccattggtaagcagaaatatgtagatggcggattggttagcccaattccggtcaaaacagcacgtgatatgggtgctgatattgtgattgcagttgatatttctgcacgtccggcaggaaaccgacctgcgaatatgtggggattgcttgatcaaaccattaatattatgggtcaacaaagtattaatgaagagttaaagcaagctaacgtggtgattcagcctaaagttgggcacttaggtacactcgatttaaaatcaagtaatgaagctattttagaaggcgaaaaagctgctcaaggtcaaattcgccaaattgaaactgcaattgcaaatttcaaaaaatctccagccgcatttaagcctgcgccacgtcctaaattttaa

SEQ ID NO: 68523 - DNA, 393 bp, Acinetobacter baumannii
  misc_feature (11)..(20): n is a, c, g, or t
atgcttatacnnnnnnnnnntgcttatacagatgcggaagtaactaaagacaatactttgcaaaaaggaacagctctagccaatattccaaaaaatagttttaatcttttaaatatctatgaatttcaagatggccctttacaaggcttaggtctaggcatcaatcaaaaatatattgataaacgtgcaggtcagacagctaatagtacctataccatgaaaggttatgcagttacagatttggtttcttattatcaggcgacaccaaaacttcgtcttaacttagatgtgaagaacatttttgataaagtttatgatgaaagtgctttcaatttatatgcttatccgggtgaatcacgtaccgttcaattaggtatgagctatacgttctaa

SEQ ID NO: 68524 - DNA, 1788 bp, Acinetobacter baumannii
  misc_feature (1752)..(1761): n is a, c, g, or t
atggatcttaagcttcgccttctctccctgagtattgcacaactatgctgtattccagctgcttttgcagacacgaacaactcttcaactactcttgcaactatcaaaattaaagcccaacaggcatctgaccagacttataaagtggatagttccagtagtgctacgcgtagtgaaattgcattacaagataccccgcaatctgtgagcatggtaacccaaaaagtaattgaagatattggtgcaactcgcttagttgaagcacttgatttagctggtggcgtgactcgtgctaataactttggtggtcaaggtttaactggttttaacatgcgcgggtttaccagtggtgagttttatcgaaacgggtttccaattaaccgtggctatccaaatgcgccggatagcaacacaattgaacgtgtagacgttttacgtggcccctcttctagcttatatggccgtggtgacccaggcggtacgtttaacttaatttctaaaacaccaaagtctgagcaacaaaccactttaggggcacagctcagtagtgaaggtttatatcgcactaccgtagacacgacaggtactgtacccgatgcagaaaatatcggttatcgcctaaatgtaattgcagaaggtggggatagttaccgtgaccatgtcgaatctaaacgttatggaattgcaccagtcattcaatggcaagctactgatgccaccaaggttacttttgaagccgatattttaagaaaccaacatccactcgaccgtggtcatacacgttatccaacacagaaatcttttaatagctcaccagaaacctatttatgggaaacgggtaaatactacaatcgactctacaatgataacaatatgactcaattacgagttgaacatgaccttgggaatgactggaagctaaatgctggcgtgcaatatttaaatggcaaattgcatggctatgcagtagaagcaaatggcattcaaaatgacggagaaacattagggcgaaattacaattatcgcgaattaaaatggcaagataccgatgcccaaattaatctcacaggtaattttcagcttttaggtttagcccatactttagtgactgggcttgaatatgaaaattatgattataagtcatacattattcgctcaagcggagatatcggtagctaccctattaatatttataatccagttttagggcaacctttacctgagctcaatcgtgtaaccacacatgaccgtgaaaacttaaaaacaacggccctttttgtacaagaccaaatcggcttaaatgagcgtttaagcgcactcttaggcttacgatttgaacattacgagcacgattacaaaaacctattaccaaatactaccaactggaataccagtcatgatgcatttattccacgtttaggcttagtttataaagcaagtgatgacctttcactctatggcaatgctgcaaaatcttttaaaccaaatactggcgccagccgtaacggagaaggttttgatcctgaagaaggtacggcttacgagttaggttttaaatggcaagcacttgataatatgttatcgattgattccgctattttttatgctaataaagaaaatgtattaacattagaccctgttgattcagcttataaagtcgctgctggcgaagttcgtagccgtggcattgagttaaatattgctggtcaaattacaccagcttggaaaattattggtggatatgcttatacnnnnnnnnnntgcttatacagatgcggaagtaactaa

SEQ ID NO: 68525 - DNA, 864 bp, Acinetobacter baumannii; identical to SEQ ID NO: 45586

SEQ ID NO: 68526 - DNA, 255 bp, Acinetobacter baumannii
  misc_feature (224)..(233): n is a, c, g, or t
atgagtgacagcagcaatcaattgatgcccctgtcattgtctgcgcctggtgtaaaccttggtgcatatatcagtactgtcaatcagattcctattttaacggctgagcaagaaaaagagcttgctgagcgttattattatgaccaagatcttgatgccgcaaaaatgctggtaatgtcgcatttacgcttcgtcgttcacattgcgcgcagctatgcaggttnnnnnnnnnngttatggcctacctcaaggtga

SEQ ID NO: 68527 - DNA, 960 bp, Acinetobacter baumannii
  misc_feature (890)..(899): n is a, c, g, or t
atgatgaacactgatattactacccgtattgagaaggatcttattggtcatcgagaaatcaacaatgaccattattacggagttcaaacattacgtgctttagaaaatttcaacttaacaaatagcaaagttggaaatttccctaatttaattaaagcattagctatggttaaactagcttgtgctgaagcaaactataatcttaaaaacttagatcaaactaaatttgaagcgattgaatacagctgtaatcagcttattcgtggtaatttccatgaccagttcccaatcgacatgatgcaaggcggtgctggcacttcaaccaatatgaatgcaaatgaagtattggcaaacgttgctttagaatatatgggccattctaaaggtcaatatcaatacttgcatccaaataacgacattaacatgtcgcagtcaacaaatgacgtataccctactgcaattcgtttaggtttattacttagcctagatgagttaaatcttccatttaacaatttgatacttagcttcttgaataaatctcaagagtttgcacacattttaaaaatgggtcgtactcagttacaagacgctgtgcctatgacattaggtcaagagtttggtgcttttgcggtaactctacaaaaagaccttgagcaaattaatacgcttattccaaatgttttagcttatatgaatcttggcggtacagcgattggtacaggaattaccactgaatatagttaccgtgaactcgcgattcaagcacttgcaaaaatctctggtaagaaaattaagtcagctccagatttgattgaagccacttctgatatgggtgactttgttcttttatctggtttattaaaacgtactgcaactaaactttcaaaaannnnnnnnnngccaatgacttgcgtttactttcaagtggtccacgtactggcattaatgaaattaatttag

SEQ ID NO: 68528 - DNA, 1281 bp, Acinetobacter baumannii
  misc_feature (5)..(14): n is a, c, g, or t
atgcnnnnnnnnnntaacgatcaatggaatggtagcttaagtgcgtctcaaagccgtgttgtgattgatgataatagtgctttcccatggggatgttatagcagcatttgtgaagttaccggtttgggcaatacttttgataaacacggaaattatgacatttatgacttccgcagcccagatgatacacgaattactaaccagttcgctgctgggttaaatggtcaattcaacactggcaatattcagcatcaaatcgctttcgaattacaacgtacatataaaaccttaaagcaccatacaccactgaatgtagcggtaggaacaggcaatatctatgaagatacggtcgactacagtccttcatcggaaagcccaggcgatcgttacaaagctctagagagtgatcagactgcacttactgtatctgaccgagttcaatttaatgatcaatggtcaactctactcggtggaaaactgattcaccttgatgagcaagcttataattcagatgggcagcaaagccgtgatacggatttaaacaaattcttgccacaattagcactcatgtatagtccaacttccacgactaatctttatgcttcatatgccaaaggattatcagatggtggtgaagctccgtggttcgctaataatgctctagaagttctatctcctaaaaactctgaacaatatgaagttggtgttaagcaacaaattcggaacttcttagtaacagcagctatttttgatttaaaacaagacaatcaatataacaaagtgaatgcagaaggaactttcgattttatttcacaaggcgaacaacacaatcaaggtattgagttgggtttaacaggtgccttaaccgatacactcgatgtaagttcaggtgttacctataccaaatctcgtcttattgatattgatacggacatctacaaaggtcatcaaactcaaaatgtaccgaaagtacgtgccacagcccagttatcttataaagtaccgtcagttgaaggattaagattactcagtggtatgcaatacagtagcagtaaatatgcaaataaagagggaacggcaaaagtaggcggatatagtgtctttaatattggtgccgcctataaaacaaattttgctgggcatgacacaacttttagattcaatattgataacttatttaacaagaaatattggcgtgatgtaggggcatttatgggggatgactatctgttcttaggtaatcctcgcacagctcaattttctacaacttttagcttttaa

SEQ ID NO: 68529 - DNA, 444 bp, Acinetobacter baumannii
atgcaacatcaaattaatggtattgctttaccgaatgaacaaggattttttggtgaatatggagggcaatttattcctccacatttaaaagaagcaatggatgaaattaatgttgcttatgaagaaattcgccatacaccagaatttcaaaatgaattagcagacctctttgcaaattatgtcggccgtccaagtcctttattttatgcaaaacgcctttcagaacagttaggtggcgcgcaaatttatttaaaacgtgaagacttaaatcataccggtgcccataaaattaatcactgtttaggtgaagctctacttgctaaatatatgggcaaaaagaaagttatcgccgagactggtgcgggtcaacatggggttgctttagcgacggcttgtgctctagtgggtattccatgtgaaacaactccatgttctattttttaa

SEQ ID NO: 68530 - DNA, 306 bp, Acinetobacter baumannii
  misc_feature (282)..(291): n is a, c, g, or t
atgcgtggacgaaacgtattagtcatgatcgatggcgtttcgcaaacaggttctcgcgatgtttctcgtcaattaaatagtattagtcctggtatgattgaacgcattgaagtaatttcaggtgcgactagtatttatgggtcaggtgctactggcggtattattaatattattactaaaagagcagatacatctaaaccacttagctttgaaacaaaagtaggcattacatcttcagatacattccgtagtgacggcttagcttatgaagtcggacaatcnnnnnnnnnnatctgtctcatttaa

SEQ ID NO: 68531 - DNA, 525 bp, Acinetobacter baumannii
atgagtgcattagatttagaccaattaagtgaatatctagatggagaccacaatgagtatggtctagactttgctgcaactcatggatttttgtgtgcaattgcagtaggccctcagtttgaccgttggttagatgaattgttcgaaggtaaccagaaaaaggttccggctgaaattattcaacaaatcaaggtttggctagagtcgattcgtcaagatttagcaaatgaaaatgggattgaatttccatttgaagttgaagaagctgacgttgaatcaagcctaggcgattggagtgtagggtttgttgatgcaatgttcttaaacgaagaggcgtggtttgctcctgagtacgaagaacaattggttgatttgactttaccgatcatggtttttagtggaattgatgaagaagatccacagatggaatctttccgtcgcaatggacagttaatggatgaactggcagaagaaatcccagataatttgaatgagttatatttgatgtaccatactccaaattaa

SEQ ID NO: 68532 - DNA, 471 bp, Acinetobacter baumannii
  misc_feature (433)..(442): n is a, c, g, or t
atgaatgaagcacttaaggatgagctcatcaaattaccaaatattccatattggtatgaaaaaactgatgaaagaccatcgttaaataatgaggttgatgctgatgtagtcattgtcggagctggttacacaggcctatggactgcatattacttacttaaaacatcaccttctcttagagttgtaattttagagcgtgaacatgctggatttggagcatcaggccgtaatggcggttgggcttctgccatatttccaatttccctatctaaagtagcaaagaattcatctcaccaaagcgcactatttttacagcaagtaatgaatgagacagtagatgaaattggtcaaattcttcaacaggaaggtattgatgccaattattctaaagatggctttttatcaatagcgcgaacgcaagctcaactacagnnnnnnnnnncaactacagcgtgcaaaatcctcagttaa

SEQ ID NO: 68533 - DNA, 1899 bp, Acinetobacter baumannii
atgtctggttttaacgtgagatatattgagcctttaagtctcgatgaaatctatcgattgggctatcagcaacatttaaaagaacaacagtctttttccaatagttttcgtttaaatatagaaaaacttcgcttaacttttaggcaaatattaaacagctcatctctacagcaaaagggtttaattttagctttgctgacaggtgatgaaagccttttatcagatgaaactcaactacagttcaaacaattgggaattagtcatttattggcgatctcaggcccacatgtgctcatttttgccattatgttatcttgggcatgtcatcaatttatcagtcgttatcatcctcaaatttacttatggaaaccgaaacaggttttgatggctgtaccatgctgccttggtgttttaatttatactgcatttgtaggtttcgaaattcctgcactacgaacattattatcagtccttatatttattggatttctattattaaaacaacctattaaaccttttacattactcgtatatagtgcaagtctactgttgctaatggacccgtttagtgtgctttctgcaggtttttggctgtcttatggggcatgttttattttattaagaatttaccaaactatagcgcagctacctgagcaacattttttgagtctgagttcaaaaatgatttttatgagtaaggtgttaattgaatctcaaggcaaaatatttattgcattgagtcctttaaccttacttttctttcaacaaatttcttgggttgctccattaaccaatattattgccgtgcctattgttgggggtgttattgtccctttaaacatcatggctgcttgcgcatggtttgtaataaaaccatttggaaatatgctttttcatttcaatgatatgttgctcagcatattgctgagttgtttgggcttattagaaaaactctctttaccattacaaggtataagcttgacgccactgtctttatcagcgattagttgtgccattattattttatttttacctaaaggaattctgcccaaaacttggggaatattatgttgtttacccttagttattatgaacaaaacgagtcagcaaattcagcttaatattttagatgttgggcaggggcaggctatttttctacaacatcccgaacaaaactggttaattgacacaggcggttcttacgatgaaaaaatatttagtattggacaaaatgttgtagtgccttttctacgtcagcaaggcgtaagacaactagatcatgttgtgctatcccatcttgatcaagaccatagtggcgcgtttcctcttattcaacaagagattcctgtaaagcagcttatttcgaatgaacaattaccaaatgatttaaagcaaccattccaatattgctatcaagggcaacaatggcattatcctgagttagatattcaaattttatggcctaaagaaaaagatctggcttttgttgcttctaatcagaatcaatattcttgtgttgtatatcttcaatttaaaaaagttggtggttaccaaaattttcttattatgggcgatgctggatgggaagctgaatacgagttattaaaagattatcctaacttgaagatagatgtgttggtgctagggcatcatggaagtaagcacagttcggcttatgatttcttggcgaccttaaaacctaaactggccattgcatcggcagggtttgataaccgttatggccatcctagccaacaagttatagcacgtttaaaagctctacatattccgctaaaaagcactgtggaacaaggaaccttaagttttgtgttggaaaaccacaaaatagttttacatgaccgacgtttggataggctctggttgagtagaggtttttaa

SEQ ID NO: 68534 - DNA, 1536 bp, Acinetobacter baumannii
atgtcttctcggttcttatcgttgttactcggtgaaaatgttaattcatatgatcagcaattcgatacgtctaatcaggatgcaacagcgcagctatatgaaactatggctccgttttcacttgggactaaccaaaccaaagccaataagaagcgtactcgaaaagaaattcttactaaatgggagagaatgttacgctttgcacctatcgcagagggtatggggattcatgtttctgcagccttaggcggagattcttatagcggccaacaagtctttattacgcccgcagaacggttaaaaaaggcgaatggaccagcagctgaaaaactaaaaaaacaactagatgagcgccgtgtaaagatggaaaagcttatcaataagtatttaagcaaacttgcccgagatgctatttctttcggtgattcctatgcacgtatttatgggaaaaaagatataggtgtaattgacctcgtatgcaatgagtatacatatccgccattaatacaaccgttcgaacaaggcagtaagactgtcgcctttttttgtttagatcctcgtaattggcaaaaaactattaccaaactgaatactattcaaatggtacgtttcaaaatgccccgtatgagcaatattgctcaatatgagcttgttgaaactggtcttgtcacgaaaatgttggagggtgatgatccagatgagctaccaatcttaccagcgcatttaggcggctcatttctttatgagattgaagatatttatgatgatgtaatcctcgctttggcatcaatgaatagccagcaaattgcagataccgtaaatcagatgttcttgacagtaaatatgtcaggaatgccgccagcacaacgtcaagcctatatccgtggtttagaaggtttactcaaaaatcatgaggcttatgtccgtgatgctttatcaggtggtgaagcagtctggaatactgcttttcacatgcttccagtatttgatgaaaaacaagttctaaatccagtgggtgatatcaagaatcaacgaagctcacctattaatattgaacagttcatgattaatgtccgtttgttaatgggcggtataggtctagacccaagtatggtagggtgggctgacatgttaactggtggtattggagaaggtggagcattccatacttctgcacaaatcatgcgtaggtcacaagacattcgaacagcagcttccgaagggattaatcaaattcttcacttggattggggttttgcttataacgaacaatttgagcctgaagattacccttggcaagttgaatattattcaaaccaaactgcagcagctacggaagaaatcaacaatgctcaatcaagaatgaatacaacattacttaaaacacaagtaatcgcatcattgaaagaatcaaatttagatgtagatattatggcgtacattcttgagcgcgatacaggtatgaaatatgaggaagcattaacattagctgaaagtattgctaagagccgtaaatttccagaggatgaagaataa

SEQ ID NO: 68535 - DNA, 1281 bp, Acinetobacter baumannii
atggcattaatcgttcaaaaatatggcggtacttctatgggtacccccgagcgcattttaaatgttgctcgtcgtgtgaagcgttggcatgatcacggtcacaaggttgttgtggtcgtatctgcaatgagtggtgaaacaaaccgcttacttgccctcgctaaagccattaccgaaacacctgacccacgcgagttagaccaaatggtttcaaccggtgaacaggtgacgatttccatgttagctatggcacttaattcgattggtgtggaagctaaatcctataccggacgtcaagtcggtattaaaactgacagtgcatttactaaggcgcgtattgagtcgattgacacagatgtcatgaccaatgacctagatgcaggccgtgttattgtagttgcaggcttccaaggcttcgatgccaacggaaatactacaactctaggacgtggtggttcagatacttctggtgttgccattgcagctgccctaaaagcagatgaatgccaaatttatactgacgttgatggggtttatactacagaccctcgtgttgcccctaaagcgaagaaaatcgatcgtatttcttttgaagaaatgctagaaatggcatcattaggttctaaagttttacagattcgctcagtagaatttgccggaaaatatcaagttcctttacgcgtattatcaagttttgataatgatgacgacggcgcatttgacgacgaatttaaagaaaatgtaggtacactcattactactgaggcagaagacactatggaacagccaatcattgcaggtatcgcttttaaccgtgacgaagcaaaattaacaattttaggtgtacctgatgaaccgggtattgcttctaaaattttatcaccagtaagtgatgccaacattgaagtggatatgatagtccaaaatgttgaagaagatggcacaacagatttcacgtttactgtaaaccgtgttgatttagcaaaagctgaaaaaatcttaaatgaaactgccaaaaatattggtgcacgtgaagtttcaacacgcgatgacatcgttaaagtatctatcgtgggtgtaggtatgcgctcgcatgcgggtgtagcaagcaaaatgtttactgcccttgctgacgaaggtattaacatccttatgatttcaacatctgaaattaaggtttctgtcattattgatgaaaaataccttgagcttgcagttcgttgcttacataccgcttttggtttagatcgtgaacatggtgaaagcagcgcacgcgcttaa

SEQ ID NO: 68536 - DNA, 390 bp, Acinetobacter baumannii; identical to SEQ ID NO: 44080

SEQ ID NO: 68537 - DNA, 519 bp, Acinetobacter baumannii
gtgattatttggggtacaggttttgaagtgtctcatccacccattggtaaacgggtacataacgaaaaaggggaatgtctggcagaactctggaaagactcctcaccggaagcttacctaggaaccaacattgaaaatgtgccgaacgcatttcttatgctagggccaaatgtcttggtttacgactcattcattggtcttgctgaagcccaactgcaatatattgtagatggtttattgcaaatgaaagcgaaaggtattgctaaactttctgtaaaatcagaaataattaaaaagcataatgagcttgtacaaaagcatttacaaaccacagtattcaatagtggtggttgtaagagttattaccttgatgcaaatggtcgcaactttgcagcatggccatggtcattgaaaaagcttagacagcgtttacatcatttaaatttagaagaatacgatgtcatctatgaagctgatcttgtaaaagtaaaacctaaagttgaagaagtcgcaggttaa

SEQ ID NO: 68538 - DNA, 150 bp, Acinetobacter baumannii
atgtcttggctgattaagtctgaggctgatacattgccagaaattattcaggaaatgctattggcaacaagttctgagcgtcaaggtcgtatgattgaccatgatgaagcaggctcaatggaaaagaaaaagcaagaaggctatttctaa

SEQ ID NO: 68539 - DNA, 1116 bp, Acinetobacter baumannii
  misc_feature (480)..(489): n is a, c, g, or t
  misc_feature (1078)..(1087): n is a, c, g, or t
atgcaagaacttgccaaccgattggcgatacaaaatttcgtcaacgcttatatgcaagagaccggcaaaggatatttactttcttttgaccaacaaagttcaactcaacaagcgtttagctctggtttgacgctgttaactcttcctcttccttctatacaagcagaatgttctgtacctttatcttatgtgagtcgtgtaggacgccatcgtctcgctgctttaccgaaaatgtgtattgatggtcaatggcaaaaaatcagtgcaggaaccattgttagtcttttacttgaagagttggttattgaatctcaattcaaattagatgctgcttcattgttagagaaatggatacaaagccgggacgcgctactacaattcttaaaacaacgccacaatgatttcgatgatttagtaaaggctggacagaattttattgaaagtgaacaggcattaattttgggtcatagtatgcacccnnnnnnnnnngatcaagttaaagacgcaatccgttggtatttgtccgaaagcgatttaaacctgttaaagactcatgttgaatttaaattattgccactacatccttggcaagctcgttatttacaaggtaaaccttggtttgagcaattaaaacaaacaggacagttaattgatatcggtttacgtggatggcaattttcaccgactacatcaattcggaccttggcaagttttaacgccccttggatggttaaaacctcactatcagtcatgattactaattcaattcgagtgaatttggcaaaagagtgtcatcgtggcgaaatttcttatcgtttatggcacagtgatttaggtaaaaaaatattaaaacagtgcccaacattgaaagcagttaatgatccagcctggatagctctgcaaatagacggcgagattattaacgagacaatttgtattttccgtgatcaaccatttgcagtacagcaacaagtcacttgtattgcatctttatgtcaagaccatccaaataaagagttaaatcgttttaatgctttatttggccaaattgctcagaaaaatcaacaaatgaattttnnnnnnnnnntgctttggattggtttgatcatttcttga

SEQ ID NO: 68540 - DNA, 216 bp, Acinetobacter baumannii
atggctcaggttgaaaacaatcctaaagaagttgcattacaaggaaaccttccgactgccgtaaccagtgccattattcaagcaatggcttcacatcaacagttgtctgctcatctgctcaagactgatagccaagcgatgcaaaatatccttttggcgctctatcagatgcttaaagatggtgaaacgcttgatgttgaaaaaatgaagggataa

SEQ ID NO: 68541 - DNA, 732 bp, Acinetobacter baumannii; identical to SEQ ID NO: 61121

SEQ ID NO: 68542 - DNA, 1893 bp, Acinetobacter baumannii
gtgcaaggaaataataatgtttctaaattctatgttcagttagccggtggatttaatgcgaagaatgattggttagggcaaattcaaaaaggaagttttgattcacgccggattcgtctagcacaaaatcaaaatgcaccagttgttttctcatcggcacgttctgaattatatgttggacaacattgctggcaaagtacaaatagccagttgtgtcttgaccagcctgtgcgtgtgagtaaagcgcaaggcaatatttcatttgttactcagaatctagatttaggcgattttgctgcgttcatgccggaaggtctggctatgactggccaacttaatggttatgctaaagcttcttgggtaaatggtgggcatcctaagcttgatgcacgcttagtgaccagaaaaggtgaactgggcttagcagcggaagacccgcaagatccaccgactactttggcttatgatgaactgagtgtaattgcgaaaagtatttcagaaggcttattgttccgtgtcgatgtaaaaacacctgatattggtacaggatatgcgaatgttattattaatccataccaatcatctatgccgatgcatggagaggtagcttttaacgatgtacagttaaaagtgttaaaaccattcattcaagatgtacgttcaatgagtggtaccttagccttagctggcaaagtgaatggtactttgacccagccacagtttacgggcgaaatgcgtttgaaaaacggggcgatcagtatgatttccctgccggttaatttaaccaatgtacaggtgtattcatctattcatcaggacatggcaacaattgatggtgcattcaatagtggacaaggtgtagggttacttaaaggtagttttgactggaaaaatgcaccgcgtctacagttaaacttaaaaggtgataacttacttgtacgtcaagctccattaattacggccattgcaaatccgaatttgacacttgatatgtatccttttgataagcgtttaagcttgaaaggatcagtagatgttcctcgtgcacgtatttcaatgcctgaaacaactgcaccagtggttaacacatcttcagatgttcgtattgttcgccaaggtcaggacccacttgcaattttacgtgcggcaaaaccgtgggatatccgtgcagatatttcggtaaatattggcaatcaagtcatcttccaaggctttaacagtaatattcctttagtggggcgtttgaatttaacccaacgcggttatgaaacagcaatgcgagcaatgggtgctattggtgtaagtcaaaaagtgaaaattgaggcctatggtcaaagcctagatttaaaccgtgcaattgcccgttttaatggcccattggcaaacccgacgttagatattgatgcgaataaaaatgttcagggtagtatggttggggttcgtgtcactggtactgcttcatcaccaaacattcaagtttataatgatgcaggcctttctgaacaagaggcattaaatgcactcgtgacagggcgtattaatgaaggtgccagtggtttaagtaatgcagaaggctttaaatctgatgtgaacaatacaattgctgctgccggtattagtatgggcttgggtggtactcgtgctttaacgaatcaaattggtcgtacttttggtttgagtggtcttgcattagatgctcaaggtacaggagatgatactcaagtaagtttaactggttacattacacctgatttatttattcgttatggtgtgggtgtgtttactccagtcaataaactgacgttgcgttatcaaatgaaccgccgtttgtatttggaagcaagtcaatctttagaacgagcaatagatttattctacaattggcgattctaa

SEQ ID NO: 68543 - DNA, 426 bp, Acinetobacter baumannii
  misc_feature (360)..(369): n is a, c, g, or t
atgcaaaagattcttcaaaatttctcaataccagccgtatttgctggttttattacctttcttattggtattagtgtttcggctattttagtgattcaggctgctcaagctttaggtgcgtcatctgaacaaatcacctcatggttttgggctttaggcttaggtattggtttatcaggactcatcctttcttggaaatttaaatatcccgtagcaacagcttggtcaactgcgggcctcgctttaattatggcaacaggtagtggctatagtttaaatgaagcaattggcgcttttttagtaggtggtttacttactgcgattttaggcttttcaggtatattccaaaaagcgctttcnnnnnnnnnngctttcctatataccacaaagcttaaccagtgccatgcttgccggagttttgcttaa

SEQ ID NO: 68544 - DNA, 213 bp, Acinetobacter baumannii
atgacattcattacagcagctgaagcatcagaaatcgctaccaaagcaaaatcttctgaacaagaaatcattgatataacttggagtttatcgcgtagtaaagttgaattaccaacattagaaagggtaaaggctaaattcgtagaaggaggatattccttccagatcctttcaaatagtcctgaaacatatactgtagatattaagttttaa

SEQ ID NO: 68545 - DNA, 276 bp, Acinetobacter baumannii
  misc_feature (233)..(242): n is a, c, g, or t
ttgcaaaatacattgttaaccaagcaatctgaagaaaatgaagtaatcattaaagagaatagtctcgataatgagttaccagatagtatttctgatgaagaagccgaacgtttaaaagccgacttaaagcgtttaaatgctgatcctgaatgggcaggtgaagatggtttacgttaccaagcattctttgaacgtatcaataaggctctagagggggattctgatgcagtagnnnnnnnnnngaccaggctttggctcaacagcaagcagaattag

SEQ ID NO: 68546 - DNA, 582 bp, Acinetobacter baumannii
ttggctcaacagcaagcagaattagaagcaaaaaaactttgtgatgccgaaaatgaagctaaacaaaaaagagatgaagaagtattagcagcacgtacagctggtatagctgaaaacaaaatgatgcaagcatggttagacactttggaaaatcctgaagattctaacaacatagactttatggcttgggtttcagatcgccgtggtgaattcttaaaaaactggaatggtgccgaaggttcaccagaatatttaacagcattttatgaatattcaagagcatgggcagatgaacatttagcggatcgcctcagaaataaagagccagcccaaaattcagataatgaagaatttaaagaactaaatgctccgacagaagttgaagatcttcagcctagtacgacaaatgatgaaggtaatcaactttaccgttcagtaattgaagggcaggttaaagttaatcttgagttattagagcaaattcgagatgaagcagaaaaagacttaaatgatccacttcttattccagcggtgacagagctcttgaatcaagtacaaaaaatggaagcggagaatatctaa

SEQ ID NO: 68547 - DNA, 1431 bp, Acinetobacter baumannii
atgacaacattaaatctaatttctactcaagatattgctaaaaatccattagttgtaattgatcaaatgatcagcttctttaaacctaaacagcccttcactgggcttttgaagggtagaactaataatgtgaaaacagccaaaggacaaaagatttctactgtattcgccttagttgatattgatcaagtaattgcatctcatacagcaactggtgcggaaaaccctaattatccgcaagaattgcagccacgagatcgtagtcgtgaatcctcacaagcatgggtacagaaaactgctaatgatttagaccccgaaagcctaggccgctcaggtcgggcagacacgggagcaccgataactggtgatgatttagttgtagaatcaggaaatggtcgaacaatggctatcaagcttgcctatgagcgcggtaccgcagatgagtataaacaatggttgattgatgaagccgattactttggctttagtagtgagcaggtccaagcaatagctcaaccgattttgatacgtattcgtacaaccgagattgatagagctcaatttgcaatagatgctaaccaagatgataagttgtcttttacagcaactgaacgtgctaaagctgatgctaaacgtttagatgagaatttactggcactttttaatccgagtgaagatggcgatttattagcagtaagtaatcaaaagtttattcaaggttttttaagtaaattaggtgatacagaagctgcccagtacacaacgaaagataaaaaaccaacacaagcactgataaacagaatcaaggccgcaatttttagtaaagtgtacaatgatgatcgtttgctagaaatgatggctgatcatacaaaaccagatcttcaaaatatgcttaatgcgcttggtgttgctgcgcctaaatttattgaagcgcaagctataagtcgtggaaatgttcaagatatatcagatcaaatcgttgatggaatggagcaagccattgatcaacgtgttgctaatgcaattattgatgcagcaaataccattttatctgcaaagcaaaatgatcaagatattgttgagtttgtaaagcagcaagggctttttgaggatctaggagaaggtctcgccaagaatagccgcagttcaaaaaaaatgagcatgttatttaaagctttagctgaatttgcagagaaacaggctttagatagcagtaatgtaggtttgtttggtgaacctgaaccagtaagtgtaaaagatgctatccaatatgcacaacaagtgcttggtgatgatttcattagtgtgcaaatgtacgattcattattctctaatgcatgtaattatttaaaattaatagattatgtatctaaggatcctctttttgttattaaatcattgattataaacattaaaaaatataagttttaa

SEQ ID NO: 68548 - DNA, 240 bp, Acinetobacter baumannii
  misc_feature (224)..(233): n is a, c, g, or t
atgagaattctctctgacatgtcaaagtcagtaaaggcagtattttttgttgtaatcggtgttttatgtttagcctttcatgaccttttaggtaaaaagttgaaccaaaattattcaatcattttaattttatggtttaggtatctttttcattttttatttgcaacttttcataggatcaaaattaaaaaactttctagggttaagcgcattcactttttaannnnnnnnnnggattaa

SEQ ID NO: 68549 - DNA, 324 bp, Acinetobacter baumannii
  misc_feature (304)..(313): n is a, c, g, or t
atgaaagttttagttaccggttctaatggttttattgcaaaaaactttattcagtttttatcagaaaaacctgaagttgagattttaaaagctcatcgtgaaacaacagatcaagagtttgagcaagtagttttagctgctgattggattgtacatttagcaggtgtgaatcgccctctaaatgaagaagaatttgctaaaggtaataccactttaacggaaaagatcagtcaaattttgcagcaagctaataagaaaacgcctgttattttatcgtcgtctattcaggtcgagcgtgataatnnnnnnnnnnaagtaagctag

SEQ ID NO: 68550 - DNA, 1440 bp, Acinetobacter baumannii
ttgattgttgataattttgcaggtggtggtggaacatctactggcttagaaaaagcctttggccgtcccgttgatattgctattaaccacgatcctaaagcaattgcaatgcatcgtgctaatcatccaaatactcgtcatttttgtgaggatgtttgggatgttgaccctgtaaaagttactaacaatcagcctgtaggactggtttggcttagtccagattgcaaacacttttctaaagcaaaaggtggcaaaccggttgaaaagaaaatacgtggtttagcttggattgctcttagatgggctgaccttacacgaccacgtataatcatgctcgagaacgttgaagagttcaaaacttggggcagattaggaaaagatggattcccgagtaaaaagcacaaaggtgaaacgttcaggtgctttgttaatgcattacgtcatcaaggttataaagttgaatggcgagtaatgagtgctcgggattacggatctccaactctaagaagacggttttttctagttgctcgccgtgacaacttccctatagtttggcccaagcctacgcatgctgcaccagatagcaaagcagttaaaactgggaaattaaaaccatggcgaatcactgcagaatgcatagattggtcaattccttgcccaagtatttttactcgtaagaaacctttagttgaggcaacttgtcgccgtatagcaaatggtttagtccgttatgtaatcaataatccagaaccatttattgttccaatggataaggttaaaagcgttgccccagtacttactgagtgtgcaaatgcttctagcccaagatgtatgcctattgatgaacctttacgcacaatttgcgcaggggtgaaaggtgggcatcatgcgttagttactgcgttcattgctaagcattatacgggtgtagttggtagtgatattcgcgaaccacttcatactattactgcaaaagatcataacagtttagtcgtcagcaacctggtgaaactgcggaataacaacattggtcaaccagtagatgaaccattacacaccattactacaagtgcgggtcattttgcattagtacaagcatttttaactgccttctacggtagtgagaaagacggaaacagcattcatgagccacttcgtacgataccaacacgtgatcgctttggccttgtaatggttaaaggtgagctgcaccaaattgttgatattggcttccgtatgcttcagccaagagaactattcactgcacaaggttttgaacctacttacatcattgatcatgggatcgatgaacatggaaacactatcaaattaactaagacagaacagggaagaatggtaggtaattctgtgcctcctcaattctctgaagctttagtacgtgcaaattttgcacatgaacacctatatgaggcagcttaa

SEQ ID NO: 68551 - DNA, 171 bp, Acinetobacter baumannii
atggcaagatctagaaatattaagccctcattctttatgaatgaagacattattgaattaccttatgaagcacgattgctatttatagggctttggactttagcagatcgcgaaggccgtatttcctgcagacgatataaacgttgcagaacagttagagaacatttctaa

SEQ ID NO: 68552 - DNA, 2007 bp, Acinetobacter baumannii
atgtttgttagaaaaagaaactcagcgctcttcacggtcatactcctcggttcaatcctgagtggatgtcaggtcgtcaatgttaagcaacaagctctcaacgttactattgcaaatgagcgtaatagtattcttacccaagataaactaagtgaagcaagtcttaatgttttgtccatgtcagggcaagaagctaaggcctgtacagactcccctgatacttgtgttaatcaacttaaaaatctgccccaaattttagatgaacagctgttatcggctgcgagtgaaatgtatctcgcaaaagcaatggctttgtcagattcttctgaatgtaaaattagtcgtttcactaaacataagccaactgaagaacaaaaagttattcaaaataaatatgatgaatgcttagatcaacagttaagtctactcgataagagtatccgttatagctatgcttatctgttttctacaaaacgtcagccaactgatcgtatttttgataatagacaagttcagatacgcgacttctataatcaagcgattgccaaaatggtcagtgtgtatgatttaaggtatccacaaaaaaatgtggtagagccacaaatccatattggtaagagtgtatattcaattgattttgagtttcatagacaattatctggccaaaaattagaaaaattaatttcaagttataacttaaatttctcaggtttaagaacaatcaaccgtcgtgatggtttcggttccgaatttgtggctgtcttcccaagttcaggcaaagaagacattaatgaatacattttagatccacttaattacagctataaaaatggtgtaaatcctaatattcaccatgcacgttatttagcggcgactattgttgcagagcctaaacatgccaaaaccgttcaagaaattattaatgacccagaatttgtgattcgggtctatgatccttatcgaaccgataatattaatgtcgctggtaagcagtatcctttagctgcaaacttctcagctccttatggtctgtggttagcagaaaacaacctaggtgtagcggcttatttaagcttgattgatcgtgatcagcacttaaccatgccgcatttatatatgcttgaaccttataatccaaacaaaaaaattattgtgttggtacatggtttggcaagtagccccgaggcatggattgcactcactaacgatgtcatgggcgatactgttttaagagataactatcaagtttggcaagttttctactcgaccaatatgccaattctggaaagccggttccagatttatgcccttttgaaacaagcgttcggttcgttaaacccaagtgatcctgccgcgcatgatgcggtgcttgtaggtcatagtatgggaggaattattagccgtttacttgtaagtgatgctgatattactaaacctgccttggagatgatgacgatccgtcagcaaaaccgttttaagaaacatcctatggtgactgaacggctgcaaatgcattcaattagtaactttgatcgtgcaattttcttggcatcgccacaccgaggtactgattatgcagatcgttggtttaccttggcagcacgtaaaattatccgcttaccgggtgcttttttatcagctgttgcaacttcgctcaccacagaaaatttagatattaaagatttcttgaataatattgataatggcctgattcaaaatggaccaagcgacttaagccatcaatctaaatttatggaactcactgagaatattaatccacatcaagggttaatcttccactcaattatgggcaacattaccaaaagtgatgatccaaatgtgattaccgatggtattgttccttataaaagtgctcacttagaaggtgctaaatctgagaaagttctaccgggtggacactctattcagttaacaccacaagccgtattagaactacgtcgtattttacgagagcatttagttgaacatggtttgtataaaccataa

SEQ ID NO: 68553 - DNA, 1794 bp, Acinetobacter baumannii
ttgtccgtttcgaccttccatacttttggtttaaatcttttacgtttagaacttaaaaatttacctttaaaagctaatttttcgattttggatgcagatgactgtaaacgtattttaatggatttgatgcatcgcgataatttatcgggtgcagagagtaaagagctaattgccaaggcaatgaagaaaatttcagattggaaaaacgatctgattttgcctgaacaagcacattcgacgtgcgaaactcctgaagatgtccagtttgcccatctttatcaactttatgaacgtaatttacgtgcctacaatgcagttgactttgatgacctcattgttatgccaacccgcttattgcaagaaaatgcagaagtgcgtgacaagtggcaaaaccgtgttcgttacttgctagtggatgagtatcaagataccaacaccgcgcaatatattttggtgaaattactagttggcgtaatggggcagtttactgccgtaggtgatgatgaccagtcgatttatgcatggcgtggggctaagcccgaaaacatggctttgcttaaacaggatttcccaaatctacatattattaaacttgagcaaaattaccgctcaaccagccgtattttgaaagctgcgaactgtgtaattcaaaataacccgcatatttttgataaaaaattgtggagtgataaaggccatggtgaggtcatcagaattattacctgtcgtaatgatgatgatgaagcagaacgtgtagtcaaagacttactgactcataaacttatgaacggtaagaactggaaagattacgctgtattgtaccgtggtaactttcaggcgcgtgtattggaaacacaacttcgccaaatgcagattccgtacaaactctctggcggtacatcgttcttcgctcgtgcagaaattaaagatgtaatgagttatttacgtcttattattaacccagaagatgacagtgctttcttacgtattattaatacgcctaaacgtgcgattggcccagttactcttgagaagttaggcttatttgcacaagaaaataatttgtctttacttggtgcttcttctgaccaacgcttaagtatggtgcttcctaaaaaggcagaaactcaattgcatgagtttgctgattttatctcgacgtttacacgtgagctgctggaagatgatgaacctgtgcctaaagttcgtcaaatgatgaatgaagcgggttatatcgactatattcgtgagcagtccgcaacgcctgcgcaagagaaaagtaaactcgataatatcgagaacttgtttagtagtattcaaaacttaattaatcgtgctgaagatgttgatgaaaagaacattgaaagtgtgattcgaaaactagtcttgcttgatatgttagagcagcagcaagaggaagaggacactgataaagtgaacttacttactctacatgccgctaaaggtttggaattcccatatgtctatattatgggtcttgaagaagagctgttgccgcataagaactcgattgctgctgaaactattgaagaagaacgccgtcttatgtacgtgggaattacccgtgcacgtcaaggcttaactttgactttggcagagcagcgtaaaaatggtggtcaaatgaaacagatgaccccaagccgtttcctcgatgagcttccgcaagatgagctcgaatggttagggcgtaaaaagaaaattgcagcaaatgttgatcctaaagaacaggctcaacaatatttggcaaatttaaaagctttattaaagcgttaa

SEQ ID NO: 68554 - DNA, 771 bp, Acinetobacter baumannii
ttggatggtaaaactggcgatatcattaaaaaagatgctaaacaaattccggttcaaagtgaggcctatacttcgggtacaaccactgtaagtctgacagacctctatcaaaaatttagtaaaacgccaagtatcgaagcgattttagataaataccgtcaagcagtaaccacaatttctggacgtgttgttggaacttctactgccgttgtgagccgtacacaagtcgaaagtggtgaaagcccactaggtgatatgattgccgatgcacagcaagctgctgctcttcaagcaagtaatcaaggctcggattttacgttaatgaacccgggtggtgtacgtgctgatctactaattaacagcaataaccagattacgtttggtgatatttttgcagttcaacctttcggtaactcgattgtgactttgagcttaaccggtaaacagattagagatgtgcttgaacagcagtggtctggtgcaaatgcaaattcgcctagaattttacagccgtctaaagagttgagttatcaatatgcggcaaatacatctgtttcaccacgagcaagtaacatcatggttgctggttcaccattagttgacactaaagtataccgtgtgacggtaaatagtttcttggcagatggtggtgacaactttacggtattaaaagaaggccaaaaccgtgtcggtgatgcgcttgaaagctatgttgctaagaactcaccgttaattattccggctacgactcgtattaaagtcattaaataa

SEQ ID NO: 68555 - DNA, 297 bp, Acinetobacter baumannii
atgaaaaatgatacaagtaaaacgatttttcctgcctataaagtcaaaacttatggcgggattcctgtagcttttattggtttaacactcaaagcgactccaagtattgtttcagcggcgggtattaaggatgttgaattccgtgatgaagcagatacggtaaatgctttaattcctgaactccaaaaacaaggtattgaagcgattgtcgtcgttgtccatgaaggtgcagcgccaagtacgaaactcaatcaaaaaacatgtgatggcttaagtggaccaattttaggtatttaa

SEQ ID NO: 68556 - DNA, 198 bp, Acinetobacter baumannii
atgcaacgtagtgatggaaccattgttttttcagatccagttggctcaattgatatttacacttccgggcatggcgaatttaaaccgatcgttagcctttcggacgtgaagtggaccgacgtcaaagaccgacaccgtaaagagttccaagcgcttattaataaaatcaaacccaatcagaaagcattgaatgcctaa

SEQ ID NO: 68557 - DNA, 537 bp, Acinetobacter baumannii; identical to SEQ ID NO: 62755

SEQ ID NO: 68558 - DNA, 201 bp, Acinetobacter baumannii; identical to SEQ ID NO: 64360

SEQ ID NO: 68559 - DNA, 237 bp, Acinetobacter baumannii; identical to SEQ ID NO: 68491

SEQ ID NO: 68560 - DNA, 189 bp, Acinetobacter baumannii
  misc_feature (141)..(150): n is a, c, g, or t
atgctgaagtggtttgaaaaacttgtagatccttatccaaccaaaggtttggatgagcccttaccaacacgctttttcccatttgtttggcaagctactgaaggtgtgcgtccatatttattgctacttattatatgtacnnnnnnnnnnttgaagccctactcttttcaaaaattgggcaacttgtag

SEQ ID NO: 68561 - DNA, 261 bp, Acinetobacter baumannii
  misc_feature (20)..(29): n is a, c, g, or t
ttgagcctctactctacccnnnnnnnnnnctttaaagatgttccggctgaacaaccttatcgttcacgttcatatgtgaaaaaaccgggtggcactggcggtaagccaatggttcgcaagaacaaagatggttctgcgaaaaaatctggtacaaagcgtatttggcaaatggatgaaagtgaaaaaccgcgtcgtaagactaacggtacaacacgtccaaataccaaagcaccacgtggtcgtagccgcaatagccgataa

SEQ ID NO: 68562 - DNA, 258 bp, Acinetobacter baumannii
  misc_feature (160)..(169): n is a, c, g, or t
atggcaaccgcaatgacagcatcaaatcaacgaaaagctcaagcattcgcaatggccatttcatttctgttggcattgccgcttgctgtaattttactggtgcatccttccctcatgttagatgcaaacggacactacaatcatagccagcttatgctgnnnnnnnnnncttatgctggtgatggtgggtatttccggaggcttcatttatggggtgggttttgtgccgcacttctggttatggaaatggttgtttag

SEQ ID NO: 68563 - DNA, 759 bp, Acinetobacter baumannii; identical to SEQ ID NO: 48815

SEQ ID NO: 68564 - DNA, 582 bp, Acinetobacter baumannii
gtgaacttgggtattggtttaccgaccaagattgccagctacctacctgctgacaaagatgtcttcctacattctgaaaatggcctgttggcttttggcccaccgccagcggcaggtgaagaagaccctgaactgattaatgcgggtaaagagtttgtgactatgcttgaaggcggcagctttttccaccatggagactcctttgccatgatgcgtggtggtcaccttgatattgcggtgcttggggcatttcaggtggcagcgaatggtgacttagcgaactggcacacgggtgcgccggatgcgattcctgccgtaggtggtgcgatggatttagcggttggtgccaagaaagtatttatcactacagaccacttcaccaagcaaggtgaaccgaagattgtggctgagctaacttatccggtaacgggtaaacactgtgtggatcgtatttacactgacctgtgtgtgattgatgtgaccagagatggtttaaaggtgattgagaaagttaaaggtcttagctttgatgagttacaggctttaacaggtgcaactttgattgatgcgactcaagggtaa

SEQ ID NO: 68565 - DNA, 282 bp, Acinetobacter baumannii
gtgggctcggagatgtgtataagagacagattctcaagcatccaacgtctgatattagattcacctgagtttgccttaccattaaacaaaggcgaacctgaaagcacaattgcaccacgcccaccaccattctcaggggtttcaagcttcgcaaccaaattttgtaagaatagcattgaaccatcactactctttggaacacctgcaccaaaacgccctgcaaaacctaatttttgttctgctttaacggcagcagagtctttatcccatttcatgccgtaa

SEQ ID NO: 68566 - DNA, 162 bp, Acinetobacter baumannii; identical to SEQ ID NO: 49124

SEQ ID NO: 68567 - DNA, 264 bp, Acinetobacter baumannii; identical to SEQ ID NO: 62767

SEQ ID NO: 68568 - DNA, 264 bp, Acinetobacter baumannii
atgctaagagacaatgcaggtaccaactatcatccgtgctgtacatgccgtatggggcacgatgaaatgagtgtggttgatgagcttggccgtgttcataccttagacaatgtgcggattgtggatgcatcgatcatgcctgagatcccgagtggtaatttgaatgcaccgatcattatgatggccgaaaaaatggccgatattgttaaaggagttaagcctttgacactgaatcaacctgtagattattacaaaccgaattga

SEQ ID NO: 68569 - DNA, 285 bp, Acinetobacter baumannii
atgcttggtgctgtgcctgtaccatccggtgtgaacactgctgtccaggtgatgttatcaattgtagtcaatgcacctaatgtaccacctacaactgcgatgtcacttacatcaaagcctgtaactgcttcactgaatgtgaaggtaatgttggctgattcacctgctgcaagcgcaaggtcatcagtcgtaatcgcaagcgttggtggaacaatgtctacaacgaaaccatcagttccatcaagtacatcgcctgtacccaagttacctgcaaggtctgtgtag

SEQ ID NO: 68570 - DNA, 237 bp, Acinetobacter baumannii; identical to SEQ ID NO: 68491

SEQ ID NO: 68571 - DNA, 201 bp, Acinetobacter baumannii
atggctgttcaaacccttggaagaatgaacgtgagtaatttagcaaatcatcactgctcaggcaaatgcactgattttaaagaagaacagtgctcaacttgtcttattaatcaagatgccccgcatcaaatcgtaaacactcaaaccgatgaagagaaatttctagatcgtgcattcaatgcacaaaaggagatttcatga

SEQ ID NO: 68572 - DNA, 276 bp, Acinetobacter baumannii; identical to SEQ ID NO: 48683

SEQ ID NO: 68573 - DNA, 294 bp, Acinetobacter baumannii
gtgaaaaactatacagttgctgtaaagattacagaatctaagtctttctttaaaaaagatatttatgaggctgcactttttgataaaccgaatattaatgctactggttccagttatgacgaggtgattaggaaggtatatgagaagacgcttgagtattttgattttctaagtgaccaaggtcttgatattcctgagccgactgaaattaattcagtaacatttaaaaaacgtgataaagatgttttttttcatgtcataacaattgatacatcaatctatgcggaaagataa

SEQ ID NO: 68574 - DNA, 501 bp, Acinetobacter baumannii
  misc_feature (475)..(484): n is a, c, g, or t
atgggtcaaaataataatgttatggaaaagttgaactcagtaagtgtaattgatgttgctaaagcagctaacgtttctattgcaacagtttcacgtagttttaataaaccagaaatggtaaaacctgaagttcgagaaaaaatcttagaaattgctgctaatatgggatataccgcaaattctgcagcaaaatcattaagatcaaaaaagactaaagtgattggtgcaattattccaaccttagatcactcgatttatgcaaccatgattaatgcttttcaaaagaagctatctgagcaaggttatgttgtatacatcttaacttgtggttttgatgcaagtgatatctttgataaggtcacattacttttggaaagaggagcagaggctttactcatcgtaggagagattcttgataaaaatttagaaactgtctcttatacacatctgacgctgccgacgaagaggatagtgnnnnnnnnnnggctttactcatcgtag

SEQ ID NO: 68575 - DNA, 432 bp, Acinetobacter baumannii
gtgccaaagttcaaaaaactagattacggtgcaatcattaatgtggcttctgccgcatcttataccgcagcaccagaaatgagtgtctacaatgtaacgaaagcgggtgttttggcattatcagaaaccctttcagccgagcttcgcaaattcaatattaaagtcaatgtactttgcccgaccttggtgcctaccaatatcattaaaaatggtcgtattccgggccgttattcaaaacttgcagaccatgcgctcatgaactacgcactcaccacaagtgatgatgtagccaaactcacacttaaccgtcttgatcaggatgagctttataccattcctcaaatcgatgcgaagttgttctggctgatgaaacgtgcatcaccaagtttgtataccaagtttcttggtacctcttacaaattatttaaataa

SEQ ID NO: 68576 - DNA, 432 bp, Acinetobacter baumannii; identical to SEQ ID NO: 68575

SEQ ID NO: 68577 - DNA, 237 bp, Acinetobacter baumannii; identical to SEQ ID NO: 68491

SEQ ID NO: 68578 - DNA, 255 bp, Acinetobacter baumannii
atgtttgtaggagtaacaggagctattggagcaaatgcaatcgcaaatttattaaatattttttctcaagcagcaggtacagtttccggactcgcggtatctttccaatttggcttcggtgccttagccagttattttacagtattactttatcgcccagactcttcactagccatgacactcattatggcaatttgtggatttataagtttcttaagtttgagaataaataagcagctcaaaaattatttatag

SEQ ID NO: 68579 - DNA, 780 bp, Acinetobacter baumannii
atgaacaaaacaatccaaagcttagtcgtagcagcttttgctggtttcgcagtcacaacttatgcaaatgaacaggctcagcaacaggaaattcattttccagcgattgaaaagagttatttgaaacaagtaaaacgttatgaataccaagatattgctcgtttagatacaggactaaataaagatcaaattcgagctttactaggcaatccacaatttagtgaagggctttttgcagtaaaagtttggaactatgtgctagatatccgtgttcccaacacacaccagtaccagcgttgccagttgcgtattgattttgataagcactatttagcagaacgtttatcttggaagggtgaagcgtgtgaaggtttagttgttttgggagaaaataatcaggcaccagcatatagcactgtaattgcagatcgtacagcgagtgtcctatttgcttttgatcgatttgatgcgagtgcgattgaagaaggtactaatagcgttgtgaaaattgctgaggaaattaagaaaagtccaacaacaaccccaattattgtttctggatttacagacccattgggtaagtttagttataaccaagagttatcatctaaacgagcgaatacggttgccaagttactggtacgacaaggtgttgaaccaagccgtatacaaatacaggcgaatagccagaccgacttatacaagcagtgtagtgataacaatagttcacaacttattcaatgtttagcgccaaatagacgtgttaatataagttggtaa

SEQ ID NO: 68580 - DNA, 399 bp, Acinetobacter baumannii
  misc_feature (312)..(321): n is a, c, g, or t
atgctgaatttttttttaacattaagaaataaacagatttccctgtttatgtttaatctcattatagccatttggctaggtgcaattctaaatattggtttttatcatcaagttcatactttaactccatattttggaataaaggctattttgtttttagctgctactctcgtaattcttgttgctacctattatgcggttttacaaatcttaaattggaaatggactgccaaaatctttgcaattttattgatatttattggtggctttagctcttattttgtaaacacgttgggtgtcattatttcgccnnnnnnnnnnacacattgggtgtcattatttcacccgaccaaattcaaaatatggtgcagaccgatgtttcggaagttaccgatctaa

SEQ ID NO: 68581 - DNA, 687 bp, Acinetobacter baumannii; identical to SEQ ID NO: 46696

SEQ ID NO: 68582 - DNA, 897 bp, Acinetobacter baumannii
ttgtttgatctagacagtagattattaaatattttttatcatatttatcggttcaaaagtgtttcaatggctgcagatgctattggtttgacacagccgagcgttagtaatggtctaaacaaaatccgccaacattttaatgatcctttgtttattcgagtcggtaatgaaatgattccgactgaactggcaaagcaaatttttccactcattagtgaagttattgataaggttgaaagcattaataattttaatgtgaactttgatccgttgacctcagatcagttgtttacgatcgcgatgactgatgtatctcatttggttttgttgccgcaactaaccaattatttaaaagaaaaagcacctttgattcgtttaaatattaggcctattacaccagaaactagctatcaaatggcaaacggtgaaattgatctagccataggttttttaccgcagttagaagaaggtttttatcagcagaagttttttcgtcaacactatgtcgtaattagctcaaaaagccatccacgtttagacccaaataatttcactttagaggattatatgcgtgaatctcacatcgatattgatgcgggtattgggcattatcacattaaaaatgagctgcagaataaagggctggaccgaaatattttaattcgcttaccaagttatttaggtgtgggattggtcgttcaggaaacagatgctattgccactgtgccatattatttaagtcaggttttattggttagagagaacttacagattttaccggcaccgcttgattttccaacttatgatgttaagcaacattggcatatgtcttgtcaccacaagagtagccataaatggttccgtcaaacttgttatgaactatttaaaactgcttaa

SEQ ID NO: 68583 - DNA, 747 bp, Acinetobacter baumannii; identical to SEQ ID NO: 49089

SEQ ID NO: 68584 - DNA, 162 bp, Acinetobacter baumannii; identical to SEQ ID NO: 49509

SEQ ID NO: 68585 - DNA, 393 bp, Acinetobacter baumannii
atgcagcgcttctttgcaggtcagtattttgattatcgtcaaatttctcagttgattttcaatatgttttcattcgaccaagtgcaactgactttagatagaaccaattggaaatggggaaaacgaaatattaatatcctgatgctcgcaatcgtttatcgtggaatagcgatacctatcctttggacattgcttaataaacgtggaaattcagatacgaaagagcgtattgctttgattcaacgctttatagccatttttggtaaagaccgtattgtgaatgtgttcgcagacagagagtttatcggtgagcagtggtttacatggttaattgaacaagacatcaacttctgcattcgtgttaaaaaaacttcattgtcaccaatcatttag

SEQ ID NO: 68586 - DNA, 522 bp, Acinetobacter baumannii
atgaagaactttctcaccaggaaaatgtacgtaactagagctttattttttgctgtaagtgttatggttttggatgtttcccctattgttatttctactactcatgcagcgacagaacaaaaaatggataatttatcgactacactttcattaatttttgcagataaacccatagaagcttctttatttagccctcaatttttaggacaagttcccatcacacaaattcaaaaaatcgttgatgatttaaaagtctctttaggtgctcttaaaaatattaatgtttcaaatggctctgggactattgatttcgaaaagggagaattaccggtttcaattagcttaaatgagcaagaacaaattagtactctttggtttagtgcgcctcattttaagacaataagcctagacgaaatggttaaaggtctacatgaaaatgcgatcggtaaaacttctcttttagttagtgtagataacaagcctgtggttgtagaaaatgataaaacccctatggctgattaa

SEQ ID NO: 68587 - DNA, 210 bp, Acinetobacter baumannii
  misc_feature (198)..(207): n is a, c, g, or t
atgaattttaaacagtacccaagttacaaagatagtggtgtggaatggttgggtgaagtgcctgagcattggtctgtaaaaaaatttggctatatatttcgagaaaataaaattaagaatagtggtctgatcgaaactaatgttctttctcttagttatgggcgtattaaagagaaaaatattgaagataataaaggnnnnnnnnnntaa

SEQ ID NO: 68588 - DNA, 684 bp, Acinetobacter baumannii
  misc_feature (659)..(668): n is a, c, g, or t
atgacgacccctttaaacgaacgtcgtattgcaaacgcaattcgtgtattggcaatggatgctgtgcaacaggcaaactcagggcatccaggtgctccaatggggatggcagatattgctgatgtcgtctggcgcgagtttttaaatcacaacccaaataatccacaatgggcaaaccgtgaccgttttgttttatcaaatggccatggttcaatgttgcaatatgctttgcttcatttaacaggttatgatctttcaattgaagatttaaaacaattccgtcaattgcactcaaaaactcctggtcaccctgaatatggttatgctccagggattgaaacaacgacaggtcctttgggtcaaggtattgcgaacgctgttggttttgcattagcagaaaaaactttagctgctcagttcaataaagatgacttaaaagtagttgatcactttacctattgtttcttaggtgatggctgtttaatggaaggtatttctcatgaagtatgttctttagcaggtactttacagcttggtaaattgattgcttattatgatgacaacggcatttcgattgatggtgaagtagaaggctggtttagtgatgacactgaagagcgtttcaagtcttatggttggcaagttcttcgtgtagatgnnnnnnnnnngtgtagatgggcatga

SEQ ID NO: 68589 - DNA, 459 bp, Acinetobacter baumannii
atgcagtttgttcatctcggtatttacacagaattttcgattacagagtcgattgttcgcatacccgacttggtcaagactgcggtaaaggatgaaatgcctgcgctggcacttaccgacttatccaaccttcatgctgctgtaaagttttataactcttgccttaagaaaggtattaagcctattttgggtagcacaatccgtcttaatgatgcccaacatcgtgcaactttgcttgcaatgagcgatattggatggaaaggactgaccgaaattgtttcgcgtggctttattgaaggccaacaactcagtatcccttgtgtacaaaaagaatgggtcctagagcagcatcaagatattattgttttacttggccaacatagtgatgttgggcaaatgctttgctcatctaacccgcaaaaagcagaacctttacttgaaggttggataagtcggtaa

SEQ ID NO: 68590 - DNA, 228 bp, Acinetobacter baumannii
atggaagagttctacccccatttggaaaaaatgctcaccgaaattgaatttttagatccagaaaatccacgtttactacctttacgcttgcgtcgtttatttggtcgtatacaattagatcgtatggaatatcatttacttcgcggtatttttagtcgagtccaagccctcacaagcggcaaatggaaaaaagcatcatcggacaaggaggatcaatccaatgcttaa

SEQ ID NO: 68591 - DNA, 291 bp, Acinetobacter baumannii
gtgcattctatcgcttcaggattggactatcctggtgttgggccacaacatagtttcttaaaagatttaggccgtgtggaatatagcactgcaactgaccaagaatgtttagatgcgtttatgaccttatcacgagttgaaggtattgttcctgcgcttgaaagctcacatgctgtcgcatgggcaatacgtgaagcgccaaaactgccgaaagaaaccatgatcgtggtgaatctgtcgggtcgtggcgataaagattctgattatgtggcagaaaaacttaagctttaa

SEQ ID NO: 68592 - DNA, 2538 bp, Acinetobacter baumannii
atgtcagaatggttcatatccagtatatgctttaaaaagcgcactacatattatttagtattgagtctcgcaattaatatccccttaactatatatgcatcagacaatataaatagggaaaatattttaaaagctgactttgatactaattttttagtgggaaatgcacagaaaattgatattggtcgatttaagtacggcaatcctattttaccgggtgaatatagtcttgacgtctatattaatgggcagtggttaggaaaacgaaagtttgtttttaaaagtactcgttcgaatgagaatgcaaagacctgttttaccccagatatgcttttagaatatggagttaaaccagaaatttttcatcatgaagtaagtagtacctttacctgtaatgacttagacaagtgggttaacgatgctttttatcaatttgatacttctcgtctgagacttgatatttcaataccgcaagtagctttacaaaagaatgctcaagggtatgtcgacccacgtttatgggaccgtggtataaatgcagctttttttgcatacaatgcttctgcctatcgtattgtaaataataaccatgaaacaaatcatgcgtttatgggtacaaatgttggtctaaatctctatgattggcaattacgccatactgggcagtggaaatggcaagatcataatgaaatacaagaaaaggtttcttcctacacatcaaataatacatatgcccaaaaggcttttcccaagctcaatagtgttgttactttaggtgattattttaccaataataatttttttgatgccctaccttatcgtgggattaacatatcaagtgatgaccgcatgcttcctaacagtatgctcggatatgctccccaaattcgaggttatgccaaaaccaatgcaaaagtagaggtgcgtcagcaaggaaatttaatttatcaaacgactgttacacccggaagttttgaaattaatgacctttatcccacaggcttcggtggcgaattacaagtctctatatatgaaacaaatggagaaatccaaaagttttctattccttatgcttctgtcattgagatgctaagacctaaaatgagccgatattcttttactttgggacattttagagatgccaatatcaatctaaaaccatggctagtgcaaggtaaatatcaaagaggtattaataactatttaacaagctatacaggctttcaggcaactgaaaactaccagtcttttttaataggtagcgcatttgcaaccccaatcggtgcaatttcatttgatgcaactcagtcgtcagctgagttcgaacaaaagcccacccttaaagggcgaagttatcgtttaagttataaccgactatttacttcaaccaacaccaatttaactttagctacgtataaatattccacagaaaattatttgaaattacgcgattcaattttaattcgagacttgcaacaacaagatattgatagcttttccgtggggaaacaaaaaagtgaatttcagatcacattaaaccaaggccttccaaatcaatggggtaatttttatttagtaggctcgtggattaattattggaaccagcctaatcgtaatcaacaattccaatttggatatagcaatcaatttaaagatctgacttacagtatttctgcaattactcatgagcttgaccaagaaaatcaaaattctggtcatgaaactcaatatttgttgtctttatcttttccacttcaatttaaaaaaaataccgttaattttaatagttctatttcagaagatagccgaactttaggaatgagtggttatatcggaaaccgctttgattatggctcatcaatttcatatcaagatcaaggacagacaagcctaaatattaatggcacctaccgtactaactatacaactataggcgcttcttttggtcagtccgatacataccaacaagaaatgatcaatttaaatggaagcttggtcgctcactcacaaggtattttatttggcccagaccaagtacagaccatggtattggtatatgcgcctcaagcaactggtgctcgagtcggcaatacctctggtctaagcattaataaacaaggttatgctgtcattccttatgtaaccccctatcgcttaaatgacattagccttgaccctcaagggatgccatcaactgttgaacttacggaaacaagtcatcgtattgccccgtatgcaggatcaatcactaaagttaacttttcaacaaaaacgggatatgcagtttttattagcacccaaacacctaatggcggccatttgccatttgcagcacaagtttttaatcaaaacaatgaaatagtcggaatggtagcccaaggtagccggatttatttacgtactcccctaactcaagatcatctttatgtgaaatggggacaaagtaatagtgaagaatgtcaacttgattatgacattcaatcaaaaatcttacaggaaaaacaattaattattatgacagaggcagtctgcaaatga

SEQ ID NO: 68593 - DNA, 366 bp, Acinetobacter baumannii
gtgtcaaatcaacaacagatggctgctcaaacagcaactttttggcaaggtgccaaagatagtcaagccatcgttctcacctacttaccagtttcttttgcctttggcgtttctgcatctcaatttggttttagcccatgggaagcattttttctttcttgttccatgtatgcaggggcaagccaatttttagtggtcgcacttttagcaagtggttcttctatatggttaaccgccttaacagtcattgcacttgatatacgacatgtacttaacggacgaagtttttgccagtggtatgatccaactttcacagcgcagacaacaatggtccgagtcttggatgttgggcttaagtctatttag

SEQ ID NO: 68594 - DNA, 531 bp, Acinetobacter baumannii; identical to SEQ ID NO: 68486

SEQ ID NO: 68595 - DNA, 375 bp, Acinetobacter baumannii
atgacgaaatcagtggtcaaaaagaaaagcttggatattaaaaaaccactacctgcgcaaacaggagtggtttataggcattcagtcgagatgaatcaaatgaataaaactaatttatcaaatcaaacaaccgaacgcaaccagccagaatttttagtgggtgacgttgtagtacttactaaagagtgtcgaagttttaaatcaaacgatttatttgaggttaaaaataaaactttgactagtttatggaccatcaaatcagagaatcatttgattctggtttcttcaaaagaaatccgcacagcaacagttgcagaacttaatgccaaacgccgactaacaagcgcagagcaagcattagcggaggtgtcatga

SEQ ID NO: 68596 - DNA, 882 bp, Acinetobacter baumannii; identical to SEQ ID NO: 50963

SEQ ID NO: 68597 - DNA, 789 bp, Acinetobacter baumannii
  misc_feature (719)..(728): n is a, c, g, or t
atgccaatagtgaatcaaaacgctcgtccccatattgaaaaaattttagctaatctgacccaacttccaggcgtttataagatgctagggaaagagggggagttgttatatgttggtaaagctaaaaatctaaaaaatcgggtgtcgagttattttgttaaaaccattgagcacccgaaaactcaagctttagttgctcgaatttatgatattgaaacgctagttacgcgttcagaaaccgaagcgctgcttttagaacaaaatctcattaaacagcatcgtccgccttataacattatgctgcgtgacgataagtcatatgtctatatctttgtatcggcagataaaccttatccgcgaattgccagtggacgtggcaaaggtaagcaccaaatcggtaaattttttggcccttatccaagtgcttatagtgccagagataccttacttgttttacaaaaactttttaatgttcgccaatgtgaaaatagttatttctcacagcgtaagcggccgtgtttgcaatatcaaatcaagcgttgttcggccccttgtgtaggcttggtttcaccagaagattacaaagaagacgtgaataacagtattcgtttcttacaaggtgacaccaaagaattaaaccaggaactgattgcgaaaatggaacaggcagcggcagatcttgaatttgaaaaagcggttttttatcgagatcggttgtnnnnnnnnnnatcggttgtctttacttcgcgaagtacaagcacagcaagccgttttcaaagtgaaaggtga

SEQ ID NO: 68598 - DNA, 885 bp, Acinetobacter baumannii
atggctatccagcttttagatgcggcaagaaatgagattccagtgaaatttacgcagttttctggtggcgagcgtcatgtccaaattgatgagacaaccttaggttcactatctggcaaggtattggttcgtgcaaagatggcctcaagtcacgatgtgatggactatttgttacttgaaaatatattgctgactcagggtttaaccattgacctagaagttccgtattttccatatgcacgtcaggaccgtatttgtgcagtaggccaagcgttctcgcttgatgtgatgaccaagttactcaacatcaatgctgacaaaaaagcgggcaaacaaggcaagatcactgtttgggactgtcatagtgaagtaacgacagcattacttgctgccaatacttcttttagcgaagttgtaaacatcagttcagtagacatcatcgcaaagagtgaagcgctaagcacattgttaaaagatgaaaaaacagtgctggtttgcccagacaaaggcgcaaaatcgcgtacacaaatggtcgcagatgcttttaattctaagcgcaaacaaccaatcactattattcagtgcgataaaaaacgtgatccggtgactggcaaaattttaggtacacatgtacatgcgactgatttatcaggcctcacagcggtcattaccgatgacatttgcgacggcggtgcaacctttattggtattgccaaagaactgcgtcgcctcaattgccataaggtcgttctatatgtgacccacggtattttcagtaaaggaacagaggtttttgatggactgttagatcaactgtttacctcagacagctttccacaacaaccatcagacaaaatttcagtaattgcttttgcagcagaataa

SEQ ID NO: 68599 - DNA, 360 bp, Acinetobacter baumannii
atggtttctattaaattaaaagataaaataaatgaaaatagtgaatttatttcaatgcggagaatatttgaagaaataagagaaaagacagatctcaaaaaggatttcgagatagctgagctgttaataccaatagctaaaaaatgtcatgcttataatcaatatcaattagataatggcaagcctatgcgcttatttgagaaaaatcctagtgatagaaataatgattttgactatacattattagaaatcgcgagaggggacttatatttagatgatagtagtatttttaataattatgctcttcaaaagtcagatttttattatgaatttgaggtttttttgagatctgtgatttag

SEQ ID NO: 68600 - DNA, 246 bp, Acinetobacter baumannii
atgttccaagctacaccggactatatcaaaaaagctggtgatgacattcaagagtttttagagggcgcttctagtgagacaaccggttggttacaaccggctgaagatctagggggtaaaccttttgagttcagtttaatacctgacaaagactatccatatgagcgtgtacgactctatttagcccatggagttgttggtacaactcgtgccgcaatttttgatgacgacgttttagttaaataa

SEQ ID NO: 68601 - DNA, 300 bp, Acinetobacter baumannii
atgattgctgtgactttattgggtattagtggcggtttttatatagttcctttgtatgccatgatgcaggcttactcaccacgctcacatcgtgcccgagtggttgcagcaaataacatcttaaatgccgtttttatggtttcttctgcaattttctcaatcttaatcttaagtgttttaaaaattgatattaaaatactatttattattacagctgtacttagtgcaatctttagtatatggcttcttgcccgactaaaaccaatgcttgccacagcacatctttctttggaggactaa

SEQ ID NO: 68602 - DNA, 369 bp, Acinetobacter baumannii
atgttcaataaatgttgcgaattattagcaaaggaaaaaattaaaattgcattttttgaaagcgcctctgcgggttaccttgcttatcgtttctctttaagtccttattcaggcgatattctgattggaagccttgtgagttacgaccttcgtgtaaaggaaaataccttgcatatttcagaagagcttattgaaaaatatactgcagaatcaatgcaagtgactgttgaaatgattaataaaggtaaagaacttttatatgctgacctgtatgttgcctgcacaggtcttttgaaaaaaggtggctctgaaacaccagaaaaacctgtaggtactttcttttactcaatagacctcttgcgaaagtaa

SEQ ID NO: 68603 - DNA, 1410 bp, Acinetobacter baumannii
atgcctgttgtagtgaaaaaacgattattagacttattacaagataatcaacaaaattattatgaattgtttgtttttttccttgatcctgatgtttctagctttgagaaagagaaaaaggctagagattttcttgttaaagagatagataaactagagatgaaggaaatagattttccttcggatatcaatttgattaaggcatggtgtgaaaacgataataaaaaaaattgtcaggaatttcaggcatatttaaatcgtagacaatctggtcaagatagagagtattttaagaacgtcgctcaggcatttgagtttttaataaaggtgtctccaaccaaaaaagtagacggtgcatggctatatagctcagtgcattattggaatgatcctatttttcatgaattaattattacttatctcgaagagcttgggttaggtgagccaaaagcaaaccatgtttgtatctatgatgatcttttacgcagtctagggctagacagtttcgatctgcttttagaagacgagtattatcatcaagcagttgtgcagcttgctctgggttatgcacctcctgagtttattccggagattgtgggttttaatttaggctatgagcagttaccactgcatcttttaatttcgaattatgagcttgctgaattaggtattgattctaaatactttaatcttcatatcactatcgacaatattgacaatggtcatgcctataaagccattaaagttattgaagatatttataataaatataaagataaaaaactcttcttgaccaagctaaaacgtggttttgcccttaataatcatggggtgtcctcttcaaacattataaaaaatttaaatactgaagactttgtccatagaattttcaaaagaaaggcgcttgtcggtcagttaattcataacgaaacccgacagtttgggtgcaagaccattaatcaatggttatcaaatcccgatgacattgcaggtttaatcactcatttaactgaacacaaatggattaagtttaataccgaccctgaacagagcgtattctggcgaatgattaatgaagaaaatggaaaaatgtttggggtgtttaaccctgtagagcgccaaattattcatgactggattgctggtagtgatcattcttctaacttcttggcatacagcagagaactaaagaatagccagcgtattcaggactatctatttagttatatctcggatggcgaacttgatgcactacaagagcgcgtccaacaatcaaatgaccttgccataaagatttgcaaacttactccgtttcttgccccagattctcatcataaaagtattggtctttggagtactcgtaaatacgtagaactcctttttccttatttaggtacgtttaaaaactag

SEQ ID NO: 68604 - DNA, 2139 bp, Acinetobacter baumannii
atgaacgacaatactaaatcaaccaataaaacaagtgaaatggctggtgccgatgcagcaaataaagccaatactacccagaaaactgaacagttagacacagttagagatgatgcaactaatgaagctttaaccacaaatcagggggttaaaatagcggataaccaaaatagcttaagagcgggtattcgtggctcgactttattggaagatttcattttaagagaaaaaatcacccactttgaccatgagcgtatacctgagcgtattgtgcatgcgcgtggtgtaggggcgcatggttattttcaggcatatgaaggaaacgaacgtttaaccaaagctggattcttgacagacccaactattcagacgcctatttttgtacgtttttcaacagtgcaagggcctcgtggttctgccgacactgttcgtgatatccgcggttttgccattaagttttatacccaagaaggtaacttcgacttggtaggaaataacgcacctgtcttttttgtgcaagacgggattaaatttccagactttgtacatgcggtaaaacctgaaccggacacagaaatcccaacaggtgcaactgcgcatgatactttctgggattttgtgtctttagtacccgagtcagcacatgctgtaatttgggcgatgtcagaccgtgcgattcctcgtaacttacgctcgatccaagggtttggtgtgcatacgttccgtttaattaatgctgaaggtaaatcgcattttgtgaaatttcactggacaccaaaacaaggtttgagtgcgctggtatgggatgaagctcaaaaacttgcgggtaaagacccggatttccaccgtcgtgatctttatgaagcaattgagcaaggtttttatccagaatgggaactcggtgtgcagattgtcgaagaagaagatgaaatgaactttgacttcgatttgctggacccaacaaaaattattcctgaagaattagttcctgttacaccaattggccgatttgttttaaatagaaatgtagataacttctttgctgaaacagagcaggtagctttctgtccgggtcatgtagtacctggtattgattttacagatgacccacttttacaagcacgtctattttcatacacagatacccagttaagccgtttaggtggaccaaacttccaccaaattccgattaacaaacctgtgtgtccattccataacaatcaacgtgatggtattcatcagcataccattcataaaggacaggctgcatatcaaccaaactcaattgatggaaattggccagtagaaacaccgccagcggcatcaaatggtggttttgaaagttatcctgaaaaaattagtggacataaacttcgtcaaagaagtgagacgttctctgattatttctctcaaccgcgactatattacaaaagccttgcaccgcatgaacaaaaacatgtggtcgatgcctatacttttgaattaagtaaagttcaaagaaagcatattcgtgagcgtcaagttcaacaaattttggctaatatcgacttagatttggcacgccaagtaggggcaaatttaggtattgaagtgcctgacttaaccctaaattataagaaaacagcagttgaaaaatctgccaagttatcttttttagctttcccacctgaagatattcaaggtagaaaagttgccgtacttatccataacatggtgaagtctgatgcattggaggctattaaaaactgggcaattaaagaaggcgtaatccttcacttactagcgccgagcttggctccagtcaaagatcataaagataacgttattgtggctgatggcatgcaaatgtctgagccttcaattgcctatgatgcggtaattattccggatggcgataacctaaatacggttatgcaagacggggtagctcgccattacttactcgaagcttataagcacttaaagccaatcgtatttttaggtaataaatctgatttgcttgaaccattaggtttagtggcggatgaaggaactttaattgaagatgagttccagcatgttgcggaaaaatttaagaacctgattaaagcacaccgtgtttggtcacgagaacaaatagccgcacatgtaccggcttaa

SEQ ID NO: 68605 - DNA, 879 bp, Acinetobacter baumannii
atggaaaatacaacgaatcagtatccatcagaagttcctgcacaagttcaacctcatcaaccaggtgatcaggagaaaatgcatcctgaaccagaaattattaaagcatcccataaaggcagtgaaaaactaaaaggcaaaattgccgtcattagcggtggtgatagcggtataggccgttcagttgccgtactatttgcccgtgaaggtgccgatattgctgtactgtaccttgaagaagaccaagatgccgaaattactaaacagcttattgaaaaggaaggacaacaatgtcttttattaaaaggtgatatttccgatccagaccttgcaaaacaaaatattgataaggttttacagcattttggaaaaattaatattttagtgaataatgcgggtgtgcaatatcaacaaaaagaaattgaaagtataagtaatgaacaattagaaaaaacatttaaaacaaatatttttgccatgttttatttaaccaaagaagccattccttatatggaggaaggcgatagcattattaacaccaccagtattaccagttaccaaggtcatgatgagttgattgactatgcaagtactaaaggtgcaattacctcttttactcgtagtctatcgaacaatttaatgaagcagaaaaaaggtattcgtgtaaatggtgttgcaccaggcccaatctggactccccttattccaagtagtttcgatgccgaaactgtcgaaaagtttggtaaagataccccaatgggtagaatgggtcagccaagtgaagtcgcccctgcttaccttttccttgcctcagatgatgcaagttatattactggtcaggttattcatgtaaatggcggtcaaattgttaatggctaa

SEQ ID NO: 68606 - DNA, 357 bp, Acinetobacter baumannii
atgaaatttagattgaggtggtttttactttcgcaagaggtctattataaccaagaatggagctatagattagatccgcctcatgcaagccatccttttcagagagacttgtatattattaaatcaaaaaatattgaaacagaagatataaaaaaattactagataatatagttgttaaaaacaataaaaataaagatgacttaaaaaatatagttgaagcggaaacagtaataaaagaaattttagatttatctaattatatacctatagaaaattggctaaatgatacaggtaatcgatcaattattgaaagtatgattcataaaaacaaggttaagttattagatattatctaa

SEQ ID NO: 68607 - DNA, 393 bp, Acinetobacter baumannii
  misc_feature (374)..(390): n is a, c, g, or t
atgaaaaatttaaacatattgaaaagtttagaggagaaatttagtattcctcaacacgaactacaagaatttattaagagttcaccaaggaaatataaagtttatcaaattcctaaaagaagttctggtactagaacaattgcccaaccaacggctgaactaaaagaatatcaacgtcatttggtgtctatattttctccaattttacccgtgcatgaaacttctttagcgtatataaaggggaaaagcataaaagacaatgctctcatacattgtaaaaatagatactttttaaaaatggatttcgccaattttttcaattctattactccaaatatattttggaattgctgggaagaaagcaaaaaccaaannnnnnnnnnnnnnnnntaa

SEQ ID NO: 68608 - DNA, 357 bp, Acinetobacter baumannii
  misc_feature (318)..(327): n is a, c, g, or t
atgatcaatcagctatatgaacagtatagtactatggccttaagtgcttggggctttactgatttaccttcttatacagataaatatgatcctaatgagaaagatatagtgataaagacaaataattggttgaatgatgaggcagcagaggaaaaaactcagcaaggtcttactgcctttgtagctcttgatgacgcatttatgagtattgcatcacgaatttatttaattagaaatgccaaggaaacgattgatctacaatactacatttggaccaatgattttgtggggaaccttattttacatgagctgctcaannnnnnnnnnttgattatctgttccgatttaaaaaagtaa

SEQ ID NO: 68609 - DNA, 1209 bp, Acinetobacter baumannii
atggaattttataaacgtatagcactatttaatacatttttactaccactcactgtcatacatgcatttgaatttaatggatatataagatcgggtattggatatagtgaaaaaggggacacacaaagctgtttttttctggacggtgcaaaaagcaaataccgtttgggtaacgagtgtgaacagtatgtagagttaactggcactcaggaattatataaatttaaagataattctacagtggccctaaagggtacattggcgttattacaagattttggtgatgataaagatttttctggaaataattatgccaaatgggctgaagcctatctcatgtggaataatatcagctacttaaatggtgcaaatgtttgggcaggtcgtcgtttctacaaccgtaatgatattcatatttcagacttttattactggaatcagagtgcgacaggatttggtatagataattttaaatataacgacttgtactattcatatgttttctctcgtaaggatgacgtctttcaggataaaccagtaaaccgccatgatattactgtaagtggatttaataccaacccaaatggaacactaagtgtaggggtaagctatatcccaaaaatagatgaaccagatagccattcaggtacttcatttagcgttcagcataaacaaaagctaggtaaactcaacaataccttggcctttcaatatggttatggtccaggaactggcttaagttataccggtgatacaagcttatcgagtaaggataaaagctggcgtgtagtcgaatttattgatgggcaaattactgaaaactttagcgcccaagcggagttgatttaccagaaagatgaacgtgaagaagcctcaaatgaacaagaatggtattcagctggtgtacgaccggtatatgcattgaatgatcaatttaagctggtaggagagttgggttttgatgccgttaaacgtgataagaccgcgactttaactaaattaacctttgcacctacatggtcaccaaaaggaaaagggttttgggatagaccagaattccgtttgtattacacctatgcgatttggaacaaggaagcccaagagcgtgctaatttgaacaatgcaggttctacattatcgtcaacgggtaattttggtacatcacgtaatggcagcaatttcggattgcaagtagagtattggtggtaa

SEQ ID NO: 68610 - DNA, 285 bp, Acinetobacter baumannii
atgcttggtgctgtgcctgtaccatccggtgtgaacactgctgtccaggtgatgttgtcagttgtagtcaatgcacctaatgtaccacctacaactgcgatgtcacttacatcaaagcctgtaactgcttcactgaatgtgaaggtaatgttggctgattcacctgctgcaagagccagatcatcagttgtaattgcaagtgttggtggaacaatgtctacaacgaaaccatcagttccatcaagtacatcgcctgtacccaagttacctgcaaggtctgtgtag

SEQ ID NO: 68611 - DNA, 129 bp, Acinetobacter baumannii
atgcctgagatcccgagtggtaatttgaatgcaccgatcattatgatggccgaaaaaatggccgatattgttaaaggagttaagcctttgacactgaatcaacctgtagattattacaaaccgaattga

SEQ ID NO: 68612 - DNA, 408 bp, Acinetobacter baumannii
  misc_feature (276)..(285): n is a, c, g, or t
atgcaagacacccctctcattattggttcacgttcttttcaatctcgtttattggtaggaacagggaaatataaagacttaaatgaaacggatttagccattcaagctagtggtgcagaaatcgtaactgtcgcaatccgccgtgtgaatattggacaaaatccagatcaaccgaatttactttctgtcattccaccagaaaaatatacaatcttgccaaatactgcaggttgttttgacgctgacagcgcagtacgcacgtgtatgctagcgcgnnnnnnnnnncggctgtttcaaaagcatttgagtttcttgatgatggttttgagattatggtctatacctctgacgacccaatcattgctcaagaacttgaaagtatgggctgtgttgcaattatgcctttag

SEQ ID NO: 68613 - DNA, 156 bp, Acinetobacter baumannii
atgacagctcgtgaacaaggcgtagtaaagtggtttaatgacactaaaggctttggttttattcaacgtaacggcggcgacgatgtattcgttcacttccgtgcaatcgtaggtgacgaaggttttcaagctgaaaacgttcagcctttagactaa

SEQ ID NO: 68614 - DNA, 627 bp, Acinetobacter baumannii
atgtacttatctgatttaaacgcacaacaaagggaacctccattgaatcgaactaatattttttttggtgaatcgcattctgactggttgcctgtcagaggcggagaatctggtgattttgtttttcgacgtggtgacgggcatgccttcgcgaaaatcgcacctgcttcccgccgcggtgagctcgctggagagcgtgaccgcctcatttggctcaaaggtcgaggtgtggcttgccccgaggtgatcaactggcaggaggaacaggagggtgcatgcttggtgataacggcaattccgggagtaccggcggctgatctgtctggagcggatttgctcaaagcgtggccgtcaatggggcagcaacttggcgctgttcacagcctatcggttgatcaatgtccgtttgagcgcaggctgtcgcgaatgttcggacgcgccgttgatgtggtgtcccgcaatgccgtcaatcccgacttcttaccggacgaggacaagagtacgccgcagctcgatcttttggctcgtgtcgaacgagagctaccggtgcggctcgaccaagagcgcaccgatatggttgtttgccatggtgatccctgcatgcccgaacttcatggtggaccctaa

SEQ ID NO: 68615 - DNA, 234 bp, Acinetobacter baumannii
atggtggaccctaaaactcttcaatgcacgggtctgatcgaccttgggcggctcggaacagcagatcgctatgccgatttggcactcatgattgctaacgccgaagagaactgggcagcgccagatgaagcagagcgcgccttcgctgtcctattcaatgtattggggatcgaagcccccgaccgcgaacgccttgccttctatctgcgattggaccctctgacttggggttga

SEQ ID NO: 68616 - DNA, 408 bp, Acinetobacter baumannii
atgagccttgatggaaaagtgattgaagaaacaggtctgggaaaatatattggtgaaccagatagactttgcctgcccattttagacagcttgcaacccagtgccttatccccagaattaaatgctcagctttacctatccatgcaagaagaagatggttcagactgtcgctatgaaccacgtaatatattaaaaaaattattaaatcagttacatgctaataattatttccctgtcatggctgccgagctagagttttaccttttctcacctcagcatcaattcgagacatgttcagaaaaccaatgttttgatatagatgcgccaaataactatcaacaagtcctagatgaagttgaaaaagcagccttactacaatcaattgaaattaccgcaattgttgcgtaa

SEQ ID NO: 68617 - DNA, 1092 bp, Acinetobacter baumannii
atgctatttttgcttgttttcttatcttcaacactatatctgtatgggacaagaaaccttaagtcaccaagtttttttaaacaatttattgtctgggttcctgcatttcttgctttctatatcccaatggcctttcagaaagatgtcggaacagattactattcatacattagtatttatagcaacgctgcagaaaggtatttgtattctgaaaaaggcgagtacctttttttatggataattgattttgcaaaacttttcaatcattatcaatttgtatttataatattttcattaattatatcattatcttttttttacagtttatttattttgaaaaataaatacaattataaagcatggttaatattttttatatatttttctgtaacaggtatatataacacatctttcaacactttaagacaaagtgtgattatttcgctgctcccttttttaatacacctatttgttattaaaagacacttgttttttttgttatgcattttaggtttgtcttttctacataattcaactttgctttacttatctttttatcttattgcattcatacctaataataagaaaacggtattgtttgcatttgtgttaagcacacttttatacactgtaaacttcgggtctgtagtgagcattcttgcaaataatccactcacaggcttgatttttggtaattattcatattatgtggaaagctcattctttgatgctggaccaactttgtcgatattaacgaagttatattatttacctttgtttatattgttttggatgctatatattaaagataaaagcttaaatctatatttcgattttacaattaaagtatggtcattgacatgctttatgattattcaaatgatgcatattggtattttttatagattctggaatatgtttgcatttttatatgtctttccaatatattatgtaattgatcactacatcaagaaaagagatgcctttattgtatttctcttgatattgtacataattatgccttatctcattaaagttttaattttgccatcggcagaatatatttataactttaataatttaatcttttaa

SEQ ID NO: 68618 - DNA, 2382 bp, Acinetobacter baumannii
atggcagtaccagaacagacgccatttatagaatatacagcgaatggaaccactacagtttatccgcttacgtttgactgtgataaatctgaatacttgattgtatctcttgatggggaagaggccccagttgggtcatggagccttagtggtgggtcaataactttcaattctgcacctgctaatggtgtgctcattacaattgaaagaaatacgccattccgtagaaccactgagtatcaatcttataacaactcatttcgtccatcacctgtaaacaaagactttgatttaatctggtggaagcttcaagaacttgggtatcgtgatcaagttatctggctcgctttagttaaagagattgctgatcgtattgcaggtgatgacaatctacaaaaccaaataaatacgattgacgagtggcttgataatctacaacaaaacgtaaatgaaaatacgagtgacattgctcaattagttactgatctatcaaaagaaattgctgatcgtatagctaatgatgaagctctaaaagaaatgttcctcgcaatgatggatgaagccattaacgaggggacaattaatgcattagccattactcatgtagaatgtattgcagatttaatcaatattactaacgtttgggatggtcgtactatatatgttaaagacattggtatgtttgaatatgatgcacttcgatcagattggattgcattagataaagatatcgttagaacagtcgaaagcattgctgatttgatcggtttagaaaagtgggatggcagggctatttatgtgaaatctgtttcacctttgccttttggtactttatacccctacaacggaggcggtacatttgtattctcaacacagacagacaaggttgctgacgggtatttggttgtaaatgacattggtgggaaatggctaaaacaatcaatagatattacagttgatgatttcggtggggttggtgacaatacaaaagataactcagacgcatttaatgcttacgcatcaagcccacacgttggaatggagatacaccttggtaaaaaaggtcggtatagagttgccaagcaagttgacctaaaaggcaagaaccttattggctctggaatgggtaagattagcgaattttattacaatctctcttgcatagatgtcgatggatcaagttctgaattattgaataaaacagcttttataaactgtggaccagtgattcaaaatctaacagcaagatgctcaaacggagcggggaaacaagtatcatttatcgagatagatggatatcttgccaatattcaaaatgtagcaatggtcaatttttacaatcaaatagttgttaaaaatgccttggtcggattctattgcgaaaacatttggtcctattattctcaaaacgctggaatatattgtgacgatccagacaaccgtgttagtacaactggtgtatttaatagtatttacttccagcttggtgacggttatgcaatgaaatttaatagagatatacatggctgtcagtttgataacattattttcgagtcgatgaatggtggcatccgcgcaagaacagtagcaacttgtgattttggtcaattttggtgtgaaaacttaaagacagagacatcaaaaccatggcttgaagttgttggaacatccaatagttgctacggaaatacatttaaaggttatattaagttgcttggtggttggactgacccatcatccgctatagctccatcatctacctctaataattatggcggagtgagtgttagtagtaatggtgtagctattggtaacgctagcaataacgcaaaaatgacaatggtatctactggttttagaactggaaatggagtaatacaagaaactcgattagatcaaacatccaccactccgatatctaaatcaagattgattggcgcggatggggcgggcgctccatatttagctgctgatacttacactaagctgtctagaaagtgggcgacatacaatcacggatcaaacaacgctggggcattttacgcacctatgatgttgacttacgaccaatcattttcaacaccacaaattaacaatgggtggcagattgtaaaagagtcaactggcgtatatcgagttgagcgagtttcaggaaatacatctgtcataactaatggtcatattttggttagcgggataatttctggaagtagacttggcacaggtgcgtcgttatcgaatggcatccaaatgattgaaacctatacggggtcatggacaagttttgctgaagctgctggtttcaaggtgttttttcgtgacacatctggggcgttggctgacccgtggcgctttacagttgcgtttacagcaacaagctaa

SEQ ID NO: 68619 - DNA, 291 bp, Acinetobacter baumannii
atgcagattatgcaagattctgactgcgtcatgattgatggcacactatggacagatgatgaaatgcagcaaaccggtgtagggaaaaaaactggccgtgaaatggggcatttatacattagtggtgaaggcggttcgttgtcttatttgaaccaactcagtacaccaaagaaagtgctaattcatattaacaataccaatccgattttaaatgaaaactctgctcaatttgctgaactaaaagcaaatggtgtagaagttgcctttgatggcatgcaaattgaactctaa

SEQ ID NO: 68620 - DNA, 381 bp, Acinetobacter baumannii
atggttaacggtgctggtcttgcaatggcaactatggacatcattaaactttatggtggtcagcctgcaaacttccttgacgttggtggcggcgcaactaaagagcgtgtaatcgaagcgttcaaaatcattcttgctgatacgtctgtacaaggtgttttaatcaacatcttcggtggtatcgtgcgttgtgacatgattgctgaagcaattattgcagcggttcaagaagtaaatgtaactgttccagttgttgttcgtttagaaggtaacaacgctgagttaggtgcgaaattacttgatgaatctggtttgaaattaatttctgcgaacggtttgtctgatgccgcagaaaaagttgtagctgcagttaaagcgtaa

SEQ ID NO: 68621 - DNA, 219 bp, Acinetobacter baumannii
atgggaaaaatagctattttaattatggctcataaacctataaagtattttgaaggtttagcaagagataatcagcaagttaatttttttgtccacatggatataaagactaattttgttaatcctgaaattaaaaatttatattttttaaaagatgagttaagagtagatgttaagtggggaggattttcgcaagtacaaatttatctgaaactttaa

SEQ ID NO: 68622 - DNA, 393 bp, Acinetobacter baumannii
  misc_feature (353)..(362): n is a, c, g, or t
atgaaaaaggttgtggtttttagccaaattgatgaggaaattttgtcacggttacagcagcattaccatgttgtcgtattgaaccctaaactgggtgatattaatgaacagatacgacaagaagtagtagatgctgatggcatgattggggctggtcgtttgctcaatgaaagtaatctttctcctgcccaaaaattaaaaattatttcttctgtgactgtaggttatgacaattatgatgttggttatttaaatcagaaaaaaatctggttagcaaacacacctcatgttctaactgaaacgacagcagatcttgcttttactttgttattaagtgcagccagaaaagttcnnnnnnnnnngaaaagttccttttctagatcactggactaa

SEQ ID NO: 68623 - DNA, 873 bp, Acinetobacter baumannii
atggctatccagcttttagatacggcaagaaacgaaattccagtgaaatttacgcagttttctggtggcgagcgtcatgttcaaattgatgagacaaccttaggttcactatatggcaatgtattggttcgtgcacacatggcctcaagtcacgatgtgatggactatttactacttgaaaatatattgctgactcagggtttaaccattgacctagaagttccgtattttccatatgcacgtcaggaccgtatttgtgcagtaggccaagcgttctcgcttgatgtgatgaccaagttactcaacatcaatgctgacaaaaaagtgggcaaacaaggcaaggtgactgtttgggactgccatagtgaagtaacgacagccttactcgccgccaatacttcttttagcgaagttgtaaacatcagttcagtagacatcatcgcaaagagtgaagcgctaagcacattgttaaaagatgaaaaaacagtgctggtttgcccagacaagggtgcaaaagcacgtacacaaagggtcgcagatgcttttaattctgagcgcaaacaaccactcactattgttcattgcgataaaaaacgtgatccagtgactggcaaaattttaggtacacatgtacatgcgactgatttatcaggcctcacagcggtcattaccgatgatatttgcgacggcggtgcaacctttattggtattgccaaagaactgcgtcgcctcaattgccataaggtcgttctatatgtgacccacggtatttttagtaaaggaatagaggtttttaatggactgttagatcaactgtttacctcagacagctttccacaacaaccatcagacaaaatttcagtaattaactga

SEQ ID NO: 68624 - DNA, 291 bp, Acinetobacter baumannii
  misc_feature (277)..(286): n is a, c, g, or t
atgaaaattaagcgtattgagctctatcaaatcgatctaccttactctggtggtgtatatcatctttcgggtggccgtgaatatcgtagcttcgatgcttccatcgtaaaaattattgcagataacgggttagaaggctggggagaaagtacaccatttggttcaacatatattgcatctcacgctttaggtgcacgtgccggtattgctgaaattgcgcctcacttattaggtaaagatccccgtcaagtcgatcgtattaatgagaccatggatnnnnnnnnnncttga

SEQ ID NO: 68625 - DNA, 963 bp, Acinetobacter baumannii
  misc_feature (832)..(841): n is a, c, g, or t
atggctaaaatccctatgggcaactttggtaatgcacttccagaggttcaagaaacacgcttacctcaaagcaatttgaatatgtttgctgatgctgttagtaatttcgggcaagtagctacgcaacgaggccgtatccaagatgagcaacaacgtcagcaagaagtaacagccaagaatttagagctttataacaaccagcttgaggcaaaggaaggtcaattaaagctagatgagtcattatctaccgactttaacgacaaggtggttgatattaaaaaccgcctaggcaatggcacaatcaatgctaaacaggcagatgaagaactcaatacattttcatctcaaaagttcgcggaattgcaacctaatttaccgggtcacgctcaggaagatttaaaaaaatactgggatagcaacgtaacgcgccaacgtacttcgttcttgcctttacagttacgtgcagatgaacaaaaaggcggggtgctagctgaccgttattttgatgtggccacacgtatgacccgtgaagaaggtaagaaatacctttccgataatttaatgggacttcctctatctgaggcgcagaaaagcgaactcgtaatcaagtatgaaactgcgcgtgatgtgaatgatattaactcacaaatcacggaagctattgcaaggaataatattgaagctctaagagctacagcagcaggcttgaaggactataaatttatcgatggttctacagtacagaaatttcaaactgaaatacaaagtaaaatcactacacttgagcaacgtcaacaagttaacgagaacaagcgcattaatgaggttgagnnnnnnnnnnatatcaaagtgatgttgagcaagcggcaaaaggcacaccatcagaggcggaatatcagttttataaacaacaatctgctgactttattcgctttcaagctttgcctacaaaccagcagctag

SEQ ID NO: 68626 - DNA, 333 bp, Acinetobacter baumannii
atggctgctaaacgagaaattaaaacaccgggtgtgactgctgaacagaaccaagaacaacaagcacaaacaccagatacaacccaagacacttcaactaaagatcaggctgaggcggctttgtctgaaatcttatctgctcctcaagattccgaagctcaaacgccaccagatattcctgagtgggcaactgcaattgtagagaaccaagcgcgtattgaacaaaagctagatgcaatcttgtctcaatcaccaaatgcacctgctacgcctaaagcaaaaggccgattcaagcttgttgaaggcaagggccacgtttgggtggagggctaa

SEQ ID NO: 68627 - DNA, 492 bp, Acinetobacter baumannii
atgaatgagtttaaagtcggggataaggttgtttgcaaatatgagcatattatattgtttggaaacgttgttttagagatcaaggattttcgagaggatcttaaagagattggggacttctgcacattcaccaatggtaacgattactggttgagtgctttaaggttcgccaccccagaagaaatagcagcaggtagccgcatagacatgccttctctgcctgagccagttggaagcttacaagagttacatcctgagtttgcaaaagtcttgcacgagaactttctagagttgctaggtgatgaatccaacactgttcaggtggcaaaagatgcaattgaacatggtaacgacttagcaatggtgtcaattgaaggtgttgagcacgtatctattgctcaagtaattaagccatttccttgtgaggagttcggcgacgacttccccatagaaaaccacatttcgcctaattgcaaagtggaggatgtttga

SEQ ID NO: 68628 - DNA, 882 bp, Acinetobacter baumannii
atgaatctagcacacaagcgggaggagggcaacatgattacgttgcacccatctaccgcaaagaaaaaagagcgacaagctatgtcggaaaaatttacacatggctatgttcaatctagccagctttaccggaaggaggtttatccgtttctcagtgatgctgcacgacatgtgtattttgagcttgagaatcgcttaaacggttatcaaaaagaatctgattttgttagctactctcaattgcaaggtaattctgaaattgaaggaggcagaattgttgcacgcgcttcagttgccaaaggcctaaaagagctaatcgaattaggagttatctcggttattgataagagtaaaaacgggaacaaatataagattcatgaagtttctttgctaggtcagaagtacactaagaagactagttcacctactagactagttcacgtagtagaccaagctggttcacctactgaaccaaaactagttcacgtagtagacacacaaaataaagaaagaaactttaaagaaaatacacatattgttcctgccgaaaatccagtcgatgcagtcctaaaactttggactccaaatttggatgcgttgaatgcttggttgcaaagatcaggtatcgcaaaaatgactcaatccgaagtcgatggttggttacttgagatcaacgggtactactcaacaaaacttgaagcgggtttgcttacagatacccaaatgtacacaaacttcgtgaagtggattaaacgcaatttctcaagtcgtaagcctgcacagcctcaaacatcacgcaacgtaaacgatgcttgggctaacaacccagttcaatacaccaagacgcttgaagaagctgaaataccggaggactgggtatga

SEQ ID NO: 68629 - DNA, 726 bp, Acinetobacter baumannii
  misc_feature (636)..(645): n is a, c, g, or t
atgaataatactcaatcagcagcaatgccacttgttgaaaatgaagaagttaatcttttagattcgattgttgaacaaagccgtattgcacgaaatgaagaagaacattctcgtgctaaaagcttaattggtgagcttgctaaagaagtaatggcagggaccattactgtttctgaaaatatgactttatcaattgataagcgtattgcagaaattgatgctctgatttcaaagcagttaagtcagatcatgcacaatgaacaattccaaaaaattgagtcaacttggcgtggtctttattacttttgtcaggaaacgccttcaaatccgctcattaaaattcgtatgcttaatacgactaagaaagagttggtaaaagatttccaaggtgctacagactttgatcaaagcactttgtttaagaaaatctacgaagaagaatacggttcttttggtggtgcaccatactcagcattaattggtgattttgagtttgatcgtactccatctgatatgtatttgcttgagcaaatctctcatgttgcagcggcagcacatgcaccatttatttcagctgctagtccgagcattttaggccttgaatcatttacagatattgatcgtcctagagatgtnnnnnnnnnntttcaaaaatctttgaaaccgctgaatatgttcaatggcgttcgttccgtgatagtgaagactcacgttatgttgcattga

SEQ ID NO: 68630 - DNA, 483 bp, Acinetobacter baumannii
  misc_feature (460)..(469): n is a, c, g, or t
atgttacaaggctcaacaatattagtaactggtggaacaggttcttttggtaatacatttgttccaatgacattggaaaaatataatcctaaaaaaataattattttttctcgcgatgaaatgaaacaatgggaaatggcgaagaaatttaaagatgataaacgtgttcgctttttcattggtgatgtgcgtgataaagagcgcttatatcgtgctttagatggggttgattatgttgtgcatgctgcagcaaccaaaattgtaccaactgctgaatacaacccttttgaatgtatcaagaccaatattaatggtgcaatgaacttgattgatgcatgtatcgataaaaaggtaaaaggtgttgttgccctttcaacagataaggcaagcagtccaattaatttatatggtgcaacaaaacttgcatctgacaaattatttgttgctggtaatgcatacnnnnnnnnnngcatactctggtga

SEQ ID NO: 68631 - DNA, 300 bp, Acinetobacter baumannii
atgcgtgatcaaggcatgacattgactgatgctctaggcgaaagtttaggaataaatcctttatctggaagtgctagccgtatctatgtagtacggactaacccaaatgatcgtacaaccgaaatttatcatttaaatttaatgagtattggtgattttggtttagcaaatcaatttagactacgtagtaatgatgtcgtttatgtggatgcaaccggtttaactcgttggcaacgtattgtcaaccaaatcattcctttctcaaatgctttatataacatagaccgtttgggacaataa

SEQ ID NO: 68632 - DNA, 435 bp, Acinetobacter baumannii
atggaccgccatgttcatgctcgtggtcatgagcttcttcatcactatgcccttcatggtcatggtctccacaatgtaaacttagatcatgaatatgacaggtctcatattcatggctatgccccggtaaaccatactggtctcgacggttactatacgaaatacccgtataaccgcgatcataaatccaagacaaccccacgttcactgaatcaccttgtgcaaaggtattgtctacacggcgctctttttcaccttcatgaatatagtttggtgcaatatagttattcgcatcacgtgttaacccctcaacacgtaatgcaacttggcttcccaaccctacagttaccccagcactcgccagcttttcatcacttccagtgttgtaacgtaagccaacttgtccttcataaccattttcaggcatttgtgtag

SEQ ID NO: 68633 - DNA, 1110 bp, Acinetobacter baumannii
  misc_feature (1057)..(1066): n is a, c, g, or t
atgctcagtcgtcaattagaagtatcattacgtttggctgttagcatggctcgtcaaaagagacatgagtttcttacagttgaacatttactattagccttactcgataacgattcggctgtgaatgcattaaaagcatgcggagctgatattgtttctttacgtaaagaattagaagaatatgtagaacaacatactcctaagcttggcgaaaatagcgagcaagctccacatccaacagaaagtttcgaccgcattttacaacgtgcaattttccacgttcaatcaagtggtggtgaccgtactgttgaaggtgcggatgttttagtcgcaatgtattcagagcgtgattcttttgctgtttatctgcttaaacgtcatcaaattaatcgattgactttaactcaatacttgtctcatgggacacgtaaagacgaagttcaggttgaagaagaagttgaagacattgagggtgaaagcaattcaggcaatgctggaccattagaactttatacgctcaatttaaatgttgaagcgcaaaaaggtaaaactgatccactcattggtcgtgagaaagaaattgagcgtacagcacaaattctttgccgtcgtcgtaaaaacaatccattgttagtaggcgacccgggtgtaggtaaaacttcaattgcagaaggccttgcttggctcattgtaaatggtaaagcaccaaaaccgctaagccatgcagaaatttacagccttgatattggtgcattagttgcgggtacaaaatatcgtggtgactttgaaaaacgtttaaaacaattgttaaatgctttgaagaaaaatccgaatgcgattttattcattgatgaaattcatatgatcattggtgcaggctcaagtatgggcagtacgatggatgcttcgaatctcatcaaaccagctttagcaaatggtactttacgctgcattgggtcaaccacgttccaagaatatcgtcaggtatttgaaaaggatcatgcgttatctcgtcgtttccaaaaaattgacgtaaatgaaccgagcatttctgaannnnnnnnnngtttgaagatttccaccatgtacagtatgacgacaaagctttag

SEQ ID NO: 68634 - DNA, 507 bp, Acinetobacter baumannii
atgaagatctattcgattgaaattaataaccttggatgtacgggcatgatgcttggatctgctgttcctaatggaagtcttggtgttgtagttgatgactataaatttgaagtatatgagcgtcttggatgtgccatttggtctagatgtggcgagattcttcatatctatcaacatgcaccaggaacaaaagagggttttggtggttcaaagataagtttacgtattaaagagcctttatgcatgtttcctaagatacaagctgctcgcgttcatacattcaaaggtgatctttgggatggctcaacagcaaacaaactagttgctgaacacttaggcactaagctcttcaatgtgggtatcaagaagttaagagatagaaattcatgtttttgggcaggcaaagtaactgaaaaattcatggaaacactttctaaggcggtaatccttggtcaaccagttcaaggcgactttagtgaagatttaaaggagccctctcatggataa

SEQ ID NO: 68635 - DNA, 489 bp, Acinetobacter baumannii
  misc_feature (22)..(31): n is a, c, g, or t
ttgttttgtttaaccgaactgnnnnnnnnnnctgtacgtgaaaacattgcttatggtcagttacataatgcaagtgatgaagacgtaatagctgcagcaaaggctgcttatgcccacgactttattatgaacttaccaaatggctacgatactgttttgggtgctcaaggtctaaatttatcgggtggtcaacgtcaacgtattgcaattgctcgtgcaattttgaaaaatgccccaattctgattttggatgaggcgacaagtgcgcttgataatgaatctgaacactttattcaacaagcatttgatgaagctatgcaagatcgtacaacgattgtgattgctcaccgtctatcaaccattgaaaatgcggatcgtattgttgtgatggaccgcggacaaattgttgaacaaggtactcatcaagaattacttgctaagcacggtgcttattatcaattacatcagcgtaattttgaggaccattaa

SEQ ID NO: 68636 - DNA, 348 bp, Acinetobacter baumannii
  misc_feature (331)..(340): n is a, c, g, or t
atgaatttacaaaatcccaaaaaattcaaaatgatgattgatcaggcacatgatgttgcgatcaatgttttacgccctatttcccgtaaatacgataaagcagaacatgcttatccgaaagagctggatatgcttgcttcactcattgatggcatgaatgaaggtggtgaaggaattaatgcaggggctgccggcgcaggaaaacgtggtgaaactgataatgaaggaatccgtaatggaaccaacatgtcaacagcgttaggcatcattgaaatgtgttatggcgatactgggctattactcagcatgccacgtcaaggtttaggaaacnnnnnnnnnncgttttaa

SEQ ID NO: 68637 - DNA, 150 bp, Acinetobacter baumannii; identical to SEQ ID NO: 45823

SEQ ID NO: 68638 - DNA, 3447 bp, Acinetobacter baumannii
atgattaagattatttataaacaagaccctttatccgaagacaaaacaattgaacacgccgaaactttgggtcaatggcttacttcaaaatatgattatatgcctgaacatgtccgtattttccatacaacaagtaatatggatcatgccgaaatttcatttgcgaatgaagtcacaccgaagaatgcatatgaattaaagcagctcgatttcttgccaggcactttcattgtaattgagaatcccaagggtatagaccccataactctagcttggatagcggttgcttctatagttatgggtgtggctgttgcattattaatgcctgtgccctcaattacccaaaccaaccagaataacaatcaatcctcgtctgcaaataacgaattatcaaaccgtgaaaataaaactcgcgtaaatggtcgtatcgcagatatttatggtgccgctcacgatacccctgatctgattactgtgccttacaaggtatatgaaaacaatgtcgaagtagagcatgttgttggttgtattggtcgtggtcactataaaattaacggtgcatatgatggtgaaaccaacattgttgatattgccggcgcatcggtagaagtctttcgaccaggcgttgatattgtttctggtgagccatatttctcgcttggtaccgaaattaccacgccgccactaacggttcagcatcaaacttctgttaatggccaagttctccgtccagcagatacacagtctttagaaggtacgaactaccttcattttgcatatccaaacgagatccttcgggcaacggcaaacaacacagatttaaccactaagtttgtaagtaatgaccgtgtagaaatcaccaatgcctcattcacgtttaacggccagacttatgatttaaacggtacttacagtgttctatcggtagctgatgaccgtatgacgttatcaaatccggcggccgttaatgctaactggttaaagcttaaagagttaaataaccaacaaactgcagctttgtcaccaaagatcagttcaataggtgaaaaatggattggtccattcattctggacaatgttgaacgtagccgggtgctgtgtaattttgtggccacaaatggactttataccgtttcagcaggtggaaatcagggtgctgtaaacgtcacgattgaagttgaggtaacaccggtaaatgaatctggtgcagccattggcaatccaatgctgaagcagatcattctaaagggttcagcaaagtcacgtcagaccgttggtgcaacacttgatatggtcacgtttcaggggcgttgtagtgtccgtgcacgccgtttaactccgactccgacagtcacaacagttgttgatgaagtaaagtggcaggcgctttacggtgcttatcctttacaaagcacagtgtatgaacatgaaacggtttttcgtgcgcgtacttatgcaaccactggagctttatctgttaagtcccgcaagatcaattttgatctccagcgaatgttgccgacttataaaaacggggcaatgacaacagagctatatccaacgtctagctttgctgatgctttggtatctatggcactcgatgacaagattggccgccgttcgatcgatgagattgatcttgaaaacatctatcggacctataatgatgtagttgattattttggtacgccgctagcggctgagttctgtactaccattgatgatacgaatctatcttttgaagagctggttaccaatctttgtgatgcggtgttttgtactgcatatcggcaaaacaataagctcaagctttattttgaacggccaactgataactcggtaatgctgtttaacttcaggaatatcattccggatagttacaagcatgacctgacctttggcgtgatggatgactacgacggactgatctatgaatacacggatccgaccgacgatagccgtatcaatatctatttaccggataaaggagccaaaaacccaaaagaggtgaaatctgttggtgtacgaaacaagtggcaagcgcatttcaatgcataccggatttggaacaagatgcgcttccagcgcaaatccattacctttgatgcggcaccagaatcagaattactggttttacgtgaccggattgctgtagcggattatcgcaatggtattcatcaaagcggtgaggtggtacagcaagaaggtttagtcctcaccttaagccatgatgtagatttcattgcaggcaagagctatgtgatttatctgcaaatggcggatggcacagtggacctgattcctgttacaccgggttcagccaaaaataaggtggttttagggcggttgccgaacggggccttaaagctaagtcctgatgattttgtaaataccatctatacagtagttaatgatgatactaaaggttcattgccttatctggttgcaaaaagagaaccggttgaccagttctctaatactattacagcaattaattacgatgagcgctattacctcaacgataaagactttattgacgtgccggttgatgattctccaatttacattcgatatgaccagctggatattaatctggcgcgtttatatcagatgcaaagaggggatttgccaacgactggcgaaatcagttttgtagttgaatctggtgcactagtttctagttcgagttcttatcgaccggaaaccagatttgtctataaattcgactacaactccagtccgccgaaacaggaatttattgcccctgcagcgactgaactacccgccattgatactggtgagttcccacctgatctggtggtaaatctgactattaaaggtgctgttgttgggcgtggtggtgatggcggtttacctcatttggcatttggcgcatgggagtccgatccggattacaactttactaaaacccgacgtgatgggtttcagggagcacccggtttattgaaccggcacagcaaactaaacctgattattgatggcggcactctagctcgaggtggatctggtggtggagcaacaccaagcggtatttacactgggttgtcttatggtgttcaaggtattccgggtggagctggtgcaccatttggacgggtcatgacaggccagccaatttcaagcgactcacaagattggcgctggtattttggaagttacttcaatgtcttaaaaattactgatgccgaagcttcggtacccggaaaaggctaccgaacccaaaatgaccgttatggatccccattatcaggtgatggcggaaactggggcgaacgtggtaccaagtctactaatgatggaacatggaactggaaataccatggcacaactgaaggtcagccggggccaggtggacctgcaattgtgggagttgcaccactgacaactcaattgattaatggagggaaaatcttacaaaccctttaa

SEQ ID NO: 68639 - DNA, 312 bp, Acinetobacter baumannii
atggttgccttggctacaattttagcggcttctattgccaagcatcaaaataatactatggaaaatacagcctacttaatgcgccaaaatcaatctttgctttatgcaaaaagtgcagaagcctttttttcagaattattaattcaagatgcaaataatgcaggtggagtagatcatttaaaagagacatgggcacaacctatgccgccgttttctattgaagagggttcagtatctggtcgtttgcttgatgagtctggtaaatttaatttaaatgtttattggtacgtgtgggattaccagccgaattaa

SEQ ID NO: 68640 - DNA, 1125 bp, Acinetobacter baumannii
  misc_feature (1085)..(1094): n is a, c, g, or t
atgaataatattccacatgcaaataagtcattctggctagcccactcaggcgaatatattccatcaccacctcttagaggtagcattgatgtagatgtggtgattattggaggagggtttactggattatctactgcttatcacataagaaaagtggattctgctgcatcagtggctgttcttgaaggcgaatgtgtagcatttggtgcttcaggccgtacctctggctgggttgtgccagttccagtacttgatcccactactgcaaaagtactttatggaaaagaaagattaactgaacttcaaaatttcgcatggaatggtctggactatgtgcaggacttaatcaaacgcgaaaatatggatagcgattttgaaatgcctggtgtgacatttactacacttcgcggccatgaaaaaagattagagcactttactaaatattggcaagatcaacctcgctctaaagacagcgtctatatggatagagctacggtaagccaagccctaaatagtgatgcattttctggtggatgccgaatgccacattctgggcaagtcaatcctgtaaagcattctcgagaactaaagcgaattgcagaacaggctggtgcacaaatttttgagcaaacgccagtattggatatagaagataaggaaacgttctttattctcaaaactccagaaggagaggttagagctaaacatattgtattaggtaccaatggttttactcatttattgccaccagaattggggctaaaacgcgcccaactccccatgtttgtatatcagttaattaccgaacctttaactgatgaagattggaaagcgcttggatggaaacatcgtggtcagttttatgacaaaacaacctattgtcctccaacctgtagaacgactgtagatggaagattgcaatttaacctatgtgatatctatgtaggagaagggcgttctatggacgaagctcagaaagtgcaattttatgatgccgctgagcgaatgtataaaaaggtatttcctgcatttcagaaattaaaaattgctcaacgttggagtggcgcttgttctattccttttgnnnnnnnnnnacgtaaggtctcaagtgggcacactccataa

SEQ ID NO: 68641 - DNA, 285 bp, Acinetobacter baumannii
atgcgtgccgctgaagtttcttttattcgagattgtgcggaaatggcagcaagagcttcattgtttagagaagaaagccgctggggactgtaccactatagagcagatttccctcaaaaaaataactcggattggttctgtcacgcgcatttgaaaaaagatgaacacggcaatatggtcagtttcaaaaagccaatcgagccttatctggttccgattaatcaagatgaagctgtgtcgtatgaccgtttacgcattcaaaaagatgttgctctagcagactaa

SEQ ID NO: 68642 - DNA, 303 bp, Acinetobacter baumannii
  misc_feature (255)..(264): n is a, c, g, or t
atgtctaattctctatctaaaacgacggcatacgtccaagtcattcaaaatgatcaacaagcaattaatgctgcttatcaagtggctgattttgctttagagggtcgtaatacacgtgatcaacaacgcttattaccgcaagagcaaatcgaaagctttagccaaaaaggcttaggcggaattcgcattgcaaaaaaatacggcggtgcttttgtttccaataaaactttggctcaagttttccgtattttgagnnnnnnnnnngattcatccagaaggccatgtcgttttagtgattgttaa

SEQ ID NO: 68643 - DNA, 207 bp, Acinetobacter baumannii
atgcctggtttaaaagttgaatacaaggcagtaacttcatcaacacgtattcctgagcttttagcgggcaatattgatatggaatgtggtaccaccacaaactctaaacagcgtcagcaacaagtgggtttctcaactaactactatgcaacagaagtacgcatggctgttaaagcaaactctggtattaaaagtttggcacattaa

SEQ ID NO: 68644 - DNA, 645 bp, Acinetobacter baumannii
gtgtataagagacagttcaatgcagagataaaaatcatcaataatactgaggttcaggttaaaaagtcaccgcttgagttatttaaaaatcagcgtgcgttttttacctattccatctggatcatcagtattttaaatatgatcagtttatattttctggcaaattggctaccgactttggccaaagagtccgggctttcattaaatcaggcattgttgatcggctccactctacaattaggcggtacgattggtagtgtggtgatgggccttaaaattgataagacaggattttataaagtattaattcctgtttttctggttgcagtgattagtgttgctttaattggctattctgttagtcatatcgttttattgtttattatcatttttattgctggctttgccattgttggtgggcaacctgccattaatgctttgtcggccagttattacccagtttcacttcgtactacaggggtgggctggagtattggaattgctcgtttgggttctgtcattgggccgttatttggcggttatctctctcaatttctggtcattacccatttatttgtgattgctgccataccttcgctattcgtcattatcatgctgatgattcaggccaagtatcggtcataa

SEQ ID NO: 68645 - DNA, 678 bp, Acinetobacter baumannii
  misc_feature (666)..(673): n is a, c, g, or t
atgaaagaaattgtattaagtgatttgatcaatcagcagaaagttggaccttatcaaaaatttattttggttacctgcctattactaatgattatggatgggtatgacattcagtccatggcttacgcagccccactgattatagaagaatggggtgttcaaaaatcgatgctgggagttgtgtttagtgcaagcttgtttggtttgtttgttggatcatttttattaagttcactttctgatcgttttggtcgccgtccgatactactgatctcgacctttatattctccatattgatgctgttgacaccacatgtaggcaatattgagcaattgaccgtaatccgctttgttacaggaatttttttaggcggtatcatgccaaatgtgatggcttatagctccgaaattgttccatatcaatctcgtatttttaccatgatggtcatttcttgtggctatacggtaggggcaatgttggggggcggaatatcagccttactagttccttggggaggatggcaggcgattttttatttcggcggtattatccctttaattattttcattatcacattctttaagttaccagaatctttatattttttaagtgaacatagcaaaaatagctccaaaattttgttttggttaaagaagttttatccnnnnnnnncctaa

SEQ ID NO: 68646 - DNA, 1056 bp, Acinetobacter baumannii
gtgctgaagcagatttatcaggaagatgatccgcgtggaccaatgtggggaggtttacctgtctggtttagtgatggcacaaaaacgaactggtctaaaaatatcactacaagtgctgactggacacgctggaatgttaaatataccaacctatttgcagatttaactcataaatttaatgacaactggtcagctaaactgtcttattctcatggtaagcgtgatgctaattctaagcttttatatgtttcaggtagtgtagataaaaatactggtctagggctatctccttatgcatcagcgtatgaccttgaggtagagcaagataatgcttctttgcagctcaatggtagttttgatttgtggggcttagagcaaaaggttgttttgggttatcaatattccaatcaggactttacagcgtatgctcgttcaactgatacaaaaatggaaattggcaatttctttgaatggaacggcagcatgcctgagccagtgtggaatgcacctacactcaatgaaaaatataatattgaacaaaatgcactattcgctgcgacttatttaaatccgattgagcctctaaaatttattttaggtgggcgttttacaaattatgaaaagaatatatatggtcgtagttcatccataaaatatgaccacgaatttgttccttatgcaggtattatctatgatttcaatgatgtctatactgcatatgcaagttataccagtatttttcagccccaagataaaaaagactttgatggtaactatttagacccggttgaaggaaacagtactgaagtaggcctaaaatccgcatggtttgatggacgtttgaatggtactttagcactttatcatattaagcaagataatttagctcaggaagcaggggacgtcactcgtaacggggtaaaagaaatctattatcgggcagcaaaaggtgcgacgagtgaaggttttgaagttgaagtaagtggacaaatcacaccagactggaatattacagcaggttatagccagttctctgccatagatacaaaattctaa

SEQ ID NO: 68647 - DNA, 468 bp, Acinetobacter baumannii; identical to SEQ ID NO: 51207

SEQ ID NO: 68648 - DNA, 1017 bp, Acinetobacter baumannii; identical to SEQ ID NO: 51504

SEQ ID NO: 68649 - DNA, 855 bp, Acinetobacter baumannii
atgagtagtttagcccagacaaaacctaataaccaaagtacatttttgactaaattttttcagcagttgagatcatatccggcgcgtttaaaaagctacgtgattgcttttacatccatagctttttggatagtcatttggcaaggacttgctcagtttaaagtaaatttaggctttgtgaactttagcaatgtcccgacacctttagatgtcattcatgcgctatgggctttttttcaactcagcgctgcatttgaacatgttgaatctagtgtatttcgtgtagtggttggttttgtgcttgcagctctaattggtgtaggcattggtttgttggcaggacgttatcaaaaactggctgcctttctaatgccaccattagaagtattacgtccaataccagcagttgcatggattcctttagcaattctgatttttccatcctcagaagcgtctatgatttttattacgtttattggggctttatttccaattttattaaacaccgtacatggtgttggtgcagttgatccacgactcgttgcatctgcaaaaagtctaggtgcttctgatcttgccattattcatgaagtcattattccgggtgcattaccgaacattattactggtttatccattggaatgggcacttgctggttctgtttagtgactgccgaaatgatttcggggcaacatggaattggatacttcacatgggaatctttcaccttgcaaaactatagcaatatcgtggttggcatggtgctaataggagcgttaggtatgtttagcagtacattggtgcgtgtgattggaaaccgatttactccatggtatcaattgaggaagtcttaa

SEQ ID NO: 68650 - DNA, 732 bp, Acinetobacter baumannii
atggtactcagcccgatttttaaagctgacttcattaaaaagctcggtaccactggttatagctttagcaataccggatcctttacagtaactccgcctaaaggtgagcaaattacagaaaaaggtaaggggaaaaatacaattgccagcgcagttgatgcagcggcttatatttatgaactctattcaatttctggtggtatgaaagatgagttaaaaggtattaattttgataaatatatgcctttggaagccgcaaaattttatgctgaatttaatgatgccaatgatttttacgaaaaaggtccaagctttacagaatcaaatcaagtcaccagtgaaatcgcccaaggacttaaacaagacctgttccaacaagttgatgctgttgtgaataaagcccaaccttataaagcagttttacgttttgcccatgctgaaattattattcctttagcaactagcttagatttgcataatatgatgcagccgttaccactacgtcagacttataattactcgacaagcgcatggcgtggtgaagtaatttcacctatggcggcaaatttacaatgggatatttaccaaaataaccaaggctctactttggtaaaaatgctttataacgaaaaagaaactttatttaaacctgcatgtaattatgcactttatacaccaaccagtttttactatgactacatcaaattgaaacagtgctatcaaatgcaatag

SEQ ID NO: 68651 - DNA, 267 bp, Acinetobacter baumannii
atgaatattttatttaaaacaactgtgcttgcagcatcattattactcgcggcttgtaataacaatgatgatcaagaagctcaaactgcaccatctacaaacccatcaaaatattatcaaacgaaaacgccttaccaacctcaacaagacttaaaaagctatgaacaagcgccgactgggttccagccagtttttacagagttagtggcacgtcacggttcgagaggtttatcaagtctgaaattattgggcaagatcatttgttag

SEQ ID NO: 68652 - DNA, 219 bp, Acinetobacter baumannii
atgaaccttcccaatatttatagcaaagttctaaaaactcttcagcttgctcatagcgggcatcgtggtcttttaaacctttttgaccaattaagcgttcggcactatctagataacccgtcacgatattccagccaatacgaccttgagttaaatggtcaagactcgcaaagcggcgagcaaattgatatggatgctcatagcttaagttcacagtga

SEQ ID NO: 68653 - DNA, 1806 bp, Acinetobacter baumannii
  misc_feature (1794)..(1803): n is a, c, g, or t
atgagtaagaaattatcagaattagtatcagtacaccgtaatttcttacgctcaattcgtttagatactgatctaggtcgagcagatgcaataagtggttacattttacagtctcctgcaaaacagttacttgatattacaggtagttatttactggagtcacaacagaaagcatttacttggacaggaccatatggtggtggaaagtcatctcttgctttaactttagcttcttgtgttaatgaaaagaaagatattagagatttgtcacgctctatattgggtgatgaaataaatgttggtattaagcaatatttctacacagatgaaccttggattgtattgccgatagtagggaaaaagacttcgattgaatcgcaaattcaggcgacgttaaactccatagatgaacaatataaatcactaattaatcaagaagattctgtcataaatcaattggttaagttggcagaggttttgccaaaaaaatctggggttttattattaattgatgaacttggaaaatttctagaatatgcagcatattctggagaagatataggattctatcaggaccttgctgaagcagcggcaagatgtaaaggaaatcttgttattatcgggattttgcatcaatcttttgagcaatatgcagctaagttaggaagtaacgttcaacaagagtgggcgaaagtacaaggccgttatattgatattcctttagttacaaatacggatgaaactctggagttaataggcaaggcgattcatgttgagactcaatatgaagaagcacgaaaagttgctgaaaatgtctccaaggttattcacaaaagaagaccaagcgctgtatcgaatctttcagttttattagaagcatgttggccacttcaccctgtaatggctgttatgttaggacctgcatcaaggaaaaaatttggtcagaatgaacgcagtatctttagctttttaacttcggtagagccgctaggattttctgaagtattacaaggaatggatggcgagatatttgactattattggcctcatcaattttgggactatctacggggtaatttcgaacaagcaatactagcttctgtagatggacatagatggtcaatcagtgtggatgctattgaaagagctgaggcgatcttttcaaatgttcatgtaaacttagttaaaacaattgctcttatcgaaatatttagaaatggatcaggactcgttgctgaggatcagttattgaattgctcagtgcctaacgcatctattactgaaattcatgatgccttaaatgatttagcaagagcatcaattttaatttttagaaaacatataggtgcttggggtgtttatgcaggaagtgattttgatattgaagctgcactaaatactgctacttcaaatgtgttggatgttgattataaagaattaaaaaatacccttgcatttacccctataacggctcgtagacattattggaatacaggggctatgaggtggttaaactgttctattatttctgaaagagaagtgaaaaagcatattgactctttccagactcaaggaagtgcttttggtgagttcctacttgtaattcctgatattattgttaaagataaagatgaaataggcaagaatgagcaattagtttcaaaagcttttgctaaaggagtcttaattggtttccctaaaaatggagataatatccaagggttagcgaaggaactcgcaagcttagagtttattagaaataatagcctcaaattgcattctgatagtattgcnnnnnnnnnntag

SEQ ID NO: 68654 - DNA, 570 bp, Acinetobacter baumannii; identical to SEQ ID NO: 13730

SEQ ID NO: 68655 - DNA, 1266 bp, Acinetobacter baumannii; identical to SEQ ID NO: 45556

SEQ ID NO: 68656 - DNA, 312 bp, Acinetobacter baumannii
  misc_feature (138)..(147): n is a, c, g, or t
atggcacgcgtcaccgttgaagattgtttagatcatgtagacaaccgttttgagcttgtgctcgttgcaagtaaacgtgctcgtcaattggcacgtcaaggcatggagccaactgtagaatgggataacgacaaaccnnnnnnnnnngtagaatggggtaacgacaaaccaacagttgttgctttacgtgaaatcgctgtaggtcacgtaacgaaagaaattcttaaacaacgtgagcaagattatcaaacttctagtcttgatcttgccctttctacaaacagcttaaatttagaaggtttttctttctaa

SEQ ID NO: 68657 - DNA, 273 bp, Acinetobacter baumannii
atgtccagatctagacgaagtgatggtgacttaacaaagactaaaattattgaggcagcaggacccttaatcgcccaatatggttttgcaaaaacagcaaacaaaacaattgccaaagtagcaaatgtcgatttagcagcaattaattatcactttgatggtcgagatggactatatcaagcagtgttaatggaagctcatgcccattatctagatgaacaatacttactagaacttgttggtttttattcgcgaactgttttcaccttctga

SEQ ID NO: 68658 - DNA, 591 bp, Acinetobacter baumannii
atgcatcttaaaacattaagcttcggtttagcagtagcattggcaagtacagttacattagctgcaccagtggactataaaattgatccaacacatacagctactgttttctcgtggaatcacttcggtttttcaaccccaagtgctaacttctcggacatccaaggtgtaattaaagttgacaatgctaaaccagcaaactcatctgtaaatgtgaccattcctttaagcagtgtgaataccaatgtacctgctttagataaagagttccaagaagaagcttggtttaatgcggctaaatacccaaacattactttcaaaagtacgaaagtagaaactaaagataaaaaacattttaaaattactggtgatttgactgttaaaggtatcactaagccagttgtacttgatgctgtcttaaataagcaaggcgagcacccaatggcaaaagttccagcgattggttttaacgcgacaacttcgttcaatcgctctgactttggtttaggtaactatgtaccaaacgtgggtgataagatcactgtaaacattacaactgaagcaactgcggctagtgcagctaaaaaataa

SEQ ID NO: 68659 - DNA, 342 bp, Acinetobacter baumannii
atggttctcgagtttacgtgccctcgacctacaatcgctggacttttaccacctaattcaagagtgagcggaacgaggttatcacttgctgctttcatgactttacagcccacaggtgtacttcctgtaaacaatagatggtcgaaaggtagtgcactaaattcagcaccaacttcaggcccacctaaaataaccgcaacttcttctatagaaaagttcgccgcaagcatgcgtgaaatcacttcacttgttcgaggggtgagttctgagggtttaagcattgctcggttaccggcagcaatcgctgtagcaaaaggaataagcgtaagagaaatagggtag

SEQ ID NO: 68660 - DNA, 126 bp, Acinetobacter baumannii
atgaaaaatattttaaaaatcacaataaaaaaaagcgactctaacgagtcgcttttttactgttcagaaactcaaattattgagcttgttgaccaggttgaactactacagtacggctaccagtaa

SEQ ID NO: 68661 - DNA, 651 bp, Acinetobacter baumannii
gtgtataagagacaggatttcaatgacttaatattagaaatcatatccttacagccagttatttttttaaattcagataaaacccctaaagccagaattaaaaaagtgcttttagaaaaatttgaactttcgaatttatcattacatcaacaacaggttagacatccagctaatgttttagtaaatctttcgagcgtatactcagataaagacttcaaagataatttctctgagatattagaaaaattgttcagaaaatccccaaatttaaaattgtactcccctgtttttaaagacaagcctcaagtttttgcaatgtatttaaaagaggttaaatctcgattaggttccaatacattcgatatagcaaacgaatggtgtgaaatgatccgggatattgaagaggtttatctaaattatattgatgatagacaagcttttgagattattacagctatttcctactctgccaaaacgggtgcttttaaggcagaaaatattgtgagaggtcagttttcttcaattttagctacaaaagacaaagctatgaaatacataaaacttcatctggatgatgctcaagcacattttaaatcacaagttgaaaaagatttgcctagcttccttaaatctcaacaagctctcaattga

SEQ ID NO: 68662 - DNA, 807 bp, Acinetobacter baumannii
atgagctcaattgaactattagtcagtgctctaaacgatactcctgactctgaaatcataattcggagtcaagagctttcttatttaaatgttttaattaatttgaaaagagtcgatggtaaaaccgttccctaccaattagagattcatgctgttaaaaataataaagttgtagtatctgagttaacccagttattacccaaatgttgtccagaacgacatatcaattcagatggtactttttgcttatcttggcaggatgatattgatttaagtattattgatattgagaaagcagctttttggtggcaaacacttattggcttcttacttaaacaagaacgagttcataaaaaaagacaatggcctgaccaaaatgcttgggctcatggttcagcagccaaatttcaaagagatgctttatcagcacttgatcaagttggagcaaattttaaaactttagttttttcagactctatacaagtcacttatcataaaactaataagggcaacggtagctattataaagtatttagaaatggtctactatggtatgtagtatgggaaaaatttcaaagagtagctatattaagacaaaaatgcctgtgtggctctaagaatagaaaacattataagagtactttgcgaaattgtagtaaccaattgcaccaaaaatattttgttgattttgcgataaactattaccattggaaaatagaagaggcaaatttttgggtagattttaaaggaaaatcttgctgcggtactttagatgcagaagaaagattacatgtttgctgtggttaa

SEQ ID NO: 68663 - DNA, 1539 bp, Acinetobacter baumannii
atgactaaagtttggaatcatgaaaatgcactaaattctattgagaatcgcttaaaagacgtcaacaatatttcaattactgaatatgccaaacgaagggatttaagcaagattaaaactgccgaagcatgtgtcctagatggggttcatctatatattgatatactaaatatggatggcttattaggtactacaatctctgagggagaaacatgtcataagcgtgtattacagtttttatccctacactaccgagctattgataagatactagaaagctgtggggccatccgtgttgactatcataaccaacggcttcatgcagttataacgcaaccttataatacagaaagtgatgcagaatcaaaacgtatttataaagctgtagctattgcaaaaaccattttagacgtaagtaaccaacttgatgatgaacgagatgaagacaatacatctcttccccaagcaaaaatgagagttggtattgatagcggaattgctttaactgtaaacaacgggcgtaatggacatcgcgaacccttgtttctaggcgatccagctaatcacgctgctaaaatagcaagtggtggtaactcatcaggtatttttatgactaatcgagccagagaagtaattggtctcaatcgggttggtttagaaaaaaatacagctctaaataatattgatattaatcaaattgtttcacaaacaaaaattcctgtaactgttgatcaaattattgaatgctggcgtaatgatctaaattctcaccctattggtaagtttaaatttactcgtcaaacacctccacttaaagatatggacattttgaatctgacaccaggaaattcaaaacgtcaagaggctgtttctatatatgcagatattgatggctttaccaactatgtaactgaacatatctatagcaaccctgaagcggtggtaaaagtattgcatgtactccgttcagaacttgaacgtgtattaacaaatgattttggaggtcgtcgtattcgctttattggagattgtgttcatggcgtaatatgtgagggaacatcacaatctactaatattcccgaaactatcactactgctgtaatttgtgccagtgctatgagaagtagttttgacttagcacttgaaatactcgctcaaaatggtattgatacaggagatttaggtctacaaatcggtttagaatacggaccaattgttatcagtcgcttggggaaacaaggcaataaaatacgttgttgtatcagccgtgctgttattgaatcagaaaatgctcaaatgcgatgtgatgggaatcaaactgctttgggtgaggcggcttacagacatgctcctgatgatgtcaaaaaattatttaaccatcatagaaaagctaatcaccttgattacaatgaaattattgagtctttggctgattctaaaaatgcctcagccacttccgtaaaagaagctgcctatgatagtgcttctacattaatgcagaaagcaagcacacaagttgtaagaccttattgtaaatga

SEQ ID NO: 68664 - DNA, 918 bp, Acinetobacter baumannii
atgaagctaatcgaacgttttatctcaaacgaaacagcagtgattaatgcattgttaaaccaaaaatctattccaagtcaagagattgctaaggatattgctgaaaagggagaggtagtatcttatcagtcaggggaatatattattaaacagggtgattacgatcaagatgtctattacattttggctggaaaggtagagctgcatattaatggtgttgtactgccctatgaacgtggtgaagatgtcagtgttggtgagttatcagcaattaatgcaagtcaagctcgtacagcatcattattggttacttcagaaactgtagctctcaagattaagccagatgactttcaaactattcttagaaaacatccagaagtctctatgtttttactaaaagatgtaagctcacgacttgctcagcgtaatgacttaattaacaagtgtaatgaaagacctaaactttttattattagtacagtggaggcattagaggttgcacgtcaaattaaactggatttcaatcatgacccaattgatgtaactatttggaatgctgcgtttgctccaggtacttatacactagaagcccttgagcaagctgtaaaagagtctgattttggacttgcaattatgcaaggtgatgatttgacaacatctaggggcgttgagtattcagcccctcgtgataatgtaatatttgaattaggcctatttatggggcatctttctagatcgagaactttgatcgctgtaccacaaggtggaaaagtaaaactggcctctgatttacaggggctaacgattttagattacaaaattgagtccgatcaaaaagttgatgtgattaacttagctacggcacttcgcaatcatatcaagaccttaggtcctaaaaaaattgtattatctcattaa

SEQ ID NO: 68665 - DNA, 636 bp, Acinetobacter baumannii
atgcaacaaagccatcaggggatgactccatctagtaaacacttgttggaaatacctattactgatggcacacatgaaactccaaattttgtagatgatggtgtgccttttatttctgcagaagcaatttcaaaaggaaaaattgattttgagaaaaagcgtggctatatcacgcctgaattaaatgaaatttacagaaaaaaatactctccaaaaattgaagatatttatatggtcaaatcaggagcaacaacaggtaaagttgcaatggttgaaaccacagatgaatttaatatttggtcgccattagctgtatttagatgtaataaaaataaaattttgcctaagtttttattagctgtttttaactcaagtcatttttatgatgctttagttttaaattggagttatggcactcaacagaatattggtatgggtgtgttatctaatattgaaattccttgtccccccctacatgaacaaactgaaattattcaatatttagatgctgaaaacatcaaatttgataaactcattagcactcaaagccaattaattgaaaaactgaaagaatatcgttcttccattatctcccatgctgttacaggtaaaattgacgttcgggagttctgttaa

SEQ ID NO: 68666 - DNA, 951 bp, Acinetobacter baumannii
atgcttgagggtgtaggtggtatgattttcagtgataaattcggaactgtagacccgatagttggctgccagttaccgagaatcatcatttgtttaaatgaagataaacttagacctgttgttagtaatatcttctcccttacgagttattgcgagagtcaattaaaagaaagataccagaattgcataataacagtactagccacctccccgaatgatattaaaatttcacctgattcaatagttgaaatttcgattttacacgttggcttattcaacatattcaatatccaaaatgcacactactatactgaaaatcaaattactattgaagtaaatgcagctatcaaacgcttcactcagcaaccagttaatacattaaacaacaatattgatagcatcggccaaaagctttctaaaatgcttgtagtatccacaacagttaatgatctatgtgagaacaacctgtttaaagatggagaaaccatcagctgcttagatcacaagggtaacccactcgtattcagctcaactggaatgccgaccgctgtcgaattgggatatgctatatttaatgctgatggtgagatcttaagtgttttacatgaaagtatcacacccaataaacttatagattttttaacttgtttgcataacatgcaaaatacggtagaaagtcattacgctaaatttatgtcatctaaagttatgtcctttctaaatggaaaaggttcttttagcgattgtgatgatattgattacgcaaaagatgtttgcaaggatctcctcggtcgttttgaaactcagatgaatgaaatcgtaccaagtaaatattttagtagcactcataacttaaaacatttaattgacatccagtttggaaaatcaattaaatattcagtgttagatttcacttctgaaattcaggatttctgtagacttcgagattaa

SEQ ID NO: 68667 - DNA, 1098 bp, Acinetobacter baumannii
atgaccacttcaacatcatttagtccaatcaattatttgattgatctagatactgaatatgaagctatgaaaaaagcattctatcagtccgttgctgccaccaaagctatgaatgcaggacgcatcaatggggcgttgagtgaatatgaatggcatccaagcgtttttctacccaatttcttatgggtggatctcgtagaaccattcatggaaagcctattgttagatagcaaagataagttgtatacgccctatttctttaattttatcgttcatttcacttggcgatatagcaaaagtatctatcgttttgatgattatacttttgaatgcttaagtacaagcaccgcagggaaatttttggattttagacttttactaaatttaccagagggtagtttatacatagattttgaaaaaccattggatttacaaggtaaaaaagtgcatggttttcatgcaatcttaaattttcaagaaaaaacattaaatgaaatcaaaaataaatcccctaatcaactaatcatactgttgaacacgcataatccttttagtaaatcatcactaaagtccttagagccactaccagtagttatcttcgatattcatcgatcaggaaaaataagtcagcaaatttcatatattaatggcataaaatatgaaacaaaagacgagcttaacgaccatctctctccttatatttccctattgactgcactttgtaccgatgaaattgaaatcgataatttttctaagaattcagtgaaacctgttgttaagcagaagccatcttataaagacaatgagaatctattttggagcaaagggaaaggaggaacgtaccacgctacatctccaacaaatcctaaaaactggagagttggtataacgtatggcgttaattacagacaagctagatccgcacaacagatcgcagaacaaagtaaagcaagattaattggtcttcactggacaacacatattgttgattttgaaatcagattaaaacttatgcctccaaaactttcaaacgaaaatcatatacatgagcagttggaagaatttctgcaacactatgatttcgctgaaaacttatag

SEQ ID NO: 68668 - DNA, 2253 bp, Acinetobacter baumannii
atgagtgctcaaaatctggttattgttgagtcgaaaaataaagtctcaaaagtccaaacctatctcgatcaactatacggaaaatcttcgtttatagtttcttatagctctggccatattcgtgatttaccaactgatagcttcggccttaccgaaaattatactccaacatacgtttttagtgatggtggtgcaagacgtgtagctgaattaaaaaaattagctgtaaatgctcaaaatgtttatttggctacagatgatgatcgagagggtgaagcaattgcttggcatcttcagacagttcttaagtgtaaagaaagagcttttcgtgtagcgtttaacgaaatcaccaaagcagcattgaaatcaacctttgataatcctcgttctttaaatatgaagattgtagcagcacaagaggcaaggagatttcttgatcgaataattggctatgttggaacaccagtttttactgtactttgcggtgaaagacaaattgcaggtagggtgcaaagtagtattgttgtttaccttgctgatttggagagacagatacaatcatttgtaagtgttcatcattttggagttagttttttatttgatgaatggacagcaaattgggaaacagaaaactttgtggaaaagagcaatccatattttatggatagagggattgctgaaaagatagccttacttaaaaactttaatgtcatttcctttgaagaaaaacctgtaaaaagttctcctcctgcaccctttactacgccaacttatctacgggctgcgcaggttcaatgtaagttaaaaccaaaagaagcaatgaaaattgcacaaaaactttttgaagatggccatattacatatcacagaacagactcaccaaatattagtgatgacgcattttctatgatacaagcctttgctttaaaacataagttaccagtattaacacaagtaagaaaattcaaagctaaaaaaaatgcccaagaggggcatgaggctatacgtccgaccgatataaatatatccaaaatttcagaagatcctgttttacagcaagtgtatcaaatgatttggttacgtgcagtggcaagtcaaatggaagaagcaacctatacttcaagatcggtacgactcgtagcagatcagaaaattgaaaatagggatgtatttattaaagcaactggccgtaaattgatagatcaaggttggctgcgtcttacagcaaaaacaagtttctctgaaaatgaacaggacgatattaaagaagatgagcaggaactaaacaatcctgttccattattagcagtaggagctgatgttagggcgacatctggacaagttaataataaatctactcaaccaccaagaagacatactgaagcaagtctaattaaatttatggaagattctgatataggtagaccatctacttatgcagtgatcgtttcaaaaattatcgagcatgggtatgtagtaaccgataataaaaataaactacatgcaacagatctggccatgcggttaagtgcaaaagtcgcagataagtttgacttctgcaatctcacctatactgcgggattggaggggcaactggatttaattgcacatggcgagaacatcagtcaaagactacttaaagaagctcatcagaccattttagctcaagctcaaaacgcctctaagttgttagaacaagatcctaatactcaatactgtagtaaatgtcagtcagctttagttctcctcactggagcaagtcagaaaacatactttaagtgctctaacttggcttgtggacataacatgaagaatgagaacggtaaggctatcgacaaagaagataatgttacgccattcaactgtgtcgagtgtagtaaatcattgatcattatgaatggagctaaaggtaaattttttggctgttcaggtttctttaacaagcgcaataaatgtcgtgcttcatatccaatgcttgaaaatggtgaaccagactttgctcagtatgccaagagaaaagaacaacttggttcacagtctataggatcagtcgatacacctaaaacaaatgtggcaacagtttcttcaaaatcaaaagatcacacttgtcctgaatgtaataaaacactgagccaaaaaacaggtaaacgttcaacagatggaaaaaaatgggaaatgtggatctgtgagtgtggatctaagtattggggtgcaagaaataaaccagacttttctaaaaaagtttcaagctaa

SEQ ID NO: 68669 - DNA, 387 bp, Acinetobacter baumannii
atgaacatacatacattaagaattcagaaccctttgcttactgataaagcctataaaggagtggttggtgtaattgctattgtgcttataggcctgatctatttgtttgcaaacgaagcatataatggtgttttactaaagcttaagctgtgtcttattcttcagctgatcctcgtcatttcgctgcaatttattgcttatgtcgcagacaaaattacacatatcaaaatctattcttttttgggttttgtccttttatttttcagcagcttttatcttgataatttcttttacggtaatgtagcaggcaacttcttgcgttattacgttttatttgctgcattacaagtcttactaatttggctatcatctaagaatgaggattaa

SEQ ID NO: 68670 - DNA, 855 bp, Acinetobacter baumannii
atgataaaaaatagtgtaattgggattgcagaacatggtcagtcaattgcaagagagagagaacaacgtagactgaatcaaatgcataaagatttaaaagataacaatcctagaggggttatgtttgactttatggcaactgatgcaatttattatgggtattatgagtttttctctcaaaaaaatttatctggattaaaacaatggttttatgtctccagtttactaagagcagaaagctgcaagtattcgggaggatactcattatctactccggatagatttttatttcccttattaactgataatcgagagattctggaaagattttcccaattaaacaccattaatttactctggggagaatttgaaccaagttaccaagaagctaaattcaaaccatcaaaagatgatccaagatttagaactcatgctttacaagctgtacttcgaaatgactggaaagactatcaagaaattaaagcggtggctaatcaaaaaattaataaattaagagaagtcgtacagtttgaatttggaatctatgatgcaatttatgaaaaggataaggataaaatcatagagatagtacaaactttattaaatccaagagtacacaaagcttataataaggattttggtgaagagtttaatggtgagatttggtcacatcatccagtcatgtttactaaattagcatggatgaatggtctagaaatcgaaattgataatcctttagtgcctatggaacttatgccaattaagcccttggaacactacgactatcattatgattttttagatccgaattggaagccgcagagtttttgggggaaattatttggtaggaaatag

SEQ ID NO: 68671 - DNA, 171 bp, Acinetobacter baumannii
atgaataaccgcatgtcaaaagaagattttttatcagttttaagtggcttgtttgactgtcatacaggtagtgaccatttcgatgaagaagcatggcttgagtgttgggaaaatggcgaagacccagtagcagcattctacgatgaatatcctgaatacgatgagctttaa

SEQ ID NO: 68672 - DNA, 294 bp, Acinetobacter baumannii
atggagtggattagtgttgaagatcaaatgcctgaaccattgcgcaatgtccttgttttgataaatgcaaattcagcaaaaaaccaaaatcagatggtcgccaactttgtgcctaagttcactgaggaaagtggttgtgatgaatggtcagaatattgttctgaaaaagatatgcactttgtgcctgaaggttggtatggcaataccgcatatatgggtgatgaatattctagttatttcttagatgagaaagtaacccactggatgccactaccagaaccaccaaagaattag

SEQ ID NO: 68673 - DNA, 324 bp, Acinetobacter baumannii
atgaaaaatgctaccctaaacaaaggcactatagtgcttgttaatggcgttccctttaaactagcgaacgaggttgaaacagagcaaccattagattttttaataaatgcccttaaaaatgacccgttaagtaatatacaagaaatcactaatgctgtacttgatgcccaacgagagttattgaaagttaatggctcgatggtaaagcaagttattcaagggtatgagcgcacagaaaagctcagaacagtcgaaactattgctaagcttgattgtgctaaagaaaaattaggttggctttgggattgtttcaaaaaccaataa

SEQ ID NO: 68674 - DNA, 246 bp, Acinetobacter baumannii
atgtcgttaattgatgagatgattaagaatccaaacaacattgttatggttggttacttggatgagtctgccgaccacccaagtagactagatattagttttgataatggttttgaatatcaaattgagggtgtgcctagagaattatatgaaaaacttgagaaatctagtcagcaatcaactttttttacaaccgaaatttattatcagtacaaagataaaatcaaaattattaaacctgagtaa

SEQ ID NO: 68675 - DNA, 243 bp, Acinetobacter baumannii
gtgcaggttaaaaaaaggagaatggaattggataacgcaaaattaccaatcaaccagattattgctcgcatcaatgatgctgcgaaacatggtgaagctttggtgctaatagccgaagaagtgaagattctttctaaagacattggcgacaaagtctttattcctgtacttacaaatgaacaagtcgttcagttggtaaaagaaggaaagctggggcagaaaattaataacaccaaagattaa

SEQ ID NO: 68676 - DNA, 384 bp, Acinetobacter baumannii
atgaagccagaacagtttattcgtgagtgggggttgccagaggctaaacggattttaaaagaagcacctaagcattctcaattcgttattccttgcttagatggcgagatgtacttttcaaaacgtgaagatgatggcaagtggtttaaatggagtaatggctataacaaatggcttgagtatttcgggaaatgtaatccgcttgatttagcttataacctttccgacctcaagcgtctggtggattcagttgatttagtaattagcttaggcggattaaaagcagcacgttcagaagctcataaagattgttttgtatataaccagccattgctagccgctattgcggcatacgaatcaatatacggaggcggggatgagtaa

SEQ ID NO: 68677 - DNA, 276 bp, Acinetobacter baumannii
atgagtgagtttaaagtcggggattgggtcaagataaaggatgattcttctgcatggatgggtaaggtagcagctatagagtacaagccgtgtttcgactcaaagtggaacagatgcgagattgagattcttgtttttgaagatggtacgaagttgggttctggatgggcaattcatgttgttaaagcagcaggccaccgcattgataatgatatgggcgaagacttccccatagaaaaccacatttcgccgaattgcaaagtggaggatgtttga

SEQ ID NO: 68678 - DNA, 183 bp, Acinetobacter baumannii
atgtatagcgatcaagtaatcaatgaacgtttacagcaagaattaattaatgcagttaagacagtgcaagatgaaatgaagatcaatttcacccatgtaaatgttcagtttgatatttacggtgatcaatcaaaattgtcttttgaacttttaccagaagaatattcgagaccaaatgcgtga

SEQ ID NO: 68679 - DNA, 282 bp, Acinetobacter baumannii
atgcgtgatgcaaagcgacttgctgcaataagaaggttgccatgcgttaggtgcggctatcctcactcacaagcggctcattctaattctggtaagcatggcaagggaaaaggaataaaagcctcagatgcgtttacagtgcctctctgtcataagtgtcatttcctattcgacacataccaattaggcacgagacaagagtcggaaaccatgtttgagcggtggttagaaaagaccgagttaatgttaaaaatagatacaaaatcagacgatgttttctaa

SEQ ID NO: 68680 - DNA, 330 bp, Acinetobacter baumannii
atgagtggttttacagttgaagatccctatgatttagacatttctaaaatgactcttagagatgcttatgctctaaaaggtcgcctaattgataagattgaagcactagaaaaacaggaaagtgttcaaatattagattgtgaaattgactttgaacaagtccatgtagctcctagagattatgacggtctaattagccgaatagttaaagctatagagcagaatcgggctaataatgaggatatctctagaattagagttattccaaaagcagtaactaaagtcgattttgagcagaagattaaagagcaacaagaatacgattcttaa

SEQ ID NO: 68681 - DNA, 207 bp, Acinetobacter baumannii
atggaaaagccaacactagaaacatataaagccttcttggaggaaaataaagaaaaatatggtctagttgagtatgagtttgtcaatcaactagtagtggtgttcaaattcaagcgcggttatgaagcgaatgttaagtacctttttgatgttcgccagaagcctgaaagtataactggtggaaggtcagaaacatttgaagaataa

SEQ ID NO: 68682 - DNA, 513 bp, Acinetobacter baumannii
atgcctcagattttaaaagccttccatctaactgctatgcagacgggtcttttaaatatgattccgtttggtttagctgccgctttcatgattgtttggggtgtacatgccgataaaagtggtaataagagccttaacacagctattccgttatttgtgacgagttttggtttgctccttactatttttacttcatctttaaccttgagcttacttttattctcactcgttttgatgggtaactatgccattaaaggtcctttctgggcgttggtttctgagcgcttaccgcctactttagtggctgtaggtattgcagcggtaaatacgattgcgcatatcggtactgggcttatgaactctattatgggcatagtgaaagattactcaggtagtttccctgtttcacttctaccgttatgtattcttacctttattggcgccatgattgcattgtatttaggaagaaaaccaactttaccgaaagcacaaaaggttcaaaaagtggtttag

SEQ ID NO: 68683 - DNA, 870 bp, Acinetobacter baumannii
atgagtcaggctttaaaattaattagttttaaaaataacgatatttctgaaattaaagaactagatttagaaactatcaaatcaattaaaaactttgaaaatattttagaaaaatttgaagaaagattttttttactttattgcattcatgaaaactgcaattcatttagcaatgaattctcactatatacaaatagtttaagcgctgagaaatcacacattgcaagtatcgattttataaaaattaatagaatattcggaaaaggattaataaatatattagcagcatttaaaacaatgctcgaacaccttgaaaccagtataaaaagagagttcggtgaggaatcaaaggaatttattttctttaaaaaaattcaagcagaggaatttgataataatttttcttattctttttgctataaattaagaaactatatgcaacattgcagtattccaaaatttgagttttctctacaatacatccgtgatgagtcagagatgccacaggttacttcaaaatttcatttcaacagagatgacctaattaaaaactatgatagctggggaaaaccagtaaaaaaaaatttactattgaaagaagacacattttgtgttttcacaacattaaatgaattcattaactcattaaataaaatattttttaaaatgaaagatatatttcaatttaatcaagttaaggaggcacaagaatatattatttctctactgaatgaaaaagaggattacataggacaagattacggtataggaaatcttgagaaagaaaaaggactaaaagctaatatgataaaaacttccttattaaaaagtgtcaatgattttaaagaattgattaattctaattactaa

SEQ ID NO: 68684 - DNA, 1224 bp, Acinetobacter baumannii
atggctttaccaaagttaagatttaaagagtttggtggtgattggaaattagaaaatcttggagatagctttagcttaatttctggatatgctttcccgagtacatcatctgttgatagtggtgctaagtggttaaagattgctgatgttggtatccaggaaatgacaccgaataatccatcatatttaccgttaggatatttggataaatattcacagttcatagtgaacaagaatgattatgtaattgctttaacaagaccaattttaaataaaaaattaaagattgctcaggttggcaatctatatgatggcgctttgttaaatcaacgtgtagcaaagatacatagcaaaaataataatttagattttatatattcattattacaaagatctaagacagtagaggaattagaaaattcgattgcaggtacagaccctccaaatttgtcattaaatgatgttaaagaaattaagctagcttttccatccaaagaagaacaaaccaaaattgcctctttccttttcgcagtcgatgaaaagattaaacaactaactcaaaaacacgagttactcattcagtataaacaaggcatgatgcaaaagttatttagtcagcagattcgttttaaagcagatgatgggagtgagtttggggaatgggaggataagtctttaaacgaaattgcttcaaagcaatcaaataaaaataaagatgatttgataactgaagttctaacaaactctgctacacaaggtattatcaaacaaagtgattattttgatcgtgaaattgtaacggaatcaaatctgaatgggtattacatcgtaaatttgaatgattttgtctataacccccgaatttcagtacatgcgccagttggaccaattaagcgtaataagaaatgtttaggtgtaatgtcacctctatatactgtttttacagtgaaagagggaaatttgacatatttagaatatttctttgatagtaatttttggcatgattatgtcaaaagtgtagctaattcaggagctagacatgatcgaatgaatattataaataaagacttttttgatatgcctattctttatccttgcctagaagaacaaaccaaaatcgctaatttcttgtctgcgattgaccaaaaaattgaagttgtggcacagcaaattgaacaagccaaacagtggaaaaaaggcttgttgcagcagatgtttgtttaa

SEQ ID NO: 68685 - DNA, 459 bp, Acinetobacter baumannii
atgaaaaaacttatattagttgctttaataacattcccaatcttggcgcaggctcaaacttttaaatatcaaaaagatatttctggttttaaacactataaaggaagcgtgactttaacaggaacttactcacgtactttagaccctgaatatttagactatatgggcgatgcgatttgctttgaaccaaacaaaacatcatcggctcttatccctcgtccaaaaggtgatgaacgaactgcatggttctgttttagcaattttgaacaagccaaaaaaatatttcaattgccagataccatcaaaaaagactattgcaagtatgaaggtaaggcaacaattaccattaacgattacaacttatttgtcgaagaaacagaaggatcagacttaacccaacttatgtcagcaaaaaatattacacctgcgaaagcagtcaaatgtgaagttaataattaa

SEQ ID NO: 68686 - DNA, 594 bp, Acinetobacter baumannii
ttgacagactttcaagaagatccaattgtttatgcggaatgttttaatttgttgctaagttttggaacaaaggaagttaagcaaaaaatattatatgtgattaaaaatattcctactgctttatggaatgaagatctaagagaagataaaaagctactcaatttatttgagcatgatttaaatttagatcacaagttttctgaagcttttgctaattggttagcttttagtatgctcagtaaagatgctcatcaagataaagtgtgggtattgtttcatgtaattgagcgaaaaattcttgataagcataatgtttatggaagtttaaaaaagattttctttgaaaacaatccaattcaatggtcaagtgagagtgttcaatatgtatcgcgattctggacagatataagtgatattgatgttcaacacattattaacaaattaaacctctggattgattctaaagaatgggagcaaatcgaatggctaacggaattacttgatgatgtaagtttaagaagtgaaatattagaatctagagttaaagaaaatattgaaagtgaagaaaatccaccagaggtaaaacatatttag

SEQ ID NO: 68687 - DNA, 240 bp, Acinetobacter baumannii
atgaagtataaattgattaatcactctaagaaaattgaagctgtatatgagtttgagcaagaaagtagtgcgagagtttacagcgattctgttgataatgtagaactcgctttagtcccgggagcttatttaacagaaattaaagagctgatgattggacaggaggctgaatcactagagggtgaggagattgatggctgtggatgtggaattgatcatgtacatacatataatgattag

SEQ ID NO: 68688 - DNA, 564 bp, Acinetobacter baumannii
atgtttaataaacaaaatattgtttgcttctttttggttttattttcactgaaaagttatgcaaaagaagattttaatcttatttcacaatgtacggacgaatatgagacaagttgtaatgttgtgctaacagcaaatggtaaaaagaatattttattacgtgatataaaatcaccaagtattgaaaaagttagtgaagacatctttcatgtagtaagttcatgtggttcaccttgtgtaggacattactttattggaaaacatgagaaagactatactgaggagttaattagttttgatattaagtctaaatgtattatagaaagtgatagtcgtaaaaagaaaatatatgcaaaaaagatgttcactaataatagaaaaactttaatagacttaaatgataagaaattcaatattcttccatcaaaatttaattattacagtgattttagtgagatgtctcattttgataatattggagagctcaatttaattgcaaatgattatggtaaaattctatttaaaaagaaaatccaaaatccttgtggaagtaataataaatga

SEQ ID NO: 68689 - DNA, 2361 bp, Acinetobacter baumannii
atgagttattcagaagaatttataaagtttgttgggacggtggcaggagaagctggaggatgtagtcccaccacttggaaagttgtggcgcactgtataaagaataggattggttttgcagagtggattaatgcaagaaatgtcagtgatattttaaaaaaaaatttcgacgctattagcgataaaaatccaccttttaagaaagctgtgacagaaatgcattctgggaatatatctgatcatacgcaagatattattgatgcaatatcgcccatttatcagggaaaggaagaagatataacaaatggagttgtattatattatagtcctaaagctcaagcagctttacataaaaaaaacccagaaaaatatacttctctaattccagattttgccaaaagccctttgacagaagaagtaaaaataagaggaacagaaaatgatgatatgcgttggtatagatataggggtacatcacgcttctatgtccaatttgttgataaaagtgcgaatgcgcttgttaattctagtgtgagtattgggtacaaaaaaacgaaagtagtgccagcgttaagtaatttagttactaataatcaaggtaaaattagatcatttcttgtgaaagatggttggggagcaagatttactattgatggtattcaagcggttgataataataataaagaaattttattaattgctgatgggaaaaatcattcttcggttatagtcgttgcaagtggtagtagtggaataaaatctcaaactgatatacataaccaacagacatcacctagtcaaaagcaagaacctctgcaaaaagacaccaaagctgaagtaaataatgcaaaaaaagcagaagatagtgaaaataatactaaacagaaaaatgttaattttagtattaagatcattgatagtgaaaataaggtaattccaaatttttcctattttctaaaatataaaaatgctgaaaagaagcatagtgtaggtattaacggtattgaaaataatttagtagcactaagtggcgaggagattatagttttaattagtgggctggactcaaaacaagaaattattcgttttacagtacaagagggtatgggtgaaaagactataaagcttaatttacatacttttaacatcctgttcagacatagagatacgaaaaaacccataacaaatttgaatttaattcaaaaatatagaaatcagataaagcaaaaaaagactgatggtaatggaaagataactgttagtgcaatgccaggattcgaactgaattataaattaagagatgaacagaatttattaactattaaagttgataaaaataaatcacttcgtgttatcgatgttgattcttcagcaatagagcaagcatcaaaaaatataaagacagggactaaagttgtagaaatatctcaatctaaacaaccaattccttcaggtaaacataagcggccagttgataagccagttgaaacttatgattctacccctaagagagatgaaaaagtaaaaaccagtacagaaggccatcctaaaactattgttatagataatagtgatatagagtttaaaattttaacttatgacaaaataactaagcaattagttagtaattgtgaatatataattgagtataaaggaaataaaaacactcatataagcggtgttagcggtctaggtacaaaaatacataagggccaagccggacaaacaataaaaatatttgaaaatactaacctattgtctcaagtaatattacaaaaagatatgaaacctatatctattaatgttactaagacagattcatctcaactaaaagttagcggagaggaatggtgtaacttatttttacaaagcaatagcttaagtgatttagctgagcctttcaaaaccaatgcttcaaaatttattaatggtatgaaaaatgccggtatcagtgtcgtaattaatacaacttggcgtccatctgaaagaagttatttaatgtattattctacagcgatagcaagaggagaaattgctgtagataaagtacctccatttcctggagtaaatattgattggacacataaaggaaataaaactgaagcaataaaagcagcaaaagcaatgtataaaaaatatggtataggcaagaatccagtaggtaaaccaggctcttcaaaccataatagaaaaaaagcagtagatatgagaatatctaattatattggaaaagttgtgactattgatggtgaaagtataaaaattacaagttgggcaacattaacgcaattaggcaaaaaatatggtgtaatttggtatggtagtaaagatgcacctcattggtcagagacaggtagataa

SEQ ID NO: 68690 - DNA, 561 bp, Acinetobacter baumannii
atgtcagatgaataccctaaagctttatatcgtggcgacactaaatcatatgaacatgtgattgctgatggtgaagatcatgaacaacatttgcgtgaaaaaggctacgttcattactcagaactgaaagaacctgaaatcgaagtagttggtaaggtggctggttcaagtggtgaacttaagaaagttcaagaagaattacctgaagctttaaagaaaaaccaatttctagaagaacaacttgccactgcaaaaggtaagtatatttcccgaattaatgatcttcagttagaaaagcaaaaacttgaagatgaattaaaagcattacctgcatcaacaggtgttcctcaagaggtttatgacgctgtatatcaagagcgggaacacctgcttaaagagaatgcgcaatataaatactctgctatgagcgcagcagagttaagaactgtacttggtggcaaaggtattaaatatggttcaagagatgaaaaacctgcattagtaaaccttgtacttgaaagcctttacccagtagaggttgaagatgagcaagaagaataa

SEQ ID NO: 68691 - DNA, 372 bp, Acinetobacter baumannii
atgagcaagaagaataagcttatttggtttgataccccttttgaccatatccgttacaccctagttcaaagcaaagatcaaatgaaagaagctggttataagaaatcagaatttctttcaaggaagtgtcctgctcaagtaacgtttggcaccaataagcacggcaaaaacgaggctgttgttcagctggataatgttcagtttaaaagccgaatcgttatctttggtttgctattgcatgaagcagttcacatctatcaagaacttaaacggttaatggctgaaacccatgttagcgctgagtttgaagcttattcaattcaacgaattgctcaagacttattctgggcatttgaagaaagtgagaaataa

SEQ ID NO: 68692 - DNA, 480 bp, Acinetobacter baumannii
atgtcatggactaagcggcaaattatcgaacaggcttttgaagaaatcgggatggctgcttatgactttgatttgcaaccagaacaagtagaaagcgcaagaagaaatatggatgcaatggcagcattgtggtcgtctaaaagaatccaacttggctatccacttcctactgaagcagatagtagtgatctagatcaagatagcaatattcctgattatgccattgaggctttctatctaaatttagctaaacggttggcttcaacagttggaaaagcacttgcagctgaaaaagtaactcttgcggacgagggctataaaaacctcttacgaattgcagtttctcggccaccacaaatgaaatatgcatgttcattgccagcaggtgcaggtcataaagcatgcaacccatttattgttaatcaacaagacaatgctgttttaacacctaatcaagatgcggagttcttcaatgagtaa

SEQ ID NO: 68693 - DNA, 453 bp, Acinetobacter baumannii
atgagtaatcgtcttaatgaaactgatgccttgggtgttggtgaccagtttgttttatataaaggtaattgcacagactttcgctcattacctcaggatatcttgctgcaatggatacttgagaatattcctgtagttaagccaattgctgcaattattcagcccttcaatcccaatagcgactttaacattcaaatcgaaaacaatgcagttggaacatatttagtgatgaatccaactgtatcaatcatgaatgggattattacactgcccttaattgcgaatgtaagtgatggtcaagaagtgctggtaacaagctcccatgaagttgaaaacttaacaattgcaggaaatggcgctgccttaattggaaatccaaatacaattgctgctgatggattctttaaattgaagtttgatcaactttcaatgacttggtatcgggtggggtga

SEQ ID NO: 68694 - DNA, 1401 bp, Acinetobacter baumannii
atgcaaatcccaatattaagtggaatctttactgatcaaaattcagattttcgaacatcatatccgcgcaatttaataccagttccaaaagaacaaggtctatctaatgggtatttacgtccggcagaaggaatcgagcatctagttgatactaatggaatagatagaggtggaattaactggaatggtacatgttacagagtttctgataattatttaatccgtgtaaatatggataacacaattacgaaacttggagaagtattagggacaggttattgtaactttgactactcatttgattatttggccattaattcaaaaccatatctatatctttattcaccaagtaaaggattaaaacaggttactgatagcgatttaggtaatgtatatgacgttacttggatagatggttacttcatgacaactgatggcgagtcccttgtagtcacagaactaaatgaccctttttctgtaaatcctctgaaatatggctcatctgaggctgaccccgaccctgtaaatgcgctgtttaaactccgcaatgaagtgtatgcattaaatcgctacacaatcgaagtgtttgataacgttggcggtgaaaactttccattcagcagaattgatggggcaatgtccacacgtggcaccttgtcagcaaatacctgttgtatgtttattgaaacaattgctttccttggaagtggtaagaatgaaccaatttctgtttacttgagtgcaaacgggagcagtcagaaaattgcaacccgggaaattgaccaaatcttaagaaattattctgaagatcagcttgcaaactgtttagttgaatctcgagtaattgatggacatcaatggttatatatccacttactagataaaacccttgtttatgatgcagcagcatctcaagccacaaaccagcaagtctggttttttttatgctcaggttttggtgaaaatcgatatcttgcccaaaaccatgtgtggtgctatgacaaatggattgttgggcatccaaatcagcataaattgggcgtgctttctaatgtaaatggtgagcattggggggctgtaactgaatgggatttcaaaacatcaattatctataacgagtcacgcggcgcaatattccatcaacttgagttagttgccttagctggtagatgcctatttggtgaaaacccaactatttgtactcaatattctattgatggtgttgagtggtcaaatcctaaatatatatctgttgggaaaacagggcagcgtgataagagattagtttggtttcagcaaggccatatgaataattggcgcatacaaaaattcactggaactagtgaaagcagattatctattgctaggcttgaggcgtacatagagcctttaggagtttaa

SEQ ID NO: 68695 - DNA, 369 bp, Acinetobacter baumannii
atgactattgttgacccaaagccgcccttaagaagggatcttgaggctatgtgtggtggaaatcaacgcctagttaaggcttttgaaaagctttttgaactaattcctaaagaactaaataactcaaatgattctagttctgacgctcaatttattgctgattttgcgcaatctagtgcaaatcaagccaactcggcaattagtgatgttgagcgattaattgatttagtagctacaagtccagctccaataatccacactcaagaacttatcgggatttccccccgctatgaagtcacagtttcagatccaatctatccaatttatcagggcgaaagttgtccaaattataatttagaggtcatgtga

SEQ ID NO: 68696 - DNA, 339 bp, Acinetobacter baumannii
atggcagcatcagtaaaaccaaaggcttttgtccctgcaaaatttttagaaaatgcattaacaacccaattttctgcagataattccacagtacaaattgataaatgcactattacaaatacatcagcaagtgcagtgacgtttagtctgcatctcgtaagcactggatcagcaggaacatcaaaccagattattaaagatcagtctgtagcggcaggatcggtatatctctgcaatgaaattgttggtcatattcttggttctggtggaagtttaagtggcattgcaagtgctgcaagcgcactagtaatttgtgtgtctgggcgggagattacataa

SEQ ID NO: 68697 - DNA, 648 bp, Acinetobacter baumannii
atggtagcagcagcaatggtagctacagcagctgtaggagcggttgcggccaatagatctgcaagtgcacaaaagaaagcagcaaatcaagcttcccaagctcaaacagaatctagtcaagccgcaattgatgaacagcgcagacagtttgacgctattcaagaactaatgaagccgtatgtgaatgctgggacaactggtttagcagggcaacaggatttattgggccttaatggtactaataaacagcaagctgcaataaacgcgattaataatagccccgcaatgcaaacctatttacagcaaggcgaaaatgcaattttgcaaaatgcctctgctactggtggcttgcgaggtggtaatacccagtctgcattgtctcaatttagacctcaattgcttaatcaattagttaatcagcaataccaaaatttaggtggcatgacatcacttggtcaaaatgctgctgctggtgtaggtaatgcaggcatgcagtctgcaaataacattggaaacttaatgcaacaaatgggcgcagcacaagcaggtaatgccatggcgcagggtcgagcatctgcaaaccaatgggcaacaattggcaacttggcaggtcaaattggtggttattacgcaggatcaaaattctag

SEQ ID NO: 68698 - DNA, 1317 bp, Acinetobacter baumannii
atggtacagccaattgattacacccttgatgtggtaaatccagtgcaatcatctttacagggatttactgggggaatgcagcttggaatggctgtagaagatcgtaaacgtgcaatagcacaagcgcaacgtgaccagttagccaaagagcaaatgaataaggatttattcgatttgtcgcaaaatccttcttatgaaggttatacgcaggttatgactaagtatccacagctttctgagaacctaaaacgtgcctatgacactatggatgcgggtaagcaaaggacgactttggggctagcatctcagacatatgcagcacttgatagcaacaatcccgatattgcaatgcaaattttggaggatggtgcaactgcttatgagaactcaggaaacaaacaggatgctggtgtgctgagaggttataagcaaatgattaagaataacccacaaatgggtaagacaacaatcggcatgctcctagcctccacaaatcctgacaagtttgctgatatttttggaaagcttggttcagagcaacgttctaatgaattgcaacctattgcagtaaatcaagcaaatgccaatgttgcgaaaacaacagctgagactgataaaattaatgctgaaaccagtgatattccattagctgcagaagatcgtcgaactggtgttgagaatcaaaacaaaaagattgaatatgacaatcaatacaactatgacaagttgagtcaggatcaacaacagttctatgatgacttaagccaaaaggaaagacttgaagctgcaaagttaaagtctacaaaggcagaaacacctgttcaaagagttgagcgtcttgaaaaagttgaaaactattctaatgctgcgaaacaggctgctgatgcatctaaccttgcggctaaacttactcttcaagctaaagagaatagtggcccttattgggatcgcttaatacgaaatgtgcctggcacttctgaaaacactttcgcaaaagatattgaaactttaaagtctcaagtcttcctagctcaagtagaaaagatgcgtgggttgggtgctttaactgataaagaaggtgatgcaattcgatcttcaattgcttcgcttgacattaatcagggtccagcagcagttcaaatgaacctttctaaaatcgctcaacaaatgtcagcagcagccaaaagtgctaaccgtaaagctcaactttatgcgactaaagggcagggttattcgccagcagttacagaagcagccaagacccttggtatttcaccagctgaagcgcagaaatttgttaatgagaatggcctttaa

SEQ ID NO: 68699 - DNA, 1119 bp, Acinetobacter baumannii
atgaattttgattttaaaatattaactgacgaagtatctagggacgacttatttacagataaaacccatgaaaaatcagctgatactttatttaaagttattaatgcttccgaaaaaaatattactataggattagaaggtgcttggggagcaggaaaatccactgtaataaatatgttcaatcaaaaattacaacaagataaggatcagaaaacattatttttcttgtttgatgcatgggctcataaggatgacccactaagaaaaatttttttagagtcactcattgaaaatataaaattagaaaattcggataatcaacctttagataaaactcataaagaaattattggaagagttaaaaccactgatactacagtacataaaactgtttctcccttaggtaaacgcttagcttttagcgcgatgattgtccctttaggtactgttttaataagaactgtaaaggttgaagacttgggattgtttttatttcataacactattaattggatgttttgctttagtttaatattagttttagctcctatattagtgatggtacattggtttttcatgggggaagatcaaattcctgaacagaaaggatttttaataggtaagaaaaaaaattgggatttttttacaaaagaatcaactgaggttataaagcaagaaacaacagaatatggagagaaaacctctatcgaatttcaaaaatatttcgatgaaatcataaatattgcatttaaatcatataattataagcaagttattattgtaattgataatttagatagagtagacccagagcaggcaaaaagtgtttggtctaccttgcaaactttttttcaaggtagatcattaactacaaatagtactcaaaataataaaataatatttgtagtaccttatgataaagagggtttctccgctatttggtcaaaaggaaaaaatgaatctaatgatgatggaattgctagttcatttttagataaatgttttcaagttcgtgttgaagttccgcagccaattagttcagggtggttaaattattgtgaacagtgtattaatcaagctttaattggctggagtaaagaaaaaaaaattagaaactaa

SEQ ID NO: 68700 - DNA, 282 bp, Acinetobacter baumannii
atgagtacgcgtggggaaatgccatctatggatatagtggctgatcgactgcatttaaatacaagaaccctgcgccgtcacttgtcagctgaaggaatgacttttatccaaattcgtgaagaggtcaggcaagttctagcagagcaatatttggcgttaccaaaagcttcggttgagcaaattgccgaatggttaggttatgcagagcctgccagctttattcatgcttataaaagatggcatgggaaaacacctcatgccatgcgattaaataaccaataa

SEQ ID NO: 68701 - DNA, 522 bp, Acinetobacter baumannii
atgaagttgacgaatgatcaaataaaagcaattcaagatattgaaaataattcggtaatcatggcgtgtccagggagtggaaagactaccgttcttattaataaaatgagtttatgttgtgaaaagttaaaaagacataatggaataataggattatctttcaccagaaaatctagtgaagagttgagaagaaaatttcaaaagaagacgataagttcaaatctcaattatctaggtactatagatggctttctgatcaatgaaattattagaccttttttgccaaagctatggggcaatgagaacgatgatattgagatcgtaagtattttatcggaagaagaatctattccatttgtacaagagtttgcgaatggagaaatatatttaaaagatatagaaaatgataatgcttttaagggattatttttaagtggaaaaatatggcaaagaacagtaacacctttagctttgtttgtaggcagagtaaaacttgaagtgcgacataaaccacctaattaa

SEQ ID NO: 68702 - DNA, 231 bp, Acinetobacter baumannii
atgttagaaaagcttttatattcattggggttaactatttctttggttctattagttagctgcactaaacaacaagctgaaactaaaccgcatcctccttcagttgaagagcaattcatgcaagctagtcagcagattgatacgatgcttaatgctctagagaaccgagaagtagctttgaatataaagcgagacatattgtgtaagacatatcccgaggtcgagtgctga

SEQ ID NO: 68703 - DNA, 981 bp, Acinetobacter baumannii
atggcaaatcttgtttttaaatttaactgggaccatcggccattcccatataactctgcccaaggaaagcggcaatttatgctgccgtttgcatccggaattcccaatttagcaccagcattttcacaaatcacgaatattcctaatatcaatcctgcttcgagagtcgttggaactgcggttggaaatgtaatggaagtgggggcatttggactaggtctattacaagatacgaagtatatttcaacaactgatgatttgagtaatgtagagaatggattctattctattgagcaaggtggtcatgcaggtattttaattcgtcaagctgctgttcaaggtaaaacattaatgggaattattggttttccttcagaccctgtttcaagtgctccattctattacaaaattaatctaagtaatggtaaaactcttcaatctcaacaagcatataagtatgtctttcgaactacgcaaaatacagcagttgacggaaacggttttattaaggcagcttctccaattgtaaagttatttgcttataaaattgagttgaatgatgacgcatctaagcagtcgcttgactatgaaaaagtaggcactggcgattacttgctaaaaggttcacttggtttcgctcaggaaggttggtatatcgaagtccctaaagatgccaatgggaatactgtggtagctgttgaatattcaactttagaaaatggtgatctttccatcaaaacttacaagcgtaagtttgatttcgaacttgcggcagttatagcagatcacgaaaatccgatggacattccagagggacgctggatcgatattcgcttgcatgaagagcctgaaccagagcctgagattattcaaaccgaaacacctgtggaattccaaccaacaaacttatctgaagctgtagctgctgcaatggcaggggtggaacctccggaaatctcagacacagacgaaacactttaa

SEQ ID NO: 68704 - DNA, 351 bp, Acinetobacter baumannii
atgagcaattttgtttttaagcgtggtgacacattcaacttaaacctacagttggttgatatggatgaaactttaccttgcccatcggatgacgtgcgtcgagcaattgacctgacgggttatacgtttacatcacaggttaaaactttagatggggcagctgtagcaacgttaacttgtgcacctttgaatcaaggtacccaaaaaggttggttgaatgtgacatcaagcagtagcactgcaacttgggctttaggtctgtgtcagatggatattaaagccatagttggtggcaatacccaacacaccgagactttgactttccaggtgattgatggagtgactgcataa

SEQ ID NO: 68705 - DNA, 198 bp, Acinetobacter baumannii
atggggtatatcgttaaattaaccgattctgataaatatttaattccagataatgacggttggatcacaacaactgactcaaaagaaaaagctgtagaaattggtcaaatagatgatgaagagtctgctgagttaactgcgcatagttttagtggcggtatgactgcaggtgtcgattttttaattgagaaggtttaa

SEQ ID NO: 68706 - DNA, 369 bp, Acinetobacter baumannii
atgagcttaagagacgagattcaggctgatattgctgaagcatttaatgaggaccttgccgatgccgttcatccctttacttgtgaccgtattgttagtacgaattggaatcctaaaacgaatacttcagaagatgtaattgagcattacgaaggccgtggtgttttatttgcttcttataaccaatatgaagttttaactcttggagttcaggcaactgataagaaggctattgtgctgcaaaatgaagtcactaaagagccaaagattgatgatgaatggaacacggcgcaaggtacttttcgcgtcatgcatatcaaacaagatccaatcggtgcaagctggaaatgtcagttgaggagagtataa

SEQ ID NO: 68707 - DNA, 378 bp, Acinetobacter baumannii
atgagctttatcactgaacaagaagcaattgaacgtgtagcaggctttaatgctttatctgacagtgataaagctgactatcttgaaaaatcggaagcttacttattagcgcgtaacgtcaagccttatgaagatgtgacaacggtccccaaagccctgaaaacagcgtcatttgaagtcattaaaggcatcatgaagggtgagctatatcaaggccaagaacaggcattaaagcgaaaaaaagtgaaagctgaggttgagtctgaaaaggaatatcaagacggatctgtaaagcttaatgcaactgaacaatacattcttgatttgatcaagccatattgtaagcgtcgatcagtgatatttattaggaaaatctaa

SEQ ID NO: 68708 - DNA, 519 bp, Acinetobacter baumannii
atggcagcattaaaagaacaagtgaaaatctatattgttcaagctcttgcatgcatggatacaccccaacaggttgcggatgctgtcaagcaagaatttaacattgaaattgatcgaaaacaggttcagctatatgacccgactaaagctgcaggaaaaaacctaagtaagaaattcagattgctgtttgaaaagacgcgagaggattttcgaaataatatttttgatattccattggccaataagtcatttcgtattaatgagctgcaaaagatgtatgacacaaccaagaacaaggtcacaaagcagaacatcattaagcaggtgaaggatgaaatgcatggccattcagcgcaattattggatcttgaattaaagcagcttgagatcgaaaaaatcagaaacggtgacggcgaaggtgctgacgatccaacaccagtaaaagtaaccattcaagttgtagatgcgagtaaaaaagatgccgaacatcaatccgacgctgaatgtacctcaggctaa

SEQ ID NO: 68709 - DNA, 459 bp, Acinetobacter baumannii
atgttagaatcaattggacaaattgggctaggtgttgttttaggtttcgttcttaatcatttatttttgccattctataaagagcttatatctcataagtttgagaaaaataaaaatcaagataatcataatttacagttagaaagagagttgctttataaagatttagaatttgaaaaaataaaattagaaagagttttgcctgaactagaaaatattaataatattttatatgaacatagaatgatgtttaacacgtatctttattggataattaataaatgtggtaatactaaagaaatagaagaagaacgtgtggaactagataaaaaaataattatttcattgtctaaagtctctctctatataccgatggaattcagattattaataaattcatatagaaagctgattagttgttcatggatgcctacgcaaacggggcagagtaaaacttga

SEQ ID NO: 68710 - DNA, 297 bp, Acinetobacter baumannii
atgcaagtatcatttaacaaacgcataatttttcctaccgtttatcgttctgagaaagacggtaaagaacgagcttttttatctacaacggttttatctccagttaaatacaatttaactgcaatgccgggaatgatgccagttgaacagattcaagcaattcttgaggaatgtgccgataacgctcaggaagtagaaatcgaattcacagagcaacaaactaagtttggtgcacaaatgcaggtgtttagcgttaagccgttaccgaagaaaaatccaatagaaacaaaggcttaa

SEQ ID NO: 68711 - DNA, 204 bp, Acinetobacter baumannii
atggctaagacatttcgatttacagatgaagaagaacaagctctaaatgaggttgctttaaagataaacagagacctagtaaaagctgggaaaaaaccattacgtgatacggaaatcttccatgaaatcatcagacaaaccctattaactgggattgttgaagtaacacgcgatggaaatgtcaaagtagaaacaaaaaactaa

SEQ ID NO: 68712 - DNA, 1611 bp, Acinetobacter baumannii
atgaagttttttaaatatttagttttcataataataagtttattttctattcaagcttttgctgacgcaacttatgtcatatctcagcgcccgagctttggtactttcggctctggtgatgctgcatgtaaagctcttgataaatcttatatttttaagcctgttccaaatgccacaggtgaattaaattcactggctggttattgtaatgatgtttatggcagttcttatgccggtgtattgttcggtgctccaacttataaatgtcctgcgtctggttatccgattccagtctattttgagcctaatactccaattcctttgcgtacatgtaaaaagaatcctgacggtactttttgtatcactgaatgggctggggataaaaatagacctgtagtcatctcaggcagccaatatcaaaatattattcattcgtctgttagtgaaataccaagtcctagctgtacgcctttattttctcaagatacatgcgaccctaaggacccttatgggggttgttataaaccgcctaatgacaactgtaaccgcatgtcagacggttctatttattgtccaccagatcaaccaccaccaccaattaaatcgggttgtcaaaataatgctacttattgcgatatgccgccgactgggtgcggttcaggctatgtttcaggatcttataatggtaagcaaatctgtgtaaaaaatagcaatccaccgccaactgaccctaaggacccaccgccgattccagatccaccagctacatctgatccaccccctacagacccgccacctgcgtctggagttcctccaactaatccaccaccaccacctccgccacccggaggaggtaatacggacgcacttttacgcgcaattattgaagccattaatgcggtcaataacaaacttacatgggttaaaaatgaaatagttaatgcaattagtaatgtttctaacaagattgatttgacgaataagaagcttgatacgactaatacaaagttagatacgcttaatgcttctgttcaagattctactaaggcagttaatgctagtgctgacaaagttaaggctgctgtagatgctaatgcaactacggtaaaaacggctgtagatgcgaatacagccgcgacaaacaatgtaaaagctgctgtagatgctaatacatcatcgaccgcaaataagcttaatgatgttgtaaatgctattaataataaacctgttggtggtgggggcactactgacgttaaacctgttgttgctgctattgaaaagcaaactagcgactttaaagacatgatgaagactgatccatcagattttgatacttcacagtatgagaaaattggggatgcttccgatgatccacgctatttaaatgctcagtcagatgctactaatgcactgcaaaaattatcgaataaattaactttttctaatactgcatgtgttcaggattttactgttgattttccttattttggctcttttgtagttccactttctcgttggtgtgaactattagcaataataaaaatcttgatacatctcagtgtatacattcttgcttttagaatgcttgactcaacagtgagggctatctaa

SEQ ID NO: 68713 - DNA, 297 bp, Acinetobacter baumannii; identical to SEQ ID NO: 68710

SEQ ID NO: 68714 - DNA, 1305 bp, Acinetobacter baumannii
atgatttgtgcatttgtgatttttggggaaatcaatgaacaaacaacaaacttttataactataaaatcagagtaattacgatgctcgattttctgcggttagcgattccaatcatacctacgcatgttcgtagcttagagaataatcactggtttactggtgatattcgtgattttggtattcctgctgcaactcgtcatgtcggtaagcttgatgatggaacgacaacaacaggggagctttatcatccttttgagtcgttacctagtgactataccgatatggctatgaagttttacacgcatacaatcaatagaacgccttatgttgagattaaggcgtctccgttgaagttgttacaaggtcacaatgtgtatggttttgagtctattgaattaggctccgatcatatgcttggcatgttactcgaggcctttccccagttagccccaattttggacttggaaaatactgaggtcttacatttagatacgacatatttatttagattgcctcatcagaatatggttcaaccaactttggattacatggctaacttggcttcgggtcaccgtaaagctagacagattaagtacgagaattacattacttggggtaatgacggtgcaaccgttcgcccaaaggcttatggcaaatttgaagaagtaaaaagccagttacataagttacagaagcaagccgataagggctgtatgcgctctaaatcgcttgttattgctatgaatgatgctttgccattcgctaatgctgttttacgtctagaagctcgtatttgtaagacttatttaaccaagaatggttatccatcgaatttatttcagcttattaagctgcaacatgaacagccagaattattgctacgcctctggcacgtagcttttgacccgatcttaaacacattgaagggtaaacatatgaatttctcgaatgatggtgaaatcttagatttatttaagtcgaaattagtgacttatacaaagactggtaaaccaagttacaccagagcgaacaacgcaatgaaattttattcattgattcgccagatcggcttaaaagctactaaagaactttataacgaacgtacgttttatgacgctcttaaggcattggaactctgtgagatttctaaaggtcatttacagaaccttgctaagaatcctaacggtaaagttattccatttgtacgtttatttgaactcaagatggctgagcaattgccaccagattacgttttaccagtttcacaatacacgcctaaaccgcgtttacatttagttgcctga

SEQ ID NO: 68715 - DNA, 204 bp, Acinetobacter baumannii; identical to SEQ ID NO: 68711

SEQ ID NO: 68716 - DNA, 843 bp, Acinetobacter baumannii
atggcaatcaccgcatactcaaaaactttcaaaagagagctagatgtagagcaattgaaacggctttgtaacaaccatcttaaagagaaaaattttgcagaatttgtaaaaatagatattgaatgtccttgctgtggtgttattggtgctagagtggtaaatgaaagcatatcgcctatctctaatatagctgtaaaacaggctcattttgcatttaataacaataatggcgttgatgcacatttattgttttgtgattactattctggtcaggatggtcttattcaggttgaaaaggattcatttataaatttatcaaaatcaggtaatgaagttacagaagctatccgaaaattagtatgttcagctatatatcataactattttaatcaattagatattcgcaatatgaggaagtggttttatgatatgcgttctaaccaagatattttggtagagtatagtaaacatcagttaaatgtattaaggaaatctattgtacgctcaaaaaggaatgtcgaagaatatgtaatagatagagagcttttgaagaatgattggtttgatttggatgatgaggtttatgaatctttagctactaagtttttatttccttatgatattaaagatattaatggattaaattatatattatctagaaaatctattattaaaaaggccatttctctatcaaaaaaaaatcatggaatgtatgagtttgatagatctaggcttgatgaaaaatataaacttgctacacgactatcattgcatattattgatcacagtgagtttttttatcaaaaactaggacgtagcgttgctaaagcgagagcaaagtaa

SEQ ID NO: 68717 - DNA, 309 bp, Acinetobacter baumannii
atgacctcccaggtgaccgacgttctagaagcagtccagtcattcatcgccaacggctatgaccgcgaataccgcgtcaaggacggcaatctcgtcgatctcgaactagggtcaaccctcgatgcatgcagcattcgcgtcgatgcggcgttgcgcctcgagagcggggacgacggcgaagatgcctccaacatctacgcgatcaccgatccggcgacagagcataaaggcctgttgatcgacgtgttcgatgaaatctgctaccgcgacccagttcaagagtcgggacctcaatgtagaagaagttga

SEQ ID NO: 68718 - DNA, 2079 bp, Acinetobacter baumannii
atgaccgtaaactctgaatatgatattaaagcacaagcgtatccaaaaagtattaaaggactcgttgaacgagcgcaaaattattcaaatagaactgctttaagatatacgagcgtttggaataaattattaatcaaatacggcgaaaaagataatattgtcaataatccagaagcagccataaataatgtggttaataacctcatagctgaatattctaataatgagtatagagactcaacctttaggcagtatcgagctgctgtcatttacagattgagcgtaatcctgttggagcagggtagaacaggaaataaaatcttatctttgcccaaagcagcacgtttttttgaaagtttgaaaaatgtagagcgtattaatacagatcaaaagcaaccgaaaagatccagtagcagcaaattgaaatattttcctaaagacctctatgagcatgttggtaagacgcaaaacgaggttatcggatctaaattgggtgtgatgcttaagtgctttctggaagctaatatgttgctaggcttgagacctgtagagtggctaagtttaagattggcatgtgatgtagaaaagaagtgcttatgtttagttgtcgataatggcaagcattcaaatggtagggcgaatggtgaaatacggatactggatctactagaggatgatcgggaaaaattaaaaaaccagttgagaataattctagggtttaagaagttactggacaaagaactagaaaacaaagctcgaaagatacttagccaactaagtgcagatacaggtgagcaatacaaactctatatatctagtagagaacctgatgagtttttatatgaatattatggtgtgaatggccaacgagccaccattaacgaagatcccaataacggagttcccattaacggaacaaagaccactaacggtataaatgggtcagaggtacacggcgataatttgagtgaagattccatcaacggagatcccattaacggaataaatactggagacggaattgacggtttaggtgcgcacggcgactatccgcataggtattccgataacggagagaccatcaacggaatgaatactggaaacggaattattggtgacgcagccagatacggcgtagaaaatagaacaattggtgaagcagccataaatagcgcacggcgttctgttttgcatggagattccgccaacggaatggagaccattaacggaatagaaactgaggacggaaagaattcagtcaacggaagtaataccgataatggaagaaaatcgcacggcgaggacggtctaggagataccgacaacggaataaatccagacaacggtaaaaatccagtagacggaagtaaggggcaaattgattcccaacaaaacgataaaactatcagtcaatccaaaactttcagccgatctgaaactatcagtcaatccaaaactttcagtcgattagaaactttcagtcaaaatgaaataatcagtccagaagttaagcaactagacacggcgcacgatgattcagtgaataccgtttctggagagaatacagtagacagtatggattccgagaacggaaataacgccgtgttgtttaaggcattaaatacagcggtgattgaaagttatgtggataagcacggcgcaatccaatatgccttatgccaagcttatatggattcactccaaagcaagctttatcgtatatgtaatgagttctataaaaataaaaagctaggtttggttgaggaaatagaggcaaataaagcgaacgcaacaatttacagtacacgacatcaagccgttgccaatcgaaaaaaagccaagtggaagcttgatgaaatcgcagcatggtttggacatgccagtatagagacagcttcaaggcattatggtagagcaggacgtgcgtggggagaattgccatattacagaccatcacgctctagcattgaactggttagagttcgtgaggcagtactggagcaaagcaaaacacctatgtcggatcaggagttaattaatcaagttgtgtctgaggactacttagatggtcttttgtga

SEQ ID NO: 68719 - DNA, 150 bp, Acinetobacter baumannii
atgctcaaagttaatattaaaaaagcaacgtttatggcaattctgttggtgtatgtacctctattttgcagtattgcttatgcctcttatttagtcacaaatgacgcatttgctaactccacaagtaatactgttataggtagggattaa

SEQ ID NO: 68720 - DNA, 207 bp, Acinetobacter baumannii
atgaatttagaacctgaaccattagtaagtattaatggtgttcaattgacaaatgctcaaacagttgcacttcgagtggcagtctcaaattatctatctgatttgcaggattctaatcttggtgatgatccgcacggtcaggcagtgactaaactttatttggcaagactgcaagaagtaagtgagctgatgcacggcgcaaaataa

SEQ ID NO: 68721 - DNA, 240 bp, Acinetobacter baumannii
atgattaatagaaataacattactggtgaaatctcatttggttgcatcatgtgtgatgagtcggatgacatttgttgcgattgccgtaaggagtcgagttcttatgacatgggctatagcgcagggaataatggccatgaatcaaatgctatttattatgatggtaatttgagagcaatttatgaggagggttacttgcgtggtcgcaacgcacgggctgaacatggagaatcaaaatga

SEQ ID NO: 68722 - DNA, 201 bp, Acinetobacter baumannii
atgaatgatattttagattttgcagcgaatatccacaaacgattttttatcggaggtttatttgtatttgttattttagtaatacttatgtctttaaatataaatataaattatttattgattctgctcggactcatcttatctttctttacagggggattagtgaccaatagtctctatataagaagatttaaaaaataa

SEQ ID NO: 68723 - DNA, 258 bp, Acinetobacter baumannii
atgagtgaattaacacccaaagaagcaaaagcaattgtggaaaatgctcctgcatttattaaagatgctatagatcaaacagaaactatgtactgtcctagaactggtatgtatgcaatcagagggcagcacttcgcaaccatgcaatacgagcagggggaggattcatttgtctccacattgaattatcacagtagtttttatgatgaatatatctatttgtctgcattgaagtatctttatgagcaggctgaatga

SEQ ID NO: 68724 - DNA, 297 bp, Acinetobacter baumannii
atgaatgagttagaagaaaaagactcggaaatgtcgcaaccgacatttgaccgatatagtacgtggggtaatccccataatcctaataatgttgacttcgcaacattagttttctattcgtcaattcttgatgttctattgaatgtttttctcgtagtcattgtgcttttagtgcttgtcattgttggacttgtgatttttatcttcatcaatcctgatttcgtaagattcatttttgatgatggttcatcagttccctgcatatacaacccactgacaaaaacatttacccaatag

SEQ ID NO: 68725 - DNA, 699 bp, Acinetobacter baumannii
atgactgatccaaatcaaccaaaacattcaagtcctaaagctccaaaaaccatagacagccgtcttgctgaacgtgatgcaacgatcaaggaaatttctgatcgtgtatctaagcaaaggctctggttggctgcgtgctttgttgtaattcctgcattggtagtagctttagttctgctaattgtcatgctttctaaaatgcctaaagcggaagcattccagacaattgacaacagtgtcatctgtaagatcaatccaaacgataaccctgcatttaccaataccaatattgcagagtttgctaaagaagctgttcttaatgcttactccatcgattataaaaatgcggatatttcaacgactgacgtattacgccgttacttcacggataaaggtcgctcaagctttatcaccacattaagacagtctggtttgattgatcaaatcaaacagaactatctcgtcttacagacatctgctttacaaacaccagaagttaccaatgacaaaggtatcgacaatttcggaaaccgcttttggatcgttcaagttcctattcgtatggactattttaacggcaaaaactcacctgctgactctagaacgtatgtcgctgagattcgtgttgaagtcactcaacgtgatgtattcaacccgaaaggtattggcgtgagcagcattattcttagaactaaatag

SEQ ID NO: 68726 - DNA, 1107 bp, Acinetobacter baumannii
atgatgcaacaacttaagtttaaaactctggcaatttgtatcggtctgatgatcggatcaactgcatacgcagctgatcctgtggccaatcaacaaaatgctcaagggcaacaacaggggcagaacttggctgctcctgctcagactcagacgcagccaccccaacagcaaggtcaaccgcagcagcaacaagctcgtaatgactacgttggacaagctccaccaacaaccatcgatttaggaagtgctcaatcgtttggttcgtctttcccacctccaatgaatgtgaatcgttctaaagaggaaattgttgctgaagctcttggtatggcgttgagtccacaacaagtaaagaacttgaaagatctgttcttgcagcaagaacgtgatgcgtctacgccgtattcatacacggcgagaccaatcgtgcgctcattgccagtagatcttagtcctgctacgcagccacctgtagtaagactgtctaaaggtatgctttcaagcattgtatttagtgatttgtcaggaaatccgtgggaaatagatcatgtatcttttaaccatgatctattttcagataatccaccagataagcctaaacaggatgaatcgggtaattataaaggtacaaacatcctctcaattgaacctctcacagcaacggcgtatggcaatgtgacggtgactttaaaaggtttatctacaccagtcatttttattctttcaacaggacagaatgaagttgatatgcgtattgacgcacgtttatcaggccgtagtccgacagcggtaaattcggcactcagagctaatctaaactcgctttcgggtggagtgatggcaaacattgatagtcagacattaatgttcttggatggtacaccgccaccagaagcagaacgtgtacggactacagatccgtcactggaggcatggaactacaacggtcagtacatcgtgcgtaccagagatacagttttatacccaagctataaaacaacagcacgttcgacatctggaatgggaatcttcatttatcccgatccgattaatcaaattacagttagccgaaacaatggcactgcaactatatttttgaataactaa

SEQ ID NO: 68727 - DNA, 1626 bp, Acinetobacter baumannii
atgactcaagataatcaaaactctcagtcagtacctaacgatcaaaatattgatgtaggacaaactgaccaaaataacggcgttgatctagttcagactgaacaaaatcaggatacgcacgttaattcggatggtatcaacgatacttataacccaaatgccattcgccctaatgatgcagatgagcgcatcaatatgaagtttggtgaaaagttcatgaagaactggaacgagaatggaatttttcgtttcatggtcattatcggtacgtttatcgcaattattttgctgattggtatttttaaactgttctttgcaggatcaaaaacaccagaccagattgatgcttctaagactaaattcgatgcacctgaaacaaacgtggggcaagcagaagaagtaacaccagaacagtaccaatatattcgacaacaagaagcgattctggctcagcaagctcaacagcgtggtgaaagtttcactcctcgtaatttggtgattcgtcaatctaacggtcaaggtcaggcagtattgcctgctaccaataacgcagcgaatggcgttacgtcagggcaggtcaacggtacgttatttaattcaactcaaaacctgtcatatagcggtaacacggcgcaagggcagcaagtacctgccaatggtcaggctgcacaaggtcaggttcaacagactcagtattcgcagccaccacaatatgtgcaattagctcctgattatgcaagtcctgctgcgcagcaatacgtgcagaacaataatgaatttgcttcttggtatgaccaagaatcgcagagacagatttctgagaacgacaaatcagaaacaactctttacggatttgttgaaaagcaaatcaagcgactttctggtgaagatcagaaaaacggcggtaataaacgcacgggttacgccgtatcaacttatgcagttgaaaaccctaattccgtagatggtacgaatacaggtaacggacaaattacaggtaacggaaatcaaggtaacggatctaaccttaattatggtggggcaaattccgcaaacggtactaatacaggtaacggaaagaaaatcctcattcccgcaggtacaagagttactgcacgattattaaatgatgtgaataccgatgacggtgatcaagtgttttccgaaattatgacggggaaacttaaaggccgtaaggtaattggaaatgttagaaaaactcaagacaacattcagtttactttaagtcgtgtcttatctgacggcgttaaacctgaattttctattgatgctactggtcaaacgctacaaggctctttcggcatggcgacctatattgatcgtcacatcatcaagaactcaacggccatgattgccagtagtgctgcaaagggctatggcaacgcataccgtgactatttgggtaataccacatacaccaatggtgctgtgatagtgaatcaggaagaaccaagtaacaagcgcatcatgggtaacgtggttggtcaacttggtgaggatttcggatctaagatcgacagtatctacggtaataagccgactacatttagaacgccagtaggcactgtgttctacatcttcatcaacaaagacattacagaataa

SEQ ID NO: 68728 - DNA, 903 bp, Acinetobacter baumannii
atgagtcagaatcaagatttagaccacgatattgatgattattcttatgaatcatctacacatgcgcctgaaactggtaaatccaataaagagaagtacatcattattggtgctgtggtggtcggattattacttgtcgttttcttatttatgggtaagaaaggtggcaataagcaggttgctcaggatgttccagtagagacagcagcagcaactcaagttgcaccacctgtgccgaatggtgcaccgatggctgatccaaatatggcagcagcaggcggtttccagaatatgcctgcgccgtatcaggaaactcaaatgatggatgttcctgtaactatgccaaaacagactcaacctgtttctggtgatgtgacgatcaagagtagcactggtcaagacgtagctgcatatagttacgagggtcaacagttaattagccagttcaatgcagcgaacaatttacctcctgtgtatgttccgaatactcctgcgcctgttaatccgaacagtccacaaggacagatgcaacaacaggctgctatgacaaatcaagaactgattcaggcacaaactgaaaacactcaattacgtgcacagttaaacagtatgcgtgatgtggttcagcgtcagcatatcaccatcggtcaacttcaattgttaatcaaaaatacccgtgcgaatcaaggtgcgaacgttgtaacgctacgtgaaactaaaaaaggtgttgcagtaggtaaagccattcctgccaatcaggaagtgattgcgactgtgggtaatcgtgtatggctcactgatggacgaaatacaagttcttatgctgtaggtgatcgcttaccaacaggctaccgagttcttgatgtaaacgaacaatctggtgaagtttcgttcactaaatag

SEQ ID NO: 68729 - DNA, 579 bp, Acinetobacter baumannii
atggaatttgttgaggtattacagaactcaggaacgttaatcgttgctacgacaacagttgttcgttacgcatgtattttatttggattcattatctttgtaagagcagttttcgacttcgttggtgtagtagatccagtcaatgcaagtcgatatttaacacaaattcgccgtccatctgcgatgggtgtttttgtaaagatgatcattgcagtgatcatggcgcaattgggtttaaatctccaattagtcgatgtgatgggaagttttatgagtgatacgacacctgctgcggtcacttattacgactattcacaaaatgttggaaattcttatacagcggaactgaatcttacagttttggttctaatcggtgtgtgtcagctagttggactactggcactaatgaaaggtctatttatctggagagacaatagtgatggcattggtaaatcaagtaatgctcaaggctttgtctatctcataggaggaatgctcgcatacaaaatagaagaagttcatgctttagcagcaacaatttttgggcttgattttttcaaaatcatcgggcttacctaa

SEQ ID NO: 68730 - DNA, 405 bp, Acinetobacter baumannii
atgtctttaaatatcaatagcttacaacacgcaactagtaacgcttatttaaaagcaggtgtgtttttaacaatgtgtagcatggcagcatcttcttttgctgatacaactgctttagagggtggttctaaacgtggtgcagctgcggcaggtgaatctgtaggtgacattaaagatcgtgctacaggtggtctaaatgatgcaatggcttttggccagttagcaatgatctttgtaggatttgttctgtttgtcttggcaattctagattttaccaaaatcggaaaacctggtagtgatgcgactgctccaaaagcaattggtaaattggctgtaggtgtggtcttggcaggttcaggctacttcttcttctctggtgcgaactcagcagcaggcaacgtctaa

SEQ ID NO: 68731 - DNA, 762 bp, Acinetobacter baumannii
atgaattatttgcaaatggacactatctcagatgcagaaaaatacctgcacgtagttgattcaaatatttctgttcccttttttgctaagcatgatcatcgttgctatttctgtgattttcaggacttaaagtttctagaaattcaccatcttgacggaaatcacagtaataacaatgaatccaatttagtacctgcctgtaccctatgccatcgtgtacatcatctgtcgtggtgtctcgctgataaggcagcttctttaggtatttgccacgatctcgatcaggttcaggtgaatcacattgtcagatttatgattgtgttagctcaccatcctgataaggccattaacgtttatttcaagtcaggtggtgtatttgcctctcttattgataatctggccatgcaattttcacgtcccaatattgatctggaacaagtgagaaatagtatttttactgaataccctgaagctgaaaaggatgttaaagaggctttgattgatgaccgcatcaatgctgcctacattcgccagtcgcttgcatcaaatgatggactagaacgtctgattaatgcgattaagctgataaaaggtaagggtggccagattaagcagggatcacttttccctttcgttttactgttcaatgagaatatttttagtcaggatcaaattcagtattatttatcattagatgaatttaattctaataaatggactcagatttatgagcaaaaattgcttgcaaatttgagtaagtga

SEQ ID NO: 68732 - DNA, 1044 bp, Acinetobacter baumannii
atgttcgatgaatatttacaaccttatttatataaatcagttagaaacttaaatcattctacgcagtttgattttttaaacggtataaatcaattaaatttatcagttaatccagagcttaataatatttatcagaaatttggaaatttttatgagtcgagtctggagttatcgaatcaatatgagcctttattcctatcgactttttcaaactatattattgactcattagcaaacactgatttgcctttacttgttccgtttgaaactttgactgaagaacagcaaagtcagctttatgatgttaagcctgccacgttaaatgtcataaaagtaactgatcaacctcttagctccaaagctatgaagcgtctcgctttgcttggcatgaacacaaatttacctatcatttgttctgaccaagaaatgtgtatgtttaataagcttgaactgacttatgaattaattcatcaatttgattgttggtcttttaaatttaacatggtgaatcacacacgcaactctctctctatttttgatagagatcacatgcagagattgaaccatattgccaatgatttacttggcgtggatctagggattttttctttcctttttaaccaaaaagtaagaggagattttgcaaaacgcttagataatattgaagatattgagattgctgttcattcttctgaattggcagacgattctggtgatcttttttttcatgtgggttatcaggcaaactcttttaaatcgcagtttttcaaattactggatcaagatttattagcatcaccattttatttaaagcagtatattgataccaaacaagattataaggtgctcgactttaaacagaaatctaacaatattatgtcgttcttattgttgtattttgctttgtatcaaaaggatgcacttaatgatattaatcaactatttcatactaattcggatgtgaaccaccagactattttaaacaagatattctcttgctttgataatcgttcttttacttctcaaccgttatcaatctcttaa

SEQ ID NO: 68733 - DNA, 3267 bp, Acinetobacter baumannii
atgggaaatgctaaacaaaaaacagatactagaagtactgttaaaactaataaagcaaaagctaaaccgcctgttgctaaaccttataagccgagtgccacaatttcagcagttgaactggtactggtctggcttgcaaagatgtttaaggcatcggcagaagattactgtgaaattgaaacggtggacggtcattacaatttagtactgcaaaatggtgctttagttaccttgctgcgttatgacggcatcagatccacgattgattataacgaaatctttcttggccagattgatcgattgaatagctacctgagaaacccattcaaaacggttggccataagttgatgtgggtatttagacgagatctggatggtaatgcaggtattgatcgtattatcgagatccaaaagaaaacggcaagtacacttggtttgaacttgaattcattcattgatgaaaacaaagctatctacgaaccatatttgtatgatgaacaaagctatattgcggttattacacatcctcgactactcgatgcagctgagattaaaaacgatcataaacgtattgctgatttagccaagcgttatgaaattggcacaatgaaagatgcgcaaaatctgttgcatggtttacctgcattaaaggcgatccatgatacttttgttcagggtattatcaacgagcttgagcattctgactttaaaggcgtggtagaaaaactggatgttagtggtgctatcacatcgattggtcgcatgatgaacccacgatattttgatccaaactataagccgttcattcctaattctggaatgcctatacctttgcgttggaaatctcgtccgagtcctaatgattattctgaagtgctttatccaaagatttcagatcagttgatgatccagaccattaccccactggatagtaaagacaaggcaggggacatcactgcgccaaaaggatctgtagaggttggagatctggtttacgcacctattccattaagtgtgccaccatcaccaagcttttctggtatgtcatcgataatgccaacatttgctgatttcttcgaccgtatgaatcagcagacgactgaattaagtgatggatctgtacgggcaattccgtatgctgtttctttcatgctgtctggtgatggaatggccagtattggccttaaacgggctttagcttcagttgttgcatggcaaggtgcagataatgcccaattaaagtcagcaggtgatgctctacagcgttatgcagactttggcggtacagtggtcggtttacaggtctctgcaatgacttgggatgaaaagactgaaaaaggtttagaacgattacaaattcgcaaatctaagctctggcgtgcattacaaaactggggtcatgcagctccacttgagcgtactggagacgtggttcaggcgtatcttactcatttccctttaggctttaatcatcacgcacctctagcagctgctcccttaccagacgcattacacttacttccattggatcgtcctgcatcaccgttcaaaaaaggcacaatggttcaaagaacaccttgtggaaagatggtgaagttagagcacttctccgatgaacttgcctataactatacgattatcattggttcaatgggttcgggtaagtcgatgcagatgaacaatgagttatttgaatctgttcttgcagcaggcctagaccgtatcccgtatatttttatcacagacgttgggatgacctcatcaggcctagtctttggtattcaaaatgctttggatacttctcgaaaaaatctatgcgtgtatcgcaggatctcacgtactaaacgggatgctattaatccgttagaaacggctgttggtttacaacacccattgtcaaatgaatttgcagaaatgaaatcatttctggtgacgcttgttactccatcggaactcgatagacctgaagcggaagtatcgaatgtaatttcattgattctaaaagaaacatttgactttttcgctacggacaatgaccaagctcaacctaagttatatcaaattggccagagtacagaacttgattttctattgagagaactacgcatcaacattgatgtgagtaagcaattaagattgcatgatcttgctttattgtgtcatcaacgtgctgaatcgattttagaacgtgatactgccagtcaacagcgtaaaaataagctctatcgtgccagaaacttggcacaccgctacgctatgcctattctcgctgactgtattgcagtgactaagttcgataccgtaaaacgtatttatggcaactataaattaagcaatggtgattacatcttggatgcgattgcccgtgccatgtctcaagtggcaattgattatccaaacttcaataactataccgaatttgatatttctgatgcccgtattgcttcagtggatcttcaggatgtgattgtgaaaaacaatccaaagaataactcgttattcttccagatcattcgcatgttctataaaaaacgtattgcatattcagaagaagatttacagcgtggtgagatccccgatacttatctcgaatattattcaagattggttgcagagttaaaagttgaccgtaaatatatggtatttgatgaaatgcacaacattaaatcagaccagaccatgcttgcggaattggagcgagacagccgtgaagcacgtaaatggggtattgcatattatctaagttcacaatacatcagtgactttggattactggtgaaagctgctcgtagattcgtggtttgttcatcgggttcacctgaagaacgaaaagaaattgttcaagctttatcccttacacctgcacaagttagtcgtttgacaacagctgtaggattacgtccaactggtatgacttatttatccaaagtgatcaataagcaggggaatgaatttgtccagttcttaacgtcaatggttggctcaaaacgcctgtggttattaaccacagatccagatgaccaagcggtacgcagcatacttcgtaagcgttatgatttggatacagtcatcaatatgttggccatgattcaccctagaggtgtcaaatcaattattcaggtcaaaaaggaagaacgtgcattagaacttgctagtagttcaatgagcattgatcagcaacaagcagctgttgaatcggtttataacgagttggctgatgacattgtaaacacctataactatatcaatagtcgtagtgtggcttaa

SEQ ID NO: 68734 - DNA, 2742 bp, Acinetobacter baumannii
atggttgcgcctagacacgatggaactacaaatcaatttgaaccgaaagatttacgtgtagatacccgtgatatatttcagaaaatgcaccaagcattgctgaaatctgatgggtctcagttatttgccataattatttcttcacttgccgttttaacaattttctttccctttttcttaattcttttaacgcctatcgccttactaatgatccgtttgtacttagtacccaaaaaacggtttcataatatgccatatcgagtgccaaaacatgccaagatccctgacggatctttcgatgctctggccagaaaggtttcattatggaaaaaccctgagaaagcatggggagatggtacatattactatggtgttgaccgcatcacagggcaacaggtatggaaaactgacagtgatgaaagaacccatgatctactcattggtacaacgggtgcaggtaagactgaaacgattaaaatgatcctgactaatccattgcttcaaaatagtggatttatcatttctgatgcaaagggtacaacggatctagttgctgaattaatgtatttgactgctcgttttatgcgtcaagacgatatgttagtgactaactttatcaccgcaggacgtgacttgcttgagaagcaagaagataagctcagtaacacatttaacctgatgtcatacaccagtgcagccatgctaagtgaacagttggtgtacctactggatgactctggtggttcaggtggtgatatgtggaaaggccgtacaattatgtacctgaccgcattaaccaatattctgacatttcttcgagatcgtggcctattactattacaacctaaaacttacgttgaatatcaggaactcaacttaattatccgtgtggcctatggagaggattttgaaaaatattacaaaatctttggtgaaaaatacatcactgctgtaagtccgttacgtgcctatcttggctctttggcaggttttgatgaaagcagaatgtacaaacaggatgcaaaaaccaatgaacagcacggctatgtaattatgagctttacccgtgcaatcagtgatctgtcatttaactttggtcatatctatggtgataaagcctcagaaattgatatgttcgatgtggtattaaatagacgttgtttgctgattgttttacctgcgctacaaaatgctccagatacgatcaaaatgcttggaaaactttgtgtcggatcattgaagcaaatgatggcaggggcattgggtaacaagattgatggtgttgtacgaaacgttattgaatcgaaagtcacagcctccaagacttgctataaagttgttctcgatgaagtaggctatcaaattgtggcaggcctttcggtaattcctgcccaagctcgtggtctatcatttagtatgaccttttccgcacaagacgtttcggacattttacgtgcagatgaaaaagagggtgaggcaattattgccaataccaataccaaaactatcggtcgtattaactctggtgaacaaggccaaacttatacccgtgtaaaaggtattgtaagtgataccaatcaggccacgattcagggctacaatgttgagacaagtgaattgttcggtacgaattaccgacaatccacaaatgtaggaattgagaaacgtccaacagtttcttataagtcattagccactcaacaagaggggcaattcacaatgattattgcgaaaaaaattgatggtggtaaaagtggcgtactgtcagcgattcaaatgcagaccatgtatgttacaccgccaaaattaaataagatccgtctgaatgatttcgtatcgatagaaaaggaactgtcatattttgaccatatcgaatatgaagaccagattgcgaaattagccagttttattgaatctggtacattggctcaaagttgtccgaactatggcaaaattgaggcaattggagctgagaatcggggtattcaatttgacttagaaaatatcggggcaatgttcaaccagaatcaaaataatgttggttcgtcattctatgcagcactaagaacaattcagctgatgcttgaagcaagcagcgtgaatgattttgcgtctccattctatgaggtagacgtagctgatagttcattcaatgatgagctagataatgaaattgataatttatttgctgaagttaaagtggagaatgaacaacttgctttagtactggatgagaccaacaagatccagactcaacagcaagcagatttaccgcctgaagaaatattaaaaaatattgatcattatttgaaattaaatcaaaacgaagttcaaacggtcactgaggttcaggagttcgttaaagataataacttcatcgatgccgagcagctgtactctaatgagtttgctcaacgtgtacaggcgcatttgaaatcatcagatatatttatttcccatttctccattccaagcatagaggatctaaagcagcttgatgaggcagcattagatacacaaaaggctcttactagatatgttgacgaatcgatgcttgagctttgtgaggaagatacgattcaacgttatcaatacgttgaagactttattaattgccgtgatgtttcagtacaacagatgcaaaaggaaattaaagatcaggatgttgaaattttacatagtttagaaaagtattatgaaattatcttttctcagatcagtaaaaaccttaaagatgaatga

SEQ ID NO: 68735 - DNA, 477 bp, Acinetobacter baumannii
atgatgagtagattatttcttgtatttttaattagcttaatatatgtatgtacaactgaggcggatcagcctaaatcaagtaacaaaaaactttatttttcttatcgaaactgtgaaaagtcagggaggtgtaaaaatttcacacctacaaaaaagattgataattatctctttaaaagacttgatcctgcatatgatgaattttatataaaagataataatggtaattttaccttatattataaaaatatttatagtgaagatgttcaagttggatgggcagaagctaaagcagatagaaataatagtagtgagttgagtttaaatattgataaagttaacttagccttgggtgagattgattttataaagaatagatattcagataaacaagctgaatcaaagaattttaaatcgggaatctattatttagctgataattatataggtacccatattatcaaaagcaaaaaatag

SEQ ID NO: 68736 - DNA, 210 bp, Acinetobacter baumannii
atgtcaaaccacaatgttgcacttcaatttgaagatggtgttacacgtttcattagcgtagctcaaggcgaaaccctatctgacgcagcctatcgccaaaaattaatattcctttggattgccgtgatggtgcatgtggaacttgccgcgcattttgcgagtccggtagttatgacatgccagaagaaagctatattgaagatgcattaa

SEQ ID NO: 68737 - DNA, 438 bp, Acinetobacter baumannii
atgacaactcaaacgaaagaaaccagcaaaaagttaaatgctaaagatcgttaccgcgcattaacccgtgatctggactgggacttttcctatgctgaccgtaaagacgccttcccttatgaagaatttgaaggcatcaaaattacggactggtctaaatgggaagatccattccgtttaaccatggatgcttactggaaatatcaggcagaaaaagagaaaaaactttatgccatttttgatgcgtttgctcaaaacaacggtcagatgaatgtcagcaatgaacgctacttaaatgccatcaaactctttttaacggcggtgactccacttgaatatcaggcctatcaaggctatgcccatgtagggactggcttgaatgctatgcgccagaagcttctttctggatgccagcttgggacgacgacgatagattaa

SEQ ID NO: 68738 - DNA, 720 bp, Acinetobacter baumannii
atggctcgagtaaaatacgataaaacgggacgatacgcagatcatccgcaagaaattcacgatttgctctctaaactgcactttgatactgcccacggccaaatctggtttgatgaatatcgaatgctgcttttacacaccagcattatgggatatttgcgtaaagacttagcgcacatgattgggcttgagcgaaccaagcgtttttttattcgtttagggtatcaagctgggttaaaggatgcagaagttacaacaaaaatgcgtcccgatttaaatgaacacgatgcttttatggcaggcccacaaatgcatgcgattcgtggaatggtgcaagtacaggccaaccagctcaatttaagccacgataaaaaacagttttatgccgatttaaattggcttaactcttttgaagccgatgtgcatttagagcattttggcccaagtgatgaacctgcgtgttggatgcttctgggttatgcatgcggatacagcagttttgcgacaggcatgaccattatttatcaagaaatagagtgtaaagcttgcggcgatgagcattgccgtattattggtaagcctttagaagagtgggaaaatgcagatgagctgattcaattcatgtcaccggaacccatggagaaagaactgattgcgttgcaggctgaactttttgaactaaaaaaatcaatttatagcgatagtgaagccgattactaa

SEQ ID NO: 68739 - DNA, 294 bp, Acinetobacter baumannii
gtgggtaagtcagcatcttataaacaggtctgtgcattattaaccaaagcagcaggttcgaaagtttccattttattacaaggtgaaactggcgttggtaaagaagcttttgcacgaggggttcatgaaaatagccaaagaaaagaccaaccttttattgcggtaaattgtgcagcgattccgccagagttaattgagtctgagctatttggggtagaaaaaggggcttatacaggagcacatcaatctcgcttgggtaagtttgaacgagccaatggcggtacgattttttag

SEQ ID NO: 68740 - DNA, 396 bp, Acinetobacter baumannii; identical to SEQ ID NO: 58523

SEQ ID NO: 68741 - DNA, 2091 bp, Acinetobacter baumannii
gtgaatggtggaaatcttgcaaactctgatcatttacgtcaacgtgaatttttgactgctcaagctcctcaagctattgatgagtttttacaattaattggccgagtagatagaaaaggacaagtaagtcatccaatcatttctcaatttgatacaggactacctattcagcgtaagtttcttatgatgcacaatgccaaactttcagaattgagtgcaaacataacgagtaatcgtgagaatgttaataagcaagtaacagatgtagatcttctaaataaatacggtgatgacgttgcttatgaatatctcaaaaacaatcgtgcattagcaaatatgctaatcatagatgtgcctgaaagggaagataaagcaaatacagatggccttatcaagaaaatattcaacagactcaatttcgtaacaatcagtatgcaggaaaagattatagatgatcttacatttgcatatagtgaaaaaatccaaaagctcaatgagcttggtatcaatccattcgttgttaaagtttgcgattggaaagccaaaacacttgatagccaagaaattaaaactggcttaggcatatcaaatgttaaaaataaaagtgctttctttgaacctgctttttatcaacgtgttgagtatgagtcagctatcactcccctaacttctagtgatgtcaatattttggtagataaaggtgctaaattaatgacaactcaacttgcaaaacatttagataactatgatccaaaaatgtttgatggtatcgaaattgaaccgaaagatttgcctttgtccagacttcttaaactctatcatgaagtgcaaaaagtaattctgactaaagaactatacgagtcagttaaacattctgctactcaaggttttttgaagaatgatctggataatgatgtttttgcagacataacaaatagattaaaacaaaacatcgatttagatggtttgaaatcgataatttcactcaattcaaaggttttttcacacgtagcttatcagctagagaaagcgatgattgttgtagatttcgtcaacaaattatcacacttagccgatgaacataattccattagtctaaactttgccattaaaacagctccatcactttttgatttgaaagaaagggatagttttgagaatgcacttatcagagttacttttcctaaactaacatcggtttgtcttgcttctcaaaactatgaagttaaatacacgtacccaagtttggacgcaatcaaaagtgacaagttgaagtatttaatcgaagatgcgattactactgaatcacatcatcggaatgtaggtactgcgctatttttacgctctgatactcaaaaactttcattaatgaaagtttttgagaggttagagatgcttaataatgaaagttcactacttcatagatttgatgagtttgaaccaattaaaaaaattaaagaagctacattgctcacaggtaatattattagtgcgctaacagtggcatctgtgtcaaaagttcattctcaatcaattaactatacagatgtaaatggtaatagacagagagccttactgatgtcttcagatatagatttcagaactttaactgacaagattcaagggctatcgactattcaagaagcaatcacatatttaaaagcgattgaagaatcccgtgagaataggattagctgcaaactgcctgagtttcagattacaaaatcaaattcagcaggtaatcctgtactgcaaatttctataaagccatttaacagcgtgttagataattattgcttattggttcaaggaaatcgttctcaaataaaacaattttcagaaaatgagaatctgtttagacagaaaaatgcaaatatcgaaaaaggtatgaaccttgtgctagtgggtgatctatcacaaggatctcgatctacgcagcaggccaatttttcttttaaagagctaagagcagtattaacacatttgtcttcagagttttctacagtaaagattaacaatattgatgaaactgttttaaataaaattcgtgaggtagaaccaagcgatctaataaattcattaaaaaattga

SEQ ID NO: 68742 - DNA, 1653 bp, Acinetobacter baumannii
atgaatcctgaaaataaaactaatgatcatttaaaccaagataacttagacttggtatcagcttggtcaaatttaaaaaatgatagtgtccaaaatgcgtctaagtttggtgaaaacttatcagaatttatattgtctttagatagtcaattgactgataacagggtgtcacttgtcaatcttgatatagtggatgaaattgagactaaccaaacgcttcatatacaactcagaaatacagcaggtaagctgctttatattggtgctgataatgattcaatttctctatctgagttagataaagacaatatggtgataaatactctagaagctaaatttgatgataactggactgaaaaaatgaatgaatatgttaatcaggatatgaatgagtatcctcaagaacagaaccttgctgatcagcagttcaatcaaggtcaaaattttgatgatcaacagtttaatcaaaatttacaagaacctgattatttgtatgaagacgtagcattcgtagagtatgaagaaagtacacaacatctacctaactctgacattattgatttggatagaactgaatatcaagttttagatgatgaattacaatttagtgagtcaaaggacttagtggtaattgatagtgaaaatgatcaagaaaacgagatcatagacgatgttagtaaagagcttgtaaaagtaaatggtcaggagttctttaaaagaaaattaaacaccaatcaagaagaattgttattaaaagcaatgcagttgttacaggaaaaaaactctaattatatttatgatagtttcacaccacctacaagtttagtgcctgcatcaaatgttaattctgatctggttgcaagtggaggaaaaggaggttcagggggaactgttaaaaattattccctatttccaaacttaagtaatttattcaaagatcgctctcaaagtgccgtgcaagaattgaatacacaaattgatggcaataaagatcctagtgcagtgatagcaaatcggtttgattcatttaaatcaacaatagcaaatgatgagatggatttaaaatccgtagtggctaaccaattgatatgtgaaaaatataatgatgttttagatgcacatcaaaattatagccgaagcatcgatgacttttggaaatttgataaaatggacgattttcgtgggcaaatggttgaatatgggaaagcaaataataaagatttaaatacaattgtggatgagttaaataaaggtgaaaatgaaccattacgaaagatgtttcaagaccagatcgatctgattgagagcactccaaaaggaaaacagatcatttcagatatgtatgattcgcatcagaacttcgtcaacaagacaaattccgctgttgatgttttaaagaatggtgaagttgacctatcattaaaagaaaaattttccaaagatttgactcaaattgtagaaaatcaagaatccatatctaaccaagtaccaaacttcattgacaaagatggtaaaaaattcaatcttggtgaagaaatgaaacgttatgctgaacaaatcaaatcagcactcaaagctgtggttgaatttgttaaaagtaaagtgggaattacgaataaccaagacgacaattcacactcccctaccccttaa

SEQ ID NO: 68743 - DNA, 405 bp, Acinetobacter baumannii
atgaactcagctagtgaaacaattactaaatttagagacaagactgcgtttctaggttttgaaaacctcaactggttaaaagatttgttctctgaacaggttttaccagttctggacgaatttgatgatgtatacgaagatcctatcaagatggtgggagtcgccaaaaactactatgcggaagtagatataacaacggtttctgattctgaatggttacttgtattttcctacggagaagaaaaactaaaaggattagaagaccaatacaaattgcaaattcgagcttatgaactcaaagagcagttttgcctaacattggagtcggcagaattacgattaagaaagtacccattaacaacgatagcaaatagtcttcaacgagtttttggcatttctcaatga

SEQ ID NO: 68744 - DNA, 588 bp, Acinetobacter baumannii
atggacaacttgaatttagataatgttcaattagatttggacacgctcttacgttttgtatgcgcctatgcacttaatgatactcacgtatcacaaactattattgcctccagttttgaaagcttacccgatcaaattaaatcgtttggtttattagttgaattcacccctgaaaaatctgacttacttggcattaattttacttcgattagtactgaggtaagtgataagtgtataaaaaatctaagtaaatttattgatctattccgcaaagaaaatgttaataaaaacgaatatcccattatctatgactttttctcagcaagtcctttttcttatgttatctacttcatcagaaatgtcatatcgagtagtaaagcaaataacgaattcttaaaagtgaatcagcatttaactgatctaatagtctggattattgaaaataaagcagatcagttatttcttgcaaggcttctattctttatacggcattggcaaacaatctcagtgtatgactcgattaatgtcagtgaaattaaaggcatcttggcatacgcaaaatccaataatatttttccatctttttga

SEQ ID NO: 68745 - DNA, 1035 bp, Acinetobacter baumannii
atgaaaaaagcctctacttttaaacgtaaagaacttgttaccaagacttcttctagtaatcacggattacaattaagaagtctggttataggtgtatgttttggtttagcaactgctacatcaatctcatcaattgcatcgaatactggtctaaactcgcttggatctactcaaagtaatgtcgagtcaattaatcagcaatcttcaacagtgggaaatagttatacaaatacggttacttcaaatatcccaactattacctcctcccctttcgttgctgacgacaactccgcagctgcacagtctgcaatcaatacagcagcggttggctgtggtgatgctaatacgcaaggtagtattgcttggacacaacaagaagtaattaagaatcgtcaaattcttaatactgctccagtagacattgatgctctatttaatggtagctcaggaggttcttcaggatctagctgtttctctgatattacgaaaatgatagacctttcaattgctattccagatttcagtggtatgaaagcagctgcgattgcagcactaagagcttacgctacacgtaaagtttgtacgatggtaaatgaagcaacgaaaaaagctcttgaacctttaaacaacgcaattgacatcattaataaaaacggaactattgatctaaatggtgcggttcaaggggctgtaactggaggcttaggtaagattgatcctgaattagcagacatctataaaactcaagctccgactggccaatcagtaaatgttttcccaacagaaacaacgcaatttaatactgatttaaagaatgttcaaaattcagtgaataattctattggcggtatgaccaacccaacaggaacgaatacaactggtggatcaaatggtaatacatggagcaatgctactaaccctaccgctactgcaagtacaggtaacttagctgctagtactcaaggaaatcagacacagaataatactaactcaggtagtaaatcttctatctttgattccatattcggaaattaa

SEQ ID NO: 68746 - DNA, 741 bp, Acinetobacter baumannii
atgattataaatcgtaatctgcttttattgtccttgctttccatttcttcgcacagcttcgctgtgcaggctgagaatagttataacctgcttactcagcaggttaaaggtgcttacagtgttttaacacagcaaaaagcaattggatcacaacaacaagcagaatcagcaaagaatgcgcatcaagcccttgctacggcaattggtgcaattaatatgtctgatcgcctgttaaaatttatggttgatgatgcaggtcgtcttggcagttcacagacaacatcttgtgtggtttttgccaatcagcaagctgagaaaattaagttagttcaatcatcaatctatgcaagagacatggtttccaacttcatgaaagtgatgatgagtaattcatctgaagctgaagcgaacagaattgaaagacataaaaattattgcagtattgcagaagctaacatgggtatttgttcaatattacctaatggtttgcaaagcggtgattctaattattcactggtattcaacaataataaattgcaatcagatacacataaggctgcaacagattatattgcgaatattgttgataaccgctattccgcacaagatatttgttcaaatgcacaatgtatcagtaaacaaatcgactatataacacgtacttcgggtaatagtttgtcggcttttgtcttaagtaatcaagtctctcaaagacttccttacaatgttggaggtcaataa

SEQ ID NO: 68747 - DNA, 1125 bp, Acinetobacter baumannii
atgaaatcaatcaaattacttattacaacttcccttttagccattccattttatgaagcaaatgcaaatgcaaatcttcaatatgaagttgtatcgcctcaatttcagtctcaagtgcaaacattaagtgcgaccatgacaactaatttcgctactacacaagcgaacttgttgtatgccattcaggaaaacaccagacagatttcttcagcaattagtgtagcagttactcaatcaagtgcaggtgcaacacaagtaattgatgcaagaaaaaatgcagctcaaggcttggcaacagcgatccaagcgataggtcaacaagataagattattgatactgttcttagttatgggtcaacgggtcaaggctataatacttgtaaagttcttgttggaaatgcaaccctaagtaatggtaaaaacgaatcgcaaaagctcgctgcaaaaatggttaataataccagtacaggtacagggcgattagtccacgatattaatcaagttaataaagagactatccaacgtcatcgtgaacttttttgtacagcagaagaagcatcaaaaggtttatgtactgtaagtaagcttgcaggtggcgacaccaatgcagctttactattccaacctgccaaaacgaatagtttagaagctgaggcacgtagaagtttacgtggaaatattttaggtgctccagatgtagcgttgaatagcgtcaacgggatgacacctagaggtcaacaatacttatttgctttgaaccgaaaaacagctttacaagcctttcctgcctattctttagcatcaattgatgctgctaatcttcaaacgataaaaaatgaaaatggtgagctgcgatcacctaaccagatgatcgatgatgtcataggtcgatactatggcacggaagaagcaaagaaatggcaggccacaatgatgaaccaaagtacacgaggattattggttgagatggcacgccagaaaggagcaaatatttggctcttaaatgaggattatgaacgtggtcttcgacttgagggtaatcttgcctcactgcttttaatcagcgcagatgaagcgaatagtaaaactaagaaaagctatcagtctattgcaggccgatcttag

SEQ ID NO: 68748 - DNA, 1137 bp, Acinetobacter baumannii
atgaatcgtaaaactggattcttggcactttgcttatttagtacatctgtagctgcatattactgtccaccttatatgacacctacatttttaactcaaatgagtacaggctttgcacagcttaaagcaacattcactacaggtttaaatacattagatacatctgtaagttctgcattacaactcgaacgaagtatgatacttggtgcaattggagttcaaactcaacaagaagctgtaaatgcttctaatattgcacatgcagatatggaaattgcacgtacaacagcgagtgcaattggggcaatgaaacaatcagacagaattaaagatacagctctcaattatggcgcagctggtcaaggttacaacccatgtctagtattgaatgaacgtagaactatcaccgagacacaggaaaaggataaagaaataagagctgatatggttttccagaacgttacagcaggaacaggaaagtttgcaaatcccataaaggcacaagatgaagctttgaagcttcaccacgattatttctgcacatccgaacaagcagcagcaggtctctgtttgagtgtaggtgaaatgcaaggagcaaatttacaagcctctacgctatttgagtattcatcgtctacagataaatacgctatggctaaaaccagttttattaataatatggttggtcttccagatgcaccattaagtgctacagcagctaaaactcctagaggtcaggaatatttgcgtcaaaaatttgaaaaagatgctgtaatttcacctgcgcttaactctctaatggctattcagtcagaatttacggctacaccaaatggaactgagtctggtcaacccgtaaaacctttaagacaacaatatcgtgagcaagtagatcgttatcttggtcatggtgaggaatataagaactggaatcgaagtttagtgggacagactgaacgtggagttttagttgaaattcttaaagagggagctttggagcttgcaataatgggtaataaacatgcgcaaaatgaacgtatcgaatctatgcttgcttctttagtatcacaagaaaataagaaagttaattctttgaccaataaaaatctagcaggttcagcaacagctccaaagtaa

SEQ ID NO: 68749 - DNA, 360 bp, Acinetobacter baumannii
atgaaaacaatgaaagcggaaaagttcaattgtgaatttaaagggtttggtgtaaccaactcaccagacttacctaatcccgatgaatttaatcacgatgaatcaatcataactgctttttcatttgaagatgctttatcacaatggttgagacagatgtgggatatgtttttaagtattaatattccatgttctcttaatggtgaagtttatacctatggtgaaacgtatcaagattttattgcaagtaaagatgttgagtttaatctagttaataccgaagaagatcgcatccgattagaaattagatatagaggacgtagtgatttttggtatgaaatttcgttactgaaacattaa

SEQ ID NO: 68750 - DNA, 681 bp, Acinetobacter baumannii
atgtttaagattggcaacgtaccagaagtagagaaattagatctctccagtatgcagaatgattttataaaatctttcgtagatggattagttgctgatcgtttaatccaaaaggatttagtgatactagatccttttgaagatgatgaccaatttctttcatttcaaatttattatcctcaaactcctgaaaaaagagtaattattcaaattgaaagaccaaaatctctgattaaagtctttgttgaaagtgagacttattattcaggttcgggttatgagttccttattcatccaacaactaaactacttactgctaagcatgatgatattgtagagattgtgcaagataagatctttttcttagcatataatttgttgagactagctgatggttatgatttttttgtccaaaaggataataaagaactcgaaacaaagcacccgatgattgcaatttatgaaacgcttgtaagtcctatagatcagaacagtaccatccttttcaatgaaccacatatagaaactgaatgtacagatgtagtgattcaaatacgtcctaatgagaagcttgtatcgattactggagaggggatgtctttaggtagcataaaacttttagagacatttgtaagcttgagttacctatactctgatatggctgttgaatatgcttgttaa

SEQ ID NO: 68751 - DNA, 399 bp, Acinetobacter baumannii
atgaaaatacaaacagttctattttctgcgttgttatctgtttcaactttaacattagctaataataagtttgagactgagttcagtaatattcaggaaattaaatataactgtgctgattcttcctatggtgatgcaatccaatgttatgcaggtattgagaaaaaactaaatgccttagccgatacaataaaagcctctaaccctgcaaaaagtaaagatgcagcatggaataattcgatgagtgctgtgaactctgtctaccaaatctgcaataagataaatgcaataaattctccaatggggggagctgatgcacttacagcaggtgcagcttgtaaagtggatctaatcgctttgaaaccatataaggcagcaaaactacttgaacagaaatag

SEQ ID NO: 68752 - DNA, 351 bp, Acinetobacter baumannii
atgaaaaaaattagtttgatcctatgcagtgctctctctgtaagcatttatgccacaagcgctattgctaatacaggactggataatcagtattatcaggctgtacaaaagttacaggataatccgttatctctgaacatgaaagagactgatcagaagtacatcggtatttatacatcagttaaaaatacgatgttatcgttgaatgcgcaaaagaatactacggtttttaatcagtttaaaaatcaaattgaatctgagtgcaataaactcaaaacagggtcagctgaaaatgtcagttcttcatattgcaaagccagtcttaatgctgctatttacgcaaaactttaa

SEQ ID NO: 68753 - DNA, 1869 bp, Acinetobacter baumannii
atgacaatttttaattcaaagaagcaactttgtgttgttctctgtgctctgatgtatggtgatgtccatgcttcaatgcaatttgaatataatcagccaagtggtcagacaggaaagccaacaaatattgccgtaggggaaatgcccttatctggcaatttaattgttactacccgttttggaatggggcgtactaattcagatggatcggcacgtacacatgcaggtctggatattgtcaatactaatggcgaccataaactttatgctattgctgatggtacagtaatagcaaatgactggttaaatggtggcggtaatttcatacgaataagaagaaaagacaataacgatgtatatcaatatttgcatttggcaaatcgatcaccaattaatgtcggtacagaagtaaaaaaagggcaatttattggaacgatggggaacacaggtgtatctcgtggtactcatttacattttgactatgctgttcctcaaaaagaaagtaccagagcacgtaatgcttggttaggcaactccagtaaaggagctgatgcgaatccctttcaaaatattcaatctgttggagcaaatagaaatggcttaagtggctactacgttacagatcctacgccttatctcaaagatgatataccaatcaatgcgagcgcatataagaactatctaggttcgacaattcggcaacaatttaacatcttatatggagcaagtttacctgtaggttctggtgcatcacagccgaaattttcaggcctaaagtttcctttaccgcagggttatggtgctaccgatgagcaacttgcaaaattaaatgtttcggttattgaggcaagacaaaaagctctggaagatggaacgatcactgaagcacaggcttatgatccaaatgtcacttacagagagcttgaagacatcttcagggacactggccagataggtgaacaagagccaattaaaattgatattggtgatgatcagacggttaaagggcacatagaagatttagcgtataggcgattctcatcttcaggatgggcacaagatattgtaaaagcctcaaatcgatcattatgggttgaacttctaaatatggaagttgcccgaaatcatattaagactgaattaatgcgccaaaatgagcgcattgaagctttacttgctgcttataccattgcaaaggccaaatatattgcaggtaaagttgaggagctgagacaggccattgaaagtggtcgaagcatagctttaattagtaacttagaacttgaagatcttcctcctaccgcttctgattatcaacttgcaacgtctgttgttactaagcgcagtggatctaaagcattaactcaagaacaaaaagatgcaattattagagttgctaagaacataggtgcaaatcctaatgacttggctgcggtaattagttttgaaacagcaggttcatttagtactaatgcacgaaaccctaaaggatctgcaacaggacttattcaattcatgcaatatactgatggcacgggtaataagaatacacctcgaagccagtgggattattggggaatgaccagagaccaattcggagcattatcattctcagaacagatgaagtatgttgagaagtactttaaagatcgtggtttgcgtgaatcaaaaccaacaagtctaggccagttatatagcttagtgatgggtgtaccaagtggaggatatacaattgctagataccctgatgtatttagagataaccctgcgtgggatgttaacggtgatggagtaatcactggagctgaagcagtttcaggatctcaatttaaatcacatattcgtacttacttccctgaatatccataa

SEQ ID NO: 68754 - DNA, 393 bp, Acinetobacter baumannii
atgaataatcttccttattcagagggcggtatggatggtggaatgtttcatccatcagtcctcgatagaaaagaacgtgagtatcagcaatacatggatactcaaactcctattgctgctcaaaaaatacgaaattttgtaaatgggaatagtaatcatggtttaggtcaagccttaccaaatgaggttttgtatgatcaaaattacgttaatcagattacagcagaattagaacgagttaagttgcaattggtattaactcagcgtgattcagctagtaaagatgaaaaattaagccgtgcttttaacaacattaatcaatgtaattcaactatcgaaagattagacaatttagttacaaaccttaaggttaaattatcaaagtatgagtaa

SEQ ID NO: 68755 - DNA, 2706 bp, Acinetobacter baumannii
atgagtatatactgcccgttttcatctgatagtacctgtcagaatgatgctgctgttgcgttactaggcaaaatttttggccacgatttcattcaagcgtttgtaacaggaaactcacctgctgcaactgcaccgcctagtggcgaacttgcccctgtgttgtttggtgcgctagggcacatgggacttgtagctgctgctttcctttttctatgtctaatcttttcttctgtgatgcacactgctcaagatggtgaagtgtttggacagggaagtaaaaaagggtgggttgtaattcgctttattactgcggtggttttcttactacctactgtttctctctatagtgttattaacattctgttattgatgattgttctggcatcaaatggaatgactaataaagcgaatcgagaattcctccagactgctattcaaaatccatcaccaagtttcgcttccattgataactatgatccttatggatatagagcttttgcgttacaaaaaatacgtcagtaccaatgtacaagggttttgaatgctaatttcagtccagatgcttcaataggcgaaaaagtctatcctgatggttcaagaagttatatcaaaacggttggtggtgaaaatatatttcatggtgaacttgttgataataataaatatttagatcaaggatactttggagcaatttgtggtagctctgactacattgttactaatgcttcagcgttaggtactaatattaagtatttaactcagaatcctgatttggatgattataaaacctataaaacaagaatgattctgaatattcagaatttaaaatttcagggcattagtcgattaaatacagcaatcacagcttatgtaaataattttcctgatttggcagaaagtcctgagtcttatgcaacgatctttaaacaacgatttgatccaattgccctcgataaaataattacagatgagatagcaagaacggattccgaaatcacgaattatttaacttcgcagcaaaactcatatatccaaaagacacttgattactatgctcaaaaaggttggactcaggttgcattagccaaaagacaaatgggtgagttccagaaagatatttatgatgctaaagctaaagtcatatatcgtggtactaatcctgacttacaacggatgaatcgtgagggtgtatccagtgagaaagagaaagttatgtataacgttctcgttcgtcaaatggatatggccattaatgattatatgaaaacccctacagtagtaactaacttgtctacgtctgatatggaaaatttaattccagaggatcttacaagtgaagatgtttcatataaacgtattgcagctgatgtagaagacgctaatacaactttagttatgaaaacgatgcgagtctttatcgatacgtttgttgggtctagtgcaaccaataatgttgatgctattactcgaatgcaaacaacaggtaatgttttgcatatcgtactaactcaattggatggtgctatttctggcctgcgaattggattaactgtaggtggtgcaacaggtgcagtattctcagacaacattggtacagctgctcagatagcaattggtttggttgattacttatctgagaagttagcgaaaatcatggtaatgggtaagttggtagcaatttatatggctatcattattcctacattaccgtatgtattcttcttgatggctgttattggttgggtgctccacattcttcaggcaatgactggcttgatcttatggtcgattatgcacatgattcctgatagaacctttgttggttcgcagatgcaagggtacttgaccgttattgctttgttcttcagacctatgttgtctttaatgggattctatttagcatttatgctgtcagatcctattattacttttactacagatgtattcttcacaatcatgggtgcaactcaattcacatcaaatggattcattgctgcactctcacaatttttcttcttgatggcttgggtgatcttgtattgcacgatccttttaccaattatctttttgatattttcattgccgactactcttgctgatagtgttatttcatggttgggtacgaatttatctcgttctcttggtgagaccaatcttgcacataatgcaggtagtgcagctcctaaagcagcaggatattatggaggtagtggtggatctggtggacagggtgcttcacctaatccaaatggtggcggtggtggacaaggacaaagaccgcagggcggtgatgggactgttttagttaatcgtggatctggaactacagcaaagccgtcaggttcagtttcaagtttacctaatgcaaatcctagttctgtaggggcaactcctcaacagaacaatgtagggagagcagtagggcaaggtattgcgagagggggtattgcaggtgggttagctgcttatggtgcttataacgcaagacaggggctttctcagcaagctgcattaggcacggcacagttatcttcattcagtaatgcgaatagaatggctataccaaatttctccagtatgacgttctcgcctgtatcaggtcaaaatcagttatcaaaaactggcaatgcgccatatttaccacaaatgaatatgaaccgttcaccaaataatgaaccacctgcaccaagaggaacaattaattaa

SEQ ID NO: 68756 - DNA, 573 bp, Acinetobacter baumannii
atgtattgtagtaccaaatcatatacaaacttacttgcatcgattgttgatatgcaacaatctgcacctttaaatactatgcacgctaatcagatcctaagttatgcaatgcaggcaggaaatgataacaagctgaataaagttttagaacacaggatacagcatggtctcaaggatgttgacaatagctctgttgccttaaagcatcaaatcatcaatgataaagttttggtcaacctgaaacgagaacgtacagctctaaatgaagcaaacaatctcgtttttgagactgccctcgcctttatgaaagatccttcacttgaaaaagttaatgatgaatctctgactaaaactttacaatgtatcaagaatcttaactgcgaacgctcagcaaaaattgatttcgtgagatcaacaaaagagaacgtactggctttcgtaccagaaagccaaaaattctcagttgagaagcaaattgtttctaaacatagagaaattgaaagagatagcacaactacccaaaaagttgtattaaaatctactattgaaaacagctttaatccgcaacgataa

SEQ ID NO: 68757 - DNA, 477 bp, Acinetobacter baumannii
atggatacaacagatattaaatgcagtaaagttattccctttactggactactctcaccaagtccgcttttaaataatttgcacaagacggctaaacttgagattccagaagttaatgaccaccgaaaatctttaggaaacatctttaaccgattaggaatcaataatatccaatcgctcattttagacaatccaaaattaaactcagttgttttaagtgaagtagcgaataacttcttcaccagtagctactatagaaaagctgaagaactggtaagaacaatgtctatgccaaattaccaatttgaaaatggctcaaatgaaataacaaaatccgcaactcccgtaatcaacccaatgcaaaaagagattattgagcaaattaaggccaaagaacaaatttcgcagcaacgctcgaatgatgtaacaaaagaaaattccaacaatcaagaacaaggttttggatcattcttctaa

SEQ ID NO: 68758 - DNA, 912 bp, Acinetobacter baumannii
atgcaaatttattacacaaaagaacaaaaacttgttgagttaactgaatctccttttcgtttagaaaaagaaattcaatcagtttttgagagcaacctttacgagtttacaggtctagagtttattaaatctgagttcacgattaaaagtaatcgtattgatacgctcgcttttgactctgaaagtaaagcatttgtaattattgaatacaaacgtgaccgtaactatagcgtgatagatcaaggtatttcttacttaaatctaatgcttgaatataaagctgattttattgtggaatataacgaaagtcaggctaaaaatttaaagcgacaggacgtagattggtcacaaagtcgaattatttttgtttcaccaagctttactgattttcaaaagcaatcgaccaactttaaagatttaggtatcgaactttgggaaattaaacgttatggagggggaattatttcaattaacccaatgcaaaaaaccaaatctgcgccatcaattaaacaagttcaaacagaaagctctaaagagataaaaacgatttcaaaagaaatcaaacagtacgatgaagattatcatctagcagataaatcagatgatattaaagaactttatgaacagttccgagacgcaattttaaatttagcaccggacttagagattaatgccaaaaagctttatatttcatttaaacgacataagaagaattatgtttatatagaggtctataagagattacttagattgaccttgaatacaaaaattgggcaattagatgactcaaaaaaattattcagagacatgtctaatataggtcattggggtgtaggcgactatcaagtagatgtatcggatactgaaaatctagaatatattttgagccttattaagcaactcttaaagtag

SEQ ID NO: 68759 - DNA, 471 bp, Acinetobacter baumannii
atgaacaacttaataacgagatttttaagtaatctggggcagtggcatgaaacagcaattacaacgactaaagccattattgctataggtgtactatgcttagtcgcatatttagtgacgattagctatattccttcggaaattagctttggtgatacgctcatttttctactgatttttgtagcgtgttctattatttatgcggggctaagcacaattttgtttttctttggtatttccttagttccagtgacatatatcatctttagtgtggttgataagtatttaccaccccatatcagaattggacaaaaactgccatttccaaagattagcattaccacattggctgcatctctttatctgttatatgttattcatagtttgtttttactgcattggaaaatcaatctttacataggtattaccgtattttttattgcctttacttattatggtaatcccccctaa

SEQ ID NO: 68760 - DNA, 843 bp, Acinetobacter baumannii
atgaaattatttaataaaaaatcgaaagtaaaagtgcctgcaacttctcatcaaccattatcacaatcaaatattcatgctgtcagtaacccgactgaagatgtagcaaagattttatctgtaaaaattgaatttgaagataattgcaccattgagaatttatcacccaaattagtatcaattccattacctaatgtcccctcgtttgactatggaatagacttcgataactttgataagcaaaatggaactgatgatcaagaaattccatttcgtactgcttcattcaaaccatttgtacttatttctaatgtattggaaagtaatctcgaatctaaaaaatacactcttgcttcagttaaattaaaagtgtatccaagccaactcattaagggtgatgcagattggtacaatgatgcagagcttaaacaatatattgaggatcaatggtcacaagtattcaatgaaatttctgacgcatacaacttaggatctcaagttaaatatcccgttaatatgatgtctggccagaactatcatccagtaggatcagcagcaattcctgcgaccccaagaacctatacgatgttcggctatacgtttacccctattcagttagtgttaatggtaattactgcaatcctattaatttacgttgcacttgccctcgccaacaagtacagctcaaacaaccaaacagcaagtggacagaatctttattcaaacgcatcgattgataagcaggtacaaattgctgaagacgttgttgctaaagttcaagatcgcatgggtgtccctaaattagctcaaagcgatcttggttgcctacaagaagttaattaa
